United States Patent Application Publication US 2019/0348154 A1 - sequence listing, part 87

SEQ ID NO: 328659 - DNA, 1347 bp, Pseudomonas aeruginosa
gtggcagaaacggattctggggtcagaaatagcatcagcgcggagccgacaaaagcattcttcgttgacatgctcgtccgggacatccctctcgaacaggcagtgctcgaccttgtcgataactgcgttgatggcgccaagagactagctaagcaggcagagcggccgtatgagggctgttcagtgaaaattactcttgatcagacgcagttccgaatcgtggataactgcgggggctttgatatcgagacagcccgtgaatacgcgtttcggtttggccgcccagctggtgccaaagccacatctcattctatcgggcagtttggggtgggtatgaaacgcgccctattcaagtttggtcgtcacttcaacgtgcaatcagccacctcaaatgaagcctgggccgttgatgtgaatgtggatgaatgggaagctcaacctggatggagctttccatgggcagaattccaagacaatggggtgtcaactgccaaaccaggaaccgatattaaggtaaccaaattacgacctgaagtagccctaaagttcggcacagcctggttcagaaacagcataatcggactcataaaatcaaagcaccgtcaattcatatccgacggcctacagatctctgtcaacgacttccgcattgatgcaactaatatatatttgctggtaagcaatggattcacacctgggacagatatcctcaccttcacgagcgacgattcggccccggtaactgcgaaaataatcgtgggtgtaggaacgtcgtctccaaaagaggcaggatggaatgttatctgcaacggtcgagttatcttagaagcggacagacgcactgtaacaggttggggtttgctcgaagaggaagcaggaaaaacgttaatcccaagcttccacaatcagtttgctagatttcgcggcatagtttcttttgactctgaggactcttcgcagatcccttggaacacgacgaaaaccgatgttgatcaagacagcattatatggagaaaaacatttcagcgaatgcttgaaatgatgcgacctgtaattaactttctaaacgagcttgacgcggacattgatgaaagcacccgcgaaaaaagcgccttattagactttgtcacaaaagcctccccacaacgtcccgagtcattttcggtaaaaaaagatttcaccgctcccgcccgagggtcaatagtcaaaggccctaaaatgatcaagatccaatattcccgcgccatagatgacgtgaacttccttcaagatgcgctagggcttggatccgcaaaggctgtcggcgaggcatgcttcgacatgattttgaaaaggcaacgtgactaa

SEQ ID NO: 328660 - DNA, 897 bp, Pseudomonas aeruginosa
atggcagctagctttcgaaagattgattactccctgcgtcccgcaaaatatgcagagagaaaaatgttagtcgatgtctttcgtcgcctaacaccattccaagctattgaagactattgctacgttggttttggctccgtctggttttctgattttatattgttccacaaatcgcttggcatcaagaatatggtttcaatagaagagtcagaaggtgcacgcgaaaggttcgaagagaaccgtccattccaaataaaaatggagttttcaaattcagcgacagccttacccaggctagattggagccaacggacaatcgcttggctagattatgatgacaccttagtaacatccatgttgcaagatatcagatctgtagcagcacgagcagtgtctggctccattttagcagtatccgtacaatgcatgaaagccaaggcgctcattgaataccatgcagaaaacgacccatccaaagaaagcgctatcgaaaggtttcgacaaacttttggtagatcacgcgtaccagatgacacccaagatgaggatctcgcaggctggccatatggcacactatgtcgaaatataataaagactgagattgagcttgcattatcagatagaaacacaaacccagaaaccgccatgcaattcctccccatctgtgaaatcgagtatcaggatgatgcgcgcatgaccactatggttgggatatttgtctcgccggacgagatgagtcgctatgagctttgttcattcaacaaactagacttcatacctccagacaataaggccatccgtatagaaatgccaaaactaacaattagagagcttagaaagatcgagcacggcgattttcaaggtagttgtcgcgtgagcgtgtcacgctgcctttga

SEQ ID NO: 328661 - DNA, 1212 bp, Pseudomonas aeruginosa
atgtcgaaaaagtcccgctccagactctggttcctcgtccacagctggctggccctgcccatctggttcttcgtcctgatcgtctgcgtcaccggcaccctggcggtggtcagccaggagatcgtctggctggccaaccctgacgtccgggccagcaagccctacgaagatgccgagccgctcagcttcagccaggtcctgaaggcgatcaacgaagcccaaccggacctcctggtcgaatccatccagcgccccgacgaagagcatttcgcccttactgccgaggtcagctatcccggcggcagcgaggcgaccctgtacatcaacccctacaccggcgccatccagggcgaaagcccctccttcgactttcgtcagttcacccgtgccctgcacggatggtggctggttccgttcaacaacggctacagctggggctggtacatggtctcgctgctcggcctccccatgctggcatcgctcatcaccgggctggtggtctataaacgattctggaagggctttctcaaacccagattacgcatcaaccagggcgcccggatcttctggggcgacttccatcgcctgagcggcatctggtcgatctggttcatcgccctgatttccatcaccggcacctggttcctgatccaggccatccttgccgacaaccacgtcaccctgaccaacgacggcatccctccggtcatcgcacgcgccgacgtgccccgcgccgcacccggtcagaaggttccatacatcgagctggacgaggcggtgcggctcgtcaccgggcgcatccccagcctggaggccagcgcggtgttcctgcccggcaacgcctacagcccgatgttcgtggccggacgcggctggtatccgctcatgttccagtcggccgcgctgaacccttatacgggcaagatcgaaaccacccgcctgctcagcgaccgtacccccctgcagttcgtcaccgaatccatgcgccccctgcacaccggcgatttcggcggtatctgggtcaagctgatctggttcgtcttcggcctgctgctgagcatgatggtgctcagcggcctgctgatctggagcaagcgcaccgcacaggccaccgccgcgctggtcaagcgcggcaagcgcccggcgcgccagccgaaaccggccaagccggcgccggtaatggccaaccagaccgcggagggacagccatga

SEQ ID NO: 328662 - DNA, 1365 bp, Pseudomonas aeruginosa
atgagcgcagcccgcagctttaaaaagcattttgccaagaaaaatttgcttaatatttataccgagaaaatcaaacactctggagccatagggcttgaccgaacaaggcccgccaatctggataagcgactagatgacgagcttaatcacatccttctcaagacccacttgggggaatatcggttcacagcctataaggagaaattgatcctaaaaggtgcggcctcatacccccggcaaatctccattccaacagccagagacagaattgtcctacgcgccctgtgtgactgtctttccgatgtattccccaccgccaagctaagccttccacaaaaggtgattgactcattaaagggggcgcttgcgtccgggacctatgcggaatacgccaaaatcgacctgaagagtttctacccttccgttccccatgacttgatcaccacagctatcagcaagaagatccggaagacagagctcaagcgtctcataacagacgctgttacgacgcccacagtgcctgagtcgaagggagggaagggagccgccagatccacaattggagtcccccaaggcttggcgatctcgaatctattggctgagatcgcactacagagcatcgactcagccttcgcggcccggacaggcatttggtacaagcgctatgtggatgacatcctgatcctgacgccagcagggcaagccatgtccaccgcgaaggagctaatcgccgagttgaaagcccttaagctcaacccgcacgactttgggccggattcaaaatcgaaagtagcgaacctcaccgaaccattcagcttcctgggttatcaggtagagggcggcaatatcattattcgccgcgaaagtattcttcgattcgaatcatctattgcgaagatcttcacggcctacaggcacaaactggctggtgcccggagcctggctgataaacagcgcgccttggcatactgccagtggaaattgaatctcaggatcaccgggtgcatttttgagggaaaacggcttggttgggccgcctatttctcgcaaataacaacgactgctcagctccgttcagtcaaccacactatttggaaattaactgaccgattctgcccgaaaggcgagattcacccaaagtctctaattaagacattttacgagcttcagcgcggaactacagccagtcatcgctacattccaaatttcgacgcactagataccagtcagaagcgagatgtccttgctatctggctaggggccgacgccaggacgttaagcgacgccgaggtagagcggcgtttctccattaaagtaagcaaagctgttcgggaattggaagaggatatagctcaaacatcctga

SEQ ID NO: 328663 - DNA, 426 bp, Pseudomonas aeruginosa
atgttcagaacacatctgcaggcagaggtgaaaggagccgttgcgttcggcgacggtcttcgcgtctggcgttacgtcgagcaggcgattcactgcccttggctctatgtctgctgtacagagaagagtggcgagctaaccttcagcagcatgctgatggtcgcagacatgtcgttgttcgaagagatgttggcccagcagaccgagaggctgcgcgtggagaatgtgctgcttgttagcccaggacatctcaatcgaagcgctggctggctgatggaggggctagtagagttatgcgaggtgatcagccctgcgtccgagcacctggcttacgtctataagctggaaggtggcagtagctactgggacggatatgtacaggatccgcagcatactctgcttcgagtgatttactcgcggagctga

SEQ ID NO: 328664 - DNA, 282 bp, Pseudomonas aeruginosa
atggaactgaaacaagcattcgggcaggctctgaagcagctcagaatgagccaagggctcactcaggaggatttctccgacgtaagcagcagaacctatctcagcacgcttgaacgaggtttgaagagcccgacgatcgataagctcgacgaaattggtgcggcgatgggcattcacccagcaaccatcctcatctatagctatctactgaaaacctcatcgaccgaagtcgagaaggttctggatcggataagggacgaactccaacaagcaatgcaatga

SEQ ID NO: 328665 - DNA, 2052 bp, Pseudomonas aeruginosa
atggctgatatcgtcctatttactccggtggtcgaactcgatgccgcggcgaatctgcacggatttatcgatatgtgtcggcacaaacttacagttttcggtgcgaatcttcccttccaggacaatgtgtgggatgtcacggaatcagtggcagtcaaggggagaggaaacaagcgggagcgaattacgttttccaacgcagccacagtgggcaagaacgcgcaggaaatgatgcgcgagccgtttatttcattcgccaaggcatacctgcgctacatgcatgggatgcgtccgaccaagttgattcacaacaggatggccgcgctaagagctcttgaagctgctttatcggaaagaggtgaagctcccagtcctgtccgtatcgattcgcatattctcaatcgagctgcgcagatagtcgctgatcggttcagtgatggagccgcgtaccgagtggctgggcaacttgaaatcttagcggccttcatggcagaaaaccgacttctcgctgtccctattcgctggcgcaatcctatcaagcgtccaagcagtgctgtccgcgtgggcaaagcgtttgacgagcggcgtgtgaagaaaatgccctcttcagccgctcttgaggcattgccccaaatcttcagggcggccgttgagcctgtggacgtgattacggcttcagtcgctgcggctctactcgcagcacctgatcgtattggtgaagttctatcgcttcctgaatgttgcgaggttcatgagccgaggcagggggcagaggatgcatacggcttgcgttggtggccagcaaagggggcagagccgatggtcaagtggctagtgccctcctttgcaacggttgttaaggacgcactacgcaaaatccgatctgtgaccgaagaagctcggcgtatcgctaaatggtatgagcggtatccttgtcagatatacctgacggatgatgtctcgtacctgcgtggtcgggagtggttatcgctggctgaaattgccgaaattatgggcttccgacaaggaaacgccgctcagagctggtgtaaagcggagggcattaaacttgagcggcgtcatgggctcgggaaattagtattcgcgcggttcctagatgtggaacgatcggtgctcggtatgctacccagtggtttccctgttttcgataagtcaactgggctgaaatacagcgatgcgttgttcattatgcgacgcaatgagctaggggcgcagcgtggtacatatcgctgcatgattgagcccattggcatcggacagataaatacggggctcggtagtcgttcgaatcatgggttccagtcgatctttgatcgtttcggctttgtcgagccagatggtagccctatagtggttaccagccaccaatttcgccattacctgaacacacttgcgcaagctggtggcctgagccagttggatatcgccaagtggtcgggacgtagagacgtcagacaaaatgaggcatacgaccatgttacgtctgagcaaatgcttcagaaaattcgaggtgctgtaggcgaagaacagatgttcggttcgctggccgagcttccgaagaaggtgatgattcgtcgtgacgaatttgcacgtttagtgattcctactgcacataccaccgatctcggctactgcatccatgactacacggcttcgccctgccaattgcacttggactgtatcaactgccaggaattggtatgtgtgaaaggtgatgtcagaaagacggccatgctgcggcgacggctcgctgagtcccgcgatttgctatgtaaggcagaaaccgcaagagaagacggatattcgggaagtgatcgatggatcgaacaccatcgctcgacagtggaacgatactcgaaattgaactccatcatggaggatcccacggtgccggagggagcggtgattcaattggcacctccgatagctccaatccgcataaagcaagaaaaagtgcgccggcttcctgcccagacggatgatgcgcaagtgggtttaccggccgaaataagagcgctgatggaggagtga

SEQ ID NO: 328666 - DNA, 1548 bp, Pseudomonas aeruginosa
atggataaacacgtggcaatcagaagctgggaggcgatgcctgaattgcctgccgtggctttgacgcggtccggtgttgaattatatccacgcgaagatagatgggtttaccgtgatacaacgatggccatgagcctgaactttgctgcttggcctgcgacagcgtcgttcgttacgtcggcgaaactcacgctgctgtggtatgcagggcatatgtcgccatcgcacgtgaaaaatatgtttgaacggctggggcactatgtgaggaccatgtgcgccggtcgggatgcccctttagcagaaataagtagccatgaccttatcagctatagggctatgttgagcgacaacacgctatggtatctaggaaatatatctggcttattgcaacggtggcgcgccctcggatacccaggagtgactgctgatgcagtttcattccttaaacagattcgaactagaggtaaccgaaagggagaggctgtactaacacatgatccattttacggcccattcacagacatcgaatggggggctcttcagtcggctctcgatagggcttattctgatggcgaggttgatagagaggtctatttattaacgtatctgtttatggctctcgggcagcgttctgtacagtatgcatctttaaaagtgtgtgatgttggagtcgcatccgctcaggacggcacagttatctatacgcttcgagttcccagggcaaagcagcgtaatcagttatctcgcgtagagtttaaagatcgagtgcttgtttcacatgtcggtaaacttttggtgcggcagcgggatgatgtttataggaagttcaaacggcgcctgtcagacccatcgaaggcaccgttattccctgcaaggcgccaatccggtagctgtccagatggatttgagtatcaccgcacgggaccttcgctcggtctcatgctgcgtgttggccttaataagttatctgcgatgtcagagcgcacgggacagccgttgcacgtcaccgccgtccggttccgtcgcaccatagccaccagggcagcaatagagggtcacggagaactgattatcgctgaactactggaccacactgacacgcaaaatgttggggtttacatagaggcgcggcctgaaattctggagcggattgatcgtgcgttggcattgcaacttgcgccaatggcacaggcctttgccggaatgattatcccagatgaatctcatgccagacgtgccggtgatccgagcagtcgggtatgcgacccaagattcgatccttcgatgaagcccatgggaaattgcggaaaacatggcttttgcggattttccgcaccaattgcttgttacacctgcgtcaatttccagccttgggtggatggtccgcacgagaatgtgttggagttcctgcttggggagcgtaatcggcttgcgtcacaaacggacatgcgcatcgcatcggtgaatgatcgcactatcctggcggttgccgaagtggtacgccaatgtgatgaagtacggagcggaaaggcggatagcaatggctga

SEQ ID NO: 328667 - DNA, 1278 bp, Pseudomonas aeruginosa
atgtctcccggttacagagtaaaaaacgtcgtgctcgtctcaggagagcgtttaccggtccttcttgatcgggaggggataccgatatttgccccgactgtatttgtactcacggaggtgcgtgggaagaaccgggccgctaacaccatcgccattgttctccgtagcgtgatggtctttcttttgtttcttcatatgcgccgtattgacttcgagtcgcggcttatcgctggtgagttgttatcgctagctgaggtggaggatttggcgcgcctctgccgattgccccatactcagctggccgctctattagacgaaaatgatggcttgcccccaaaagtactgacttttgagaaagtgcgtatgggcccccagagggctttgctcgctgaggtagcaccagaggtagcggcgaaccgactgcgatatatccggatgtatctccagtggcttgcggaagaagctctgggccgtcatggcttggctccattttcagccgcacggctgggagactcgtctaggcgggtggccgaggcgatagattcgcgcatcccgcgcaagtcaggggggaacacattaagccagcgtgagggattacctgaggagtcagtagcggagctgttgcgaattatcgatcctcagtctcctgataatccgtggcgtgaccagcatacgcgctaccggaatgccctgcttattcaatggctattgaacctgggacttagagttggggaagcgctgggggtgagggttagtgatattgtggcctatcgcaaggaagtcacaatccatcggcgtgccgacgaccccgatgacccgcgacagtatcagccgcagaccaagacccgggctcggatacttcctcttggtgagacactcctttcggacacgcaggcctacattttgagttatcgcagtgtattgccctgctcaaaaaaacatccatatctgttcgtcgccagtcgtactgggcagcctatgagccaatcggccattgggaggctatttaaggatctgtgcgaaaaatccccatcgttgctccaagggctctccgcgcacttattgcgacacacatggaacgacgcattttctaagaaaatggatgaaaaaggcgtaacccccgagaacgagcgtcaggctcgtagctatctaatggggtggtcgcctacatcagatactgctgctacttatacacgtcggtacgtccgtaataaggccaaagaaatttcgcttgagttgcaaggccaactagtgagtaggacgaataacgatggataa

SEQ ID NO: 328668 - DNA, 168 bp, Pseudomonas aeruginosa
atgtgcgcgtccgaaaaacggacgcacacaatcatcccatttgcgccgaagaaattcgtcgccgctcggtacgttttccgtaccaatccggcctattcgaccttggccgccaagggcagcggatacctggccttgatctcctcgactttggcgatccaggcagagtaa

SEQ ID NO: 328669 - DNA, 561 bp, Pseudomonas aeruginosa
atggcccagattcgatttttcaaagtggcgaccctgccgggtacgctggaacccgattcgttctacttcgtcgagaatggcagctactcggagtcttacctgacgaacagcgcgggagtcgcgcgctcgatcggcaacagcgcgatgatcaacgcgctgatcaacgaggcgttggccagcttgcccggcacaggcgcgccgatcctgttcgttgcggatatcgccgcccgcgacgccctggagccggagtcggcgatattcgtgctggttcaagacgcgagcgccgacccgacagtcgaatccggcgctgcgctgtacgcctggaacccggcgaccagcgcctggctgaaggtggccgagtatgagtcgatggacgtcgagctcaactgggacgcaatcaacgggcggccgacctcgacgcccgcgcagatcgacactgccgtttcccaggcgcacacgcacgcgaacaagtcgacgctggacaagttcggtgaggagtcgggcctggttcggttcggcgggcagccgattccggcggagtggaacggggcggcctggtaa

SEQ ID NO: 328670 - DNA, 546 bp, Pseudomonas aeruginosa
atggcaactattacgcacgtcctgtccggcgccggggagccgctcgatccgccaccaagcatcggtgctcactacgtgaacacgaacaacggcgcgctataccttgcgaagggcatcgcgagcggtgccgattgggtgaagctgggtagtggcggtggcagcgctccgagcgaggtgctgcatgtcaacaccgacggccagttccttctcgagcctcaacactcatttgttgaggcccgtctgttcgcaattcccgagctcggcactgccgcaattggaatcgatcccagcacatcccgacagttcgacctgaaaatcaggaccgcgggtccgagcgggcagcaactgcagatcagagttacgtccggtgaattgcccggagggatgtcgatcgttggcacaaccaggcagtgggttgttcaggagtcgtatggattcttgatcaatgcaaatgacctcaacggcgaagtgtgggcgcgcgtctatttcgatgctgacgaactcactctgtcgatgcttgtgttcagcgatgtgccgaacgcgtag

SEQ ID NO: 328671 - DNA, 1698 bp, Pseudomonas aeruginosa
atgctcaacggtggaccgctcaatagcgctgcgctgaactctgccgctcactccgctgtgcctggtcctgagccgatcatccctggctacgctttcacatggcgcccaatcgtgcgcgttggcgatgacgacgttacgccgctcctgaccggggagatcgaggtcgatcgtgaagagggggcggctggcgtcgcgtccttttcgatctatctcggcgacggccctgttgtccctacggactggattggtcgaaccgtaaccatcgactacgcaacggagaccgccggcgagctgagtcagggccggcggtttacgggaagggttacgcagccagcctggaatcctgttcggcgcgtcttggacgtcagttgcacggaccaattgcagcagcgtgtagaggccatggagattgcggccgtcgacgccctggtcggcggcgcctggtccgcagatgtgttcgagccggtcgatggacgctcgcggtgggactacgcccaggagcgtttgaccagcgtaaccgggagcttggactgttcgccatatggtgctctccgcgtcacgtcatggctttcggtggcgcctgcctacgagttcggccaaggctctacggtatacggatcgcttgcggtcgagttggccgacctgagctcgcagacgaacaggatcgagatcgagtgcgactaccgattcagccggctttggcagttgaacgcatcgtatggatggcagcaccccgggacgggtaacgctgttggcgaggcagggttttgcaactggcgcggcgatgacaccgagttgccagatgtcgagatgatcacctcggcgaccgagagcagcggtcagacgttgttctatgcgacctggtatccactgccgcccacgggcgtctactgcaatccgccggcggcatggagaaatgacttcaccgagctgctgctcggcggaaattggattgctggccggcgctgggtgcagtccgttacagagcgctatcggttggtcatggaggttcagccgagcgttgcggcgaccggtccgattgtcggtcggcagcgtgcctcgttcgagatcgagtcggacaaggccgagcgctgggaaagcgacccgatcaccggcggcagcaccggccacgacgacgagaaggatggaaaccggcgtttgtccgcgctgaactgcttgttggcccagggcgccacgacgctcattgctgcgcaccgcggcacaaccgtgacctgggatgtgccgacgtccatggtcctgccgatcgatcttgtacatacgctccgcctcgatgatcagggcgcgcgtgcggtgggcaagtgtcgccgcattgtcgaccggctcgatctcggatccggtagcgccctgaccacgatctctatcgcggtgatgcgaggcggcggtggcgcagcagacccccttgttcctcctgctggctcgttcgatcccgtcagcccaccgtcgggcgggggacagctctcgacgcagcttggaggccgcaacggcagtcccgcgtatgacgatgaggcggatggtttctcaggcaactggagcaatcgcgatcccggcgccgaactgttcccgcggcgcttctcgttgaccgcgaaagacattccggagacctacagggacgagcatgcgcctgagatcgcggccacctaccgggtatctgtacctgatgacgtactggagatgtag

SEQ ID NO: 328672 - DNA, 522 bp, Pseudomonas aeruginosa
atgatcattccgaacgtgatgctcgggggaataccgatcgtgatacacggtggcgccccgcagtgtcagtaccagtctgtagatggcggcgtcgagcgattgaggctcagcggaggtgcggcagtacagatgacgcactggcgcaagacggcaatcaccatcagcggttcagggtggatcggtacggggatgcttgggctcgacttcgacagcccgctggagctgcgatgcaatgcgtcgcttggtatctcgggtcgtactgccgccgaccgagtattcaccatcccgggcgaggttcggccggacgccggtccatgggggctggcgctggtcgggcgtgagtgggtcagaacggacgtgtcgtccgccggccaggtggtaactgcgtcggagatcccaggcgcgcaactctaccgcgtcgagtggtggccgctgttccacgtcttcgcgtccatccctcctgaggctcttgattcttcgaacaacagccggacctggcaaattgtcgctgaggaaatctga

SEQ ID NO: 328673 - DNA, 744 bp, Pseudomonas aeruginosa
atgatcagcatcaagccggaagggttccagcagcagctcgccgacctgactgagcttgagcagaggcagattccttacgcgacagccactgcgcttacgcggaccgcgcaaggcctgatggatcgattgcgcgatgagatgcgtgtcgtgttcgaccgcccgaccccgtacaccctgaacagcctgcgcatggtgccagccaggaaagaccggctggaagcgcgggtttggttcaaggacgaagcggacggtgcgcagcctgcatcggtgtggattgcccccgaggtctacggtggcccgcgtcggaacaagccggccgaacttcagctcagggccaaggggatactgcccgaaggcaagtacgtggtgcccggcgccggcgcggacctggatcgctacgggaacatcaggcgcggccaggtcaccaaggcattgagcggcatccgcggcttcagccaggccgggtacaacgcgaacgctaccgatagcagacggagccgagcgaagggtaatgctcgccgctacttcgtcatgacacgcaagggccagcccataggcattgctgagcgcacaggtcgaggccgcgatgccgtctcgatcatcatggccttcgtgtctcgcccttcgtatcgccgccggctgagcttcttcgagatcgcgcagcagtacgccgacgagaacctgccgcgtgagttcgaggtggcgatgcgcggagttgctgctcggttcgctgcgaggcgctga

SEQ ID NO: 328674 - DNA, 483 bp, Pseudomonas aeruginosa
gtgcttacgcaacgcctcaatcatcagttcgcgtcgctcgactccggctcggagatcagaaacaacttgtccatcagcggcagcaaggacggctcttcctgcatcagcgctgccggaggctccgggagcctggtgcactccatctgcggggcagcgggctttgacgtacacgacgcgagcgccagtgccgatagcatcgcggcgcaattggttttcttcatgggaggcctgcagtgctgcttggtaggttcgagccagggcatcggtctggacctgcgcctggatgtcgcgctgggcctgctgggccatcgcggtgatcgtctcggcggattgctcgacggcggcctgcaggtcatcacgctgggcggtcacgtgatcgaggcgccagaacacaagcgcgcctaccagggcgaccaccaaccagggccgccaggtcactggtcgatcctccgaccaaccttgaacatgaacgtctgctcttga

SEQ ID NO: 328675 - DNA, 168 bp, Pseudomonas aeruginosa
atggctctgggcgaccgcggcctgtcgctgcgccagggcaccatcgtcgatgcaacgctgatcaatgcgcccagttcgaccaagaacaaggacggcaagcgcgacccggaaatgcaccagaccaagaagggaaaccagtattgtgtgtcacgaacacaggtcagatga

SEQ ID NO: 328676 - DNA, 1269 bp, Pseudomonas aeruginosa
atgagtggcgtgagctcggcgaaaccttatgacatagcgaaacgcacggtatgggacgcctaccagcaggtcagggccaaccgcggtgctgccggcatcgacgatgaaaccatcgccgatttcgagcgggatctgtctaagaatctctacaagctgtggaatcggatgtcgtcggggtcgtacttcccgcctccggtcaagcaagtagaaattcccaaggcatcgggaggcacgcgcaagctgggagtgcccacggttggtgatcgtgtcgcgcaaaccgtggtcaagcttctcatcgagccggagctggactcgatcttccactcggactcctatgggtaccggccgggacgatcagcgaagcaggcggtggcgatcacgcgtgagcgctgctggcgatacgactgggtggtggagtttgatatcaaggcagccttcgatcagatcaatcatgggttgctgatgaaggcggtgcgcctgcacatcaaggaggactggatacttctgtacatcgagcggtggctggttgcgccgttcgaaacggatgacggcatgcgcgtcccacgcgaacgcggcaccccgcaaggtggagtgctcagtcccctcctgatgaatctgttcatgcactatgccttcgacacctggatgcaacgtaccagccccaactgcccgtttgcccgctacgccgatgatgcggtggtgcactgccgcagtcgaaagcaagcggagtacgtgatgcgctccattgcttcacggctggctgcctgtggcttgacgatgcacccggagaaatcgaaagtcgtgtactgcaaggacagtaaccgtcgcgcaggttatccgcatgtgagctttaccttcctcggcttcacctttaggccgaggaaggcgctcagcaaacaagaccagctcttcacgagcttccttccgggagcgagtgcggatgccttaaagcggatgcggcaagcggtacgcaggtggcgactcaatcgccaaacccacgtgacgctggtcgacgtggctcggctctacaatccagtgatacaggggtggtggcaatactatggctcgttctatcggacagccatgcttggcatcttccagcacattgaccgcgcgcttgaacgctgggcccgacgaaaatacaaggcccttcataggcgcaagcggcgcattagccaatggctggacaagatgcggactgtggtaccccggctgtttcatcactggcgagtgaccgggcagcaaggttggataacgggagccgtatga

SEQ ID NO: 328677 - DNA, 1545 bp, Pseudomonas aeruginosa
atgagcaagagctggaaccatgatcgcgctgcaaaacacatagaccagaagatcgctgatgttgaggaaatcaccatcaaggattacgtgcgcgacatgtcgttggaatcgattcctaccagtaccgcgtaccgcgtggatggggtccacatgtatgcggacatcatgaatctcgaggacatgctgaacatcactgcagtcgagggcacagagtgtcacaagcgcacgctgcgctttcttgaccagcactaccgggcagtcaagcgaattctcaacaaggttgatgcgcgccgcgtcgacttccacagtcagcggctgcactcccttttcactaagccgtacaacactgagtccggcgctgagaccaagcgtgttcaacgcgccgttgcgactgcgcaattgatcattgacgtgcttgcagagacgggcgacgacgatgagcaaatcccagcagccaaggttcgaattggcatcgataccggcctagctcttgctgtaaacaatggccgcagcgggtaccgcgaacccttgttcctgggcgatccagcgaaccatgccgcgaaactggccagtaataacaaggccaggggtatctatctgaccaacaatgctcgtaaggccatcggccttgcggaaagcgatgagccggaaaaatctgccctaaccgcgatagagatcaaggcatgtcaggatgcggccaagctggatgtcacgtccgacgagatcgtcgaggagtggcgtgaggatctgaaaaagaaccccattggcggttaccagttttcccgccaaaccccacccctgcgtgatatggacatttactcgctgactccggccaactcgaagcgacaggagatggtgagcctctacgccgatattgatggcttcacagcctacgtggccgatcacatcaacgagaagaccgacgatgtcgtgcggactttgcatgtcatccgctccgagctggagcgggtcgtgacttccgacttcgaagggcgccgggtgcgcttcatcggagactgcgtgcaagccctatcctgtgacggcaccgcgcatactactgacgaagagaagtcagtatccgaggccacacggctagcaggtgcactgcgcagcagcttcaatctcgcaattgagcggctgaacgccgaaggtattgaaaccggcgacctcggcctcgcgattggcttcgatctgggcccaatagccgtcacgcgcctgggcgccaagggtaatagagttaggtgcgctatcgggcgtagcgtgatcgagtctgagaaacgccaatgcgcgtgttcgggggtggaaaccgcgatcgggcaagtagcttacgacgcagcatcgaaagctgtgcagaacctgtttgggaagagtcgtaagacatcacacctggactacaacgaagctaccgaagccctggcagatgatggggacgcatctgcgaagcaagctcgctcggaagcctatgcgggttccgccgccatcattcgcgcagatgagcgtcaggtgcagccccactcccgccagaaagtagacggcagccgttga

SEQ ID NO: 328678 - DNA, 927 bp, Pseudomonas aeruginosa
atgactactgggaagttgatcgatcgctttgaagggccgtcaggccgcgccgttcttgaggaagtactgcttgagcagaagctggtactcggaaatcaagacctagcacgccgcctcgcagaggtaggaacgctggaggagatcgctaaggatgctgtgctcattaccgaggacgcggaggactccgaggtttatttcatcatcacagggcatttccaggtgaaggtccatgatcgtgaagtcgcaacacgagggggcggcgatcacgtcggagaaatggctgctctggtcccaacagcgaagcgctctgctactgtactggccaccgagccctcgattgtcttgaaggtcagcgcggcagacttcaagtccattgcggacgcgtatccctcggtttggcgacaggtcactcggcaactggtcgatcgactacaccagcgaaacgacatggtgcttcctgcccatcagtcatcccacgtattcatcatttgctcggtcgaggcactccctattgcccgggcaatcgagaataaccttgagcacgacaagttcttcgtaaagacctggacacaaggcgttttccgcgcatcgcagtacgcccttgaaagcctcgaagagcaactggacgagtgcgattttgccatcgcaatcgcacagccggacgactccgtcacaatgcgcgaggaaaccaagaatacgccgcgcgacaacgtcattttcgagcttggcctgttcgtaggacgacttggcagggcacgaaccttccttcttgagcctaggggtgacgaggtacatctgccgtcagatctgaaagggctgacaaccatcggatatcgcctaacgaaaagtgaagaccagctgccctccagcctatctccagcctgcaatcagctacgcaccattttcaacaagctaggaccgaagtaa

SEQ ID NO: 328679 - DNA, 435 bp, Pseudomonas aeruginosa; identical to SEQ ID NO: 320996

SEQ ID NO: 328680 - DNA, 234 bp, Pseudomonas aeruginosa
atgttcggcgaacttctcgccccgcagtacctgcgctggttgctcgacggcttcctgctgaccctcggtcttgccctgctcagttgcctgctcgccaccctgatcggcgcccccctggccatcgcccggctgtcgcgccggcgcctgctgtcctggccggcgcgcgcctacctggcactgttccgcaataggggtttggggagcaatggaaccaaaaaccaacgtaagctctga

SEQ ID NO: 328681 - DNA, 471 bp, Pseudomonas aeruginosa; identical to SEQ ID NO: 321484

SEQ ID NO: 328682 - DNA, 1284 bp, Pseudomonas aeruginosa
atgctgatcgccttcgccatcttcctgttcaccctggtcctggtcatctggcagcccaggggcctcggcatcggctggagcgccagcatcggtgccctgctcgccctggcgctgggcagcgtcgcgccgggcgacatcccgaccgtctggaacatcgtctggaatgccaccgccaccttcatcgcggtgatcgtcatcagcctgctgctggacgaggccggcttcttcgaatgggccgcgctgcacgtcgcgcgctgggctggcggcgacggccggcgcctgttcgccttctgcgtgctgctcggcgcggcggtctcggcgctgttcgccaacgacggcgcggcgctgatcctcacgcccatcgtgatgtcgatgctgctggccctgcgcttcagcccggcggcgaccctggccttcgtcatggcggcgggcttcatcgccgacagcgccagcctgccgctggtggtctcgaacctggtgaacatcgtctcggccgactacttcgggctcggcttcggcgagtacgccgcggtcatgctgccggtaaacctggtgagcgtcgcgacctccctgctggtgctgttcctctatttccgccgcgacctgccgccggtctatgcgctggagcaattgaagccgccgcgggcggcgatccgcgaccgcgcgaccttcgtcgtcggtggctggatgctgctggtcctgctcgccgggctgttcgccctggagccgctgggcgtccccgtcagcgcggtggccgcggcctgtgcggcactgctgctggcggtggccgggcgcgggcgggtgatctcgacccggcgggtgctgcgcgaagcgccctggcagatcgtggtcttctcgctgggcatgtacctggtggtctacggcctgaagaacgccggtctcaccgacctcctggcgcagctcctgaaccgcctggccgagcacggcgtatgggcggccgcgctgggtaccggactgctttccgccgccctctcgtcggtaatgaacaacatgcccagcgtgctgctcggcgccctgtcgatccaggccagcgacaccgccggcgcggtgcgcgaagcgatgatctacgccaacgtcatcggctgcgacctgggtccgaagatcacccctatcggcagcctggcgacgctgctctggctgcatgtgctggcgcgcaaaggcatgcgcatcacctggggctactacttcagggtcggcgccctgctgaccctgccggtcctgctggcgaccctttcggccctggccctgcgcctggccatctga

SEQ ID NO: 328683 - DNA, 891 bp, Pseudomonas aeruginosa; identical to SEQ ID NO: 321481

SEQ ID NO: 328684 - DNA, 321 bp, Pseudomonas aeruginosa
atgccgcgccatgcgctcgacggtccgcgcctcgaacaggtcggttgcgtaggtcagcgccgccccaaggccgtccggggtttcccaggtatcgagggcaaggtcgaactgtgcggcagcaccgtcccaggcaaaactctcgatgtgcaaaccatcgacttgggcatcctgccgctcgccgctctggtggttatacatcacctggaacaacgggctgtggctgagattgcgttcgggctgcaaggcatcaaccaattgctcgaacggcagatcctggtgcgcctgcgcgcccagcgccgcctcgcgcacgcggcccagtag

SEQ ID NO: 328685 - DNA, 1077 bp, Pseudomonas aeruginosa
atggtgctgggtgatgaccaacacatgctcctgcccagccagcgccagcagacgcacgcgcagcagcggcccacgagccaggtcgaatggctggcggatttcctcggccacccgctggcgcaacgttgcttcgctcgccccggcgcaatcctccaggacaatgcgcaacggcatgttcgccaggatcgtctggcgcgcctgaccgtcgacctcctcgaagcgggtgcgcaaggtctcgtggcgcagcaccagccaatcgaaggcctgctgcaacgccgcctggtccaggacgccacgcacgtgcagtacgctggggagatgataggccgcgctttcaggctccagtttccagaggaaccacatgcgttgctgagcatgcgacaaaggcagctcggcgactcgcggcaatacttgcagcacaggggcaacgctcgccgcctgggactccagggaagcggcgaagtctgccaggaccggccgctcgaacaggatgcgcaagggtacgtccagctccagatcctggcgcaggcgcgagaccacccgggtggcgctgagggagtgaccgccgagttcgaagaagtgctcgtcgcgggcgatgccctcgacaccgagcagcgcctcccagatcgctgcgaccgaacgttcgagcccctcccgcggaggctctccggcctggtggcgggcagctgcgtccaccttcggcagcgccttgcgatccagcttgccgttggcgttcagcggcaagctggacagcacctgccaagccgtcggttgcatgtacgcaggcaagcgtccggccagccaggtgcgcagctccgccagaaggtcctcaccccgcatagcgtcacgccccaccaggtaggccgccagcagcggaccaccgacgccatcctgcgccacgaccgctgcttccgccacatacgggtgtgcaagcagttggctctcgatttcgccgatctcgatgcggaaaccacggatcttgatctgctgatcggcccggccgagatattcgacctgaccgtcgtcgcgataacgcgccaggtccccggtgcgatacaggcgctcgcccgaacctga

SEQ ID NO: 328686 - DNA, 150 bp, Pseudomonas aeruginosa
atggccggccaggcgttccacggtggaggcgtcgaacagatcggtggcgtagtcgaaaacggcgcaaaaacgctgctcttcgtccgtcaggtccaacgtcaagtcgaactgcgccgtccggctgtcgaactgcacgctttccatctgtaa

SEQ ID NO: 328687 - DNA, 291 bp, Pseudomonas aeruginosa
gtggtgctggaccagcaccagtacatggtcgtcttcggccagttgcaacaggttcacccgcagcagcggcccccgttccaggtcgaatggctgcacaacgatggcctgtatccgttcgatcaggccttcttcaccgaactgttcccgctcgatggaaacgctaaccgcaggttgtacctgctggtacgaacgccctccctccagccggaagcgggtacgcaaggtttcatgccgcgcgaccaggctgtcgaagctgcgttgcaaggcatccacgtccagccgcccgcgtag

SEQ ID NO: 328688 - DNA, 126 bp, Pseudomonas aeruginosa
atgccgttgacccacatcgaggcgatgtacagcacggtgccgatggtggccagccagaagtgcgcgttgatcagaccgatgctgtgcatccgctcgcggccccagactttcgggatcaggtggtag

SEQ ID NO: 328689 - DNA, 234 bp, Pseudomonas aeruginosa
gtgaatttcgatggcctgcgcgatgccgagttgaagaagtcggccgatggcatggggattcgcttcaccgtgctggccgatgatccggcgcctcgcttcaagctccctcgcagcgaagcgttgcccgtcacctatatcgtcgatgctcggggggaaatgcgtcagcgtctgctgggcgagcagacggccgatggcatattgaaacagctcgaggctttgcgggagggacgctga

SEQ ID NO: 328690 - DNA, 1326 bp, Pseudomonas aeruginosa
atgaaagtgatgaagtggagcgccattgcactggcggtttccgcaggtagcactcagttcgccgtggccgacgcattcgtcagcgatcaggccgaagcgaaggggttcatcgaagacagcagcctgaacctgctgctccgcaactactatttcaaccgtgacggcaaggaaggtcggggtgatcgcgtcgattggacccagggcttcctcaccacctacgaatccggcttcactcaaggcaccgtgggcttcggcgtcgatgccttcggctacctgggcctgaagctcgacggcacctccgacaagaccggcaccggcaacctgccggtgatgaacgacggcaagccgcgcgatgactacagccgcgccggcggcgccgtgaaggtgcgcatctccaagaccatgctgaagtggggcgagatgcaaccgaccgccccggtcttcgccgctggcggcagccgcctgttcccgcagaccgcgaccggcttccagctgcagagcagcgaattcgaagggctcgacctcgaggcaggccacttcaccgagggcaaggagccgaccaccgtcaaatcgcgcggtgagctctacgccacctacgccggccagacagccaagagcgccgacttcgctggcggccgctacgcgatcaccgacaacctcagcgcctccctctatggcgcagagctgaaagacatctatcgccagtactacctgaacaccaactacaccatcccgctggcctccgatcaatcgctgggcttcgacttcaacatctaccgcaccaccgacgaaggcaagtccaaggctggcgacatcagcaacaccacctggtccctggcgggcgcgtataccctggacgcccacaccttcaccctggcctaccagcaggtgcatggcgacgagccgttcgactacatcggcttcggcggcaacggttccggcgccggcggcgactcgatcttcctcgccaactccgtccagtactccgacttcaacggtcctggcgagaaatcctggcaggcccgctacgacctgaacctggcctcctacggcgttcctggcctgaccttcatgctgcgttacatcaatggtaaggacatcgacggtaccaaggtcgattccagctcctcctatgcaggcctgtacggcgaggatggcaagcaccacgaaaccaacctcgaagccaagtacgtggtccagtccggtccggccaaggacctgtcgttccgcatccgccaggcctggcaccgtgccaacgccgaccagggcgaaggcgaccagaacgagttccgcctgatcgtcgactatccgctgtcgatcctgtaa

SEQ ID NO: 328691 - DNA, 309 bp, Pseudomonas aeruginosa
gtgctcggcgccctgcgcgaggtcgagcgtgccctggcgctgtatgccggcgagcgccagcggcgtgccgacctccagcgtgccctcgacgagcagcgccacgcctaccggttggcgcgcagcaactatcgcgccggcgccctcgatgccctcgagctgctcgacagccaacgcagcctggtcgccgaccgggcgcgcctggtcgacgccgagatgcgcgtcgccgagcgccaggtcgaactgttccgggctctcggcggcggctggcaagccgctcccagcccctcccaccaggataacggacaatga

SEQ ID NO: 328692 - DNA, 1674 bp, Pseudomonas aeruginosa
atgtaccagtacgacgaatacgaccaggcgctggtgagcgagcgggtggcgcagttccgcgaccagatcgcccgccgcctcgacggcgaactgagcgaggaggagttcctcccgctgcgcctgcagaacggcctgtacctgcagaagcacgcctacatgctgcgcgtggcgattccctacggcaccctctcgtcgccgcaactgcgcgcgctggcgcatgtcgcccggcactacgaccgcggctacgggcacttcaccacgcggcagaacatccagttcaactggatcgaactggagcaggtcggcgatatcctcgaacacctcgccggcgcgcagatgcatgcgatccagacctccggcaactgcgtgcgcaacatcaccaccgaagccttcgccggggtcgccgcggacgaatggaccgacccccggccgctggccgagatcctgcgccagtggtcgacagtgaacccggagttcctgttcctcccgcgcaagttcaagatcgccctcagttcggcggtggaagaccgcgccgcggtgcagatgcacgacatcggcctgtacctttaccgccaccccgacgccggcgagttgcgcctgcgggtcctggtcggcggcggcctgggacgcacgccgatgctcggccaggtgatccgcgacgacctgccctggcagcacctgttgtcctacgtcgaggcgatcctgcgggtctacaaccgctacggccggcgcgacaacaagtacaaggcgcggatcaagatcctggtcaaggcgctgggcatcgaggctttcgcccgcgaggtggaggaagagtggcagcacctgcgcgacggcccggcgcaactgactgccgaggagtgccagcgggtcgccgagcgcttcgtattgccgcgctacctgccgccggccggcggcgagctggcctacggcagcgcccgtgcggccgatccggccttcgcccgctgggcctcgcgcaacgtccaggcgcacaaggtgccgggctacgcctcggtggtgctgtcgaccaagcccggcgccagcgcgccgccgggcgacgtcaccgcggagcagatggaacgcgtcgccgactgggccgagcgctacggtttcggcgagatccgtgtggcccacgaacagaacctggtgctccccgacgtgcgcctggagaacctccacgcgctgtggcgcgaggcctgcgcagccggcctcggcacgcctaaccaaggcctgctcagcgacatcatcgcctgtcccggcggcgactactgcgcgctggccaacgccaagtcgatccccatcgcccagggtatccagcagcgcttcgaggacctcgaccacctgcacgacatcggcgagcttagcctgaacatctccggctgcatgaacgcctgcggccaccaccacatcggcaacatcggcatcctcggcgtcgacaagaacggcagcgagtggtaccaggtcaccctcggcggcgcccagggcaaggacagcgcgctgggcaaggtgatcgggccatcgttcagcgctgccgaggtgccggcggtgatcgaacggatcgtcgaaaccttcaccgacctgcgggtcggcccggaacgtttcatcgacaccttcaaccgggtcggcctggagccgttcaaggcccgggtctacgccaggatggaggaaccggcatga

SEQ ID NO: 328693 - DNA, 915 bp, Pseudomonas aeruginosa; identical to SEQ ID NO: 324360

SEQ ID NO: 328694 - DNA, 354 bp, Pseudomonas aeruginosa; identical to SEQ ID NO: 324361

SEQ ID NO: 328695 - DNA, 2148 bp, Pseudomonas aeruginosa
atgcgcgcccttcgtttttccgccggatcgtggcggtgtgtcttcgcctggatgctcctgctggtcggcctcgccgcccagggtgccgaactcagcgagttggagcgcctgcgcatcgcccatgtattccccgcggtcgagcggatcggcgaccccgaaggcgactacggcgtacgccgcctgagcaagggcgaggaaaccctcggctacgccttccagaccctcagcgtcaccgacatcccggcttactccggcaagccgatcaacctgcaggtgatcctcgatccgcaggcggttatccgcgacgcctacgtcctcgaacaccacgaaccgatcctgctgatcggcatcccggaagagaagctgcacgccttcagcgccaggtacgacggcgtgcgcgccgaccagcgggtggtggtcggccgctccagcgacccgcaggcggttaccgtcgacgcggtgagcggcgccacggtgacagtgatggtggtcaacgagatcgtcatgcgcgccgcacatacggtggcggtttccctcggcctgatcgaggaccgcggcaatgtgcggcccaagccggcacaggtgcgccagcaaccggcagcgacggcgagctggagcgaattgctcggcaacggcgcgatccgccgcctgcagttgagtcgcgggcagatcgacgacgccttcaagggcagcgaggccgaaggcatcggcgaagccgacgcggcgcaccgcgacgagccgttcatcgatctctacagcgccctgctcaaccctcccgcggtgggccgcagcctgctcggcgacaaccagtaccgcgaactgatggcgtcgctgaagccaggcgaatacgccttcgtcgtgctcggcgacggcgagtattccttcaagggttccggctacgtgcgcggtggcatcttcgatcgggtccaactgcgccagttcggcgacatcatcagcttccgcgacctcgactaccagcgcctgtcggacgtctatgccgaaggcatgccggagttccgcgagatggcgatcttcgtcgcccgcgccagccagcgtttcgatccgggctcgccctggaccctggagttgctcgtgcggcgccagaccggcccggtggcgggggtattcaccagcttcgagctggcctgccagacgcccgaggaatacctggagcggccgcagccaacggccgaggaactggccgccctggaagaggctgcccggccgctgtggctgcgggtctggtaccagaagagcttccaggtcggggtcctctgtaccgccctcgtcctgctcctggcgatcctcttcctccaggaccgcctggtgcgacggccgcgcctgatgcagcgactgcgcaccggctacctggcgttcaccctggtctacctgggctggtacagcctcggccagctatcggtggtcaacgtgctgaccttcgtccacgcgctgttcgaaggcttccgctgggagctgttcctcagcgacccgctgctgttcatcctctggaccttcaccgcagccagcctgctgctctggggccgcggcgtgttctgcggctggctgtgcccgttcggtgcgctacaggaactgctcaacgaactcgcgcgcaagctccgcgtgccgcagttccaggtgccgttcgccgtgcacgagcggctctgggcgatcaagtacatcatcctgctggtgctcttcggtctctccctggaatccctggcgctggccgagcaggccgcggaggtggagccgttcaagaccgccatcaccctcggcttcgaccgccagtggtggttcgtcgcctacgccgtcgcgctgctggtggtcaacctgttcacccgcaaggtctattgccgctacctctgcccgctgggcgcggccctggcgatcccggccaaggcgcgcctgttcgactggctcaagcgccgcgcggaatgcggcaggccctgccagctctgtgcccgcgaatgcgagatccaggcgatccatcccgacggccgcatcgaggccaacgaatgccactactgcctcgactgccagatgacctaccacgaccaggacaagtgcccgccgctggtgaacaagcgcaagaagcgcgcgaagagcgcgccggcggacaacgcgcggatacccgcggagaacctctga

SEQ ID NO: 328696 - DNA, 921 bp, Pseudomonas aeruginosa
atgctgcgttacgacgacctccaggtgttcgtccacaccagcgacagcggctcgttgtccgccgccgcgcgccagttggagatttccccggcggtggccagcgcggcgctgaagcgcctggaaagcgagctggaggtacgcctgttcgcccgctccacccgcagcctgcgcctgactcccgagggcgacgcgttcctcctgcatgcccgcgcctcgttgcgcagcctggaggaggggcgccggttgctgcagggcggcaaggaccagatcgccggggtactgcagctttccgcgccctccgacttcggccgcaacctgctgctgccatggctcgacgagttccaggcgcgctatccgcaactgagcctgcgcctgctgctcggcgaccgggtgaccgatctctaccggcaaccggtggacgtggcgatccgctacggcgcaccggccgactccagcctggtcgccctgccgctggcgccggacaaccggcgagtgctctgcgccgcgccgggctacctggcggagcgcggcgagccgcgccagccggacgacctgcgcgagcacaattgcctgctctaccaactcggcggccgggtacacgaccgctgggcgttccagcggggccgccgcagcctgaccctgacggtcgccggcgaccgggtctgcgacgacgccgacgtggtgcggcgctgggccctggccggcaaggggctggtctacaagtcctggctggacgtggccgaggacgtgcgcgccgggcgcctgcgcctgctgctgccggagtggcagggcgaagcgacgccgatgaacctcttgtgtacccaccgcgcccagttgacccgtccggtgaccctcttgcgcgcgttcgtgcgcgagcgttgcgacgcattgctggcggaggctccatggacgaggaactga

SEQ ID NO: 328697 - DNA, 1494 bp, Pseudomonas aeruginosa
atgtcagtcccagtccgccacctcatcgcgggagccttcgtcgaaggtctcggcgcccagcgcatcccggtcagcaatcccctcgacaacagcaccctggcggagatcgcctgcgccagcgcggagcaggtcgagcaggcggtggccagtgcccgcgaaaccttcgccagttggaaggaaaccccggtttccgagcgtgcgcgggtgatgctgcgttaccaggcgttgctcaaggaacaccacgacgaactggcgaagatcgtctccagcgagctgggcaagactttcgaggacgccaagggcgacgtctggcgcggtatcgaggtggtcgagcacgcctgcaacgtgccctcgctgctgatgggcgagacggtggagaacgtcgcccgcaacatcgacacctacagcatcacccagccgctgggcgtgtgcgttggcatcaccccgttcaacttcccggcgatgatcccgctgtggatgttcccgctggccatcgcctgcggcaacgccttcatcctcaaaccttccgagcaggtgccgctgaccagcgtgcggctcgccgagctgttcctcgaggccggtgcgccgaagggcgtgctgcaggtggtgcatggcggcaaggaacaggtcgaccagttgctcaagcacccgcaggtgaaggcggtgtccttcgtcggctcggtcgccgtcggccagtacgtctaccacaccggcaccgcgcacaataagcgcgtgcagagcttcgccggggcgaagaaccacatggtgatcatgcccgacgcggacaaggcacaggtcatcagcaacctggtcggtgcctcggtgggcgcggccgggcagcgctgcatggcgatctcggtggcggtgctggtgggggccgcccgcgagtggattccggaaatccgcgacgcactggccaaggtccgccccggcccatgggacgacagcggcgccagctacggcccggtgatcaacccgcaggccaaggcgcgcatcgagcgtctgatcggccagggcgtggaggagggcgcgcaactgctgctggatggccgcggctacaaggtcgagggatacccggacggcaactgggtcggcccgacgctgttcgccggggtgcgcccggacatggcgatctaccgcgaagaggtgttcggcccggtgctctgcctggccgaggtcgacagcctggagcaggcgatccgcctgatcaacgaaagcccctacggcaacggcacctcgatcttcaccagctccggcgccgcggcgcggaccttccagcaccacatcgaggtcggccaggtgggcatcaacatcccgattccggtaccgctgccgttcttctccttcaccggttggaagggctcgttctacggcgacctgcacgcctacggcaagcagggcgtgcgcttctacaccgagaccaagaccgtgaccgcgcgctggttcgacagcgacagcgtggccgggaccaacttctcgatccagatgcgctga

SEQ ID NO: 328698 - DNA, 975 bp, Pseudomonas aeruginosa
atgcgcctgggattgccagccctcgccgcggggctgctggccctgcgcttcctggcggaattgccgtcggtcggctggctgctgggcatggccgccgccggactgttgctgctgttcggccggctgtactggctggggttgttcctgctcgggttcgcctgggcctgcggctcggcgcaagtcgccctggacggacgcctggccgccgagctggatggtcgcaccctttggctggaggggcgtgtggtcgatctgccggcgagcggcgagggcgtcacgcgcttccggctggaggaggtccgcggtgcgcggggcgtgcttcttcccgagcgtctgcgcctgagctggcgcggcgcgccgccgctgatgggcggcgaacgctggcgcctggcggtgaccctgaaacgcccccgcggcctggtgaacgcggcgggtttcgactacgaggcctggttgttggcgcagcgggtcggtgctgtgggcacggtgaaggcgggccagcgcctgcagccggccagcggcctggatgcctggcgcgatgcctggcgccagcgcctgctggcggtcgacgcacaggggcgcggcgccgccctggcggcgctggtgctgggggatggctcggggttgagcgcggccgagtggcgaatgttccaggacaccggcaccgtgcatctgatggtcatctccggttcgcatatctcgttgctggcggggatgctctatggcctggtggcggccttgcatcgcctgggctgctggccgcggcgcctgccctggctgccctgtgcctgcgccctgggtttgcttggtgcctggagctacgggttgatggcgggtttcgaggtcccggtgcggcgcgcctgcctgatggtcagcctggcgctggtctggcgcctgcgtttccgccacctgggcttgctgaccccgctgctggcaacgctggtgctggtcttgctggtcgagccgctgccgtag

SEQ ID NO: 328699 - DNA, 1680 bp, Pseudomonas aeruginosa
atgagtcagaagaacaataacgagcttcccaagcaagccgcggaaaacacgctgaacctgaatccggtgatcggcatccggggcaaggacctgctcacctccgcgcgcatggtcctgctccaggcggtgcgccagccgctgcacagcgccaggcacgtggcgcatttcagcctggagctgaagaacgtcctgctcggccagtcggagctacgcccaggcgatgacgaccgacgcttttccgatccggcctggagccagaatccactgtacaagcgctacatgcagacctacctggcctggcgcaaggagctgcacagctggatcagccacagcgacctgtcgccgcaggacatcagtcgtggccagttcgtcatcaacctgctgaccgaggcgatgtcgccgaccaacagcctgagcaacccggcggcggtcaagcgcttcttcgagaccggcggcaagagcctgctggacggcctcggccacctggccaaggacctggtgaacaacggcgggatgccgagccaggtggacatggacgccttcgaggtgggcaagaacctggccaccaccgagggcgccgtggtgttccgcaacgacgtgctggaactgatccagtaccggccgatcaccgagtcggtgcacgaacgcccgctgctggtggtgccgccgcagatcaacaagttctacgtcttcgacctgtcgccggacaagagcctggcgcgcttctgcctgcgcaacggcgtgcagaccttcatcgtcagctggcgcaacccgaccaagtcgcagcgcgaatggggcctgaccacctatatcgaggcgctcaaggaggccatcgaggtagtcctgtcgatcaccggcagcaaggacctcaacctcctcggcgcctgctccggcgggatcaccaccgcgaccctggtcggccactacgtggccagcggcgagaagaaggtcaacgccttcacccaactggtcagcgtgctcgacttcgaactgaatacccaggtcgcgctgttcgccgacgagaagaccctggaggccgccaagcgtcgctcctaccagtccggcgtgctggagggcaaggacatggccaaggtgttcgcctggatgcgccccaacgacctgatctggaactactgggtcaacaactacctgctcggcaaccagccgccggcgttcgacatcctctactggaacaacgacaccacgcgcctgcccgccgcgctgcacggcgagttcgtcgaactgttcaagagcaacccgctgaaccgccccggcgccctggaggtctccggcacgcccatcgacctgaagcaggtgacttgcgacttctactgtgtcgccggtctgaacgaccacatcaccccctgggagtcgtgctacaagtcggccaggctgctgggtggcaagtgcgagttcatcctctccaacagcggtcacatccagagcatcctcaacccaccgggcaaccccaaggcacgcttcatgaccaatccggaactgcccgccgagcccaaggcctggctggaacaggccggcaagcacgccgactcgtggtggttgcactggcagcaatggctggccgaacgctccggcaagacccgcaaggcgcccgccagcctgggcaacaagacctatccggccggcgaagccgcgcccggaacctacgtgcatgaacgatga

SEQ ID NO: 328700 - DNA, 639 bp, Pseudomonas aeruginosa
atgcgacgcacaaaggaagattctgaaaaaacccgtacggccatcctcctggccgccgaggaactgttcctggaaaagggcgtgtcccataccagcctggaacagatcgccagggccgccggggtgacccgtggcgccgtctactggcacttccagaacaaggcccacctgttcaacgagatgctcaaccaggtacgcctgccgccggagcaactcaccgagcgcctgtccggctgcgatggcagcgacccgctgcgctcgctctacgacctctgcctggaggccgtgcaatcgttgctgacgcaggagaagaagcgccgcatcctgaccatcctgatgcaacgttgcgaattcaccgaggaactgcgcgaggcgcaggaacgcaacaacgccttcgtgcagatgttcatcgaactctgcgagcagttgttcgcccgcgacgaatgccgtgtgcggctgcatccgggcatgaccccgaggatcgcctcgcgcgccttgcacgcgctgatcctgggcctgttcaacgactggttgcgcgacccgcgcctgttcgatccggatacggacgcggaacacctgctggagccgatgttccgtggcctggtgcgcgactggggtcaggccagctcggcgccgtag

SEQ ID NO: 328701 - DNA, 438 bp, Pseudomonas aeruginosa
gtgcgccacagcggctaccgcttccagcacttcctgctcgccgccagccgcctgcgcagcctgctctgccagctaccgctgctgcgcccgctgcgcgagggcagcctggacctcgacgggctgcacgcctacatgcgcgaacacctgcatacgcgcctcgaactggaacgcctggcggccttctgcaacctgtcgaagttccatttcgtcagtcgctacaaggcgatcaccggccgtacgcctatccagcacttcctgcacctgaagatcgagtacgcctgccagttgctggacagcagcgaccagagcgtggcccgggtcggccaggcggtcggctacgacgacagctactacttctcgcgcctgttcagcaaggtcatgggtttgtcgccgagcgcctaccggcagcgggtaaggcagggcgagggaggagcctga

SEQ ID NO: 328702 - DNA, 1032 bp, Pseudomonas aeruginosa
atgagcatcaccaagaacgacaagaacacgcgaaccaccggacgtcccaccctcaacgaagtcgcgcgccgcgccggggtcagcccgatcaccgcgtcgcgcgcgttgcgcggcgtcgccagcgtcgccgaagaactggcgcagaaggtccgcgacgccgcccgcgaactcggctacgtggccaaccccgcggcgcgcgcgctggcctcggcgcaaagccacagcgtggcggtgctggtgccgtcgctggccaacctgctgttcatcgagaccctcgaggcgatccacgcggtactgcggccgcagggcctggaagtgctgatcggcaacttccactactcgcgcaacgaggaagaggacctgatccgcaactacctggcctaccagccacgcggcctgctgctgaccggcttcgagcgcaccgagagcgcccggcggatgatcgaggccagcggcattccctgcgtgtacatgatggacctggactccggctccgggctcaattgcgtcggcttctcccagttgcgcgccggcgaggccgccgccgagcacctgctggcacgcggccgcaggcgcctggcctacatcggcgcccagctcgaccagcgcaccctgctgcgcggcgaggggttccgccgcgccttgcaaaaggccggctgctacgacccggggctggaaatccttacgccgcggccgtcctcggtggccctcggcggcgaactcttcgtgcagttgctggccagccagccgcaggtcgacggggtgttcttctgcaacgacgacctggcccagggcgcgctgctggaggccctgcgccgtggggtcaaggtgccggaacagatcgccgtgctcggtttcaacgacctgccgggttcggactgcacggtcccgcgcctgagcagcatccgcaccccgcgcgaagccatcggccggcgcgcggcggagcagttgctggcgctgatcgccggcaaggaggtgcgcgatagcgcgctggacatggggttcgagctgatggcgcgggagagcacctga

SEQ ID NO: 328703 - DNA, 432 bp, Pseudomonas aeruginosa
atgcaggcgcatccgcgctaccgggagctggtcgagcagggcttcgccgcggccagtttcgtcggcgacctcggcatccgtccgctggactgcgggccgggttgggtcgaagcggggctggacatcctgccccgccacgcccagcagaacggcttcatccatgccggggtccaggcgaccctggccgaccatgccgccggggccgccgccgcgaccctggtggaggaggggcagacggtgctgaccctggagttcaagctcaacctgttgcgcccggcgctttgccagcgcctgttgtgtcgcgccgaggtgctcaaggccgggcgccaggtgacggtggtcgaggccgaggtgttcgccgagcgggacggtcggcggcacctgttcagcaaggccaccgtgaccatggcggtggtggcgctggccgaatga

SEQ ID NO: 328704 - DNA, 726 bp, Pseudomonas aeruginosa
gtgaccctgcgcgtcgccgccgggcgtacccatgacggggtggcgctgcgggtggaagtgatcgacaccggcatcggtttcgacatggccgccggcagcgacctctaccagcgtttcgtccaggccgacagctcgttgacccgtggctacggaggcctcggcatcggcctggctctgtgccgcaagctggtggagctgcttggcggcgagctgacccacgagtcccggccgggacagggcagccgcttcctcctgcgcctgcaactgacccagccggcccagggcctggcgccgccgccgcggcgcgccggcgggcaggcggtgcggcgtcccgaggagtgcacggtgctggtggtggaggacaacgccatcaaccagttggtgactcgcggcatgctgctcaagctcggctaccgggtgcgcaccgccgacaacggtagcgaagccctggagttgctggcgcgcgagcggccggacggcgtactgctcgactgccagatgccggtgatggacggcttcgccacctgtcgggcgatccgcgcgctgcccggctgcgcggaactgccggtgctggcgttgaccgcccacagccacagcggcgatcgcgagcgctgcctggcggcgggcatgagcgactacatggccaagccggtcaagttcgaagagttgcagaccctgctgcacgattggctgctgtgccagccgatcgtcaccaagtccgcctga

SEQ ID NO: 328705 - DNA, 1083 bp, Pseudomonas aeruginosa
atgaccccatccctctctggcctgcctccgatccgcaccgcgctgatcggctacggcttcgccggcaagaccttccacgccccgctgatccgcgcggtaccggcgttgtgcctggagcacgtggtctcccgcgaccctgggcgggtgcacgccgacctgcccgaagcccgggtcagcgccgatccggatgaggccatcgaggccgccgacatcgacctggtggtcatcgcctcgcccaatgccacccacgccagcctcgccgaacgggccttgcgcgccggcaagcacgtggtggtggacaagccgttcaccgtcaccctggccgaagcccggcgcctcgccgacctcgcccgtgaacggcctgggcaggtcctctcggtgttccagaaccggcgcttcgacagcgacttcctcgccgtggaggccgccctgcaggccggcagcatcggcccggtgcgctacttcgagtcggccatcgagcgcttccgtccgcaggtccgcgaccgctggcgcgaacacgacctgcccggctccgggctgtggttcgacctcggcccgcacctgctcgaccaggcactgtgcctgttcggcgtaccgcagcgtgtgcacggacacctgcgccggctgcgcgagggggcgcagaccgacgactggttcgaggtcctgctcgattatccgcactgccaggtagcgctgcgcgccagcatgctcgccgccaatccggcgccacgcttcaatgtgcacggcgaccacggcagcctgctcaaggccggcgccgacatccaggaagcgcaactgctccagggactgcaccccggttccgccggctggggccgcgatcccgacctgctgcagcacatcgatggccagggcctgcgccagtcgctggtcaccccggcaggcgaccagagccgctactaccaggcgctggccgcagccatccgcggccagtcgcgcaacccggtgtcggcgcaacaggcctgcgcgctgatggccctgctggagttggcacgacgctccgccgaggaaggccggagcctgccggtggagctgcgcgacgaggaacgccaggcctggaactga

SEQ ID NO: 328706 - DNA, 837 bp, Pseudomonas aeruginosa; identical to SEQ ID NO: 328626

SEQ ID NO: 328707 - DNA, 525 bp, Pseudomonas aeruginosa
gtgccgttcgatcccgccaagccgacgctgttgtccacactggttcgtcactacgaggaactggtcgaccatgttcgccggcgcttcggcgaccggggcatggcgcgcgaagtggtgcacgacgtgtgcgtgcagttgctcgaacgcgacgagaaggaggacgtgcacacgcccctggccctgctgcggaaaatctcccacgacgccgccgtgagccgctatcgtagcgaccgtcgtcgaaccgcctgggtggaagccgtcgccgagcttccggaagtcgcctgcatggcggcgacgcccatgggtcgccatgaggccgagcgcgagttccaggcactggtcgacgccatcgccacgcttcctcctcgctgccaggccgttttcgtcatgcacaagatccacgaagttccccaggcgcaagtcgccgaccgcctcggcatctccgtcaagaccgtggaaaagcacctgcgcctcggactggcggcctgccgggaacggctcggccgcggcgaggcacggccatga

SEQ ID NO: 328708 - DNA, 645 bp, Pseudomonas aeruginosa
atgggcgtcaacgcgaacatttccgagtccctcaccgggaccatcgaagcccctttcccggagttcgaggcgccgccggcgaaccccatggaggtgctgcgcaactggctggaacgcgcccgccgctatggcgtgcgcgagccgcgggcactggccctggccacggtcgacgggcagggccggccgtcgacgcggatcgtggtgatcgccgagctgggcgagcgcggggtggtgttcgccacccacgccgatagccagaagggccgcgaactggcgcagaacccctgggcctcgggggtgctgtactggcgcgagagcagccagcagatcatcctcaacggccgcgccgaacgcctgcccgacgagcgcgccgacgcccagtggctgaaccgcccgtaccagacccacccgatgtcgatcgcctcgcggcagagcgaaaccctcgccgacatccacgccctgcgcgccgaagcccggcgcctggcggaaaccgacggcccgctgccgcgcccaccgggctactgcctgttcgaactgtgcctggagtcggtggagttctggggcaacggcaccgagcggctgcacgagcgcctgcgctacgaccgcgacgaaggaggctggaagcaccgctacctgcaaccgtga

SEQ ID NO: 328709 - DNA, 837 bp, Pseudomonas aeruginosa
atgcacagatatgtcgtgatagacgccttcgccagcgaaccgctgcaaggcaacccggtggcggtgttcttcgactgcgacgacctcagcggcgagcgcatgcagcgcatggcgcgggagatgaacctgtcggagagcaccttcgtgctccgcccgcaacaggacggcgacgcgcgcatccgcatcttcaccccggtcaacgaactgccgttcgccggccacccgctgctgggcaccgccatcgccctgggcgccgagaccgacaaggacaggctgttcctggagaccaggatgggcaccgtgcccttcgccctggaacgccaggacggcaaggtggtggcctgcagcatgcagcagccgatccccacctgggagcacttcagccgaccggccgagctgctcgccgccctcggcctgaagggctcgacctttcccatcgaggtctaccgcaacggcccgcgccacgtgttcgtcggcctggagagcgtcgccgcgctgtccgcgctgcaccccgaccaccgcgcgctgtgcgacttcccggacctggcggtgaactgcttcgccggcgccgggcggcactggcgcagccgcatgttctcgccggcctacggcgtggtcgaggacgccgccaccggttccgccgccgggccgctggcgatccacctggcgcgccaccggcagatcccctacgggcagcagatcgagatcctccagggcgtcgagatcggccggccgtcgcgcatgtacgcccgcgccgagggcgccggcgagcgggtctcgacggtggaagtgtcgggcaacggcgcggccttcgccgaaggccgggcctacctgtga

SEQ ID NO: 328710 - DNA, 1884 bp, Pseudomonas aeruginosa
atgaacgccctgcccacatcgctgttgcagcgcctgctcgaacggccggcgccgttcgccttgctctaccgcccggaaagcaatggcccgggcctgctcgacgtgattcgcggcgagacgctcgaactgcacggcctggccgacctgccgctggaccagcccggcccgggcctgccgcgccatgacctgctggcgctgattccctaccggcagatcgccgagcgcggcttcgaggcgctcgacgacggcacgccgctgctggcgctgaaggtcctggagcaggaactgctgccgctggagcaggccctggcgctgctgccgaaccaggcgctggaactgagcgaggaaggtttcgacctcgacgacgaggcctacgccgaagtggtcgggcgggtcatcgccgacgagatcggtcgcggcgaaggcgccaacttcgtgatcaagcggcgcttccaggcgcgcatcgacggctacgccacggccagcgcgctgagcttcttccgccagttgctgctgcgcgagaagggcgcctactggaccttcatcgtccacaccggcgaacgcaccctggtcggcgcctcgcccgagcgacacatcagcgtgcgcgacggcctggcggtgatgaacccgatcagcggcacctaccgctacccgccggccgggccgaacctggccgaggtcatggaattcctcgacaaccgcaaggaagccgacgagctgtacatggtggtggacgaggagctgaagatgatggcgcggatctgcgaggacggcggccgggtgctcggtccctacctcaaggagatggcgcacctggcgcacaccgagtacttcatcgagggccagaccagccgcgacgtgcgcgaggtgctgcgcgagacgctgttcgccccgaccgtcaccggcagcccgctggaaagcgcctgccgggtgatccgccgctacgagccgcagggtcgcggctactacagcggggtggcggcgctgatcggcggtgacggccagggcgggcgcacgctggactcggcgatcctgatccgcaccgccgagatcgagggcgacggccgcctgcgcatcggcgtcggctcgaccatcgtgcgtcactccgatcccctgggcgaggcggcggaaagccgggccaaggcttccgggctgatcgccgcgctgaagagccaggcgccgcagcgcctgggctcgcacccgcacgtggtggcggcgctggccagccgcaacgcgccgatcgccgacttctggctgcgcggcgccagcgagcgccagcagttgcaggccgacctgtccggacgcgaggtgctgatcgtcgatgccgaggacaccttcacctcgatgatcgccaagcagctcaagtcgctgggcctgacggtgaccgtgcgcggcttccaggagccgtactcgttcgacggctacgacctggtgatcatgggccccggcccgggcaaccccaccgagatcggccagccgaagatcggccacctgcacctggccatccgttcgctgctcagcgagcgccggccgttcctcgccgtgtgcctgagccaccaggtgctgagcctgtgcctgggcctggacctgcaacgccggcaggagcccaaccagggcgtgcagaaacagatcgacctgttcggcgccgccgagcgcgtcggcttctacaacaccttcgccgcgcgcgccctgcaggaccgcatcgagattcccgaggtcggcccgatcgagatcagccgcgaccgcgagaccggcgaggtccatgccctgcgcgggccgcgcttcgcctccatgcaattccaccccgaatcggtgctgacccgcgagggtccgcgcatcatcgccgacctgctgcgccacgcgctggtcgagcggcggccctga

SEQ ID NO: 328711 - DNA, 1218 bp, Pseudomonas aeruginosa
atggacgatctattgcaacgcgtacggcgctgcgaagcgctgcagcaacccgaatggggcgatccgtcgcgcctgcgcgacgtgcaggcgtacctgcgcggcagtccggcgctgatccgcgccggcgacatcctggccctgcgcgcgaccctggcgcgggtcgcccgcggcgaggcgctggtggtgcagtgcggcgactgcgccgaggacatggacgaccaccatgccgagaacgtggcgcgcaaggccgccgtgctggaactgctggccggcgccctgcgcctggccggccggcggccggtgatccgcgtcgggcgcatcgccgggcagtacgccaagccgcgttccaagccgcacgagcaggtcggcgagcagaccctgccggtctatcgcggcgacatggtcaacggccgcgaggcccatgccgagcagcgccgggccgatccgcagcggatcctcaagggctacgcggcggcgcgcaacatcatgcgccacctgggctgggacgccgcgtccgggcaggaggcgaatgcctcgccggtctggaccagccacgagatgctgctgctcgactacgagctgtcgatgctgcgcgaggacgagcagcgccgggtctatctcggttcgacccactggccgtggatcggcgagcgcacccgccaggtcgacggcgcccatgtggcgctgctggccgaggtgctcaacccggtggcctgcaaggtcggtccggagatcggccgcgaccagttgctggcgctctgcgagcgcctcgacccgcgccgcgagccggggcgcctgacgctgatcgcgcggatgggcgcgcagaaggtcggcgagcgcctgccgccgctggtggaagcggtgcgcgcggccggccacccggtgatctggctgagcgacccgatgcacggcaacaccatcgtcgcgccctgcggcaacaagacccgcctggtgcgcagcatcgccgaggaggtggcggcgttccgcctggcggtgtccggctccggcggcgtggccgccgggctgcacctggagaccaccccggacgacgtcaccgagtgcgtcgccgattccagcggcctgcaccaggtcagccggcactacaccagcctctgcgatccgcggctgaacccctggcaggcgctcagcgcggtgatggcctggtccggcgcagaagcgatcccgagcgcaaccttccccctggagaccgtggcatga

SEQ ID NO: 328712 - DNA, 339 bp, Pseudomonas aeruginosa
atgatcgaggaacttcagatcggcgcccgcgaggcggtggccaccatgaccgaaagccagcgttacagcctggagagcgtggagatcgccaaccgtgccggcgaacgcctgggtagcgtgaccagccggatcggcgagatcgacagcatgaaccagtcggtggccactgccaccgaggaacagaccgcggtggtcgactcgctgaacatggacatcaccgagatcaacaccctcaaccaggaaggcgtggagaacctccaggccaccctgcgcgcctgcggcgagctggaaacccaggccgggcgcctgcggcacctggtggacagcttcaagatctga

SEQ ID NO: 328713 - DNA, 1890 bp, Pseudomonas aeruginosa
atgatcaaaagtctgaagttcagccacaagatcctcctcgcggcctccctcgtggtgttcgccgctttcgcactgttcaccctctacaacgattacctgcagcgcaacgcgatccgcgaggacctcgaaagctacctgcgggaaatgggtgacgtgacctccagcaacatccagaactggctcggcggccgtctgttgctggtcgagcagaccgcccagaccctggcccgcgaccacagcccggaagccgtcagcgccctgctcgaacagccggccctgacctcgaccttcagcttcacctacctcggccagcaggacggcgtcttcaccatgcgcccggacagcccgatgccggccggctacgatccgcgcagccggccctggtacaaggacgccgtagcggccggcggcctgaccctgaccgagccctacgtcgacgccgccacccaggaactgatcatcaccgcggcgacgccggtgaaggccgccggcaacaccctcggcgtggtgggcggcgacctcagcctgaagaccctggtacagatcatcaattcgctggacttcagcggcatgggctacgccttcctggtcagcggcgacggcaagatcctggtgcacccggacaaagaacaggtgatgaagaccctgagcgaggtctacccgcagaacacgccgaagatcgccaccggtttcagcgaggccgaattgcacgggcatacccgcatcctcgcctttaccccgatcaagggcctgccttcggtgacctggtacctggcgctgtccatcgacaaggacaaggcctacgccatgctcagcaagttccgcgtctcggccgtcgccgccgcgctgatctccatcgtcgccatcctggtcctgctcggcctgctgatccgcctgctgatgcagccgctgcacctgatgggtcgtgccatgcaggacatcgcccagggcgagggcgacctgaccaagcgcctcgccgtgaccagccgcgatgaattcggcgtgctcggcgatgccttcaaccagttcgtcgagcgtatccatcgctcgatccgggaagtcgccgggaccgcgcacaaactgcacgacgtctcgcaactggtggtgaacgcctcgaactcttcgatggccaactccgacgagcagtccaaccgcaccaacagcgtcgccgcggcgatcaacgaactcggcgccgccgcccaggaaatcgcccgcaacgccgccgatgcctcgcaccacgcctccgacgccaaccaccaggccgaggacggcaagcaggtggtcgagcagaccatccgcgcgatgaacgagctttccgagaagatcagcgcctcctgcgccaacatcgaggccctgaacaatcgcacggtgaacatcggccagatcctcgaagtgatcaagggcatctccgagcagaccaacctgctcgccctcaacgccgccatcgaggccgcccgcgccggcgaggccgggcgcggcttcgcggtggtcgccgacgaggtgcgcaacctggcccatcgcgcccaggaatcggcgctgcagatccagaagatgatcgaagagctgcaagtgggcgcccgcgaggcggtggccaccatgaccgagagccagcgctacagcctggagagcgtggagatcgccaaccgtgccggcgaaagcctgggcagcgtgacccggcggatcggcgagatcgacgggatgaaccagtcggtggccaccgccaccgaggaacagaccgcggtggtcgattcgctgaacatggacatcaccgagatcaacaccctcaaccaggaaggcgtggagaacctccaggccaccctgcgcgcctgcggcgagctggaaacccaggccgggcgcctgcgccaactggtggacagcttcaagatctga

SEQ ID NO: 328714 - DNA, 681 bp, Pseudomonas aeruginosa; identical to SEQ ID NO: 30073

SEQ ID NO: 328715 - DNA, 633 bp, Pseudomonas aeruginosa
atgcagcttggtgtcattgccgatgacttcaccggcgccacggatattgccagcttcctcgtgcgcaacggcatgccgacggtgcaactgaatggcgtgccgacccgcgatattccgctgaccagcgaggcggtggtcatcagcctgaaaacccgctcctgcccggcggaaatggccgtcagccagtcgctggcggccctgcgctggctgcaggcccagggctgtcagcagttttatttcaagtactgttccactttcgacagcaccgcgcagggcaacattggcccggtgctggatgccctgctggccgagctgggtgagacgcggacggtgatttccccggcgctgccggttaacggccgcacggtctatcagggatatctgttcgtcggcgagcaactgctgaatgagtccgggatgcgccaccatccggtgacgccgatggaggatgcgcacctgggccgcttaattgagcgccaggggcgcggaaaagccgcgctgattgcctggccgattgtcgcccggtcgccgccgcgctggcggcagtcaacgatccggcggtgcgctatgtggtgctcgacgccctcagcgaacaggatctgctcacccagggcgtggcgctgcgggagatga

SEQ ID NO: 328716 - DNA, 903 bp, Pseudomonas aeruginosa; identical to SEQ ID NO: 30075

SEQ ID NO: 328717 - DNA, 762 bp, Pseudomonas aeruginosa; identical to SEQ ID NO: 49919

SEQ ID NO: 328718 - DNA, 861 bp, Pseudomonas aeruginosa; identical to SEQ ID NO: 49918

SEQ ID NO: 328719 - DNA, 435 bp, Pseudomonas aeruginosa; identical to SEQ ID NO: 25497

SEQ ID NO: 328720 - DNA, 1110 bp, Pseudomonas aeruginosa; identical to SEQ ID NO: 95539

SEQ ID NO: 328721 - DNA, 1185 bp, Pseudomonas aeruginosa; identical to SEQ ID NO: 16006

SEQ ID NO: 328722 - DNA, 657 bp, Pseudomonas aeruginosa; identical to SEQ ID NO: 16007

SEQ ID NO: 328723 - DNA, 1374 bp, Pseudomonas aeruginosa
gtgcgcgtactccggctcgatgtgcacacccaccaccactcgctggcggtcgcgcgacagctggtagctctgcacgctgccgacgcggacctggcggtagaggatcggcgcgccgatatcgatcgagccgagcttgtcgctggtcagcaccaggtgcaggccgggcgcgtcggtgttcagcggcggcgctttcgggcggatggtgaactcgcgactcggcgcgccgctcttggcgaagcgcacgtcgatgtagttacctttcaccagggcctcgaggccggtgatgccagccagggagatgcttggcttgacggtccagaactcggtgccttccagcagcatgtcctcgacccgcggatccatcgccaggtcggcagtggcgctgctgtagtccttgcccatgtcgatcgacttgaccaggccgacctgcacgccgttgaacatcaccggggtgcggcccggatcgataccactgacgtcgttcatcttcagcttcacgcgcagaccggcctgggccgcgtcgtagtcgtcgtacaggcggaacggcttgctcggatcggtcggcgggctgtcggtgcggttctccggggtggagaaggcgatgccgccggccgccagggtcagcaacgattcgctacgcaccttgaagccggacaggccgccggaaatggagatgccgctggcgttccagaatcgcgtgtgcttgcgcaccaggtcggcgtaggccggctcgatgtgcaccttgatctcgatggtcctctggtcatcgcccaactggaagctcttcacctggccgacctggatctgccggtagaacaccgggctgccctgctccagggagcccaggcgatcggccttgagggtcaggtgcaggccgggcagcttgtcggaaaggggtggcggctccttcaacgcggtgaagtagcgttcttccttctcgcccttcaccggatcgaccgcgatgtagacgccggagaccagggtttccaggccggtgacgccagccagggaaacccgcggcttgaccagccagaagcgagtacccttgctcaggtactcctgggcttccttcttgatctcgatggtggccaccacgcccttgatatcttcgctgacatgcaggtcggtcaccttgcccaccgagatgcccttgtacagcacctcggtcttgttggcctggatcccgtcgccgctctcgaagcgaacctggatgtccacgccagcctggtcgaaggcacgccacgccagccaggcaccgatggccagggccaccagcggcagcacccagatcgccgaccagttcgaggtcttgtgtttcttcgggcttggcaaatcactcattctcgtcgtccagattggtgttgtcccagataa

SEQ ID NO: 328724 - DNA, 186 bp, Pseudomonas aeruginosa
atgctcgatatcttcgtcatcgccatcctcgtggcgctggtcaatttcggcaacctggcgagcatcgaggccaacctcggcgccgccgccttcgccagcgtggtggtgctcaccatgctcgccgccgtgacgttcgacccccggcttatctgggacaacaccaatctggacgacgagaatgagtga

SEQ ID NO: 328725 - DNA, 303 bp, Pseudomonas aeruginosa; identical to SEQ ID NO: 183429

SEQ ID NO: 328726 - DNA, 930 bp, Pseudomonas aeruginosa; identical to SEQ ID NO: 269214

SEQ ID NO: 328727 - DNA, 705 bp, Pseudomonas aeruginosa; identical to SEQ ID NO: 8686

SEQ ID NO: 328728 - DNA, 582 bp, Pseudomonas aeruginosa
atgcggatcagtgagggtttgcaactgcgggtcaaggatctggatttcgatcacggcacgatcatcgtgcgggagggcaagggctccaaggatcgggccttgatgttacccgagagcttggcacccagcctgcgcgagcagctgtcgcgtgcacgggcatggtggctgaaggaccaggccgagggccgcagcggcgttgcgcttcccgacgcccttgagcggaagtatccgcgcgccgggcattcctggccgtggttctgggtttttgcgcagcacacgcattcgaccgatccacggagcggtgtcgtgcgtcgccatcacatgtatgaccagacctttcagcgcgccttcaaacgtgccgtagaacaagcaggcatcacgaagcccgccacaccgcacaccctccgccactcgttcgcgacggccttgctccgcagcggttacgacattcgaaccgtgcaggatctgctcggccattccgacgtctctacgacgatgatttacacgcatgtgctgaaagttggcggtgccggagtgcgctcaccgcttgatgcgctgccgcccctcactagtgagaggtag

SEQ ID NO: 328729 - DNA, 291 bp, Pseudomonas aeruginosa; identical to SEQ ID NO: 328687

SEQ ID NO: 328730 - DNA, 303 bp, Pseudomonas aeruginosa
atgatcatcaagttgtcaccgtttgctccgctgccgggaagcgacgagcgcctgtcactgagcagggctggcgatgtactcaccgtgaacggccaggcgttcgacttcactccgctcccggagggcggcgagttgccgaccgaggccattggatcggagttattcgctggtcctgtggcgcgaaggaatggccggctggaactaaccctgcggttcccgctggccgctgatgccagtgccgccgctcgcttccctgaaccgttgctgatcgaggctgatggacctgtggagttaccgcgatga

SEQ ID NO: 328731 - DNA, 672 bp, Pseudomonas aeruginosa
atgattctcgacctgcatgggttcggcgagcaactgctcgccggtacctggatgaccctcaagctgtcgctggcggcggtctgcgtggggctgttgctcggcctcctcggcgccatcgcgaagacttcgaagtacgcggccctgcgtttcctcggcggcacctacaccaccatcgtccgtggcgtgccggaaacgctctgggtactgatgatctatttcggcacggtgagcggcctgaacgccctcggcgaccttttcggcaagccggacctggcgctctcgccgttcgccgccggcaccctggccctcggcctgtgcttcggcgcctacgccaccgaggtgttccgcggcgcgctgttgtccattccgcgcggccatcgcgaggccggccaggcgctcggcctgtcgcccggacggatattctggcgggtcgccctgcccggcctcggcaacctgtacctgatcctgctgaaggacaccgcgctggtgtcgctgatcaccctcgacgagatcatgcgcaaggcgcaggtcgcctccaacgcgaccaaggaacccttcaccttctacatgaccgcggccgccatctacctgagcctcacggtcgtcatcatggtcgccctgcacttcctcgaacgtcgcgccggccgtggtttcgtgaggaacgagctatga

SEQ ID NO: 328732 - DNA, 234 bp, Pseudomonas aeruginosa
atgagccgcagcttgttcttccgcgccatgcggagagttcctgttcggccaagagcgctcattgtcctggcgatcatgatcgcctttggctgggtgccgcttgttgtggctgtatgcgaggcagtcggcgaaggggttcgggcctgccggcaggaatcgtccaggctctacggcgacttcagcaaagctttcaccgactgctggaaagccttggtttcgggggagcctcaatga

SEQ ID NO: 328733 - DNA, 252 bp, Pseudomonas aeruginosa
atggatgctccgcttctactgaagaacactggcacgtgcctaatcttatgtgacgctaacgggaaaccgcttcctggccagctttccttgagcatcagcaacgacggtctcgtgccagcggtcacggtcacgttcgcactcgacaatgagcgtgtgaggctttgcggggaaggagtggagtcgaaagagccgtgtatcgagccgtttagctgggacctggtggccggcacacgcgggaaaggacaaatctga

SEQ ID NO: 328734 - DNA, 1290 bp, Pseudomonas aeruginosa
atggcctctaataaatccaaaggtgtcgccattttccgtgtggtcagtggcaacttcctcgagatgtacgacttcatggtgtatggcttctacgccaccgccatcgccaagaccttcttccccggcgacaacccgttcgcctccctgatgctgtccctcgccacctttggcgccggcttcctgatgcggccgctgggtgcggtgttcctgggcgcctacatcgatcgccacggccgccgccagggcctgatcatcaccctcggcctgatggccatggggaccctgctgatcgccttcgttcccggctatgccacgctgggcgtggcggcgccgttgctggtgctgttcggccggctcctgcagggtttttccgccggcgtcgagctgggaggggtttcggtctacctgtcggagatcgccacgccaggacgcaaaggcttcttcgtcagttggcagtcggccagccagcaggtcgcggtggtcttcgccggcctgctcggcgtgctcctcaaccagtggctgagcccgcaggacatgggcgaatggggctggcgcgtgccgttcttcatcggctgcctgatcgttccggcgctgttcgtcatccgtcgctcgctggaggaaacgccggagttcgaggcgcgcacccaccgaccgtcgctgtcgcaggtgctgcgctccatcgggcagaacttcggcgtagtgctggccggtaccgcgatggtggtgatgaccaccgtatcgttctacctgatcaccgcctacacgccgaccttcggcaagaacgaactgcaactgtcggacctcgacagcctgctggtgaccatgtgcatcggcctgtccaacttcatctggctgccggtgatgggcgcgttctccgaccgcatcgggcgcaagccattgttgctgggtgcctccgcgctggcactgctgaccgcctacccggcgctgtcctggctggtccgcgagccgagtttcgccggcctgctcggcgtcgagttgtggctgtcgttcctctacagcagctacaacggcgcgatggtggtggcgttgaccgaggtgatgccggcggacgtgcgcactaccggtttctccctcgcctacagcctggctacggcgaccttcggtggtttcaccccggcggtctgcacctggctgatccacaccctggacaaccgcgcggccccgggcatctggctcagtggcgcggcgctgctggggctgctcgccaccctggtgctgttccgccggcgcggcaaggagatcgccgaggccgagctggccaacgcctga

SEQ ID NO: 328735 - DNA, 1041 bp, Pseudomonas aeruginosa
atgcccaaccaacaacgccccgtcctcaaggcccgcctggagcaactgatcgccctggtcggcggcctgatggcccgctatccgcgcaccatcgccctgttcggcttctgttcgggcgtgttcagtttcatcatggtcgaccggcagaagggcttcgcccaggtgctggcgatcatcatgctggtcagttgggtctggttgatcctcgagaacctcctgcgggagaccttcgcccgccgcttcggctgggagatcccggcaccgctgctgcgctacgcgacccaactgatccaccaggaaagcctgttcttcgtcctcccgttctttctcatcaccacaacctggaacagcggccaggcgctgttcacagggacgctggccgccgcggcactgatctccatcaccgatccgctctactatcgctggctgtccaggcgtcgctgggtgttcctcgcctaccacaccctgaccctgttcgcggtgttgctgacctcgctgccgatcctgctgcacctgaccaccccggaaagctaccggttgtcgctgggcatcgccgtcgtgctgtccttccccagcctgctcgtgaccttcccgctacagcactggtggcgcggcttcctgcttctcggcctgaccctggcggtgggcctggccggatggttcggccgcacctgggtaccgccggccaccctgtggctgaccgaagtggcggtgagcagccagttcgacgaccagagccgcacgcccggcgacagcctggagcaggtcggcgccgcccagttgcgcagccagggcctgttcgcctataccgcgatcaacgcgccgcgcggcctcgacgagcgcatctatcacgtgtggatgttcaacgggaaggagttcgaccgcatcgccctggatatccacggcggccgcaaggagggctaccgggcctggacccacaagcagaacttccccggcgacccggtcggccactggcaggtgaaggtactcaccgaggccggacagatgatcggcaccctgcgcttcgacgtcacccagtga

SEQ ID NO: 328736 - DNA, 591 bp, Pseudomonas aeruginosa
ttgcgtgacaccgcccgcagcggggcatggccaggggaccgggatgcgctgggtgaggtcgatccggcgggttccaggggtacagggagtacctccttcggggtcgggccaggcgaaaacgcgccggaggggagccaccgatgtctcgctgccttccggcgcgcttctatatatagaaggggtacgatgctccgccgtccggcggagcgtcggcttccgcagcgatactccgcgaacttccctgatatcgatcaatgcctgtggatggcggagtcgttttacaatcgaccgcccgcgcgttccgaggcgccctcccagaagggctttaccgcacggttatccacagaatgccgcttatccacagccagcgatggcgtgccggacggccttgcgtgtcctgcgaccatccatcgcagcgatgatgagcgactttcaacttcccaggatgggcacgaggctcccgggccttgcacggagtgccttccgctccctgttcttgtacgaaaatcaagggcaatttcctgtgggacggacgtttcattagtgatttctcatgccgattcggcatggggcagtcacttacggcattag

SEQ ID NO: 328737 - DNA, 1350 bp, Pseudomonas aeruginosa
atggaaaccacttccgaaaaacaggggcgcatcctgctggtcgatgacgagtcggcgatcctgcgcactttccgttattgcctcgaagacgaaggctacagcgtggccaccgccagcagcgcgccgcaggcggaggccctgttgcagcgccaggtattcgacctgtgcttcctcgacctgcgcctgggcgaagacaacgggctcgacgttctcgcccagatgcgcgtccaggcgccatggatgcgcgtggtgatcgtcaccgcgcattcggcggtggataccgcggtcgatgccatgcaggccggcgcggtggattacctggtcaagccctgcagcccggaccaactgcgcctggccgccgccaagcaactggaggtgcgccaactgaccgcgcgcctggaggccctggaggacgaagtgcgccgccagggcgacggcctggaatcgcacagcccggccatggccgcggtactggagaccgcgcgccaggtagcggcgaccgacgccaacatcctcatcctcggcgaatccggctccggcaagggcgaactggcacgcgccatccacacctggagcaaacgcgcgaagaagccccaggtcaccatcaactgcccgtcgctgaccgccgaactgatggaaagcgaactgttcgggcacagtcgcggcgccttcaccggtgccaccgaaagcaccctgggcagggtcagccaggctgacggcggcaccctgttcctcgacgagatcggcgacttcccgctgaccttgcaacccaagctgctgcgcttcatccaggacaaggaatacgaacgcgtcggcgatccggtgacccgccgcgccgacgtacgcatccttgccgcgaccaaccgcgacctgggcgcgatggtcgcccagggccagttccgcgaggacctgctctaccgcctcaacgtgatcgtgctcaacctgcctcccctgcgcgaacgcgccgaggatatcctcggcctggccgaacgtttcctcgcccgcttcgtcaaggactacggccgccccgcccgcggcttcagcgaagccgcccgcgaggccatgcggcaatacccctggccgggcaacgtacgcgagctacgcaacgtgatcgaacgcgccagcatcatctgcaaccaggaactggtggatgtcgaccacctcggtttcagcgctgcgcaatctgccagcagcgcgccgcggatcggcgaatcgctgagcctggaagacctggagaaagcccatatcacggcggtgatggcctccagcgcgaccctcgaccaggccgccaagaccctcggtatcgatgcctcgaccctgtaccggaagcgcaagcagtacggcctatga

SEQ ID NO: 328738 - DNA, 426 bp, Pseudomonas aeruginosa; identical to SEQ ID NO: 328663

SEQ ID NO: 328739 - DNA, 282 bp, Pseudomonas aeruginosa; identical to SEQ ID NO: 328664

SEQ ID NO: 328740 - DNA, 2052 bp, Pseudomonas aeruginosa; identical to SEQ ID NO: 328665

SEQ ID NO: 328741 - DNA, 1548 bp, Pseudomonas aeruginosa
atggataaacacgtggcaatcagaagctgggaggcgatgcctgaattgcctgccgtggctttgacgcggtccggtgttgaattatatccacgcgaagatagatgggtttaccgtgatacaacgatggccatgagcctgaactttgctgcttggcctgcgacagcgtcgttcgttacgtcggcgaaactcacgctgctgtggtatgcagggcatatgtcgccatcgcacgtgaaaaatatgtttgaacggctggggcactatgtgaggaccatgtgcgccggtcgggatgcccctttagcagaaataagtagccatgaccttatcagctatagggctatgttgagcgacaacacgctatggtatctaggaaatatatctggcttattgcaacggtggcgcgccctcggatacccaggagtgactgctgatgcagtttcattccttaaacagattcgagctagaggtaaccgaaagggagaggctgtactaacacatgatccattttacggcccattcacagacatcgaatggggggctcttcagtcggctctcgatagggcttattctgatggcgaggttgatagagaggtctatttattaacgtatctgtttatggctctcgggcagcgttctgtacagtatgcatctttaaaagtgtgtgatgttggagtcgcatccgctcaggacggcacagttatctatacgcttcgagttcccagggcaaagcagcgtaatcagttatctcgcgtagagtttaaagatcgagtgcttgtttcacatgtcggtaaacttttggtgcggcagcgggatgatgtttataggaagttcaaacggcgcctgtcagacccatcgaaggcaccgttattccctgcaaggcgccaatccggtagctgtccagatggatttgagtatcaccgcacgggaccttcgctcggtctcatgctgcgtgttggccttaataagttatctgcgatgtcagagcgcacgggacagccgttgcacgtcaccgccgtccggttccgtcgcaccatagccaccagggcagcaatagagggtcacggagaactgattatcgctgaactactggaccacactgacacgcaaaatgttggggtttacatagaggcgcggcctgaaattctggagcggattgatcgtgcgttggcattgcaacttgcgccaatggcacaggcctttgccggaatgattatcccagatgaatctcatgccagacgtgccggtgatccgagcagtcgggtatgcgacccaagattcgatccttcgatgaagcccatgggaaattgcggaaaacatggcttttgcggattttccgcaccaattgcttgttacacctgcgtcaatttccagccttgggtggatggtccgcacgagaatgtgttggagttcctgcttggggagcgtaatcggcttgcgtcacaaacggacatgcgcatcgcatcggtgaatgatcgcactatcctggcggttgccgaagtggtacgccaatgtgatgaagtacggagcggaaaggcggatagcaatggctga

SEQ ID NO: 328742 - DNA, 1278 bp, Pseudomonas aeruginosa; identical to SEQ ID NO: 328667

SEQ ID NO: 328743 - DNA, 477 bp, Pseudomonas aeruginosa
atggcacgaggcgtcaataaagtgattctcgtcggcaacgccggcggcgacccggaagtccgctacaccccgaacggcaacgccgtaacgaacataaccctcgccaccagcgaaagctggaaagacaagcagaccggccagcagcaggagcgtaccgagtggcaccgcgtggtgttcttcggcaagatcgccgaaatcgcgggtgagtatctgcgaaaagggagccagtgctacgtcgaaggcaccctgcgcacccgggagtgggaaaaagacggcgtgaaacgctacaccaccgagatcgtcgtcgaccaggtgaacggcaggctccagctgctcggcggacggccttccggagacgatggctcgcgtgctcctcgtgaaccacaacaaagcccgcagcagcgccccgccccccagcagccagctccacagccggcccctgactacgattcgtttgacgacgacataccgttctag

SEQ ID NO: 328744 - DNA, 438 bp, Pseudomonas aeruginosa
atgagcagcttcgtcaatgtcattttccgattgcccgaggatccggccgaggcccgagccttcttggactccatcggtgaagccttcgagaacgacaagcccctgcagggtgcgctgataagctccgcctctctacttccccaggacggcagggtaatcgccttgccccctatctctgcgcctgaccagctcgctcccggcctgcaggtagcaggcacgatattccgccagatcgcgcaagcctaccgacgcgaccatgagcgccttgtggcagcaggcgctgacccacagagcaacaaacacctgctggacgccgagatgatcatccgcatcgcgctcaagcagatgaaccaggagaccgaacgtctcctttacaaggcatccggcgagcacgctgaggccgaatcttcctccacctgtccttcactcattcgatag

SEQ ID NO: 328745 - DNA, 684 bp, Pseudomonas aeruginosa
atgaagccctccagccagaacgctttcactcaccgcgaactttgcgacatcgcggtgaagtggcttcaacggccgaacagcgccggcggccctggctgccacattgccgtcagcgaatgccgcacgggctggaccggtgaaatccccgacgcaatcggcttccgagcagctggattcgaagacggatcaacagtcatcgaatgcaaggtcagccgcgccgactttctcgcggatcaccggaagtcgcatcgcgtttcgggtggcgttggcaactggagatacttcctggccccggccggcgttattcgcacggatgaacttcctgaaggatggggcctgctggaggtgaatcgacgcggccacgtcaaagctctcgccggcgtggcaaccttttaccgacgcggctacggcgagctgcgggaacagaccgccgcatggcatcacgacgccgatcgtgaccgcgagcagttcctcctggtgaagctcttgcatcgcgccggcaaccctgaaacagccaatcgcaaactgcagattgcctacaccgaaaatcagcgcttgaagcaacgcatcaacgatcttgccgaggagattcgcacgatcaggttgccgcgcttctcgaaacagctgccaaaccagcgggcaactcctcgatcaataacgccccgtgccacctgcgaattgtga

SEQ ID NO: 328746 - DNA, 537 bp, Pseudomonas aeruginosa
atgaccctggcatttgttcctgagcagcagcttcggctgttgcaccacacgctggggcttcgtcctgaccagcgtaaggcctgtcggaaccattacttggccggtccaggacattacgcgatgcaggatctggaggcgctcgtcgaagtgaagttgatggtcaccggccgaacgccggccttctgcgacccaaccgatgtggtgtaccacgtcaccgccgaaggcgagcggtatgccttagagcatctgccgctgccgccgaagaaaacgaagttcgatcaatatctcgagtgggattcctgcgacagcttcggtgaatggctgcttggcgggatgaagccgaagttcgaatggcgcggaagttgggggacgtttgagtaccgcatgtaccgctgtcggcataacaaccaacacccggaagtgaagggagaatggtgccggaccaagaaggacgcgaaggcaagctacaagatcgccctgcggcagcaccacgaaacaacgggcctgcggcgcccgacagtgcggacagccgcatga

SEQ ID NO: 328747 - DNA, 231 bp, Pseudomonas aeruginosa
atgtccagtaacaacgccaacggtcgtattcgctatttcgtcaacgacacctcgcgcaagacgctcgcaaccgcaggccgcggcccagcgcggcaagccctggaagaaggtttccgcgaggtgacgcaggagcaataccgccagttcaccgaagagaatgcccgcctgctgcagactgtcctcgcgaacgtcaccttcaccgccccacttaaggaaggagtggccgcatga

SEQ ID NO: 328748 - DNA, 2070 bp, Pseudomonas aeruginosa
atgactgcctacattcaccccaagatccttacccgcgagattcgccatttccacctgttctgcgggctgggcggtggagctaaagggttcaacaaagccaacccccgcgtagggaacctccaaggcaagttccgctgcatcggtggcatcgacgtcaacgcggcagcaatccgggatttcgaacgtctcagcggatctcgcggaaccgtcctcgatctcttcgatcgtgaccagttcaaggacttccacggcaaagagccgccgcgggaatggtgcgaagccactgcagctgatatccgccacgcggccggcggcgagtacccccatatcgtcttcctctcggccccctgcaaagggttcagcggactgctgtcggaaaaccgcagcaagaccgcaaagtatcaggcattgaaccgtctcaccctccgcggggtatggctgatgctggaggccttccaggatgacctcccggagctgatcgttttcgagaacgtgccccgcatccaaaatcgtggccgccgcctgctcgatcaaatcgtgcaactgctgcgccgctatggatatgcaactgccgagaccacgcacgattgcggcgagctcggcggcctcgctcaatcccgcaaacgcttcctgctcgtcggccgcaacatcaataaggtgccggacttcatctacgagcctgagaaaaagtcgctccgctccgttggcgatatcctgggccgtatgcctctgcccggtcatttcgacggcggcccaatgcaccgcgtaccgaacctgttcttcaagacctggttgaggctggcctttgttgaagcgggcaaggactggcgatcgctgaacaggctgaacgtcgaagacggcgtgctgaccgactacctgattatccccgaacagacctggcgcgatggtgcacttggggtgcaccgttgggactcccacacaggaaccgttaccgggcgtgccgaagccaccacgggccgtttcagcgtagcggacccgcgccgcttcgacgcgatgcacaacggcgtccttggggttcgcgaatgggcggatcactccggcacagtcacgggtaattcccggccgatgactggcgccttcgctgtcgcggatccgcggccggaaagcaaagctgagtatgcgcaatacggcgtgatgaagtggggtgataccagcggcactgttaccagccagcgctcccccggtcaaggaaccttcagtgttgcggatccacgcttgggcggcgttcgccacaacaacatctaccgcgtagttcgcatggaccaagctgcggggaccgtcacaggcgggcagtcccctacttccggcggtctcgcagtagctgatcccagaccaggctggaatcgccacagcaacaacttggcggtcctggagtgggagaaaccttcgtcaactgttatcgctggcggcaagggtgtgcagggtggccaactctcgatcgcggatcctcgctacaccaattggcaccctggagccagcagccgcaagctagctgtaacccactgggacgaaacctcaggctgcgtcatcggcgcccagcaagttgcctcgggcgcactggctgtagctgatccgcgcccgggcctggaccgcaagaaaggcgacaactacttgaccgccggccactacggcgtgatcccgtgggactcacctgcaggggcagtatccgcagcagctggccacgacaacggctcttggtcggttgcggatccgcggatccccgcagataacgagcgcgtcgtggctcgcatcatcgcacctgacaacacctggcatcgccccttcaccacgctcgaattgtgcgcgctccaaagtttgatcgagccggaggagtacctggaactcgacgggctctccgatggtgactggcgggaacggatcggtaacgcggtaccaccggatgcagccgaagcgatcggcgaggccttcggcaccaccctgctcctggtctggagcggacaaacctactcaatcggcaaaaccccaatctgggtacgcaacagcctcgctgcgctgtccgttgcccaaggagatctcaatgtccagtaa

SEQ ID NO: 328749 - DNA, 933 bp, Pseudomonas aeruginosa
atgttcttctctaacctgttgctttaccgcctgacgcaggacctcgcgaaagatctcggaatcgatggcgaatcgctcgcccatgcgttgaagtcgaagccagctcgcgcctgcggcagccaagaactcactacctacggtttcattcctccgctgggcaaaggtgaagatgctccgctcgtgcacgaaagcggcggcttctacctggtcgcggctcggaaagaggaacgcatcctccccggcagcgtcgttcgtgacgcattgaccgagaaagtggaagagatcgagaccgcacaaagccgcaaggtctacaagaaagagcgcgaccaactcaaggacgaaatcgtccaggcgtttcttccccgggcgtttatccgcaaagcaactacctacgccgcgatcgctccagccttgggactgatcatcgtgaacgagtcgagcgccaagaaggccgaagatctcctctcgacacttcgcgaggctgtgggctctctgccggttcgaccggttgcggtaaaggtagcccccagtgccaccctgaccgattggctgaagaaccagcaggccagcgaaggtttcttcgtcctggacaactgtgagctaagtgacacccacgaggaaggcggcaccgttcgctgcaagcgtcaggacctcaccagcgacgagatccagaaccacctttccgctggcaagctcgtcacgcggctgtcgttggcctggagcgacaaactcagtttcaccctggacgaaaaacttaccgtccgaggtctccgcttcgaagatctgctgcaggaacaggccgagcgcgatgggggcgacgatgctctgtcccagctcgatgccagcttcgttctgatgatgctcaccctgagcgaattcgttccggagctgctcgatgccctgggcggcgaagaacagccgcaggggatctga

SEQ ID NO: 328750 - DNA, 285 bp, Pseudomonas aeruginosa
atgaagctttcgcagcttgccgggctctggtcgaaggacaaggggtttatccagttcttgaacgaagaatccgatttccgttcggaaagcacgccatttggcctgaatagtggggatcgggatcctgctgacctgatccgtgccaaatgctcgatttcttctcgccgggaactggacaccgacaaggcagctgctgcgatcttcaatcgcgaatttcgtcacccatacatggcttgggctgcaaaaaccagtcggactcggcaagccatccgcacatcgctttag

SEQ ID NO: 328751 - DNA, 279 bp, Pseudomonas aeruginosa
atgagcaaggctgtgcttgttgggcttgtcgccgagaaacacgggttaaccaaggcagaagcagcggaaatcgtgaacaccgtgctttctggtatacagagcgcgttggtcagtcaagggagtatttccttggtcggtttcggcgtgttcagcgttgtcgaccgggctgcgcgaaacgggcgcaatccgaatactggtgagcctgtgacggtggcagccagaaaagcggtgagattcacccctggggaaccgctgaagcgtgctgtgaacgcgcagtaa

SEQ ID NO: 328752 - DNA, 867 bp, Pseudomonas aeruginosa
gtgggggtgctggtgagccacagacggccgaccgaggaagcctatgcagagctgcaggctgcctacgatttttacaacgaccatttgttcgcaagccaagagcggctaccggcgtgcttgatcacatatcagcgcgaaaagcggaccatggggtacttctctcaggctcgtttcattcgccgcgacgggatcaaggcggatgaaatcgcgatgaatcccgactacttcgcagtgattcccctggtcgagatcctgcagacgttggtccatgaaatggtgcacctctggcaataccattttgggaagccaagtcgagcctgctaccacaacaccgagtgggctaacaaaatggaagctctgggcttgatgccgtccgacacaggcaaacctggcggcaagagggtagggcagtcaatgaacgactacgtcatacctggcggtcgattcgatgtcgccacccgggagctgctgaaaagagggttcgccatctcgtggatggaccgattcccggtcgacgtgagggggccgtcgcgtccgatgtcgcttatgccggcgtcgctgatgcccccggcaagccaggactaccagggcgacgatgatctggacgccggcgtagacgaaatagctgacgagctggatccggctatcgctctggcctatcaggcccctgcagcagcggcgagtctcgatgtgtcagtgaggcaacccggtgacaggagcaacaggctgaaatattcctgcccaggctgccgcctaaacatgtggggcaagccggggctgaaagttatttgtgaggaatgcgaggagcgtttagtggtcctggagctgtgtgcagactctgctgaggaagcccttgctgctgattga

SEQ ID NO: 328753 - DNA, 351 bp, Pseudomonas aeruginosa
atgcagtatggagcaactcaagagttcaccttggaaaccgcatcgggcgttttccatcaggccggcatccaaatcatgggggcggacacctggtgtccgctactggccgagaaggccaaactgaccgttgagaacacggcagtgttctatacccgtcttgcaggtcctgatggcggaccgaccgagcaactgcgcgagttgctagagcgttcgttggcgttgatctgttctgacggagctgatccggtgattcgtgttcacctgcaccgcggcgaataccaagcgctggatgctgctggtttccaggcggtagtcgggtctggcgtcgccgttgtcgagctcaatgattga

SEQ ID NO: 328754 - DNA, 201 bp, Pseudomonas aeruginosa
atggctgacagaatgactcctgagcaattcaagagcgagtaccgccgcaaggggtggacggggctagcactcgctgagcgctggtcgttgtcgcctgcctggatcagcaagctcggcaacgatcccgatcgtgaagcgcactgggatgatgctgtccgaggcctcccgaccattaaaaaattgaagtccagttcaaaatag

SEQ ID NO: 328755 - DNA, 1650 bp, Pseudomonas aeruginosa
atgtacgacgttgttatcgctcgcgaagcctgttttctagacaagtccatttcgcggggtgaggtcgtgtcagtccaccgcgacatggtcgctgccatgactgcccgggacaagttgaacaagcgtaagcgcgctatccatagcgagagcgcgttcatcgctgtacattctgaaaatgcgcttcgcaagggcgagatcgttgagcagctgatcgatgactacgaccgcgaacaacgtcgtgccttttgcaagcgactgatggctgcgattctttcgatggagctgacgggtaagcctgaccggctggccgatgatgcgggttactacctgcagcaggaagggctcaccctggaagagctgcgcgagcgctacgaacaggaagttcgcgaggagcaccaggagcaggtgctccagcagcaggaggccgcgcatttacgggcacgcgggtacgaagcgcagaaggccatcgatattatccgcaacgagccgtgtttctccgtgcctgcagtccgcggcgtgcaggcacgtggcgagttctacttggcccagattccctatccgatattggcgaaactcttcgtcttcgacgaagaagaggcggtgccggcggagctcagggcgcagcgtgccctcaacaaaaaacgggcagaggacatcagcgaatacatgctggccaaccgcgacgagtacgtcctgccggctttgacggccagcgtcgacatcgccatggccttcgaaccgttcgagggggttcctcagctcggcatgctccacattccgatgagcgcgaccatgttgatcaacgatggccagcatcggcgctacgcgatcgagctggctctcaagggcgacaccacgctgcagaacgagacggcaccggtccaaattcatttcgaccagggtctcaaacgctcgcagcagatattcgccgacatcaacagcaaggcggtcaaaccatcgtctgccatcaacgcgctgtacgaccaccgcaatccctacaacgcctggatccagcagctgcttaacggcatgcccaacatcaagaaacgcatcgacttcgagaacgcaactcctgggcagcgctcgtacaagctatggagtctggtggcgttcaagaagttcgttaccctgctcactggtgtcagtgagcgaaccatcggccttgccgacgaagcacgcctgcagggcatcgcggaattggtgcaccaattcctggaagagtgcggaaaacatctgcctcaatgggctcacatggtcagtggcggcattcccgcagctgatgttagggaagtcatggtgattggtcatgcagtgtttttggaagcgctggggatgtttggtcgtgaggcactgttcgcgggcacctatctaacgccgatcgatcgcgatgcaaaactcatcgaccccagccgcgcccgatggcactcaatgcagcgattggtagtcgtagatacggacaagggcgcggccatgtgggaaaatcgttgcgtggtcctcgggaagatgcagaagaccactgacggaataaaagcaactgcggcaaaactacttggaattgctggtgttgcactgacggacgatctggcttcggtagatgatcgggtcgagcgggctaaggagatgacgtccgcaaggggaggaaattcataa

SEQ ID NO: 328756 - DNA, 6081 bp, Pseudomonas aeruginosa
atgccaacctggatcgacctttctgaacatgatgtagagctaaacgtccaacaagatccagaaggcaagtcgcttgtcctgcggtcactacctgggggagtgatcccccagtcggtaacggagctgggcttcgagaaagttggagccctctaccgacgcaccaacctccgcttcaccttccccgaaatcatccgccacttccccaaggccaggtcgcgccagatggaaatgtcggagatattctacgttcccaccccgagcaatcttgaagctgtttcagccgccgcgggacaaaacgccggcgtcgaaaaggccccctggcagatgagttcggcagagtggatttccgctcgacgcgagctcgccacgccgatgaaggtttccgcgagttccgaatctgttcggattggcaggctttccgagctttcctacggtgttgcggcatggcggcatcagcgtgcgctcgccggcgaccgagaggccatcgcggcgctggaagaggccgtaacgcattacgacgtggtgatgaaagctctctcggagggcaagcaggtccctttcgatgtggttgccgagtacccctcccttctggatccggagccagatcagtcacgcacaatcgctgcagctgcgcctgaacagtcacctgtcgcagctttcatgcttccgtcaatcaaatcggcacgtaagcgcactggccctgcgcgagtcgtcaaggctcatgaggtggccaagtttggccgtcgcggcatggtgtctgagtaccttgtggtcttccaggacggtcgcttcccctgcagcgttgaggcgctcgaccgaaagcaggcgatcgacttcgcccaagctgagcgccgtcgtctcgataccacagagcagccggtagatgcctcttctgcagcacctcatcctcaagaccagatccaggcaacatcgatcgatgacgcttgggagcccgagcgcgttggcgctgctgcggacagcagctcgatcgagcccgcagaggcatggctggtatcccaacatcaattcaagacggtcgcggtggccaagaggacctcggacggaacagtggaggtccatttccgtaaccagtcattcgcgacagaccagactagccccgccaaagcgctgaccgcagctcacaagcaggcagttcgcgaggcattcgccaacggcaagcaaataccctttcacgtcttggtcgactatcccgatgtcgcctacggcccaggcgaacgggcagcccggtccgtctctaagctgctatctgaggctggcctggcagagcggctgatgacgggattcaacagctacgtccgactcgtcaatccgccctacacggatctcattatcgagcggctgccggcggaatcgtcgccacgtctctgcctcactcactacctggagtcgaacggggatcgtttcatcgatagcgaaatgattttcgagatacgtcccgccggtcaccttgtcctgtgcgagaccgcagtgcagaacccgatccgcggcggagaactgcggggccttgaccgcagcttcgcgaacatcttcgcccagaacctccttcagcaggggttctccagttccagactggaatggtcggatgatgccgatgaaagcctagaagacggccccgagaatcgccttcacgaggggatggccatcgttgaaaaactcgccgccgaattcaacgcggaagtctcaccttgggaggagtctggcccgtccaccattggcaaatggcgctacaccacactggtccgcgaagaagtgtctgtccgtatcgctgtgtcccaagggggggtggtgcaggtcaacggcgatcccttcaccaaaggtgaaagagttctccacgtagcggcggaggccgtcagggagtccctggttgactccttcaatcttgaaagcacaggcgcaatctcctcgcccgtccagctgtccccttatgaactaggtcgacgggctgcagaacagggcatgaagtgcgttccagcctgggataaggatctgatggcaacgctggggggcaacgtaggcgatggcgtacctgcgatgcgcgaatggatgaagggctggcacgagatcaatgcgcagcgtgaggtactgcctcggcctgaaacgaccgccgatgcagagccagctgatatcaccagatcacgcattttgctgcgcttgccatccaccgcccccaccaggctccctctgtacgggatcaacacgaggtacgaagctacgcgctattcgctccccggcgatttttacgctgagacatccttcaacggctaccggttcttcgccccggccgagcactatcgctcggccgatttcagcagagccgagcgcgacttgtatgccgctcataagcgtggcgaccacaatgcagtcaaatccgcccggcaactcatggcctcggaaatgacggagatggtcgccgccgcacgggctacattgccacaagatgagctcaccgcgagcacaatgcagacgggcgatcgagtccgcttcactccggccgatgcggcaaagcagccggtcacaggggtggtgagcaaggttctggaaaactcggcgggtgacaaaggcttcgagctaattcgggatgcggccgaagcgatggtggaagtcgagacgtgctgggtagctgacggatccctgcagttcctgccgcccgcggatcctgtagaagcatttcaagctgctctggcggtggcgaggaaggaggtcgaccccaagcgccgggttcaggcactcattcgtgttctttgcgctgacagaggagttgtgtcccaaggagactgggttgcccagctcgccttcagcgccgacctgccgacggaccaggcccagctggtgacgctcatggagaaacatctaccctctcccgcctcattcaacatagccgtaggtctggaacaatttcaggatatacccagcgagcccaaacggctggcggatgcggtgaggcgactgggtgataacctccgggggttcaaagccagccatctgcgaaaaactgcagcgcggatcgaggacttgcgcaccatcgcccctgagaacgcgctggccatcgagatgctagaaagtgctgcaaccaccgtccaccaagcggaaagcatcctggtggacctggagaccaggatcgcggcagccaaggccgaagaggaggagcgcaactgggaacggttcgagccattcggggcccaagccgtgacgaaacctctagcgtcggaaatcggtttcaccaaagcatggatagacaaggataacggctggttccaagtccggaacggagcttctgtcgcttggaccaacggccacgtattcgatttggaagaaccgaactaccgcggcttcgagaagaacgagagccgtcgcttccagaatacgcctctggcgaaacggccggacatcagccgttttctggagcatgagaccgctgacgcgatgaaaccggtcttcgtgtaccgaaggatgcacaacgacaaagatgccgtgatcctagcgaggtcctcgggccgcctcgtttcactcgacaagcgctatcacgactacattgcggtgaagtacccaggggccgtgttcttcgtagccaatgactgggaaatcgatgctccgaaccacggctctcttgtgcatgcgaaattggatggccaaatcgtcgccggggtgatgccgctacgaggattggatccggcctacacggtcgacctcattcaagccaagattctcgctgtcacccagaagggggcagtgggcgaacaggactcctccgaggtcgagaacctggtgtatgaagctgaccagcgggtaaagggccgggcgatggccaccgcaatgatccaggttgctttggacgagggccgttggtacagcgcgatcacaactcatcaccaccagggtaaccatagcggccgatcggagccgatgacttgccgaggggacgggtttacctctcgattcgacgccgtattctatgccggcaaccggatcgtcctggaacagcgtcggatagctcgatcacaggacagcgtcacaacgcccagacagaaggccgaagcgctgaaaatggcagattgggcgctgcagcaaatcctcggcgaggtcgctgtctcgtggaatgaccgcactccaggacagggatggtacgaggctcgccgtgaaggtcctgagtactccgagctgcgcggttccggcctatcggaagcagacgcactggatgaccttcgagagcgaatcgaggcctcgctcagccaagcagatcattactggaagtccattggcagcaacgacgccggcgaatttcttgaagagaacaccctgggtattcgcagcatcgtcaaggagggtgtgcggatcaccgaacctgccgccgcgttaccgcacggaggccccggcgttctgcaagatcgtcccaagaatttcctgacgaaggatgaagcggctccatcggcgctggccacgtcgccagagagcagggcggccccgggagcgacgcataaggtcggtgacctactcgacaatgcaacggtccacgtgctggtccgtggaacagctgtctccctcattcaccgcaagctgtcgaagtatgacccccgccgccaagatggcggcacggattgcttctgggcaagagcattcatcggcggggaatggcgcccgctcgggcagccctggcccaaaaaaccgagtaagtcttcgcttgagaccgccttggctgcagcggcatccgccccagcattcgacagcgacgccttcttcgtccaactgaatgaggatatccgccaggcgaacctcggcgccgacagcacagccgagatccagcctcttgaccagagcaagttccgggcacagcgcctggacgatcactcctacgagttgggcttcaaggaccgcgcatcgccgttcttcatcctggtggaataccagtcgcctggcacctacttgccgaataccgaaggaggtgtgaccggccccaaaactagcctttcatccgcctgcgcatgggcagttcgcgaactggaccgcctgcaagcccactacgagcgtagactgcaggaacagaacaaggacaaccctcgatttgatatcgacgcaactagcttcatggagctcttcccggccgacagcgatgaccaccagctgctcgaccacgtcctgcagatgtaccaacagaaaggcatgcagcgccgcatcggccaaggccaacaccaggatgcagatctgccagcggagcttcagttgatccgtaccaccgagcagtcggttatggttaggctggacgatcccgactgccctcattcgatcgagctccgctgtgctgtcgaagcatccggacgtcggccgtgggacgcactgcaggccatccagcaggctgtcgcagcactacagacagaaacagcctgggcgaggttgaagaatgagcgaggcgacgccggcatcgaaatggagcgtgtcgctcaaggctatgccgagttcatgagggcgcaggatccggatcgccacagcgggatccccggccggatgcaccgcgagtttgccttggcgttgatcgacaaggacatcgatcatttgttgggctggctggctcggccgcgggggcaaaacgatctatctaaacgctacttcacacaggtaacaggcatcaaactagccaagactgccaaggagatcaccgtagcgatctatggatgggcaggctactcgcccgagcaggccagccagatagaagcggaaaaacaacgtcgtcgcgacgcagccgctcagcaacgcgctgctgagagccacctgcagcacgttctggctcagcttgatcgcacgcactaccgtcacaacggaaacgtggtaaccgctcgccagttcgtcgacgacatcgttgccgacggcttcgactcattggaggcgaagcgagtgggcgccgtcgatcgctatcggttggtcaatcgtgccgaggaccggctgtacgagatatccggccacctggtcgactatgcacgacatgtgcttgctgaacgtgggaagcgattgaatcttgaggcggctgaagagccagctgcagaaccttcccgcccgcgcctgggttga

SEQ ID NO: 328757 - DNA, 621 bp, Pseudomonas aeruginosa
atggacgaacgacatgatgtcttgcttgtcggggtgaacaccgacaagcacgaagcatacgccctgaagcgggacaaacagatcgttcgggtcgcgcaaggggtttacttccggacgggaaaagatgccgaggtccttttcgagctctatggcatccgcctggcgaagttctgcttccaaagcgccgctttgacgcactccaccgcctggtaccgcaaacctgtggacgggcgagtttttctgggaggtgactacccatacaagaaaagcatcgcgccatacgagggtgacttccgcatcgtacagagcatggtccatcccaagctcaccgacgagaggatgtacgaactcgcaaggttcgaggatccactggggcagttcgagatgcactgcgcgaccccagaaatgacgctgatccacctgatggacgcgacgaagaagaacgtcgaaaaacatctcccggagcaggagatggacaagatctttgagcagctgcagctgaagtatggcagcaaggcctccaccctggccgcgcttgaaaccatcgcccaggcagccgagaaaactaacgaattcgagcgcctcctcaagcacttcttctctcagcggaggcgcagctga

SEQ ID NO: 328758 - DNA, 942 bp, Pseudomonas aeruginosa
gtgaccactcccgcattcgccgtcgacgcattcgagaactggctaaagacagccttctccagcccgtattcgtcgaagacgattcgcgtctattgcgcagtggcatccggcttcctgcgcttcatagacagtcgacgcgaggaagcgttccccaatgcgcttgacgatgattgcgtgatagcgttcctccgagctcctggatccgacgggaggccctattccagggcgtatcaggtcctgcgccactctgcgctgtgcgctttattccactggcttgttgaaaccggagtcgtgacggatagtccaatggagcgcctgccgagacacacgggtcgtaagcctggcacaccaactggaggaaaccggccaaagagactgccgccggttttgatgtggcatgaccagcgtcatctcttacaggtgatagactcaagtcatggcccagcgaaagtcagggattccgctatcgtcagcttagggcttgcgaccggtctccggaacgaagagatctgtaatgccactctaggtggactggaccttcactaccgccggatgcgggtagtagggaaaggaaacaaggagcggctgatcgacttttcacatgacgatcgagttctcgatcccatgcgtgcctggctcaagacccgggccgaagttttgcagcagcacgagcgggaaagcgatctgctcttcatctcaagggctggacgacgtctctccggatcgcttgtgtaccaacaggtatcccggcacctgcagtctgctgggctggcaggaaagctgaagcggtgtggtgcgcatgtgctccgccatacggccgcgagcgtcatgttcgccagaggcgtgccgatcttgcagatcaaggagaatcttgggcatgaagatcttgccacaacacagatctatgcccatttgctgccaccagagggagaggcgctgtga

SEQ ID NO: 328759 - DNA, 165 bp, Pseudomonas aeruginosa
atgcagacgatgaccttggccctgaaatcactggttgaccaggtgaagcaaggcccggcgctgggcaattctcaagcctccagcccctcgcgcggcgtcaaaatcgctgatgttcgggaagctgcagccgaagccaaagaatccctccaactcaggtaccgctaa

SEQ ID NO: 328760 - DNA, 1173 bp, Pseudomonas aeruginosa
atgttgaacagtatcgacgacgttctggcgcactggcctgcagaggagcactggcctgtcaccggagtacgcgatcgggtggcggatcttctgcagcgcttcgatgatctggagcagttgcatcgtttctggacggtggtgcgggaaatgcgtttccccggcacctatggccagacaccctggcccttcgcgtgccgattggcccacctggtcttcgatgtcgcaaaccctcatcagaagctgatggacgacatcgagcgctaccgtgattcgagtgacagctcactggtcgagagctgtcacgaggagctgcaagctctcatggcgcttgaaaacaggatgatcatccaggatccgcaccggcgattcgcggaccgggtttttcgagcactcgggcagggacttcagcagggggagaagcctgtgcagataccaggtggccatgtgttggcaaccccccattacgcggcgctcgtgtgtgatgggataggctcgcagacggtgcccatgtgcgccgtgctggcattgtcaccgaagctgctggatagcgaagtgcacctattccgtggcagttacccaggggcgtgcggtgatgcgccgttgacatctctaggtctcaagtcgctgcttcccggcgtgaagtcggagcctgatttaggcgagttggcccgaatttacctgacctcggtagagggggtggcgggatatgcgtggggcgacacccggggctccgatggcgcacatagtgctgaaaagctcacccacctggtgctcctgggttacgccgagaggacaggtggatccgatccgaaccagctggggggctcgtggccacaaatcagtgtcactcccgctggcgtcacagcgatccactctgcaggggtacttcctgctctcgctcgccagctctcccgaggaaccgccctgctccattgcggcgatgagacttatgagttcgatgtgtgcagtggcgccatcgtggcgagctcagggcagctgccggcagtcttgcgcgttgacgtcgaagagcttcaggaggccttcccggacgaaagcattggcgaccgcgattacgaaatccacgaggtctgctatctcgatttttctggcgccaaagttatggcagactcgacatttcgagatgaaaataatggcacacggccatctctttag

SEQ ID NO: 328761 - DNA, 1608 bp, Pseudomonas aeruginosa
atggccctgatcaaacgccttcgtcccagccagccagatccgacaccggctccggcgatagacgccgcctccggcatatccaacgcccaagtcgccacgctctcgctgttgcagttggaggccattcgggtttttcgcaccctgaaaggcagaagctggaaagctgagttgaacagctgttggagtcgggcgagctatcccggtcttggtgcccagcatgcagctgttctccagcagatccgaaacgagttcggcccggagtggctgcagaagttcagcgtcagtcagcaacaagatgcgctttacaaggctgcccaagaagcgctgcaaattgaagaacatctccgccatgattcgaatgcaacgcccgagcagatctccagcgccaaagacgatcgcaaactagcggagggggcagcgatgttgtgggagcggggcgatagccggcagttcagcgccgatggcccgggggtccacctgaacatgagcagcgatatttcggtgccttctccgtcgccggcgtcgacgccgatcgaggaaccggtggatcccctcgatgcggcaaccgcaccaggtcgccgtaaggggggcgggactgagaaaagaatgaagcacgagcgaggtgcgcctcgtgaccactaccaagaggtgacggatcagatcatttccgccatcgaagctggaacggagccttggcgatgcgagtgggataacactcctcgatggccgatgaaccccgtaaccggcaatccctatcacggcatcaacgtaatgctactgctctcgcagggttaccaggagaaccgctggtgctcctacaagaccgctcaagcccaaggctggcaggtgcgtggcggtgaaagcggctccaagatctacttctacaagcgtctcaccaaggaaaccggcgagctgagtgcgaccggcgaaccggaagttcgcgtgattccgctgctacgcagttactcggttttcaacctggctcaaatggacggggctcctgagctggagagcaccggtcgcggggtgaagctgctttcgtccgagacccgggatatctgcgaggagatcattgaggcttgtggggccgacatcgtccatggtttccgccgcgcaggttactccccttccgaagacaggatctatatgccggacagggagtcgttctcctccgacgccgagtactacaccacgctgttgcacgagctcgcacactggtcaggccacgaaagccgtctggcgcgtgagtttgggccaagtcgcgactcagatgaatatgctcgcgaggagctgcgtgcggagatggccagcgccatgatggccatgcggcttgcactgcccgggagcgtcgatgggcatgcgggctacgtcgaccactacctacaggttctccgcaacgacaagaaggagattttccgtgcctcgcgtgatgcagagcgaatggctcgctatgtactcagcttccatcccgacttccgtgaggagttcgagcaagaacaccggaaccagatgacggccgcggttgcggcaggcgctccggatgacatttttgacgccagtgacttcgacttcgagcctgacttggagcttgaaggtcctcgcccttaa

SEQ ID NO: 328762 - DNA, 159 bp, Pseudomonas aeruginosa
atgaccgataccgccaacaccaatacacagaagatcctgccggaagtcggcgcccgtgatatccctcacgacgacctgggctggcaggaagtccgcgagctcgggctggatgccgtcccgggcgacttacaggatgccgaagatctggacggggagtaa

SEQ ID NO: 328763 - DNA, 402 bp, Pseudomonas aeruginosa
atggaaaacgcaaaagaagtattcgacggactcattcaaacagttgtctcggaggcattgttggccgacgccattgagcagtatgccgaggtggagatcgctgatccgaatgagcgtgaggaattcgttgagacgtactccgacgaggcataccagcccgtggttcggaaagctgttctggacgtcgttgtggctgtcgcagccgcggatcgacttgtcgaagacgttgcttttcggatggttgtcggaatgctggaacctgaggaaagcaatgaggtaattcgagccatgaagctcgtcatgctggacaagatcactgaggacgccctgtccgacatggatgattctgccggcgtcaaattcaaaggccgcatggactattttcgcgcctgcatcggctaa

SEQ ID NO: 328764 - DNA, 687 bp, Pseudomonas aeruginosa
atgtccaaagggaacacgatcgctcaggcgttcccggcggcttctggtatgaaagggatcgttgtcgacaacggtgccgagaagcgcttgttctacgtcacgcccgatggcaaaagcctgttggccggcgttatgttcgatacccaaggcgcgaatcttaccagcgtggatctggctcgaaccgcgactgtagagccggttcctcagagcagtcagtctgcagacagtctcgctcaggcttggaagcgggccgagcagctgaaatggctggcggagggggacgctgatcgcgtgatgtacgccttcttcgatccgaactgcgcttactgccacgagttatggggcatgctccgggcgccggttgccgcaggtgacgtgcaagttcgctggatcccgatttccattctccgggcgtcgagtaacgaattgaacgcagcgatctaccagcaagccgctaccgagggcgtgcttgtcccgatggctgaaatggcgaagcgtcagctgcagccggcaacggtgaccgaagacattcgccaaagcctagcggataacctggctctattccgccaggcggggtttcgaagaactccgatgattctttaccgggaccgggataagggccaggtgaaggtatttgaaggtgcgccacttccccaggagctggcgatgatgctcaaaaaagagtag

SEQ ID NO: 328765 - DNA, 621 bp, Pseudomonas aeruginosa
atgagcattgagttggccatgactcgccgagacttgctgaagcgctctgtagtggccggcattgccggcatggggtccttcactttcagcgccccgttgcttgcttcaactggcttgctgctgcctgccaattacgcgaaccaggcggatgcagcggccttctgggcgaagcctcgggtgttgaacctctatcggccagctaccggtgagcacaagcagatctgttactggcgcgatggccacctcgatttggctgggtaccgcgaggcctgccacatgctgcgagatgtccgtgccggcaagattacggagatcgatttgcggctgttgaacctcctccgagggcaacagggttggctggagctcgcctacggcttcaaggagccctaccaggtaaacagtggatatcggacgaaggaaaccaacgaggctacagagggtgcagcccgagactcctaccacacgaaggggcaagcgtgcgacggaaaattcccgagccttccgatcgaatatcagggtcgcctgatgtcagctttccgtactggcggggtgggcttctacataaaccgtcaaaaattcattcattccgacgtggggagggttagatattgggtacgttag

SEQ ID NO: 328766 - DNA, 2535 bp, Pseudomonas aeruginosa
atggttcacggcgtagagaagcatcacgagattaaacggacgcgaatctttcgggatacgcggccgttcttcgaacagatcctggaagacttttcgtcgtttcatgcgattcttatcgtctacgtcatactggtgttcccgctgttctttcttcctgcgctgtttgagctgagtcttgttctgggcttgatctatagctttattccactctcgcgcaagccagatattccgttcaggaagcgaaagtctctgaacgaactggatcgcaacgataagcacccaggtactggcaagcctcagcagtctcgtggtatcgcattcattggtaatcggaagtcagataatgcggaaatatgggctgccaacgaagaccttagaacacacgctttcatcattggatcgaccggggccggtaaaaccgaagggctgatttcaatcgcttataatgccctagtttgggggtcgggcttcgcatatacagacggaaagggcgatgtaagtctctacgccaagattttttcaatggtccgttccatggggcgcgaagacgacctcctggtaatcaactacatgactggcaacgctgacacaacgaaaaagcgttccgacaaactttcaaatacctataacccgtttgcggtaggcaacagcgagagcctcattcagctcgttgttagtttgatggatgccggcgatgccaagggtgacatgtggaaggggcgtgcaatcagcttcatcagttcggttatgccggcactggtagatctgcgcgaccagagcttgctcatgttgcatatcggcgccattcgggaagcactgccctaccctaaatatttcgagctgatgaataacgttaacattagccagaagtccagggacatgatgcaagcattcttgtatgacgttcccggttataagcgtgataaaggtgagaatcaatcggcaacctttaacgagcagtacggctaccagcaaatgcagtttacccgtattctgagctccctcgccgatacctatgggcatatttaccatacgccccaaggagaagtggtactaaaagacgttgttgtcaatcgtcgaatttttcttgccctactgccggctctggaaaaaagtcgccccgagttaggtaaccttgggaagatcattgtggctggcatgaaaggcatgatgggtgctcagctcggtaataaagttgagggtagcaagttggagttgctagactctcgacagactacggccccaaccccattcatcgcgatatttgatgaactgggttattatattcctgacgatgccgcactaatgtgggcccaggctcgcagtctcgggtttgctctcatcgcagctggccaggacctgcaggcgttctacagaacatcgaaagaagagacgctcgccattgtctctaacagcaacatcaagattttcggaaaacttgaggacccaaccgatacgtttgacctggccgttaaacttgccggggaagcctacgtgtcagtggtggacggctacgagatggccgatgatggtgccggaagttatcgcggcaacactggtgcacgaattgaacgtgtcagccgtgttgaactccaggacttcaaggaacaagttgagggtgaaattcacttcatggtgaagtcggatatcatccgcgctcgcatgttctatgcagacttctctggtaagcgtttgagcaaggaataccagttaaatcacttcgtgaaggtgatcccgcctaatgaggctgagctgaaggctttcagtatcaacacgctggagcttcgtgaaacactgcgctcactgccgcttgcgaaccagcgtcccactgatggctacttcgagtatgtggccgaagttgaggatggagagcgctacaagcagtacgttaccgcgaagctgggtgtggagcgggggatctgcttgttgctggggtacgacgactcagcggttgccccagtggtcgacccagacgatggcagtgccggcggcacggtggggagcgggagtgcgcttgcacaagcgccgacaagcgacagcgacgctatgccctcccttgcgcaagccgctggtggcacggatcaacccgccctagctgccgcccctgatgcgaacgtcgccggtgatgatgtagcaggaatcgtattcgacgggggccagctcgcttcgatcaacatcttcgccgaagttccgcgtgagccgttcggcatcgacatcgtggcgctggcatctgctgccataccgatcatcgaaaccgcgttggaaggccgggtagagcgccctgtagaagagacgcctccagcaggacaaggtgggctgctcgaagaacaggctacccgagtgtcgttgaacagtatcgccttgggccttggggcacctgctgttgaggccggtgcaatggtggaaaacatcatccaggtcgcgacgcagggctccgaatacccgattcctcctaagcctgagaaagcgggcaaggatcaggaaatggaggacgtcatgagcaacctggaatcactgattggagggcgtgcatga

SEQ ID NO: 328767 - DNA, 792 bp, Pseudomonas aeruginosa
atgaagaaagtgaagattgagcgcctcgcgaactttattcgccgcgtcccaaaaaatgtttcggttaaacgtaagcgtaagcggctttcgttcgagattaaatcgccgacatatcagttgcacaccctaaatctctctgactatggggatgacacactgagtttcatcctggaaaaagaggcagatgggaatctgtttgtggtggccaaagcccccgaaaaatacggttcggataaaggcgctatggcctcgctgtttaaagcgcaagtggcgagcgaggccgatggcgtatacatgatcactcaggtgaacagtctgctgatcaagaagttgtcggtaatgaagctggtggggctcgccctgctcgcctggttgggctacctctttgtcagtgcctatatcgatatcgtctctggcaaagggggcagtattgaaccgtcggctctatcgtcactggatgcagcgcatcctgcagtccgagaggcggacagccgcgccccaatccccgtgaccgtccatccgttcgattgggagaacaccccggctcgcctacaagcagatccagttgcggacgcggaccagctgcaggccatgagtcccgacgatatcgccaagcagatctataacgctgccgaaacagctcggaagcaagggatgcgcgacaacgcgccggcgatgtcgagtgatgtggcgactggtctggaagccttcggactggcaccgagcatcgacgctgggcagtcggtaggccctggctgcgatcccaaactcgctttccaagtcgctgaataa

SEQ ID NO: 328768 - DNA, 1143 bp, Pseudomonas aeruginosa
atgagccgcagtaacgtcaataaatctaatactgatgagctgctctgggttatcgtctttcttttcgtaggcattatcgcgctctggtactttgggcacgagaagatttctactgttgttatgtccctcagaaaattcgaggcgagccttattctttttgatacagatggcaggctggcgttgattgaatggctttcgagtacccacccagctgatgcaacccctaagtcactttggtcttcgggcctcgtcgcgagccgggagctccgctggtatgtactggttatccttaccggcgtgtttgggtatcttatgtaccgggcgcccgatcgcggtaataagtactcgaataaacacactactgtcagtcttgcgaaacaggaagcgagccaatggccggttatcttgccggccctcgaaactgattttatcgcgttgccgctcaatcactcggtgcatggcatgcgggctaaggtgcgcgattacgcccggcgtcatcagtttttggtcagaactgctgcgttgggcgagaacgaagatcctgcagatattgagctactggataacaaagaagcgttaaagctgtcgcgggccagggcgattcttgttgcgcaacttggcaagccttgggagggggtcgattccttgaagccctatgagagttcgctctttgccgcatttgcagcccagatgaaccatgacaacgacctcgcgctaaaaataattaatgagctcgcccgtgcatatgtaagagcaaagcgaatgaaaaagattggcttgctgaattcgttacatgccaagcgcgcactgcaccagtatgcgaataccaaggtagttaagcgtgtagtaagtcgatatgcgtataagcgcacagtgctgatgggaatgaaggcagcggcttcagcaaatggtgtgctcgcgccgaattggttcagatggctaaaggcagttgatcgtgtcacttggtacgcgttgtgcgacatcggcatggacgttgccagcgtagaagcctgcggtttgcgctcacattggttgtcagaggttgtcgctaattcggcaattatgaatccacgcattgagtcggcgctggtaggaattaaaactgctctcggggagatggtagatgaagaaagtgaagattga

SEQ ID NO: 328769 - DNA, 429 bp, Pseudomonas aeruginosa
gtgattgacgctctgccaatgacggcccccagtcagtacggtgctggccaagctcgcgaggtctgcatcgttcgagcagcagcccattaccgtgcccatcccgacctggtcagggccatcattcgcaccgagggcggtacgactggaaaagtctcttacaacaagaacggctcctacgatatggggctcatgcaaattaacagcattcatctcgcggagctgtccaagtttggaataaccagagatatgctcgtcaacaacgaatgtttgaacatatttatcggaacttattacattcagcgtagcgtgctggggagtgatgatttttggaagggcgttggtaattaccactctcgcacgcccgacaaaaactaccggtacaaacatcgtgtgtggaacagtctcaaagaagtccgggggcagcaatga

SEQ ID NO: 328770 - DNA, 468 bp, Pseudomonas aeruginosa
atgtctgaagtgaacaacaagggcggcgcgttacgtaaagttggccgggcgaccgcttgggtgggtaagaaatgggtttggaccgtcaccggtgattggcgtgaggttcgccagaacgccaatcgggtctacaacctgctgaggtcccttacggggcgtacctatcgggaagaaagcttctcggaggcggtctctcggcttcgcctgagcgaaaaggacctcgatgcccgttgccggtatctgcatgcgctatccgtgctgtttggcttgatggcgatcgttgccggcgtgttcctcgcgctagtgccctggtcgccgagtcctattaaccacggcctcatgtctttcggcgttctcgcgttgagcatcagccgtttcttggtcaccaggtttcgagtggcccagatccgtgaacgacgcctttttaatttcaagtcgtggctcctgcgtcgggaggggcgttcgtga

SEQ ID NO: 328771 - DNA, 1173 bp, Pseudomonas aeruginosa
atgtcgatgttgcgcaagcttcacaagcaagacgtggagcgcttttccagtggtgaacaaaccactgccgttcaggcagcaatggagccagctgcggtgcaaggcggctcactgctggacgagtttgaaagcatgctgctcggcaagtccgagccggctgcagcacaggctgaagtgtcgccggcgccggccagccaggttgtgatcgaggcgcaagacgcccacccagctgcaccggagcccaagccggagttacctgtagagcctaaggctgatgaggcttcccgaacacaagcaccgtccgcagccctggtgccaggcttcgccgaggtcctcaagggcctggctccagtgttcaaggctgcaacgatctatccggggcatgacgcagatccggcgaggatcgctgaggctgtacgtcgcatgtcgctcgtttctactggcctagcccagcatattgcgggtcgggtggatccgcaggagctcgatgccgcctgggccaagaaacacctgcatggtttcaccgccgagctcgtggccagccagtggatctcgtcggtgatctcccgcggcggcatgccggccggagagtaccccgaagtcaccgtcgagtttctgggggcaatggtcgatggggcgtgggccgcatcccaaaaggtttctttcggcggacttccaacaggtgatcatctcggtgcccagctcgcgctgctcacgtcagtagcaccgctgtcgttggaggtcgaacgctatttcgccatcgttatatcgcaggtaccgggtctgcaggtgaaggctgaggacctggtgtcggagttggctgtgtttctggtcgagcaagtgtcggagcacatgacgcgcctcggtagcggtggttctgggctatctgctgctcctcaggaagtactgcatcgcctgctcatccagcatgccgcagaggtactgctctcctcctgggaatactgccgcggcgaggttcttggcgcgctgaaggatgccgccgatgttgatgcggcagcagcgattctctcccggcctgggtttactcacggattcccgctggaggcgctcaaggcaagggcgtcgtcatccctgaagcgattggtggccacaaccgagtacgccctaacaatgatgagggttactcagcccgccggagcgagccatgtctga

SEQ ID NO: 328772 - DNA, 378 bp, Pseudomonas aeruginosa
atgatccacctggcgggtgagcgtgggtgggccttcaagttcggcgatgagtctgttccggtcgaggctgtcttcaatcattcgacctatgcccctgccctgctggctgcagctgaaaccgagcttgcggccagacggatcgggggggacctggctttcgccctggagggcgagggcaattccctgtttggcgcacgggtccgtttggtcagcgagcggaactcatttctcagccagttctggcgaatggccaccacggcgctgattatcgagtcccttccgcgatcaggcaacagcatcatgctcgaccagctgcagtacgtgctgggcgatcgctttgctgattacgtcgaagctgctacggcggaggcgtcctga

SEQ ID NO: 328773 - DNA, 168 bp, Pseudomonas aeruginosa
atgggcaaggctcgcttgagggaagggcggctagaaagtagggcgatgacggtgttcaagtacttcttcctgatcgtcctgcagaacatccaattggctgatcagatgagcagccagctcggcatcgccctccagggcaacctgcagggcatggttgaccatgtgtga

SEQ ID NO: 328774 - DNA, 1116 bp, Pseudomonas aeruginosa
gtggagagactacctattactggggtgctgttggccttcggcgcagcgccctacaagttcgagaaagacgagtcggcaagcttctacgtccagttgcagctgccaactggcgagaccaaaaccctatggggtgtgggcttggaaaaagcacttgaagactccggagtgcaacctggtgaggtcctgactgcccagaaccttgggcggcagcccgtcgaggtcgatatcaaggttcgtgacgaagacgggaagctcacgggggaggtccgtcgagaggtggtgcaccgcaacgtatggtcagtgatgagtgcgccggagttggactggcgtcgggaggcggagcagaaggagcagcctggccaaagcgacaatgaacgggctcgtagcggcccctcgggttctgcctcgaccgaaagggccgctgccggcgccaccgcgaccagtaccgaccaagttttctcagatgcaggcaatacgtcagctcaagacgccccggtgaaagatacagcgcggactggtacccgacgggataagcgagatcgttccccgcctcggggcggctctcgggaccggcgagcggagcccgccgaggcgggtgcacaacagcatggggccgtcggcgccggtggtggcctcggccccgacctggtatcgaaggccttttcggcgccgttcaatgtcgctaccgcccttggcggcctgttctcgacttcctttaaagaggtgggccacaagttcacggcgcggagtgtagatggctatggcgttcttgaagggcagctttcggatctggccagtgccgtcgagcgcaaggccacctggttgaagtcgcagggggctatagatggtcaggtggcaccaggtgctgcgcaaacggcagaagatctgaagcggcttctgggggatttcgacaccctttccggccgctttgccgatctggggagcaagctcggctatgactatgccgaaacactcgacaagcattcggcctccatgaggtccgcgctggataagttggatggaaagaatgaagtaattgcagagttgcaggatcttgttaggaaacttgtcgacaagctggagcgactgttttcgaacataaagatgggtcgataa

SEQ ID NO: 328775 - DNA, 462 bp, Pseudomonas aeruginosa
atggagcggcagctcaatgatcacgctactcgcatcgccgggctgaccggccgcctcagacagtcaggcatgggcgagttcatcgctgaactgaaggcaaccggtcggccggccaatgagatattcgacgggatgaagcctggtggcccctacgagaagttcggccgccgcttctcctcgttgatggaggactcggatttcgctgctaactacgcgaacctgcagcggcatatggacgagttcggcgatctggcatcccgttacgcgaaagcaggcatcgaccttaatttggactactccgacgcggtcgatcgcaacctttcgaagatttcggccgcgaccgaaggcttccctggcatgaaagatggcgccttcaagcacctgcaggagatggcgcagcagattggggagcggatcaagcggcttgtcgaccggcttatgggccggcttgcgccgcagtaa

SEQ ID NO: 328776 - DNA, 432 bp, Pseudomonas aeruginosa
atgcagatgttctggacgttgttcgccatcctcggcctggctgcgtcggtttttcttggaaatatccaggactggcgtgacaccgaaacacagggagaaatcgcggcaatagcgggaagtatgcaggtctacaggggggcggtagcggcctaccaggccagcaatccggctgcttccggaacagtcgctgacacgcaactcggcctccctacgtggtacgtcaaggcccccggtatcagcaacgtcattcaagccggaaaggtgtacgtcttctacagccaacccaagccagggcttgccgaggccttactcaagcgcacggacaacgcactcactgtaggcatcaagcagagtggcaacctggtgaacccaaggcgaggcgtcgtagcgagcctgccgagcgccattcccgatgggagtgtagttttttga

SEQ ID NO: 328777 - DNA, 534 bp, Pseudomonas aeruginosa
atgaccgagccttccatcgcaacgattcgtgacgaggtactgatcgctgagcatttggcaacagcccaacgcctgcgcatccagatccataccgcccacccgttccacaagaacaccctcttcggcgactgggctgtaaccggcgttttcgagaaccaggagcagtacgtggggccgctcagcgagctgggattgcaactcgtaccgtctgccggcctggcgacggtgaaatcgcttccaggccaccgcagcctgatgccggaagcgtacaaggccctgcaggcactaaaggatcaagccgccgctgtgacgttgtcactgaatgacccagctgcagggaaatcgagtctgaagcaggcgcaacaggcgatgcaggagtgccagccatggaccaactggatcgtccgggctgtcctgaagaagggccaggtcgtgcctatcacggacacggatgagcactggcttgaaaacgagttcgctggcttttctgcgacccccatccttccgatccgttcggccccctgcgaggcgtga

SEQ ID NO: 328778 - DNA, 384 bp, Pseudomonas aeruginosa
atggccatcagcatcacccggcatgatcaggacctttttaaacagacagtcttgcagcacatcactgccaagttaccgcgtgaagagtgggagtcgtttcgctttcactggtgcatggtcaaccagcggctggttcccgacgcagagccggatcccgacctgacgcctcaacaattggtgaagaaagcgatgagctcaatgggcaatgagacccctcgccttctcaccatcttccgcaatcagatcgaggtgattggcgagactgccggccaacctgtctattatgccgggcgcgctgggtactacttctggtctcctcaaccccacggagggttgatgctcgacatcaacctctgcttccccagctacccgtgcggttggtga

SEQ ID NO: 328779 - DNA, 432 bp, Pseudomonas aeruginosa
gtggccaagctaatccaggtcgaccccggcatgccgatctcgttcacccctcaccgggatgaaccgatcaccgatgcaacgatggtcgacctcgcagaacaaatgaagctaccgaacctgcttcggtgcgatacacctctcaatgacgctgaacccctgacgcttcatagcgaggccgccgcggttctgcactgggtgcagaaccatgagaaatggcgtgtacgcttggaagagacattgcagagcatgtgtcaggatcttggaggacgccctttccttacagccttcatgccgatcgaggaactggaggccttcgccaaggacctcgcggacagcggccttgttcctgagctacggcagctggctgagcaatggcgagcccagggagcaacgatgggctacatcgacggttatttggccaactcccactga

SEQ ID NO: 328780 - DNA, 519 bp, Pseudomonas aeruginosa
atggctcgccaaaaccttgaaggcaatttcggtaagctcctggaggatgtcacccgggaagggcttggccgtgcctcgacggaggctcttgctgaattggccaagcagctctggtacggccagggcgatctggtgccggttctggaagaagaagtctccaggcgccttcgccatgtcgaccagaaacagcgagcgttgtacctggtcgatcggctgcgccgcttctcctgtgtgccgcgagacaaggccacgatgctgaaggcgttcgtttcctcctggtcgtcgctcaagcctgctgcccaatcgcctcgggcaagtcagctcttggctgcgcatcgcttggacaagctcgccttcgagtgggggctagaggaagacgtcagcccgcagatgaaagaggtgctgcagtaccaaactcggcactatgcggctacgcagggcgtccgcaccggctatgacgatggggtctcggcaccggccgagggccgcgaaagggctacgccagctttggcacgttaa

SEQ ID NO: 328781 - DNA, 609 bp, Pseudomonas aeruginosa
atgtccaacatccaactcagcaccccgctgggggaggccgtggccagacttttctcccgggcattgcctcttctggaaggccaggccccgggcactgtgaaggttttcatatttggcggctgtggagtgcacctgctcacccatgcccgaggcagcgacgatatcgatgcagaagtagaggcggccaaaatcttgcgccgtgacgagcttgtcgctgtgctggttgatcccgagttctatgagcaaggagacgatgatctcacggtggaattcgatccgaactacaacacatcgctgggcccgctccatgaggactatcgtgatcgagcgatcccaatagatggtttctctggagctcagcccctgcacgtatatgtggccgccggcgtggatctcgccatttccaagctgggacggtatacagagcaggataaagcggatattgaagcgctcatcgactgcggccgcgttgatgtcgaggaatttgttacactggccaaagaggctatcgactacgcggtcggtaaccgttcggtcatgctcagctacttggcggatgtgaccgagccgtacttggagaatgggcacgatggctcgccaaaaccttga

SEQ ID NO: 328782 - DNA, 2175 bp, Pseudomonas aeruginosa
gtgaagatcacgaagcttggcgttttgagggagcatctaggggcgttgcagggcagtcgttcgggggccttggtttcgttgctgcgcgaagcaatgtctagcggcctcgtacctttgtcagttccggatgcgctggtggatcgtttttcggtttctgtgcctcctgatgtccttgagtggcttgatcggctgagtgatgagaccgggctgagcctctcgctggtggctgcgggcctggttcagaacttgatgagaagcagggcgaacgcgccgagcgctgtcgcggaatgcgagggtcttccggcggtgaatgcgcgcctagggcgcatacgagaatggctgcatcctcttttcaaggaaacagataaagctctatcagccggccgggtagcgtttgtggaggccgcaaccgggagtgggaaagggcgaatgatcgctgcgctcgctggacagaggatcgagcaagggcatacccctgtggtcgtttcggcccctatgaacgtggttcggcaactggtcatggatctgcgcgagttggtgccaacatctactccgaaaatgattttgggacgtccgaacttcgtcaatccggttcatgtacgggagtgggttgcggatcaccccgactcccgcctcaggctctggcttgaagcgggatgccctgtggtggcaaaggccaccaaggagctgcaggaggccctcggcgttgaactggcgtacctcatggaggatgcgattgaggtcgccgagggcaatgtgccggttcatacctgggcgctgcagggggcaggtgatgaggaaagcgaggccgaagacctttacctgcgattgaagtctgacgtgggtgaggaggcggagctgattctttgttctcacactatgctagcggcggactgcaggcttcatatgctagcgggagcgggtgtcctgccccttgagttcgggacattgatcatcgatgaggcccatcaactcgaagcggcatttgcatcggtttacacgggaacgattcaccttcaggcgctggctgggaagatcaggaaggcggatttgccagtcaaccagcgggtgatgcttgagaatgctatagggacgctgaaggggcggattgcccagtcatggtcggcggaggagaaaacagggactctggaggacgacgagctccgcgttttggaggactccatacggcaattcgtgaagcatgcagaaaaattgcctcggacaacggatcgaaccaatcctgccgtcaggtacgccaggaagtctctggcgggcgcgagggcgattctgcaggatgctcttggcgggaaagctacggtccaagtgggaactacccctgccttggcctatcccacaatttcagtgggccgtgccaatctacgggggccgctggaatatctttggaaaagagctcatgcgagtgcactcgtctcagcaacgctttacttgcctgacatctacggggttttgaccgcccactactcgcgatgggtgttgtccgtcccgaaagatcgagcgcacttcatgcccccggtccatcctgagtgggtagttaaacaggctcgtctgcaccttgtgcccaccgcgacggcgcccgatgacagcgaggcctggctccaagaggtagagtctcttgtgcgcagcgcggcagagagtgcaaaaggagggacgctggttctctgcacgagctatgcgactgtaaatgcgctggctgcgtcgttgtccgactatggcgactgtgtgatcgctcagggcggcaagctgtcccctgctgcctgtgctgcacgttaccgggctctttatggccagggcaagaaaccaatctggcttggggtgggttctgcctggacgggtgtgaacctttcggatgactcgcttccgccggagcgagttggagaggatcacatgctctcggatcttgtgatacccaggacgccttttcgcgttaaccggtcgttgacgcaccaccggcgggcaagccagctcttcgtggcggaactaaacgaaactgctcggttgctgaagcaaggcatggggcgactcgtgcgcaaggaaggggctccggtgaagcgaatctggtttgcggatccgcgagtcacatcacccaatagcaagtattcgatgatcaagaaactgttgcttccttaccagcgagtggaggtcggcgctgactaa

SEQ ID NO: 328783 - DNA, 726 bp, Pseudomonas aeruginosa
atgcacaacgcaggcaacaacacatggtcggtcactttcttccggaccggcgcccccatctttccggatgtcgccagagccactactgcgaagcttctcgacggagtgctcccccaagaccgagtgcgtcccctgatgcactacacggaaactactgcagccccaggattcagcccagtcaaattcatcggagccaagaacggcttcggcgtcctagcctacgggcccgcggcgcaagcaacgctcgacgagctggccaacgcgattgcgatctgctggtccgcaaagcttggcgctcccgtcatccaggacagcagttcgggcacctttgaggcaaaacctctgccctatttcgtagacctgacgattcccaggatcgtcattcagaagaaacctcgccaccaggccgcaatccaggccgacatggctcgccatctctcaaggctgatcctcaacagcatcaccagccaatgcgcattcgccggcatagcactccctctgcagttgcaggtgcagccaattcattgggaaagcggctccccagcacggctaggccatggcggagcagcactagccgcactgcgtaatttgcagtttcgagccaacgtaaagctcgatggatggtggagccttggctacatcaccgccaaaggctacggcaacctcaactgcactgccgcggccgcgagagccccaaggaaacaggagacctctgctcatgcgtaa

SEQ ID NO: 328784 - DNA, 792 bp, Pseudomonas aeruginosa
atgcgtaacgcgaccgtctggcccagtgatttagccatgcaagcactcggcattcgcccaagcgagtttcttagaacggaagccccgatctggacagactccccgacgccttgcggacggtgtggtcggccaattcaaccatctgagccttacaagccagcaaaggcaaaggaaggattctccgacacccgagatcttgccgccccaggcagtccactttgcggcggatgtacaattctcgggctcaaacctgccatgaatcggttgtcgttcagcgttctgacccgggaaggtgtttaccctatagccaaagacatacacaaagcctggctattcctcagccctcctgaaccaccttttgttgccgtgatcagcgcatcgaccatggcccatctggtttggcgaacccccgtttcactctcgaaggagaggttctacctacgctacgggaacgatctattcaccattcgccccgagaaaatcagctcagccatcgcctgtgcgcaggccctgaggttccggcgcgaagagcagcaacctacgagcgtaaaggccaagcgcggcaccgtccgtctctcgccctatctcgcccttgaccgaaatctggtcaaccacaatcacggccagctctcctctgcagccattgagcacatgaaaccggcagaaaaagcccttttcttgagcctgacctccggagaggtatgggcgctcagctttttgttgacgacgaaaccgcccattcccgaacaaccccagcccttgtcgattgatctcacaaaaggatcggactga

SEQ ID NO: 328785 - DNA, 1044 bp, Pseudomonas aeruginosa
atgaaaatcgaagtaatcctgcagaacctgacgccgtttcacagctctgttccaggagactcccgagtcgacctgcaaggccgctgggcatcggaaggcttcccctgcatcagaacaagaaccatgcgtttcgcgaggatcggtaccgataacgacgaggatgccccgaccgtcggggtggtaccgatcgttccagccaatacgcttcgccacacgctgcgcagcaggatgctgaaccaaatcctcgaccagatccgcggcaaagccaccctatcgatcggggcctacactgcgctatctgctggcagtgcatcaggcaacccggatggagtaaaagcaacatttgctgagatcaagaccaccgcacaacaccccttccttggactctggggcggcggccctcgcatgatggaaggtaagatcaaggtcgactctgcctacgccatcacccaagactacctaccactcctcggcccctacgaggagttggccaccaattcgaagaatcgcttactcgaagtggcattcacgagacgagttgatccagtgctaggtcaaccgcttgatcaagagctcatcgtaggtggcgcggcggcgatcacggaatacagcaaccagcaggcaaacattcgtcgcaacaagaagttgaagggaggcgaatctgcagcggacgaagagagacaggccagaggtctcaattcattcgccgcgcatgaatatgtcatccccggtgtgaactggctgtggcggatctctgtcaggaaccccaccgacgcccagcgcgggatgatcctcaatgcactgcaagagttgcacggcgaacaggtaggaggcatgtcacgactggagtatggccgcttccacatcaagtccattctggtcgacggcagtcctgcctgggatggccaaacgctggatagtacgaacgagcatgtcgcgtcctggctatccagcctggcggatagcctcgatgagattgaggcaggctcgatagaggcctttgcgaagtctgaaaaatccccgaagacagaggtcgaggcttag

SEQ ID NO: 328786 - DNA, 651 bp, Pseudomonas aeruginosa
atgaaaccatttcgcgtgaccatccagctcgccgggccgatgattatcccaaagcacccgattcatttagacggtctcctcgccgccttacacgtgcaagcgctggaggaggcgggacatccgtcgccctgggatgagcagcacaaccttcccctggagcgttacgttacgcagtcgggtgaatgggtattcaaggccagtatgttacggggctcccccctcattgagccccatctctacatgattacgagccgcacggatacagcgagagtcgccgacgatatcgaagctggcctcctgaagtgtcggcaggcgaggctcaacacctcgaccggccctttcaagtctgggctccagaacctccacacagtctgggtgaaggagcttcacgcagatgcaataggcgacattcccgcaatcgagaagctgctgcagcgcttagaattcgtcggccctcgtcgaggccttggcatggggcgagtagcctccgtggcactcgaagaaacaagcggagcacagtggacaaatcgccatcttccactggatgcagatgtcgatgcatccacttcccttattcctcaattcggtgccctacgcccgccatactgggacaagacggcaatgacaacgatcgtttcgccggccgcttga

SEQ ID NO: 328787 - DNA, 513 bp, Pseudomonas aeruginosa
atggagcttgtgcgctatgcgctgacggatccgcgatcagatggccagtgggttcgcgacgatctcgaaagcatgattgccattgcgaatcaggtgggggcgtccaggtttcaaggatttacgatcctgcgggacgtggttcagttcgaaaagcagggtgatcgttgggtgccggggccgctgcaggtccgtagcctgagctatgaggacgtctgtggacactatcaacggatcctctcggcctatccagggtgtggtcttcaggttgcgagccacgggctcgttttccttgatgatgacggggtaacgttgctgagagcgccgtacaaggccgatggtgtgacgattgacgaagacgaactctatgagctggatggcgacgttttctattacggtcactgggagggtgagactccggagagcaccagggctgacatactgtcgccaaccttgagggagatccctgatctcgaagagattctgtcgcggaataactcgcgatcatttttctag

SEQ ID NO: 328788 - DNA, 282 bp, Pseudomonas aeruginosa
atgcacgtattcaccacccaggtattgccggctgatgtccggctcgttcgcctgttttcgatggtccatgtcgtccgtcgggtgccgataagcgaccagatcggcgccgcgatgggagcctgcatcgaccagctgtgctcaacggcacacgaagatgccaacgcccttattggggtgtccttttcagccctggtcaccaacgagggggagcagatcatggtgctggcctatgccggcacgccagccctgctggaggttgctggtcaggtcgacggggattag

SEQ ID NO: 328789 - DNA, 1092 bp, Pseudomonas aeruginosa
atgcggcggcgttggattgccgcgtcagccattgccttgggagtggcggcgatacccgtgtaccgcgcttcagcagctccctgctgcgatccttggggatttgtcggctactccgctttcgtgcaggccggggcaaaggtggtggcaaaattcacttcctggggaagtgaaattgccctggtgctcggcggtgacatctaccctgactggtggtcgggagtgaatgggcagcaagcggtaatgacgcagcagcttgccgcccagcaggcactgtttgaaggtaagcatgcagtcgacgccaaccttatggcccaggagcgggcgggtagtgccgccgaggacagcatcccgtcgagtagccaggcagcaacgatggctagcgtgcaggcggttggaagtgcagtggcgggaagcgcccgccagactgcagctgaaaaccgaaaggttcaagacgctgcacatggagccttctaccaggatcagctcgcagtgatccaacggcatgctccttactgttccgatcgagatgcgagtgcagggcgctgccaagcggttgccgcgacgatgcaagaccgggatatccgctttgacaagatgctggagccgggtgacgggcggaaaaccttctccgcggctgagatcgaagccgcccgggccttcgtcaagaatgtgaccttcgagatggccgcccagttgccagacacccggagccagcaagggaaggcgctgcgtgcatacgagctggcagatgacgcggtgatgtcgctggccagcaacagcctaaatgcaatcatcgccaggcggtctccggtcgacggagagccctcgttccacgagttgatgtccaacgaagtcgaaaaacgatttctctctccggagtggtacgcggctgaaagcggtaggactacagcgccgctgttgacggagctcttgcatatgcaggccttggaggatgttctagctctcgaaaaaagccgagctcgcgagcgcattgagatgatgcttgctatgcagaccgagcggctgaaccggaaggacatcctgccccgccttgaaaatcagcgcggcgctgctgcgagggcagggcagtaa

SEQ ID NO: 328790 - DNA, 555 bp, Pseudomonas aeruginosa
atgcagggtgccgatatccgcgtcgatacgttgctgagcaacagcaatcttacgccttcgcttctggaggctgtgcaagccctcatcgcgaagctggtcaacgcaatccctacccagaacattcccaaggcctgggaaggcaccgctcaaggcaaggcttttatcgcagggcagtacatcgaacaggccaggtcgtcagtcgcggcaaactccttgaatcaggcagtggccttgcgtaccccagtcgcaggcctgggggctgctgcgatggtcaataaggctgacatctccccgatggagctcatggaaaccttggtgaatggtcgattccaatcccctgactggtacaccatgatttccggcttctctaccgaaaatctgctgcgtgagcagaacaaaatgcaggccttcaagctgtggatggaccttcaatccttccagcagatggagcgcgttgaggcgatgcttgcgaccaacctggccatgggcgtgaaagccgactcggctgctgatctggaagtggctcgtagtgccgctgcgaaggcaggccagtga

SEQ ID NO: 328791 - DNA, 354 bp, Pseudomonas aeruginosa
gtgaagatctacaccccggaggtgaacccgacggaggtgttccagaactccatcactccctgcatggaccagatttcacagtacgtcggcggcttgagcattcctgggctgggaagcatccaggggctgatcgacaagatcgggaaagaattattggaaaagggttgccaggctgcgaagcaagaagcgcagtctgcagggcagcgggctatcgaatccgttcgtcgtagggccaacgagaagaccaatggtaactacggccaggtgatgggggctgtcggttcccagatcgggaccgtggtgcccggatcgaccggggaaacggcgggccgtgtcatcaacatcctgcagtaa

SEQ ID NO: 328792 - DNA, 498 bp, Pseudomonas aeruginosa
atgttaagcctatcgactgaagatgttgcagagcactgggagcaggtttctcctgagctaggccaactgtttgcttcgattgaacgggcagaggattgggccctggataatcacccggatattgctgagcgcctgcagagcttcgggctgcgcctctccgatcccgcggccgcggcgaagctggcggatgcggatcgcaatgatctgctgtttttcctcgtctacatcagcagtagtaaggcattccgaatcgtccagtggctggatgatcgccatgccggactggggtctcgcctgctcggagtgctcctgcagcaggactccaatggggttttttcgaacgtcctcgatccgatgctggctggcacgctgatacagcgtctccaagtagtacagaacactccgttcttccaacgactcctggctcccgagttcctggggagcctgtccaaggcgatcgcgaattaccaacaggagagggcggaccgagatgagtag

SEQ ID NO: 328793 - DNA, 2262 bp, Pseudomonas aeruginosa
atgagaaaatcgctgctgctttgcctattcctggccgcctttctcggaggatcagctcacgctgactccacgggcggactgaaccagttcaccccaccaccaggtgacacgtcggtcgacttcctggaggaagtcttcggctccatcgtgggcaccatccactcgggcgggaatgtggaaggcggcgaaaccgaggacgtgctgggcagcatgatgtccgtgttcggtggcgccgtaatgttcttaggaatgcttttcattgcctatacgaccgtcaaaggcacggtggactccgctcaggacggcgaggtgctcgggcggaagatgagcgacatctggattccgttgcgcaccgctgcgggcggcgcgttgctgttgccgctcggacatggctactcgcttatccagatcatggtgctctggctcgcgatccagggcgtgggcgtaggagacgcgatctggaaccaggccgtcgaccagatcggcaaggacggcatgctgtctcgaccgctgatccccgattccaggccgctcgcggccaatatcctgaagttcgaagtctgcgctgcagcgatgaacaagcagttcgaagcttccggccggtcgacgcgcatacaggcagtcgcatccacgcgcaaagtcgtcaacaccggggagattgacgtcgatatcaccgacgccattccggtttacggcggcatcaacatggttcagaagtacaacaaggcgagctacaccgtcgtggattacaaatggaaagctgacgacaactcgtatatgaaccccgatgtatgtggcgcactcacctggaagcagtcctgggaagcctcggaaggcaacagcaacaccaaggtcatcaaagagccgatcctcgcggcccacgcgaaagccatccggcagatgatccaggatatccggccgattgcacggcaaattgtcgccgggcagaagcccgccccgggcgtaatcgatgccgcggcaaacacctacgaaaactcacttcgcgccgccgccaagacggccgtgatgcaaaccagtgatcgagctgcggcggacttcctgaaggccgccaaggatggcggctggttgtttgctgggacctggtacaatcatattgtcaagatgaacgatgtcatgcagtccacactcaatggcctgccggcggccgagcccattgccatcgtcgagaaggaaaccaaggagacgttgcagacttacgccgacgtcatgcttacagccgatgagtatgccaagcatcgcgtcgactcggtacgaaacacctactatgccgagaccaatgtgcgggaacccagggacggcgagggcgcctgggagtacgtcaaaaagatgatgtctgcaccattcatgggtgcgatcaaccagatgacgcagagcatcgccggctccaatctcaaccacatgagccaaatgaagagcttcggtgacgtcatcgtcacgaccggtgaggtgatgctcgccgcgatggccagcgccactggtgtcgcgaactcttgggcagcgcaggctacggtgaaggtagggttcgatgccggcgcggtcttccagttcctctcgggcatcatcaccttgatgctgctcgcgctattcgcttttggtgtgacgctcagcacttacgttccgatgattccgttcatcacctggacgacctcgatcgtgaactggttcgttcttgttctggaatcggtcatcgcggccccgctgtttgccgtagcccacatccatccagatggagacgatgctgtcggtcgggctggacaggggtacatgatgattctgtcgctggtgatgcgcccggcactgatgttgttcggtctcctcggcgggatgctgctgacccagccgatagttggctacatcaacgcggccttcatgtctgtggtctcggggatccaggccgacagcatgacgggaattgtcagcttcatcgcttacgtggcgatttatgtggtgattatgaccaccgtggtgcacatcgtcttcagcttgatccactgggtaccggataacattctgcgatggatcggcaacggttccactggcggcatcgccgacgcagagcgcaccggcgacggtggccaggacgtattcgtcgccggtgtccgagaaacgaagcatggtgctaccagcgggctaggagggcacagcccgaagggtcctgccagcagcaaaggcggcgccgataccccagatggtaccccgccacggcctggtccatcgaataaagacctcttcggggggtga

SEQ ID NO: 328794 - DNA, 339 bp, Pseudomonas aeruginosa
atggcagctaaccttgaccttactggcgggatggcggtcgctcgtcttcggcacgggcgtgagatggctggcctggaccgaagctggcaggcccatgctgataagctgcagcgtcagctcaatgaagccaatcagcagaacgttttcatgactgcgctgcacgaggcgaacaattacatcctgcagctcgcgctggatgcgctgcagaggggcgaggctcaatcccctttgctcagcaaggaagcgcgtgactcgcttcgtactcgatacctgtcccaaaatctgaaggccaaaggttatgccctcaatgagggcgactggagcatccggcctctctga

SEQ ID NO: 328795 - DNA, 177 bp, Pseudomonas aeruginosa
atgtcccaagatcgactcagcgaagccgcgaacttcgaccgcacctccatcagtctgcttgagcgcggcctgcgctccccgactctcgataccgtcatctgcctctgtcgcgcattggaaatcccgtatagccagctcgctgcgttagtcgaaaaaaagctggaagaactaccatag

SEQ ID NO: 328796 - DNA, 1887 bp, Pseudomonas aeruginosa
atgatttttcggcaggacataaacgctctcagagcattagctgtatctctcgttatcttatttcacttcggagtgccatgcttcgaaggtggttttgtgggggtggatgttttttttgtgctgtccggatacctcatgactaaggccattgtgcctgccttaaagagtgggagattcgagttctgctccttctaccatgcgcgagctaaacgtattatccccgcgcttttagtgctttgtgttgttgtaacactgtttggctatttctgtctgccagtagatgagtttcggactcttggtcgtgaggttaagagtagcttgctattttatagtaatttcgctcttgctgcctctagtggctattttgaatcgcccaaggcagaacattggctgttgcacacctggtcgctctctgttgaatggcaattctatatagtatatccagtcctactcttggggctgtacaggtttttagggattcgatggttgtttgccggggttctgatcgcgggtgttctttcttatattttttcagtataccttacttcaagttttcctaatcatgcattctacatgctcccggccagagcctttgagctgctagccggcgcggctgtctacctatgccccgttgttcttcgtagtagtctgcgaccggttactctgttagttggggctatcctgattattgcatgtgcactattggtaaccgagagccttgcatggcctggctatcttgcgggaattccggtgctggggactgctctagttataatggcggcatgcgacgctaaggtgttccagctcgcaccggttcaatatttgggaaatatatcgtattcggcgtatctttggcactggcctgtggtggtgctgctctacttttgtggacttctttcctcgctgacctggacggtcttaggcattgccttttcgcttatggtggcgagcttgtcatatcggtatgttgaatgtcgatttagaacaaaatctgaacgccctgggtggtcattggggtattacttctcgataacaatactggctgtttctgtctccgccggagtttcgtcagttgtgaagcgttatccaaatcttcgatccgcagatctggagcaaggacagccgaagtacgccagctctctctatgaacagcactgcacacctaactcatacggcgcggctgattgcattttgggtgagggtgatgtgaaagtaatactattcggtgacagtcacgcacaatctcacgctgccgcagttcagattcacaatcgtggtgcggcagttggctgggcgctcggtggttgcccgatgttggttgatttctcaatgcgagataaagagcgagagaggaagtgtcagcggttcaatcgtgaaaagcttgagatattgagttctaattatatcggtgttccggttgttttgtttaactactatcagctctatatggagcataatagtggttcgtttgtctatgaagtagatggtcgaggtggttctcatttgcgagcctcttatgaagctcagtttgagtctgtcgtgtgcgggattgcgaaaacgcatccagtctatctggttaagcaaactcctagaatgccatttagtgtttataaaggagctgctcttcaagagaggctttttaatacgaaggttgacttcagtataccgttctctgaacacttaaggagaacagttgaggcaaatagactaattgactcggtagctaagaactgcaacgtcaagatgatagatcccgcgccgctgctttgccctaatggaaggtgtcttggtacactgaaccatgagccactgtacttcgatgacaatcaccttgttgatgctggtaacaaattgattcagggggtgtttttgcaggttttcgactag

SEQ ID NO: 328797 - DNA, 1290 bp, Pseudomonas aeruginosa
atgacggcgagaggcaggagattgcgcggagcgaggaggcaacagggtttcgccgcaatcgaaatgattgtggtgctgatcctggtgatctcggcccttgggattggcgctcaggccatgtttgaccatgcggacaacatggccgcgcagactactgccgatcaccagaagatcgtttccgacgcggctgcagcctatatcaaggacaactacgccgcggtggttgcagctgctggcccgaccacgccggcgacgatcactaccacgatgttgaagaacaccggctacctgcaggcgagtgtcgcagacaggaacagcttcggccaggcctactcagtgctggccatcgagccgacaccgaacaagctgcagacgctggtcgttaccaccggcggtgagactatctccgagagcagtattcgccggattgccaagcaagtgggcgcccgtggcgggtacgtttcgaacaacgacactaccaaagtcgaaggctcatttggggggtggagggttccgttagcgtcctatggcgtttccccgggagccggccacttggcgaccgcgctgttcttcgatgacggtgccttgaccgacaactacctctatcggaactcggtagcggggcaccccgaggtgaaccggatgaacacctcgatcgacatgggcggaaacaacctcaacaacaccggcacggtgaacgcagcggctgcaaatatcacagggaacgcgagcatttccggcaacgccactgtcggtggaacgatcaaggggcagacggccgacatcaccggggagacctacaccggtgggtggtttcgtactcggggtgatagcggttggtacaacgagaagtgggtaggcggctggtacatgagcgatccgacgtgggtgcgctcctatgctaataagaacgtgtacacgggtggagagatgcgcgggggcaagctgacctcggaaggacggaccgaagtaggcgagttccttcagctcaacggtgtagccactgagggtgctggttgctctccgaatggccttgtaggccgtagctctattggggtagcgttatcttgccagtctggggtatggaaagggagtagctctggtgaatctattttgggggggtaccaaaccttcaacaatgattggactggagcatatgtaggttgtcgaactatcaatccacacacaggttcatgtagttgttcttcaggttactctcctcgtcaaatcgcctggggatggaatcctgggggatacaactatgtcggagggtatttgtgcgttaggtaa

SEQ ID NO: 328798 - DNA, 978 bp, Pseudomonas aeruginosa
atgagttgcccagatagctcttcgcagaaagagttcggttggatcgatctctatatcggcgagggctacagcgacatgaaacaggtagccggggcgcacgcgcctcggatccctgtcccggacaacatgcaggagctcatccatgcactacggcagaagtgcatggagggctatgccacgcatggtgagtcggaatttgcagtgatccacgaggggacgatgctgcgggtcacccagatgactgacgtgaccaacagtaacgtcttcttcatccggcggccggaggcagaaatccgtcgtttcgcgacactgggcctccctccccatgcagtgaagctgctgctcgacaagggcacgcgaggattgatcctctttgccggtgagatgggtgtcggcaagaccacctctgctgcatcgctcgtggtggagcgtctgatgatccatggcggcgtcgccatcgcaatcgaggatccgccggagacgccgctcaacgggttgcatggccccggccgctgcatccaggtgccggcatcgcgcaaggccggcgggtatcgagagcacctcatcaagaccatgcgggccagtgcggatttgatcctcatcggtgagatccgcgactcggccgccggtgttgaggcggttacggcgagtaccaatggtcgactggtgattgcaaccgtgcacggtcgggacatcccggatgcgctgtcgaggatctcgacctggtgcgcggaactgccgaacaacaacgatctgctcgccgacggtttgagtgcggtgatttggcagacgatcaagcggcagccaggtcagcctggtcggctcatggtgaagacgttgtcaatcggcgcgaacgacactgggatccgggccaagattcgaaagggcgagttcggtcagctgcagcaggacatcgatcagcagctccggcaggcctcttggagcaccgaaaacttatttggaggaacgagatcatga

SEQ ID NO: 328799 - DNA, 567 bp, Pseudomonas aeruginosa
atggaaaaaacagcagtagtacagaccggaaaacctggcatcaatcgcaaagctctggcgaagaagcaggcgggcttcggggcgatcgagatgatcgttgtgctcatcattgtgatcggtctgcttgctctggcggcgagccgatgggacaccctgttcggtagcaacgaggctgccgaagaaatttccaacgtcaacatgctcatggccggagccaagaatctgaagacctcttccggttacgggacgtccggaacgaacctggtacctgccttgatcaaggcagacgctgtgccgaagaacatgacagtgacctctagcgcgatctacaacacctggggtggcgctgtaactgtcgtatcaactggtaccggcttcactgtgacctctgctgcgattcccgaaggtgtgtgcatgactctggccacgaagctggctagtggcggcgtgtattccaccaagatgaactccggtaccgcgattatcggtgaggtcactcaggccgctgctacttccggctgcagcagtgccaccagcaacaccatcacctgggcgagcaatacctaa

SEQ ID NO: 328800 - DNA, 1083 bp, Pseudomonas aeruginosa
atgcagttgcacgatttgatggccaggctggatctcgcggtgatccggctgcagttctacggtgctgtgcgtatggaactctatgaggcgctgtcactgctcctcgaaaaccgggtgctcctcgatgtcgcgctgaaggacatgtacaagatttacagcgagaacgggaagaaaccgaagcgggcgctcgccgcggtgacctacgactgctaccgcgaagtggcagacgggaagccactttccaaagcgttgtcgaaatgggttccctaccaggagtacacgctgatcgccgccggggaacgctcgggcgatctgaagtcttccttcgataactgcggaaagatcatcactgccaagcaggacattctgggagccatcttgctggccactgtgtacccgacgttcctgatggccatggtctgcgtgatgctcgtgatggtgtcgaccaagttggttcctaagcttgctcggacttccaaccccgagacctggtccggcgccgccgcattcctctacgacatgtcgcagttcgtcatccactacggtgcgatcaccttggttgggattctggtgttcctgttcctggtcttcgcctcgctgccatacctgcgaggtggattgcgcgtacacctcgacaagctcccaccgtggtcagtgtatcgaatgctccacggctcgaccttcctgctcaatgtcggcgtgatgatccaggcgaacgtttccctgcaggatgctcttcgcatgatggccgctgaagcgagcccctggctgcgtgaacgtctcaatgctgccttctacggtcttggcatcggcggcaacttgggcgttgccttgagcaaggccggatacgactttccggacaagaaggcggtgcagttcctcatgattctgtccggcaaggatggcttcgaagaggcgctgtgtaatttcggtgatcgatggctcaagaaaagcatcaagcagatccagtcggccgcaaagatggcgatcgccggggggatcatcatggtcggggtaattctgatgacggttatttcgggggtgtcgggtatccaagacgcaattcaagcggtagcgaaatga

SEQ ID NO: 328801 - DNA, 1563 bp, Pseudomonas aeruginosa
atgggcgttcctgcgttggcatccatcgaaacacctcgtgaggtgctcaccgcccccggcggcaagtacgcgatcgatgagaagctgcgggatctggtgtgtctgaccgatgatctggtgctccatgtctcggcctcgcacctgggcgatccgtatgtgctcggcttcatggagcgtctggggcgtagcaaggttcgctatacgctgcagaagcacccgttgccggaaattcgcgacctctatgccaacgcggcggcagcgcggccggcaatcgcggtcgccaagccggttgggctgatcgaagaaaccactccgcggcaggtgcaggtgcagcgtctcgtcaaggacgcaatgtcctgcggtgcgagcgatatccacctgaccatcgacaagacgcgccatacggcgctcatcgaataccgcgtgaacggggatctggtcgtgaaggaccagattcgggcggaggacggccaggccatcgcttcaacaatctaccagtcgatgtgcgatgtcgcagatccgacctacaacgacctgcagccccaagacgcccgcttgaaacagtccttcgtgaaggcctggggcctatacggcgcccgcattgcgaccagaccgaccgacaaagggtcgctgatggttatgcggttgttgcggacttcggccggtggatcactggaagagcttggctacctgctggagcagatccagttgatcacgcgcatgatccagcgtcgcaaagggatcatcattttctccggtccgacagggtcgggcaagtcgaccactctacagcgcgtgctgagcgatctgctggagctattcgaatacaagatccgcctgctgacgatcgaaaacccgccggagtacgagatcggcaaggggcgggcaattcaaaccccgatcttgtgcgactcggacgatgccgaggcggtatctcaggagtgggctcgctcaatctccaacacgctgcgtcttgatcccgatgtgcttatggtcggcgagatccgcgacctcgcgaccgccaaggcgggattcacggctgcgatgaccggtcaccaactatggacgacgctccacgcgaatgatctcgtcgccattgtcgagcgcctgaaggatttgggcatcgagcaaagtctgctgacggatcccatgttgatgacggggctcatcaaccaggagctggtgaaaaccctctgtaacagctgcaagaggccgttcgcgcaggccaaggcgcaactgcctgccgacctcattcaacgggtggagcgtttctgtacgcccgagaccatctacgtttgcggccctggctgtgctgactgcaacggtaccggtgtgctcggccgcacggtggtcgccgaggtgatgatgccgaacaagggcttcatgaaggccttccgcgaaaaagggaaggcagacgcccgggcctactgggtggaccagatgggcggcatcaccaagaacgctcacctcatacggctggtgaaccaaggctgcgtggatccgctgcacggcgagcgcgatatctgcacgctcgacgaagacgaaatcactctgagggactga

SEQ ID NO: 328802 - DNA, 522 bp, Pseudomonas aeruginosa
atgcccaaaaataagatgccagctgtggtcacagtcgcgctgctggccacatcgtttggtgcgttcgctgacgatgccactgttggtgacctgactcacctgcaggggcaagtactgctcaagaaggcgcaggtggatctggccaagcaggaagaagagctgcgcaagctcaacggcggggctgtcggaggcattccgatggggcttgcgtccagcggaaacgtcgacgctggcacgccgtcggtccgagctgtggcgggggtaaacggcaagctatatgcgaccttcgtgtattcctccgggattacggcggacgcggctgccggcgagaccatccccggggggttcaaggttgtccatgtaaccgtggataaagttgagctgcagaagggcggccgtcggttccaggtgggcttcgcttcgcacgcaccgtcggcggtgggtgctaccggaacgaaccctgggatggggcagcctgggtacggtgtaccgcagcccatgcttcctggcttgaatccgtaa

SEQ ID NO: 328803 - DNA, 1341 bp, Pseudomonas aeruginosa
atgggcccgatggaggatgaagtcatctcgacgccggtcactgtgacgatggtgaacgggcagagtttcgtcagcggcctgttctggcagccgctgagtaagccgcgggcctacatgcaggaagcccgagagatcggcaagcgcgagaagatggatatcgtggcgatccgccacgggagcatcatccaagccgggttcgtctcaaagaacgccggtgtgaccaaaggcatgtacagcctggcggcagcgctggccggtgcccttggtgagtcctggctgggagtgttcgcccttggcgccgagcgttacgcgctggtcggcgtgaaagacggtgcgatcctgccgggttgcgatgtcgtgggcgatcatgcagagattcaagaaaagctgcatgtcttccaagcgttcttcaccgacgaaaacgacaagttcttttctcctcccgaatttgggctgtcgagcaacgagctctacctcgacaaggtattggttgcctccagcctcaagaaagagtttcggctcaagcagctcactttcggcctcacttccaaggagtggggcatcgtcggcgtgctgggagtaatcgccctggttggcaccgttggcttcttccagtggagggctgcggaagaaaaacgaattcgcgaggagcgaatccgtgttgcagaagagcagcgcttggaactggagcgtctgaacgaaaaggccaagcaagagcagacgctgcaggcactggaacacccgtgggccaaaatggccgagatcgatggcttctggcgtgcatgtttcgcccagatcaccaaactccctctagctttcgacgggtgggtgttccaatcggcccgttgctccttcgacaaggtcgacgttacttactcgcgcacgggcaatgccacggttggagatttcattatcggcgctgctccgcgtttccccggcgccgagcccgccttcttcgaagaaggccaggctgcagcagtacatgtgcctctggaaatgggggtggggggggacgaagccttggagcagctgaatgtgctgctgaacaagttctcctcccattttcagcggctcgggctcaagcctgccatcaatgagaaggcagaagagcagcgtcaggtgatgcctggcgaagatcccaacgatcccaacgcgccgaagaaacctgagccgttctggcggacgtttaccttcagttacgagtcgcagcgggcgccgaacgacacgctgaacggtctctcagctcctggacttcggctgacagaaatttcggtaaacctcaatttcgaatcggcccaactgacgtggaaggtcgatggagagatctatgcccaaaaataa

SEQ ID NO: 328804 - DNA, 1692 bp, Pseudomonas aeruginosa
atgaatttgaagcccttgatcgcgagcttcctgctcgtcgccaccggtggctgcacgatcaccaacgtcaatgacaccatgcggcgtgccgaggtcgcgagcgagtcggccgaaggcctcgccgccagtatgcggtcgcggcaggatacgccggcaaggcccactgttcgctactccgacaccccatgggtgtcgactcgcccgatcgacctcaagatcgatggcattccggacgccttgaactgtgacatcacctactcgccgaccgtagacgtggatattttccaggtcggccaggagatcaccaagtggtgcggcattccggttcgagtaactccggatgtgaccttgactggtagcagcacttccgccatctcgttgccgtctctgaacgatggggcgcagagttccgctgccaatccggctagcagtatggggcttcccccgctgcctgccctgcctcaggggggctcggcactgggatcctcaggtggtcgcaacctgaccatcagcggcctgaaatggaagggtgggcccgctaaagggcttctcgacatggctaccgtgcgcctcgggctgtcctggaagtacagcgcagctgagaacttggtaaccatcttctacgtcgacaccaagacgttccgcttctacgccatcccctcggtcaccgacatgacttccgtcgtacagtcggggactaccactgctgctggtgttagcaactctggtacgagcagttccagcagcggcggtggtatttccggcaactctggtagttcgcaatccaccggtgtgacgatcaacacggacatcacgaaggacatcggcaacagtgttcagtcgatgctcactccaggcgtcggtcgcatgtcgatgtccagctctaccggcacgatgacggtcaccgatacccctgaggtgctcgctcgtgtcggcgacttcctcaatggtgaaaacagcaacatcaccaagcaggttctgctcaacgtcaaggtgctaagcgtgaccttgaccgacaaggacgatctcggcatcgactggaacctggtctacaaggcggtgaacggcaaatggggcctcggctggaagaacgttactcagactgacgctgccgcagtgcaaggctcggtcagcattctcgacacgagcagccagtgggccggctcgaacttgctggtcaaggcactggctcagcaagggcgggtgtcgaccatcaccagtccttctgtcaccacgctgaacctgcagccggttccggtgcaagtagcccgtcagacgagctacctggccagcattcaaacgaccaacacggctgacgttggatccaccacttcgttgacgccgggcaccgtcacgtccgggttcaacatgaacctgctcccctacgtgatgccgggcaaagagctcctgctgcgctactcgatcaacctcagcgccttgaagcaaattcgccaggtctctagcggtgacaacaccatcgagatcccggaggtggacaaccgcattttctcgcagatggtcaagctacgttccggcgagacgttggtcctttcgggctttgaacagtccgtggacaacggcagcaaagctggggtgggcagcgcgagcaactggcttatgggcggcagcctcaagcgtgacaacagcaaggacgtcatcgtcgtcctgatcactccgatcgtggaaggttga

SEQ ID NO: 328805 - DNA, 618 bp, Pseudomonas aeruginosa
gtgccggcccctaaccccggtggatttaccctgctggcggtcaccttcgttggtcagccctctggtgagatcgagattcggcgcggtttcggccgccaggtgcggcttaccgaggcgctgaagcagattgcgccggtgggctggcatgggtacttgaaggccgaaatggtcggtcgtgtcgacaagggcaaattggtcgattggcgaggtggccgccgttgggtggaggtccttgacattctggccacagagcaggggctttccgctgaggtcgactggaacaagcgcgagatcttcatcggtgagaagcggccggtgtacaccccgtcgactgctgtcgccgtggccaaggcgccgccgccaaagccgatgtggacagcaaagccgggcagcacgctcaagacctccgtccaagagtggggcaagaaagcgggttgggatgtggtctggaacgccgactacgactacccgatcaaggcctcgctcactttcgaagggagcttcctcgacgcaatcaccacgctgttccggagctacgagaaggctgaaaagccgttctgggttgatgtgtaccagaaacaaactccgcccgtcctggctatctcagcgagaaactga

SEQ ID NO: 328806 - DNA, 1137 bp, Pseudomonas aeruginosa
atggcttcgaaaaacaatactccggccgcggccggtgctgacgatgtggttctcgcggtagttgatgacggtttccgccagatgaaagggctggggggcgacggagcactcatcgcgcatccgtctctggcccgtgcaggcttcaccttgtccctgatcggtggtggggacggggacgcaggcctgggcggctaccagaccagtgggcgcgagtacaccgtggatccacaaatcgacggcgaagacactcgcttcgatgatttctcgaccagcgaaatcaaccgtgtcctggtgcaccacacccttcatacgctcgggctctccggtaagcgagtggtgttggccaccggcctgccgttccagtcgttctttgttgccggcagcagcgagcccaaccaatccctcatcgatcgcaagatggcgaacctctcccaagccgtcgaaccgctgggcgggttgcagcccatccagatcatccagcagcgggtgacggcacaaggcctggtggcctacatcgactacgtcgtcgacgacaacggcaatttcaagtccgacgttgagatggatgcccccgttgccgttatcgatatcggtgggcgcactactgactgtgtcaccgtctatggcggcggcaagctggatcacgtggggtccggtaccggtgtggtgggcatcagcaatgtctacgacatcatcgagaacgagctcaagcgcaagttcggtgccagcaagatccgtctatccacgctggagcacgttgcccggcaccgcaaaatccgcctcagaggcgagcagcacgacgtcggcgacatcgtcgacgctgcggtagccgagatctcgcaacagatcatccgcgaatctaagcgccggattggcgatgccgccgagatgcaggcggtgatcctggtgggcggcggtgctgctctcatgtccagctgcttgaaagaggccttcccgcacctgctcgtgccgtcgcgcccggagttttccaacgctcgcggaatgctcaagtacctgaagatggaaatcgatgtcgacgcgcttctccaggagctggccgggaagtcccctgcggagcagcagctggcgatccaggccctggaggcaatcgcggactcctcggggcagggggcctga

SEQ ID NO: 328807 - DNA, 270 bp, Pseudomonas aeruginosa
atgcctagaaaaaacgaatggcgcaataccgccctcacggtgcggttcttcattttcgacgcgagagcagcgtttcctttcgcagtgggtctgctgcatgtcacttggtggacgatgggcacggcgctcgccgtgttcgtcttcttcggtgcattggagtggatgggcatttcagtcgtggtggctctacgcatgctgcgcagttggattgccggaccggttcggtacggagtcgcgtggtggcacaagccgcaaagaaaaatcaaataa

SEQ ID NO: 328808 - DNA, 1206 bp, Pseudomonas aeruginosa
atgagcgttctaaccgttgctcgggatcggttgaccggctacctcatgagaggcgagccggcccgtttcgccgatgccgatttcgaccaggtgcttatccatgcgatggacatggaggcctcggatgtctacttcaagacctcccgcccggtggttgctcgtgtgcatggccgactggtccgcctgactactaggccgctgcagcatgctgaggtagttcgcctgtgcgtcctcatgtacggagcgaatgccgaagttgaacttcgcaaaggtaccccactggaccaagccttctcggtgaaggtcaaccgtgacaaggactatcgcttccgttggtgtgctactggcgttcgaatcgacggtgctttcggtatctccgtgatcatgcgggaattgaaagaggttccgcctgccgctcgcgagtccgagtatcacccggacctctggcgggcgctctttcctctgcaggggctggtcttcatcacgggagagacaggcgccgggaagacgacaacactcgcttcctggattcgcaaaatcgctgaggatcccgagtcggacactcacattgtctcgttcgaggctccgatcgaataccgcttggactctctgtctaccacttcctgtgaaatcgaccagtcggacgtgccggccgacgttgcgtcattcgccttgggcgttgtcaacgcgctgcgacgggatcctgacgtgattctggtgggcgagtcgcgtgacgccgaaacaatcaaggccgcggtgctggctgcgcaaacagggcacctggttcttagcacccttcacagcaacagcgtacagaccacgttcctgcggctgatccaggcctgtccggtcgaggagctctattcgatcatgggggctgtgatcgggaacatcgagatcatcgtctgccagcgactggtgcgctccacggatggccgccgttgcgcagtgcgcgagcatctggtgttcaacagctacatccgcaacgagctgctcaagaccgctgcgaccaacatctcgcttctgccgtaccgcgccggccagctgctggcccaattcggccagtcaatgctgcaggacgcggaacggctacacgcggaagggcgcattgatcaaacgcaggtcgatctgttccgggcggagggggaggctgccgacgcttcctcgcaggcgcaactcggtgcgctggaggtggctcatgcctag

SEQ ID NO: 328809 - DNA, 810 bp, Pseudomonas aeruginosa
atggcgccgtttaagtgtggcctgctggctggctgcttgctcgcatcgtccggtgtatttgcgggacaggatgcgccgccgccagatctgtcgggcgtgctcaccggcagtaccaatgcggcgcatgagtcgagcattgaaagtgacattccacccattcgtctgagttcgctgaaagaggcggcactgggatatggagttcgtagtggtttagcccgtcgctcctatgagatcggcaagatgctgagtgctaatgagtctcttctggatagcatctttaacttcgctgctctcgttcttgaacgtaatgtaatgcctccggtgttgtcctacggccaggtaagtttgaacttgccggacgctgaaacaatccgcatagcggatgcaacttaccgtattgaaagccaagcgagattcgtcacggcgccgaccaactggcgcgactacttactgcgcgacttccaatatcaagtcgaagtgccggctaccagtcttttgccgaagaacgacgctgagaagaaagtttgggagaaatacgtttcccagggttgggatatcggcttcaagcaggctgatgagatttttggccagtcattggctcggctggaacgtgattacaagggtatggttatttataagagccttctggccaaaggcatgattagcaagccctatgttgctgaatcgaagatgggtattaccggaaacggtaatgagatcaacatcaacgatcgggttcttcgtattacggcaaagcctcaactgcagaccaacccggcgatctggaaaccggtggcggtgccgcgatga

SEQ ID NO: 328810 - DNA, 489 bp, Pseudomonas aeruginosa
atgaagaaccgagtgattgctggctctctgcttgtcgctacgttgttgtccgggtgcgctgggactggccgtggtggcgacaagaactacagcgacgatcccgcctaccagaagcttcaggaaacagcgaagaacatccagcagtcgctcacgcagctcgctgaagctgagcagtacgacaagatgaagaaccggccttcgcagccacggatctacgcacagatccgcgggatggagcaggtcgtgaccatgccctggcacgggtccctcgaacaggctgtgagcaagctcgcgtcgttctcaggctacgaggtgaagttcatgggcaagccgcctgcagtaccgatcctcgtgcagattggggaatctccggcgagcatttctgatcacctgcgcaatgtcggcatccaggccggcgtccgagccgacatcgtagtgaacccttcgcttcgcgttgtggaagtgaggtataccgatggcgccgtttaa

SEQ ID NO: 328811 - DNA, 972 bp, Pseudomonas aeruginosa
atgattccgagtagacttccggaaacgaatgagcagtacgtcatcaaggccctctctgtctgctcccaagctgcccaggcatacggcatcgactccccccattcggtaccgccgctcacggtgatcgagcacctcatcacccgtaagccctcgatcgctcgcaacacctggaagcagtacaagaacgccctacggcatctattcacggaacggatggcggcgagcgaagagaaagtcgtccaggaagagctccaggccgctctccagatgctggagacgacctcgtcggagggcacccttcgaaaagggactcagacatcctccaagaagcagaagggctttaagcgagccgactaccaacgtctgctttcgtacctggagatgcacgagggcaaacaccgctatgcgcgcccattgaagacctggttgaaagcgacctacctggtcggtctgcgcccgggagaatggaagtcagccggcgtgacggagatccacggtcgccccgtgctcaatgtcgagaacgcgaaggccacgaacggccgcggcaatggaacgttccgctccctggatctgggggatctgacagctgatgagctgggggacatccacgagatgatttcgatgctggaaggctacgccggcgagctcccgttcgacaccctgcaggagaggatgggcaattacatgaagtacgccaccaggcattgctttgggaagcgaatgaagtatccgacgctgtactcaatgcgacatcagttctcagcgaacgccaagctggccggcaacagcaaggccgaggtcgccgccctgatggggcatggaagtgacgagaccgcaggagagcattacgcgagaaaggtttcaggcgatgccgccggaaaggtgaagccgttagcctctgatgtccaaaaggtgcgattgaagtcgaagacgttcaagccgaggtcaaaagttactttaggcggcgaataa

SEQ ID NO: 328812 - DNA, 363 bp, Pseudomonas aeruginosa
atgtctctgattaacgagtaccgtattaccgagcaggccatcaaagatctccaggatcgtttaaccagcttgcagcaagatggccggatgaaagcagagctcgaattcgataccaagctgcgtgctttgatgtctgaatacaataaatctctccgtgatgtcatcaatttgcttgatccgcaagcacaaaaccgcagttcgaagactcaactgacttctgggcgccgtgagcggcagttgaaacgctatctcaacccaaacacgaatgaggttgttgaaacgaagggcggtaatcataagattctgaaagagtggaaaacccagttcggcgccgacgtggtggagtcctggctgcagtcgtag

SEQ ID NO: 328813 - DNA, 762 bp, Pseudomonas aeruginosa
atggcaaccagcaaacgcaacggcctgacacaggcgtcaggcatcacggctgatctagtcttggagcttggaaccttctacagcgcccaggatatgcgtaaggttcagaccggccttactgccgctgcccgcgaagtccgtgctctgactcagtacggctcgctacttgggcgcctgggcgagaaactttcccccgagcaacgggagcttttgaccaacgctgcagcgcttctggattcggtcaaatacaacgtgcagcacgcaaaggagcgcaaggctcgcgacgagaaggctatagccaaaaagcgcgagctgtgggagcgacaggccgagcagctggtcaagacgaactttgccatgcctgcggataccgtgagcgagcagttgcagatccttgagctttacctggttgcccgggttgttctggggcacgcggtctacctgcaggaccactcccggctgcgtaaggtgatgcaggaggaaccgccgcgttcttcacattacaccgttgcgcaatggcgtcgaaatgaggtttcgagcctcgtcgcggatttgcgatctgccttccgtgactatttaagctgggatctggagcggacgcccgcccagcgtctggacgagttgcaggctagcctggctacgtatcgcgccgatactcttacacagcctcaagccgtagaaactatccgcatctgggccgacgcgcttaaaggcgcagcctttattgcgagcgtgatgcccacgtccagacccccaaaatag

SEQ ID NO: 328814 - DNA, 306 bp, Pseudomonas aeruginosa
atggaattgaagtttcgcaccaccactggcgccatcatcggcgccgacccgcaggtagaagcgcctacccccgtgggcctagctgatcctgcctctgagcgtggagtaggccaggtcgagtccgcgcaccttctccgtaaacaaatcgagcgcgtcattcgtgagtacagcgctgatccagcgcaagccgctctggccgtctgcgttatcctcgacgggaatctgggcctggctgaagacggctgcttcgacgatgacgaaaccgtgttgaacgcaattttggccaatgaacaggccgacgactga

SEQ ID NO: 328815 - DNA, 195 bp, Pseudomonas aeruginosa
atgactgacaaaccgcaggcgatccccgattcgacaaccgagcaagagcaatgcctgggcattatcaacgcagggcatggtgttgtgaccacgccatcgagctacgacccagccctgtatgagcgttttaagcgcatttactcggaaggtgatccggtgataattaccgggaatatgaaagtcttccgaccataa

SEQ ID NO: 328816 - DNA, 234 bp, Pseudomonas aeruginosa
atggcaggcataagaaagaccccagcacagctgcaggcccagtgcgatgcttggaacaagctgcacgggatcggcacactgatcgcttatgaggacatccgcggggagggggagacgcatcggggcaagtccaccaccgaggcgcaagtgcttggtggccactcggcagtcatttggctggaagggaagagtggttgcgttagcctcgatcattgcatggctctggcgttgtaa

SEQ ID NO: 328817 - DNA, 528 bp, Pseudomonas aeruginosa
atgaagcgcttcttgattgttgctgcaatgtttcccatgttgaccactgcggcactggcagaaaccggatcgaacattttccttgcgggtaaggtattccaaggcgacgaagttgtcgcttcgtttgccgcgccgacccttctggggaatacccttcccgttaaagaccaggtcctgcacagctatatcgaaaaagcggtaagcgacggcaataagacgcagttgattccgggaaagcttgctacgggcctcgctatgacgatgacaccgactgctgtggttggcgaaaacgtaatcgtcgccataaagggctcgctggatacgctggaggggtttgataaggcgcctttggctggtaccgatctggcgattgatttgccgaagatgcgccgaaacgagttcagtcagtcgttcgaaatcaagaagggtcagcctctggagttcgcttttggcggctgcaccctggtcgagggtaccccgaccaattgcagccacaaattggttcttgaggcctctgcaaacaactga

SEQ ID NO: 328818 - DNA, 930 bp, Pseudomonas aeruginosa
atggcaaaacaagttgagatgccgctcgatcgctttgagcgcgacctggttcagggcagcacgaagaaggctatgtcgggtgcgaaaagccgtgacctctggcagatcgatccgcgcgagctgaagttcatgccgggcttcaatacccgcaccccgcgccctggtctggaggcacacattcgggcgttggcggactcgatgaagtccgaaggctactacctggacaagcctatcgcggtctacatcgctcgcgaaggcgatcaggaggtcaagtacgttactgatggccactgccggacgaaggctgttcttctggccattcaggaaggtgctgagatcgcaacgattccggcggtaccggaagaacgtggcgtatccttggaggatttgaccgtcaagctgttccgcagcaacagcggtttgccgctgacgcctttcgaaaccggtctggtttgcaagcgcctggttcgctacggcttggaacttgacgtagtagctgatcggatgggcctcggccctgcttatgtcgatggcctactgatgctcgtaggggggccgaaatctattcgtgatgccgtaatcgacgatcggatctcggccactgaagcagtcaagctcctgaagacgcatggcgataaagccgtcgaagttcttgaacagatgcttgctgcagcacaagcccaagggcggaacaaagcgactgcaaagcacgcaccgggcgcagcgatcaagcgtgtggtgaagaagcactccgactcgctctaccaagctgcaaagaccgtacgccaggatcctggatatatctccctggcagtcgagacccgactgctgctcgatgagttgttgcgcacactcgacaaggccgagaaagatctggcgtctgtcgattccgactccgacgcgcccgaagaagaacagcggcaagcatag

SEQ ID NO: 328819 - DNA, 273 bp, Pseudomonas aeruginosa
atgactgccgaggaaaccaacggggcagtgctccgaaggctgattgaaaaggccggcatgactcagctggaagcgttggagctggtgaacgtgggacaggccaagccgatcgcggtgagcacctggaaggcgtacctggcgaatcgggaaagcaagcggtggcgtgaatgccctgaaacgatcctggtgcacgccaagagcagattgggcgctgatagtcgtgattcgatatcaacaaatcagacaacggatacgcagggtaggggacagtga

SEQ ID NO: 328820 - DNA, 1125 bp, Pseudomonas aeruginosa
atggacagcaatgagtacggattggaccaataccccttcgtagatttcgagaaccagatctatcccgctaggttcgtggctgaatgtcttcagataggaactgtatggctcggagacatcgtacgggaacataacctcaacatccgccgcattcctcgaggcacggtcgagacccgcggttacacactcgaagacatcttccgcatcgcatcgatcaggcgcgagatcggagcaatcaaacccttcccgcgtcccatcacgctctccgtatacgtgcagaaaggaggcacggcaaagacgaccaccgcatgcaatcttgctatccatttcaacttaatggggctgcgtactctggtaatcgacaacgatcctcaagctgatgctaccagcatgcttggttacgaccccgacctcacttcagcagagctggaggaagtcggcgtgccaggcaatcgtgctgtggacggacacattgggaatctcatgcgcgtgggcaatacctatacccctctatcgttggaagaggtcatcaagaagccattcggtgagtacggcccgcatctcattcctgccgaggtcacgctcgacgagatggacatcgtgttgcgaaacgcaaacggtagtgacttccgctactcgatcttcatcgagcaagcgcgcagcgggaaactgccgcactgcgacctttccaactacgacgtgatcatcatggacaacgcaccgtccggcacaatgctttctcgcaactcgatggtcgctgctgatttcctggtctgccccatccggatggataagttctcgttcagagccctgtcgcgccttgcattccggctgagcgagttcgccaaggacttccagcggtcgcctgagatcattgctatcccgactatgtacattcgcaatcggccgcggatccaggccaacctggaacgcctgactaccctattcccgggcaaggtgacgcagagcccgctttatcacaacgaggactactccaagagtcttgaggaaggcatccccgtttcgctgtggcgtcaggccagcgacaattccgtcggcgctttccgcactgttttctctgaggtagtgtcccgtatccgtgacgtactggaggcttcgaaatga

SEQ ID NO: 328821 - DNA, 1035 bp, Pseudomonas aeruginosa
atgaaatccacgcgcccacttggcactagccaacccacacacatccagggcgttccagttgcagaagctcccgcagcaaacctgggtaggtccatgagcgatatcttggcagagcggggcctgctggacgttgatcctgccgccacgcctgtggctcctacagaaacttttcaccgtgaaaagtcgaaaagttttcaccgtgaaaactcggttggacatgctccgctcgaaggtgagtatctaccaatcaaggagggcgtaaccctccttgatacggacaaggtagatccgagtccctatcagcctcggaagatcttcaacgaatcagcgctacagctgctggctgacgcgatccaggccaacggcggtctcaacaaccctattgtcgttcgccccaaaccgaatggtcggttcgagcttgttggtggtgagcggcgttggagggcgcatgagatcctgcagtgggataagatcgaagcatatgtccgcgagctttctgacgaagatgcagctgtcctggcagtcaccgataatgagtcccaagagccactaaccgacttcgaacgggccttgagctacaagaagctccttgacagaaaggccgtgaagaatcagatgacgctttcccgccgcgttggccggagcatggctactatcagtcgttgcctggcctacttcaagctgccgcaagagattctcacgctgctcgaagacgatccggcgttcatcggcaccaagcatgttgccgatctggcagcattggcggacgaagggcataaggacctggttgtccaagctgcacagctcgtcttcgatggcaagctatctcaggaagccgccgttgcttggatcaaggcctcatcaaggaagagcaatgatccccccgcgaaaccaccggttccagtgaaactcttcgcgaaagggcgcgaattggccgatctgaaggttcgagggcagaagatcacactcgaatgcccgagaggcgtaaacccagaggaagtccttgaaataatcaaaaggcacttcgatccatga

SEQ ID NO: 328822 - DNA, 1053 bp, Pseudomonas aeruginosa
gtgaccacaaaaataatgtgggacatcattgacgctaatggaaaaaacgagtggggtgtcactactgcattagccagtgccactatcaaggaaggcgtatgcacatatgcttacagccacgccctacgcaccaagctctataatccagagctctatgcgcgaatagacctgttgaccattagtcgcttcaactctggtcacgcattggcactctatgagaattgcgcgcgttaccgtgccatccggcagacccctgtgttccccttgcgggtattcagagacctgcttggtgttggtagcagtgcatattacgacgagtttaaacaactcaaccgaaaggtaatccaaccggcgatcaaagagatcaacacggtttccgacatacaaatcgatgttgagcttcagcgtgaaaaacgaaaggttgttggagttaagttcttgatccaagagaataaccaagggttattatcgatcgactcgccgacaagctttaatactgccttaatgacgaggctgcaggagagtttcctgttaactgaggctcaggctaaagaatcactcgccctccactctgaggaccgcatcgaagcagtcatgtcttacgttgcggatcggtatcgtgatggcaagatccgaaatggatccaaagcgttagcgccctacttcttgaaaattttgaaggaaggggatattgctccgctgaaaacaaatcttgacgaatcgcctaaaatcactaatgcacctgttcaagcggggttacttgaggatgatctgcagattcgcagggagtacaacagtttccgtaagcagaaagttgacgagtacctttccggcctttcccaagaacagcgagaagagctcaatcatgacttcgagaaaacgcttgttgggcaacggttgataatgaagaagtggcgagagtacctggatacaggtgaaggtagcgctatggtggttaatgggttttatcagtttattgcgaaccgtttcctacctgattacgaagctgggttgcaggtgttccagtcgattcgagaaggtatcaaaacataa

SEQ ID NO: 328823 - DNA, 519 bp, Pseudomonas aeruginosa
atgtcttctacctatgcagagaacgaggtgttcagcttctgtgggcaccttgaaggagagctcggtggcgagctgaagagcgggtatgcagtcgcccagtcggccgaggaggcaattcggtcgatgcgggaatgtggtttttgcatctcggcgatcacttccttggctgaggtgaaacagaccgtttccatcctggagctcatcgctcatcgccatcccgatatcgagccgacggattacgtagacgtctacccggcagagatccagccctatcctgaaagcaacgtgttctgctttacggggcatgtggtcgatgcgtttggggcattgaaggctggcttcattgtggccagcgatgtcgacttcgttgtgtcctacctgaagggactgggttttgtagtcgaatcggcaacgtccctggagcagctccgccaagccatggcggacatgatggcaattgccgacgacgatgcctcgttcgaccacagctgcgtggtcaatttcaaatcggccgcctga

SEQ ID NO: 328824 - DNA, 651 bp, Pseudomonas aeruginosa
atgtcaggtacttcaccacgcgatgtcgagcactgcctggatctgagccgtctgcagttctacaagaaatacttcggcaagctgctgagcgccctgatcttttctatcgcgctaaaccttgttaccggcggcgctttcgtctgggtcaaaacccgtgacgtcgaacgtgagtatttcggccaggactcggtgactggaaggctcacgcagatggttcccctgagtgaaccctttgtgtcgccccagaggctgttggactggacagtcgaatgtgttggtggagcgaacagttacgacttcgtgcactggcagaagcagctgcagcgcaactcgcagtgcttcactccggacgggtggtcgatgttcatggaggcgctggaccgctccggtaatttggatctggtccagaaacagcgactggtgacctcggcggtgccgctcgcagcgccggtggtcaccaaccaagggatgcgccgaggtgtgtggacctggcagatcgaggttcccttcatcgtcagcttccagggcggacaaggagggcgaaccgttgtcacccagaaaacgctggtgacgctgcttgtaacccgggtgaatccgtttgaaagccgcgacgggctgggaatcgcgcaatacctcgggggcgatctttga

SEQ ID NO: 328825 - DNA, 804 bp, Pseudomonas aeruginosa
atggctattcccgcactgccgccgttgccagacataaatgaggccgcctatcaacaggccgtagagcaagctgcgcctttgactcctgctcagatcaagaacctgcgactgcaggtggatgatactgagcgagcagctgccgctcttccgcggttctttccgaaaatcgtcaccaactcggtaacggtgtcgctttccccgggcgctaccccgcaagtagtccgcctattcagtggatttgtcacaacgctgatggttgttgaccaggcaggtaacccgttaatcgtcaaaacggtcgatgtcggaggcggagacaaagacttcacagtgacttgggaaaaggacgctgaaaagtcaggttcgaactatgtgaagatttcgccgaagtcaccttacgcttttggcaatgtatcaatcaccttggttgacgtgaatgtcccaatttcgctgactctggtgagtggccagcgagaagttgacgatcgagtggacgtccgtgttcaggggataggcaatatcgcaacggctgctctgccgaaaggagtcgtgcctgcaatcctaaccatgctgtcggggttcggccctgacggcgccaaactactgactagctccaacacggaagtgatggcatgggaatacaaagataagttctttgtgcggacgaattatgcacttttgtccccggcttacctttcgatgcagcgttcacctgatggaattgctgtttatgagatcccaaggacacctgtcgtggttgcgttgagcaatgggactccacttaacgtcagtctgagcggctactga

SEQ ID NO: 328826 - DNA, 1233 bp, Pseudomonas aeruginosa
atggcggaaaagatttcgaaattggacaacttgaaagttgcccttagcgatggacctaccaggctgatctatggtggttccttattgattatgttgatagctgcgggagctgggtattggctcttcacgagtaacaagaagagcaatgttgatacgagttacgtcaatacttaccaggggcttgaaggtccggctgttatgagcggtggtggaccaatgcctcagtctacccctcagtatgacgcatacatagcacagcaaaatttcgacaatgttcaggctgctgcgcaagccggcggcagcgcagtccctactgtacgaacgggcgtaaccgagaccgtcattgaggatgctgcaccgccgaagaaaaaggccccagaggaagatccggagtcagcccgccggcgtaacgaagagcgagaaaagcagctggctgatgcgcagaagcgttatgacgaggctaggcgcgcaaatgacgaggcgattaaggcgcgcaaagaggccatgagccaacaagttggtctgctggtaaaaaattgggagcctgcctcccataaaacacttgatgtgtactcggttgcgtcgaataacacagcctcaggggcaggaggcacagggcagggcggcactgcttctaatgtgcagactcgagctttgaaactcgcccgtgctggtgatctgcaatgtgggcaggttgatacggcggttaataccgatgagcccgggccggtgcttgccacgatatggcaagaaggcgatctgaaacgtaccaagctgctcggtaaaatcgaggctggtcagaacgctcaaaaagctactttgcatttcactacagcaaatatcccaggggtgaatggttcggtccaagtagacgcttatgcggtagatccgaatacggcacgtactgcactggccactgacgtagacaatcacttgtttcagcgttatgggatgttcatagctgcaacattcctcgaaggctatggcactgcaattatgcaggccggacaaaatcagcagctagttgcgagtcccagcgggacggttgttcaaactgacgctctgaataatacgcaaatactctcagcagcagcgggtaatgtaggcaagagggttgcggatagtttggccgacggggttaaccgtaaaccaacgatcactatcgattcgggaacggccgtctgcatcctgttcatgagcgatgtcgaaattaagggcgaggggaacaagtaa

SEQ ID NO: 328827 - DNA, 933 bp, Pseudomonas aeruginosa
atgagcattgaccaagaagatattctcgggcaagagaatgaattcgaggatgaggataccccgcctgctggcaagaagaaggcggtgaagaacggccagctgatgacctacgggatgtatgcagtagccgtgatcgtcgtgggcttcgccatgttcaagattttcggtccgcggttcttacagagcgacaaccaaggctatgcggccgctcctatcactattgatcagcctgcagggcagggcgcagggcagtatgggtaccaggagcaggggtaccagccacaacctctacctgccgcttccgtgtctgcgccgatgggtcagtaccaacaggctcagagttatccaacggactcccaaatgcaggatcagggggcgacagcatccgtacagcctgccccatccgccattcagcagcctgctccttcagtcgagcaggttgcccaggtgcagccgcaagtcacgatgaatccacagtctgaggcggatgtggagctcccgacatcgggtcagaacgtcgaatcgatcattcaagtccagaggcaactggagcaacaggatatccagctgaaggcaatacaggaaaccctggacgagatcaaaaggatgctgccgataacagcttccaagccggcccccaaagctagtgtcgcgagcaagccaagtacctccccgtcagcgtcgcagaaaaaacctcaacagcaagcccagcgacaagtccagaagactccatcagtttcgggtcagcagaaaaattcgccggccagcgtggcgcttaaggctgtgctcgatggtcgagcgtggttcgtgacgaagggtggggagagcatcagcgtttccgttggcgacacgatccctggcgtgggttctgtgcaacgcatcgatcccgaccaagggcaggtgatcatgtccaacggcgttgtgtaccgctga

SEQ ID NO: 328828 - DNA, 393 bp, Pseudomonas aeruginosa
atgaaagtaatgagtacgctgcgcagtttctggaacaacgcgaaagtttgtttttactctaccagcgcaatggtgatgctggcctttaccgagcttgcttatggcgaaggtgtaggtgcaatcggtcgtcgcgcagccactgaagcggacggcctgggggtgggagcgcaggctctgttcgcgctgggtggtctgatcatggtcggcctgtcgatcttcgagatcaagaagtacaacaaaaccgatggtgcgcaggggaagatttcaatggctgccattttgctgtttggcggtgctttcttgctgtacatcgcaagtgggatcgaaactggctctgacaccatttggggtgaaggcggcggtgataggtctcgtgtacagatccagcgttaa

SEQ ID NO: 328829 - DNA, 714 bp, Pseudomonas aeruginosa
atgatcgagctatcggttgttcgtgacgtccggaaggcacctcttattcagcacggatctcggctggacaagagcgcgggtgagttgcgcaagcaggttattgcgcaaggacgctttggacgccgctgtcatttttgcgattttgcattcgggacaaccgatagtttcgaaatccataatctggatggtgatcacacgaataatgagcttgaaaacttagtccccatttgtgagatctgccacgcgccatttcatctcgatacggtgtcgaagaaatggccatccgatcctgggaaaatcgtcttcctgcctgagttgactcaagttcagctcaataaccttttgcaggtgattttctactgcatggcgatgcagtcttttgcggcggggccggaaaaggtggcttcgacggcggagcatggcattaatccccacacggtatatcgccgtatcaccgaccgggcccaccaggtcgaaatgaatccaaagggtgagactgtccgaaagggcctttcggatccgttggtgtgtggcagactcctgctggacatgagcgacgaggagtacgagcagcggagcgctttgctcggtggttgtcgttatgttcccggggctgactatttcatccagcaggctggaatgtggtccggcaacggtgcgtccttcagtcgtctggacctcgcagcctggcctggcgttgcaggggtagcctga

SEQ ID NO: 328830 - DNA, 1233 bp, Pseudomonas aeruginosa
atggggatcgtcaggcacggttgcgtccgtttcgatgccgatgatccgaacatgggcggctgggcatccgttgaaggcatggaggcatttcgcatctcttccgtagggaacttagataacgacaccctctggtggaccaatctttcgttttcggcaatatatggcgcgaacctacataagacaccttacataaaaaggaccacatatcttaattcatggctgcaagaaggacagacggatatttgtggtgcctgggggcttatacggcgtagttataccgagaaggaaatcaccgagatactttctggggtgttttctcgggtcatgtggtacgcgaaaaccgtctacgggattgatggttcccgttgtgttccaatgcacgacaatctagcggacgaaatccgctgtaagatccttcccgaaaaggaccctcatattgccccagaggtggatggggcactgtcggcagctcatcaatattacacctactgcctgacgccccattacaaccgtgaagagatggtggtagtccgattctctgcgccggctgtcgcgtatgcgcgagagatgctgagtatgatcgtgccaggtgatcaagttgagtatttttctgctgaccagattgcaccgatcgctgacaaggttcattgggtcttgaacaacccgcgcccggtgctggctaaggtgtcggtttcgaacataaatcccgattatgtgaacgtcattgcgtttgccaatggggccaaagccggtagtaaccgatcctgggtatcgcagccagaactactactgttgtcacagtacgctcaggtcgaggtggcatgtgccttcgtgttcagtggctatgagacgctggaagcctcatgcgagttgccgatgttttccgcattgcaggcgatgagtcccggcgccgagatcctcgcaatgaatcactgggtcggtttgtctcgagagaattgctaccggcttgagccaaagagcacggaatatcgtgctgtttctccgcgggcagcctggataacagccgttgatcgcttttttatgtttacttatgcgctgcagcttcacaaagccggcttcgctatcaggaagtatggtgccggtagtgtgacctgcttggtgccgaaacataatttcaaggacgcttacgatatcgcgtcatcaatcggcttacttgctccgccgaatatgtcatctgacattgaggttcaagaggacctgctcaatgtctga

SEQ ID NO: 328831 - DNA, 270 bp, Pseudomonas aeruginosa
atgtctgatatgaacacgctgcttgaaatagccttgcgggactctcgaaatttggaagtgattattgcgctggatcggctgattatccttccggagagcgaggctgcacttcatgctgcgatgaaagatcttgagaccgtaaagtcttttatcaatacgaagttgcctggccacctcaaagagtatgccagggggctgtttgtacagcatggccggctggtggctgagaactacaaagcgaaattggaagctggggagaccgctaaatga

SEQ ID NO: 328832 - DNA, 3027 bp, Pseudomonas aeruginosa
atgagtgctgcaggtatcgttgacacgattgaggacctcctcgcttatgtctgctctaagttcaagatggctatggccgactacgtcaatatcgaaagtattgacgacgaacagaccatgaccatgcgggatgggaccttgctaactgtcctgcaattgcacggctcgacgaggatgatcggcgaggtcgaatttgctgaatgtgacagtttgttcagcaacagtttgaaggcctatctgagcaacggcggtcatgccgtgcatgtctacttcagtggcgatcccgatagcgctgtgcgggacatcgaagcggctatagccccctcccgggcgacggccaaacgcctgggtctggagctggatgacctctttgaggaagacgtaaagcacctttcccagttctgcaccaacgagaaggccttcatcaccctgataacgaggccttcggcggccaccagcgccgagcagaagcgcgatgtgaaggcgaaggaggagttacgcgaggctgcgccgctcccccggatgcgggatgtgcccaacgtcttcgcggccatgcagtcgttgcgcacccgacatcgctcgttcgtagacgccctggtcggagatctgcgctcagtccatatcgctgtagaggtcttggacgtccacaaggctgggtacgaaatgcggatgagcgtagacccggagttcacggcggatgaatggcgtccccgattgccgggcgacaagatccccgtgcgggacgtcagcagaaacccgaaggacatgtcgggggcgtactggcctcgcctcgatcgccagctggtaccgcgagatgctgaaaaagcggggcgaaagtacacggtagttggcgatcggatttatgcccccatgtacgtgcacatgcatgctcaggacatcgagccctttcagaagctgtttgtgcgggtgagccagaaccgcttgccgtggcgtatcagcttcctgattgagtcgggcggcctgaagatggtgggcttcaagaacatgatcgcgagcatcatcagcttcaccaacccggacaacaaggttttccgcgaagcggtatcggccgttcgtgagatggtgaagcaccagaatgaactggatgtccggttgcgtgtggattttgctacctgggcgccgaaagacgacgagaagctactcgcctcgcgtgcttcccgcctcgcccgggctgtgcagggatggggaggtgtcgacatccgtgagaccagtggcgaccagttccagggattcacatcgtcggcgctctgtttgagcctgaatagtgttgcaacgccctcctgcgctgtgctgggggatgtcactcaaatgctaccgctgtatcgtccagcctcgccctgggccgatggcggtgcagttctttatcgcacgccggatggaaagatctggccgtatcagcccaactcaccggtccaatccagctggatcaccgtaggtgtcgcggagccccggtcggggaaaacggtggatggtaaccaagggaaccttgcgctctgcctctcaccaggcatcacccgactgccgatgatcgggataatcgacgtcggcaaaggcagtgcgggtttgatatcactgctgcgtaatgcgctccctgaagacaagcgccacttggcgatgagcttacggctgcggatgacgccggaatttgccatcaacccgctggacactcaagtggggtctcggtacccgctgcctagtgaagtggcgttccaaactaactttgtctcgctgctggtcacgccgatgggagctaccgctccggcagatggcatggttggcctggtcaaattcaccctgcaggaggcataccgctactacgccggcgacggcaacaacaccagggccaagccttacatcccgaacacgcggggcgccgagcaggtcgatcaggccgttgagcgtttcggtatccaggtggacgggcgaaccagctggtgggaggtcgtcgacgcactgtacgaccatggcgatatccactctgcgactctggcgcagcgacaggccgttcctacactggctgatctggcagcggtgagtcgcgagcagcagttcgtcgatctgtatggcgggaagagaactgaggatggcgagccgttgctggatgccttctcccggatgatttcagagtcgttgcgcagctacccgatcctcgctctgccaacggctttcgacctgggtgaggccagagtcgtctcgattgacctcgcggaggtggctcgcagcggatcagccgcagccgaccaccaaacggcgatgtgctacatgctggcacgctatgtcgtggcgcggaatttctatctgactgaggaagatgtcgagtgcttcgctccacgataccggccataccatgagcaccgcatccgcgaaatccgccaggacaaaaagcaccttcagtgggatgaactccaccgcactaagcgcgtgcgccccgtgcgggatcaggtgatcggcgatatgcgtgagggcggcaaagagggcgtgatggtgacagtcctgtcccaggacgtggatgactttgatgaaaaaatgttgtccttcgctaccgtcaagaaggttttctcgaagcagaacgaaaagaaggctgggcgtatgcgagagatgttcggcttgtcgtcgactgcggagtatgcagttcgacacctgattcgtcctccgagtgcgaaggggtctacgttcgttggcgcgttcagtacacgcgaaggcgaatcggtgcatttgctgaacagcaccatgggcggtatcaggctctgggctttttcgaccacgcaagaggacacctacgttcgtgacaccctgtatcgcgaaattggaccggtagaaactcgccgcctcctggctcgcttgtacccgggtggtagcgttgcccgggagatcgaggcacgtaagaagaaggtcgagatcagcggtctgattggtcaggatcgggatgacggtgtgatcgacgggttggtggcagagttgttggagatctacgagcagcagcgatcggaggcgctacgcgcatga

SEQ ID NO: 328833 - DNA, 498 bp, Pseudomonas aeruginosa
atgaatctatccattgagctagtccctagatcctgctggtacagcaacgtccgatcgaacgtcagcgataccacctggaatcagttgaaaagccactgctttaaggctgccaactaccgctgcgagatctgcttgagccgagggcctcatcaccccgtcgagtgccacgagatctggcactacgatgaccaccgcctcatccagcgcctggatcgattgatagcgctctgcccacggtgccaccaggtgaagcatatcggcctcgccattgagcgtaaccaggcccacaaagcgatcgagtggttgtgccatgtaaattccataacccctgatcaagccctgcagctggtcaagcgcgccttcgcgattcacgagattcgttccgcctacagttggtcgctcgacctgtccctactctctggccaataccaggtgaaactcgcaccggataaccgcgaggccggactcaaccgaccagcaacgcctaacgctcagtga

SEQ ID NO: 328834 - DNA, 606 bp, Pseudomonas aeruginosa
atgaaagtcaccgataaggaacgagaagctagcgccgagatggccgcgtggctgggttttctgaggaaggccaagcgggtgactctgcagagcatcgcagaaactcacggaacccatcgggggaatctgtcggcgttcatttcaagcaaagggacgacgcgaaatgtctcgatggacaaactgcgcatggtgctgtttgaccttgggcttctggacggtgggatgctggctcccggtcttcatcgctgggaagtcgatgacgaaatggtcgactccctgtgtgagctgctgaataaaagcgcatttgagcgtggctatgtgtttcgcctggggaatggcctccgggcgtttgcggttgtgcaggtgtgcgaggccaatgcggttttcgcgagcctgcctgtagacagcgtggaaagagtggccgcggggctgaggccgatgcagggtgggcaacccatcagcttggtagatctcgaccgagctggtgacgctcagattcaagcgttgtggcaaacccccgcagaagcgtcggtgtttgcgagcatacagagtctttggaccgacgagcctttgtttcggttgccggttgaggtgaaggcgggctga

SEQ ID NO: 328835 - DNA, 777 bp, Pseudomonas aeruginosa
atggctacccagaagcgaatgaaagctaacgagctggtcactctgctcgctgagctggtggtgatggacatcgagatgatggccaggtttgccaatatccctgtccagaacctgcgttcctggttggccggcaagaaggaaaaccttcggctgcagtcggtaatgaatttgatgtcggtcatggggttgaaggtcgacaacggacttcgtctggatgacgcacgggttcactattggtacatcgaagacagcattttcagccagaagaagagcgtctacgccgcgcttacgaagctttccaagttgctggcaggctgctcgatcacggctgtcgaatcctcctcgccacgcctcaaggagcgtttggggcatcgcttctatctggtggcgagcgacaaggtgcgtttggtcgtgtgcgtgcgtcgcagcttcttccgggcgccggcggtttcccctgacgtgatcaaaggggcctgttggcgggatgacagcgatgatcatctgatcacgaccaatcgtcgtttgtggacgcatttggttgagcgcgacctgaccacgtatgagttcgatcgcatgttcaaccaggttagcgaaaacgtgagttgggctgacgtttcgctcatggctcgcgaattcggcgtgaccgctgctgatgtgtcgcagtggatcctggagcggcatggcgagctggtcccgggtggggcaggggcgcaggatgacgaaggcatcgacctagacagcagcggcggtcgcgtgctgtatctcgcggccggttga

SEQ ID NO: 328836 - DNA, 891 bp, Pseudomonas aeruginosa
atgattcaggatgctctcggttttcccgcttcggtccgcgctgttgttgagggctcacctggtctgaaagcaattcttcgggagcctgctcggagtattgccgcgtcgagtgttgttcgatggcatgagtggggtagtgcggtgcacggctcgtggcctcgtctagctgccggagaaatgctcgggtggcgcaaccactgcggccaatacggcagcttccatctcacccgggaggatctcgccagattgggctgtcgtgaggtcaaggagcaatggcagtgcgagatccaggatgtcgtaggcctgtcagcgtcgaagtcggagctgcgtgacttttccagtcttgacgatatggtcgccaccaattcgcggccgatgatcgaaccggtcaacctggagaagctagagcaaaacctcgcctggtccgagatacgaatactccatcgcgaggatccgtctgatcatttcgcctgctatcgatgggatggtcggcttttcctgatgaactccggtggctcgcaccactttgcggcggcacgttatatcgcttcgcggttacgtcattctgtgccgttgcaagggagactaaaggtctacgggctcaacagcgcctcggtcggctccctggcgcgtgattttgaaatattcgcgctgcgggacgatccggctggttacatggcgtttcacgatgccatgcgggcttatggcgctgcgtacctgcaccgacgcttgccccggccctatgacgattgccgcgctgtatttctgccacgaggtgatgttcgttcgttgcgagttgctgccgtgctccaggagttggggttcttcgacctgggggatcacctgcaggagctcacacgcaggttcgcacttgcctttaaattgaactga

SEQ ID NO: 328837 - DNA, 606 bp, Pseudomonas aeruginosa
atggcccggacgatccaggattacgtcgaaagagcttctacagccttcgaagttggcttcaccagcaaggcgggacagaagtcggcaagcgatgacctcaatcgcgccactgacttgctgaagagagaggtacattccctgtgccatggcctccgcggtaagcccggatactcagaacgggaagccgcagtggagaaggcttactggatgaacctggaccttcacctgtggggagaaaagcggcgagctgagttgctgggatatctgcccgaggcctctacggtggccgatcagtttgacgatctcgccgcgctacggcatgcgatcaagggcgcccctgtggtcaagatggctcgccaggtggacaagcgggtggagcaagttcagaaatccattcgcgagctcatggatatgcggaaagagcagtacgcccgggggcttcgccttcatgatctgttgggtgggttgccggtatatgccaacgtgcacatggttaccaaccagcatggcaccaccttcatgcgggcgttctacttcatggatggggtgatgacacccttgaacgttattcttgccgtgctgcaaacaaagtcgctggagcgatga

SEQ ID NO: 328838 - DNA, 618 bp, Pseudomonas aeruginosa
atgagcaatgttgagaaaaagggacgcataccgtcctgtgtcggacaggcgtcactggcggggagctactatgtcgccgaatgcactctctgcgggtgggtcggtagctcggaagcactgaccgacgactgccaatgcactcaggagttcggcgatcgctattgcctgggcgataccgacgaaattggctccgatcgcctgctcgaaatcgttcaggccatggcccagcgctatggcgagtcgcaacaggactaccatcgcctcattgagcacaccaacgaaaccgagaagtacctggatgaggcggccgagctgttgggcgaaattgtccagagtggccacgcatatcgcgagtgcaccgataagggcagtgcaacgggccttcgggttgctgcagtgctcggctacgtcgctcagtttcagcctgagccgcatcagccggatgaggacgcccgcgatgacaactggatcatgaatccgtgcaaccaggggcaccgtgatgtaggcgctgctggtggtgttgcacagtgcaatcagtgcggtgaagctatttcggcaacgaccactcgggaagctttcgagcgctggaacgcggcccacccggcaccaccggtttaa

SEQ ID NO: 328839 - DNA, 531 bp, Pseudomonas aeruginosa
atgaagcctcgcgagaacttgaatctccgctttacgaaagacgtgcgcacgctagagacctgtcggcttgatttggaatcaggggtgacggctgaggtctttggcgatcctgagaatggcagttacgaatggcgtcttgtgcatgctaacgggctggtagaacagcactctgattgtggctatggaattcctgcaatcgcgatgcgggatgccttggtgaccttctacggggctccgcaatttggcggggatcttgtggatcttcgaactgacggcgagcgcgttcctcgtcattgggatgaggtggttgaggaaaaggtcaccagaccggccggcaccaacagcccggtcgctttgatcaaggcggcagacatcgaactggacgagctgcgctgcgacgccgaacgctatcgtgtgctgcgcgaacattgggtgcggattgagagcggcaccacagtgcatcgtgcccgtggcttggatctttggtgcgatgagcgccgttcggcttcaaatgatgccgtcgatagttaa

SEQ ID NO: 328840 - DNA, 342 bp, Pseudomonas aeruginosa
atgagtaacgtcattcccgtcaacactcacgatctgtacaagacaatcagccatgagcatctggacgggctagtttcttgggccattggcgaatttcccaacgctggtttgagcctggttgaatgctcagatggccagtggtttgttgaggtcgaccacggatcggctttcgatcatctggctggcgtatctaggccaacggttgcgccctacaccgagcctgttttctttcagtctgaggccgaggcacagggatttgcatttacctgcatcaagcaggtgtacccagaactggaaaacaagaacctgtccgaatactacttgggcgatagcgacgaatag

SEQ ID NO: 328841 - DNA, 228 bp, Pseudomonas aeruginosa
atgagtccccagcgtttcgtgagcggcaccaggtttttcactgaggcatttgtgattacagccatccttagtggagcctccgtgatgattgggtacatccacaggattggactgtctccttggtggctgcttttggccgccccactcttcttcgggtttggctgcgctgccttgatgcttaccggatcggtgatggttgagaagggcgaagaggagagggcagagtag

SEQ ID NO: 328842 - DNA, 477 bp, Pseudomonas aeruginosa
atgcaggcgctcaccaccacaggccagctgttcaagcagttcatccagtttctaagggagcagggttaccgagttcactggcacgacatcagtcccgaagagcctgagtatgttcaggtgatttgcaacgggcagcatctaatgccggatggggtgcctagtattccgaatgatggagtcgttgagattgaccacttcgccactatttttctggagccaggcagcgggggaaggaagattcatcgggtattcaaggattggcaggccggcaaaatgttcctcggctccaccaagctaacgccacctcatctagtagcccattacgaacgcatcatcaccgctgcggtcgcgattaatgatgaagagaaggccctgcttgctgactgggttgagcggcacgcctcagagaatagcaacttggcgaccagtgattggccgggctggaaggatgtcgttgctcgcgtaagtgggcactag

SEQ ID NO: 328843 - DNA, 1515 bp, Pseudomonas aeruginosa
atggatggcctgcggatgaccgaggagcaacgtgctccctgcgaaagcaactccgatgtaatcaagatcgaagccggtgctggtactggcaagaccaccacgttgcgaggcatcgccgaggccaaacgcgacaagcgtcagctgtatgtggcgttcaataaatcgatccaggtcgaggcctccaggaagttcccatccaacgtcacctgcaagaccgcacattcgcttgcctacggtgccattggccgtgactacggcaacgtgcatggcaagctgcagggggacatcaagcccttccacgtcactcggcagctgacatccagcttgtcgggcgtgccatcgagtgcccacaacctttatggcggtcgggtgatcgagaccgtgaagaactatctcgtatcggccgattccatgctgagtccgaagcacgtcagcatcggcgacgcgccggtcgaacgtagccattttgatccgcagcggatcctgcaggacgcgatgcaggtctggaccgcaatgcaggatctgcgctccgaggtcccgatgctgcatgacggctacctcaagctctaccaggtcgcagctcgtcggctgccctacgacctgatccttttcgacgaagcgcaagataccaatcccgtaacccaagcgatcgtaaatcagcagcaggcgaagaaggtgtacgtgggcgatcgccaccaggcgatctacggtttccgtggcgcgagcaacgcgatggaactcatcccctcggacgaaaccttctacctgacgggttcgttccgcttcggcaacgaagtagcggaagtcgctaaccgcatcttggatctcaagggtgatgtggttcatctgcgcggactgggggcggaaagcaagattcgtcccttggctgccagcgagggctatgcgtacctcagccgaggcaatgctgcactgttcgaccgggccgtcaaagccctgaccaagaacgagcccttctccttcgtcggcgacatccgcggctaccgctttgaccagatcctggacgtctatcagctgtcgatcaaaggccaggtgaaggatccattcatccgctccttcagcagcttcgatgagctggttgaatacgccgaaatgatcaacgaccgcgaagttaagtcgcgctgcaagatcgtcactgcctatggccgggatatccccggtttgttggagcgaatcgagcgggctgccctcgcgccggtcgaagacggcaacgtcgaggacaaccgtctgatcctcaccacgggccacaagtcgaaagggctcgaattcccgaatgttcagctggctggcgatttcatggagtttctcgactccgacaccggccagttgatcgacatgagcaaggccgacaccaacctgatcgaggagatcaacgtcaactacgtcggggtaacccgagcgcagcgcgttctccacctcaatgagcagctggaggcctacctcgaatacctcgaagaactggcggccaaccgctccagtcgtccttccatggcgtaa

SEQ ID NO: 328844 - DNA, 1302 bp, Pseudomonas aeruginosa
atgtccctgctgaagcgtatccaagatgtaaacaagggcggcgccgacaagaagtacgacgccttcggcgccgtgttcgaggtcagcaccgccgtggaatcgaacggcgcggtcaagctgaccgggaaactactgaacgagagcaaccccaaggtgaaagccggcgaagagatcgtcgtcaccttccgcggcgagtccgcgagtaaatccctgaccaacttcgtcaagggcaacggcaagaagtcgctggctgccccggatgccgcgaagggcaccttcctcaccctggaggggtgcttcttcagcgacgagatggaggacggcaagcgcgtactcagctcgcgctggctcaacaccctggcgtccagcaatgacaccgaccacgacaaccgctcgttcatcgagaacatcctggcgacggcgccgcgtatctcgttcaagaaccccaccgtgcagccgggcgagcccgagcgcatcaccctgccggtgaacgctcgtaccgtgacggcccgcgtcaagaccgaccatggcaccttcgagaaggagtttcctgctgcctgggcggtccaaaagctggaggccctcggcccgaacgacaagccgcaggtgcacatcgataccgtggagccgtcgaacgcccgcaatgtgcgcagccgccaggacctggaagaagtgctcgccgaacaactcggccgcggtaccaaggcgctcgcgctgctgcgggttaccgacggcgaagatgtgctgactcgtgctgtgtacgtcggcttcaagcgcgacggtgacgagtatgtgcccgacacggagaaaaccctggaagatttgttcaagaacaacatcttcaagggcatcccgaatgatgacctgttcgccggcctggccaatggtgacgtgcgtgtggaaagcattcccggttaccggatgaactacgccggcgatccgacgcaggacaacaacgccgcgttcaagctgatcagcgaggtgaaggccggtcgtacccagcgctacgaaatgattttcggtgaacaggcgaacctgttcagcaaggtcatcctccccggcatcgctcgcaccgacaccatctccggtttctcgccgttcaacatcctcgccgacgaaccgggcacctacctggcgaaccagttcagcaccccgctggttcgcccgggcgccgagccgcagcccccgaagcttccggctgaagaagcacaggaaccggcccctgacttcgcctcgctcgaaagcgagttcgataccgcgctcaagggcgaggaggaagctccggccggtcctcgcccgtaa

SEQ ID NO: 328845 - DNA, 5235 bp, Pseudomonas aeruginosa
atgcaacaagccacctctactcaaaccaagaatctcgtcaactggatccagctcaacgcagatgatccggaaacgcgcttggtggcagtcaagttcccttcgggtaccaagcgcctcgtgttggtagcgaaccaggatctcaccaacggccagctccaggtgctgggcgagctgggcttctatcgcagtcggtcggggttcctggttcgcgatgatctgcgcttcagcctacagcagatccagagagcctttcccaaagcccatccggtgaaggtgccgatgaactgggtgactcgcatcatgccggagcgcccggcttcaccagctagtgtgactgcgaccacgaccactcccaaggtctcttccccggcagtcagcatcaccccgcaggatccgacgcaaggccgcgaacagcccgcaggcaacgaaagcgaggatcggcccgacgaggttcttccggttacggtcaccgtcaacaacgcggtgatgtcagcccggccgcttggcatgaattaccgtggccagatggtcttcctgggggaggatgggcgcttcattcaagggccggcccaacagatcattcgggaggccgacagccgcggtgcaaccttcctgtatggggcgactgcggaggacctggctttatgcgccgatggcctggtgagggagattgccggcggtaaggtcttgcggttcgacgatctgaagcgcttcagcagtatcgtgacggagatccccgagggggctgttctctcttctcctcgggctagagaggtgcaggaggccatcgaggccgcgctggttcggcacattcgcaagcaacctgggatgacgcctaaggctgcctacagcctggccatcaagctacacgaagggcaaccgccgctgactgcacgcacctctgagtctgttgctctgcagcagtattcgacgccgctgccattgagtgttgctgtccagcaagtcctgggcagcttcaagggacgctctgttctggagccgacgattgggaacggctcgctggtgtgcaccgtcaaggatgccgccgtggctggcgtcgagctcgacgttcggcgacttgatgcgatccggagagaccggtcggaggcgaatattcagcatggcgatgccacatccttcgacttccgctcgctcaatggcggcggggcgttcgatgtcgttttaagcaacccaccctttggcggcctgcagccgcctcgcatgatgtccggactgaaggtcagccgggttgaccacctgatcatgatccggtcgctgcaggcgcgggcggacgacggcgtaggcgtctatatcattggtgcggacagctaccttgacagccaggccgggctagtcacgggtggatctcggtacctcttcaactggttggcggatcactaccaggtcgacgccgtcgaggtggatggcgggatctacaccaagcagggggcttctttcccgattcgtatcgtcgtggtcggaaagaaggaagctggtcatgcccaagtgccagatcggctgccggtgttgctggaccacgacgaggtgttcgaatgggctgccggcatgtatgagaagtatggcctggcggagattcgaactccggaagtgggctttcaggaagcgctcagcgattcggctgtcgtcgagctcgatggcgatgccccgatggaggatcgctctactgagctgccccatcccacagctgagacggagtccagtgcggcaagggcggtcgcgccggtggatcgcagtgaggacgaagagaactcgtaccagtcgccttatgcggctttcagtcgagccggcgaagctacagcgatggtacctcgaaacttggcgacgcctacccgtatggctttgacagaggttgtgcgggaagagggcgatgttgacggtttcgtggccgctgaactgggctggtccgtggaggagttgggcggctatctctcccctgagcaggtcgacgccgtggctctggccatcaacaccctgcagaaggggaggggcttcctggaagcggaccagacagggttgggtaaaggacgagtgatggctgccttggccaggtactcggtcctgcagcagaagacggttgtcttcctgaccgagacgccgacattgttcaccgacttctggcgcgacatcagcgacatcgggtcggccgagcttttcactccgatgatcgtcaatgatggagtgtcaatcttcgatccgatctccggcaacaagctggttccagccacacccaaggcagtgatccaggctgcgcttgatggcggagtggtggatcccgcctacaacctcgtgctcggtacttattcccagttcaaccgggacagggccaagtcgtctaaggcgcgctggatcagccagatcgcggagggcaaagcattgttgctggatgaggcgcacaacgcggctggtgagtcgaatactgggcagaacatcggcctcgccatcgataacgctgacttcgtcgtttactcatcggcgacggccatgaaggctggcaagaacgtgatgctgtattccgagctcttccccgaaacggtggatatgggggcgttgccggagacgctcgccatcggcggcgaggttctgcaggaggtactctcgggaatgctggctcgggatggcgtgtttattcggcgcgagcacgaccttagcaacctggcatttagcaccgtcagcgacgacgagcgagaagagcggaatcgatcactttcggacaagctcgccgagatcctggagctgatgaactacttggccggcgacatcaacgagttggtcaacaagcggaataaggagatcaaaaaagcactggaagccattccggaggtagagcgcaagggcaaccggatgggggcggtcagcaccaactttgggtcgcgcctctacgcgatttaccgccaattcatgatggccatcaagacggacctcgctgctgacagggctatcaaggccctggaagagggcaaaaagccggttatcgtgctggagagcaccatggagtccctcctggtggacatcgtggcagaccttcggcctggcttcgatgaggctgatgccgaagagttcggagccagcctgcagggcgagaccgagctggatggctatctcaccttccgggatgtgctgcaccgcatgctgcatcgcctgacctactacgtggagaccaaccgctatggtgaggccaccaaggtcccagtgacctccgaagagttcatggatgtggtgtcgacagtggacgggttgatcaatgacttcccagatctgccggtgtcgcccctggatgagatccgaaccagaatcgcgacggctggtttcatttgcgatgagctttccggtcgcaagctgcagatccatcagcgagcagggagcttcttcgcatcccctgtgcttgaaaggcccaaggctcagatcgtaaaggactttgtgacgggcactaccgatgcccttctgctgacacgtgctggcagcacgggtatcagtctgcacgccggcgaaaagttccctgaccagcgacgtcgggtaatgatcgagctccagtccgctgcagacgtgaacgttcgggtgcagttcttcggtcgcgtcaaccggaagggccaaacgtcgtcgccggaaatcgagacgctgtcgtcgggcttgattggcgaggcccggcccatcgcgatgcagaattccaagctccggaagctatccgccaatacgaccgcaaaccaggacaatgctgctctggaccgttcggtaccggacttcatcaatgccattggtgacgaggtcgccttccggtatttggaggccaatccgcgaatcgcgcagcgtctcgacatcaatctggagaatgaggacgaacgcgaagaatcgtacttcatcaacaagctgaccagtcggcttgtgatgctgcgtgtggtcgaacaagagcagatctacgaagctctcaccaatgaatacctccgggtcatcaaggagctcgacgccaagggcgtgaaccccttgaaatcgcgagagctcgatgtgagagctcgggaggtggggcgggttgtgtacgagagcggaaatccccattccgatagcgcattcaatcagcctgtcttcgccaagacgatcgagtatgacgtcgcgctggatccgatgagatcggatgccgtcaagcgcctggttcgtgagggtaccgctgcggttgagcacttcaggatcaatcatgagcgacgtcagaaccaggacttcttccttgccctcaaggggttccttgcggtcaaccgacggaagtttctggagaccgttttggcgaaggatttcaagtcggttgacgaggcgctggcggctaagaggccgaactctgttcagaagatgatgcaccgcctcaaggtgcttgatggtgtccttgacggactgcaggtcggggccgtagccaggtttaccaacaacgacggtgaaactgatttcggcgttatcgcttcgatagccgtgcctgacaacccgaaacacatccacctgcttggagggtatgaactcagctttgcagtaccgggccggcaaacgctgatcgaccgaacactctacagcctgcaggacgacgttcagttccggatcatgccgaaggccggcttgctggatgacctcatgctgcggttcgacacagcgcccgctgggaacgtgacataccagcggctgatcctcgacggcaacctgttcaaggccgcccagatcgcagctgccggctccatcggcagcagcatcatttacaccgatgagcggggtgcacgtcaccgcggtgtgttgatggccaggggcgtcgacctcaaacatctgcaaagcctgccagttcgcgtggaaacggcggctatgtgtggagaggtgctcgaccgcttcccggcggtgaggctcacaacctcgccaggcttgagcgatgacgacgaaagcgagatgcgtcttttcctgcaggacggtatggccgtcatggaggttcccggaagtaaggtctggggcggtcgttattttgggaacgaagacctgatcaaggttaccgggcctttcgccggcacgcgaaaggtgatggtggccaagttccccaccgagaacatctcgaaagcgatgggcattttgtacaggcagggcgtttctctctacgcagaatcctctttgagacaagctattaacaatttaagcggtgtcatatactctaacgaaagtgaaaatgaagagcgcatgcgcgctgtgaaagcttag

SEQ ID NO: 328846 - DNA, 345 bp, Pseudomonas aeruginosa
atgacgccgttcgagaaattatgctcccgcatggaaatgccgtcggatatcggccgcgagctgccttatgtgcagctcgggtttgtcagcgctgatcaaagcactggggccgatgccgcagttgagtggattgaaggtgatgacgagcaccggatccgcgtttcggtatccgaatggaaaaaggccgaggccggcgtcatccgtgagccggtaatgcaggtcgaattttcggaaagctccggtgagcttttagtgccctccggtgagggtggcgaagtgatggccgatctgctgttggccatgcagggtatgagggtactagggggtgatgatgcaagcgcgtaa

SEQ ID NO: 328847 - DNA, 279 bp, Pseudomonas aeruginosa
atggacaaacaactgaaagacctggtgaaaaaagccggcaccttcgctcgggaaaaaaacgggggcctttctcaccgaatccgcaccaaacttgacgagatcaagcccgccattgcggtgcttgctcaggagcgtctcacccccagcgatatccgcgagttcatccagaaagaaaccggtatgaagatcgggatccagagccttcgccggtacctgaaggacagcttgaactaccccccgaatggatctggcggcaaagattcggccgcgggagagtga

SEQ ID NO: 328848 - DNA, 2151 bp, Pseudomonas aeruginosa
atgaaagtctacgtcgccgagaagcccaagctgggtaaggccatggttcaggtgttgtcaaagacctcgccgataaccaacaggggggggactttcgcggaaggaaatggttgggcggtttgctgggctgcggggcacatttttgcgctcgaagaacccgattattacatcggggctgctttcccaggcgccccgaagggtaagaacggcaagttcaaatggagttgggatcacctgccgctcttccctgggcagagcgatttaccagggtggtcaatagcgctcgactctgagaaaaaggatctgttcaagacgatcaagtcatttgtcgcgaaggccactgtggtggtcaatgccggggatccggaccgcgagggacagttgcttatcgacgagatcctggagtttctgggcaaccggaaaccggtgcggcgcgtgctcatttccggcttcgatgaaaccactgtcgcgaacggtctcaagggggagtctgacaacgccgagttcatcggtcttcgcgacgcagcgcgatcgcgctcaagagctgattggctggcggggatgaacctcagtcgtgccatttccctccacgccaaggaatgtggatttcaagggtcgcacatagcctacggccgcgtgatgaccgcattgctgggactgatcgtccagcgtgacatggcgatcgagaattttgttcccgttgattatttcgcgctgttggcgcgattcaaggtcaccaaaggcgatttccgtgcgcgctggaagccgtaccctaaccaggcgggactggatgaaaaagggcggctgctggatcggcgcctggccgaacaactgaacgctgcagtccaaggcaagaccgggaaagtggtcgagtacagcgacactgaaaagaccgaatcggcacctttgccattctccgtcgaccagctgcaaattctggcttcgaagaagttcggctacaagtcggatgcggtgctgaaggctctgcagagcctctatgaaaagcatgagctcaccacctatccgcgatccgactgccagtatcttcctgagagccagcatgctgatgcgccggaggtgtatgccgccgtcacaaataacctgcagttcggcgcaccgctgcaggaaattgatctgactcgcaagtcgcgagcctggaacacgtccaagactccggttcatcacgcaatcattcccactactcgacgggccaatatctccgccctttccaggatcgagcaggacctttatgaggagatctgtaggcgctacttggcgcagtttatgccgcttcatcgctaccgtcaggtggaggtagttgtcgaggtctcaggacaacgcttcggtacctccggcactactccgcttctgctgggctggaaggcactttacccgggcatgaaaacgaagaagaaaggggaagacgacagcggcgagaacgacgtactgccgccgatggccgttggggatgctgccctgtgtgaaggcctggacatcaccgcgaagaaaaccacgccacccgatcacttcactgacgccacgctgctcgacgcgatgatcaacgtgcacaagtacgtcaccgacgagcgcatcaaggcgatcttcaagcagatgatcgatgaccgtaaatcgggcgaagaagaagccgcaggcggcctgggcacccctgcaacaaggcataccttcgtgccgaagttggtcgacctggcccaggtggagttcgtgaagccgaagggcaaacagaaggaagagttcatcatctcgactcaagctggcagggcgttgatccaggcgctgccggccgagatcgccaagccggacatgaccgcattgtgggagacggcgatgcgcgagatcgaggcgggcagaagcaccatcgatcgatttgaggcgatgcagcgctcgtggattaccaaggtgatcgcggagatccgctccaaacccctgaatatcccctatacggcccctgcgaaagcgggggtaggcaaagggaatggaagctcggggcctcgtgtcgcaccggagccggtgggcagggcctgtccgcaatgcggcagccagttgatgaagcgaatgggaggcaatgggccgtttatcggctgcgagggcttccggtcgggttgcaagtacaccgaacaagtagccgcataa

SEQ ID NO: 328849 - DNA, 684 bp, Pseudomonas aeruginosa
atgatgatcggcgtgagagatctggtgattgacgagttgcgtgctgtcgcagccgtaccgaatgggctggaccgcaacgtgttggtgcggatccaagacagcatcgctgccgacgtgatttacctgtaccgcgagcagctggaacagatgatgaggcggcaggaagtcgcgggcctgcccgcggctattgcgaagcaagagcggcaggattttttcgccgagcgactgaatctggaataccgcaatcgagcggccaacggccaaggcttcagtttgccgctctacgtggagtcggcgaagaacttctaccacctggagatccggcgccatttgcagcaggtgcaggactacctggtccatgggcgggcggtgaacgagctgaacgccggcgccgagagcatccgtgagctgcgtgctcgggatcccagcctgaacgccctcgcgcacaaggtggccggtgggctgaatgccatcaacgaaaccctggagcgcctttctcgggtgcaaaccggggcggccgctcaggtcagccgtgaactgcgtagagaaatgcgggacggtctgggtgagctgcaggaagaccagtttgcgaattcgctgctgtccgaggcgcaaatgttggcgggagtccagcgtatgagcaacgagttggaagaaggcgggaatagcctgaaagtacgttga

SEQ ID NO: 328850 - DNA, 516 bp, Pseudomonas aeruginosa
atgactgttgctctgaatacccaattcacctacccgcaggtcgtcatccagtcggccgtccagttccccgccggccactatgttgagctggacgatatcgcgttcgaggcgaacggcctcggccgcaaagttgtccaggcccagtcggtcaccgcgcatggcaaagagttttccgtcggctacctcaacgtcgacggaaccggttatgtgccgatccaggacagcgcccgccccgttgatctgggagacctggattcgatcactcgcgataacgcggatctatttcgcgccctgcatcaggccttcggcggagctgcagatagttacagccacctggaactggtggttgcactccgtagcgccactcaccagggcatcgctcctctgaactcggccgaactgaagcggatcgctggcgaggcgcgtgtctatgccaagcgtgccgtgtgggttcatctcaattcgatcgaggcgatcactgatgcgccgatcaattgggcatccaaggacctgtaa

SEQ ID NO: 328851 - DNA, 714 bp, Pseudomonas aeruginosa
atgcggaaagtagtaagcccagtgttccagccgatcgtggacgctcggacaggtgctgtctcgcattacgaagcccttgccagaacgaggggggtccgttccgggcatgtaaagctgctgcagatgggcgaggaattcggtttcatcgacctcatcgacttcgaagtgctgcggcatgtttttcgtttactgcgcgatcggccatatgtgcgtgtcgccgttaacgtgtcggtgctgacgatagaggaatcctgtaacgagctgctctcgctggtgttcaagaatatggacctggcgcaccaggtcgttttcgaaatcactgaaacggcgcagatcaacgatatgccgaggatccagcagttcgtcgcggcggttcgcctattgaacgcgaaggtggccatcgatgacttcggcgatggtttctttaccgcgccgcttgtgcgcgaaatccagccggaatacctgaagctgagtggagatctggtcgcaaggctctgcagcagcggggagatcctgcctatccgggatcttgcgcgctcgttcggtggcgagttgatcgccgaacatgtcgactccgaagaaaagctcgcccggctgaaggagctgcgcgtgggcctagtccaggggtttcatgtgggccccatcctggaagagttgccagatctgcaagaaagccggttgtctgctcttggcgttgcgagggtcgggctatga

SEQ ID NO: 328852 - DNA, 327 bp, Pseudomonas aeruginosa
atgaatcagaactacatcagcgcaatggttctttgtcgcgatgggaatgccggtacgttcaaggtttcgctcaacgaacaaggcgagctggtatctactgcgccagagtggcagccggaaagcccctctgattcgccgacggagaaggttggaattgtgccgacgatcgaggggcgtaccggtatcggccacgtgatcgatggcgacgtatggagggatctggaagcgaatgggcggctcgatgacgtctggcgtttcgtcctggatggcgaaagtgtcgaagaggctgtcgagtctgttttgcatgggagccgatgcgttatgtag

SEQ ID NO: 328853 - DNA, 663 bp, Pseudomonas aeruginosa
atgccgaaggccatcgttgttgaggatgaccagctggagcacgccgtgaaggtcgcgaaagtcagcagcgccgagaatggcgtccgtgacgccgctctactgctcgcctgcttcggtacgggcatgaccgttaccgaactgtgcctgctgcgcgtgagcgactatctggcagaggatgggagcgttctgcgtgactccctggtgcgggcagagattgcgtacaaccacaaatcgcgaccgctgtgctggacgaacaagaagctgaccaacggcatagacgcccatttggctgagcgcctgaagcgcggacatggggtgtcgagcaggaaggcggcgtatcgcggccttgatccggcctcgccgctgttcgtgtcggggcgcactggcgaagggctcaagctcagcgcgaagcagcgggacggcaagacctactacagcgcgactcagctcagccggttgttcacccggcttttcgagcaagccggaatcgagggcgcgagcgcgcagtctggccggcgcacgctggcggtgaagttgaagcgccgtggcatcgacctgcggcatatcagcgagattctgggcatcgagagcctggaggcggttaagaagctctgtgcgggtgatcctgcccgcctgggcgacatagtgcggaggatcctgtga

SEQ ID NO: 328854 - DNA, 666 bp, Pseudomonas aeruginosa
ttgctggcatctgctgctgacatacgagccattgaaggcgtcatttcacctcagcggcttagcacctacgcggcggcacagggcatgcagaattcgaggcgtgtgcttgagctgtatgcctggaatgccgaggtctcaggggcgttcatgttgccacagcaaatctgtgaggttgcagtgcgcaacgcggcgtcagaggtgctggaggcagtatacggcccccagtggccttgggcgattggctttgaaagaagtctgccagacccaaagttcggcttcagcctgcgtaaagagttggcttcgggaagggcaaaggttccagccggcaacacgaacaaggccatccctgagatgaaattcgctttctgggtgcggttgttcacccagcgattcgacagccgcttgtggattccgcatttgcacaattcgtttcgaggcttgccgcctggggtagcagttcagcagtgccggcagatgatctatgacgaactggataaggtaaggggcatccgcaaccgcattgcccatcacgaacccatttttcagagaaacctggcagcagactatgcgcggatgatgaggctggttaagtggcgctgccctcgaacagccgcttggcttaacgaagttgagagcgtccgggcgctcatcaagaaacgtccatga

SEQ ID NO: 328855 - DNA, 225 bp, Pseudomonas aeruginosa
atggcaatgacaggcgagcagtacgacgccctggtgaagctgatgcgtggcaagccggagagccctgcgtgtagggctgcccgccgtgtgcttgtcgatggtgtatcccaggccgaggccgtgcgggaagccggtatcacgcggggcacagtcagcaaagcagtgcgaagctacaccgaggcggatcagctcatgcgcgccgtgtacggggaagagaaacagtga

SEQ ID NO: 328856 - DNA, 261 bp, Pseudomonas aeruginosa
atgagtgatgttgaaaagcacgacctatcccatcacctggagcaagctgttcaggagctggacgctgattcaattggcttggctcacaatatgtatgacgccacgctcgaacagcttcacgaaattgtgtccttcgctgatcggttgaaagaaggggctttggtcgaaatgtatctgcgggagcgcaaggctcatggcgtcaatgctcagcaactgattttgccccccaaggggtactccggctacaagccggaaagttga

SEQ ID NO: 328857 - DNA, 168 bp, Pseudomonas aeruginosa
atgagtgattacgtcatcagaatgcgtcgccgtcagatcgcatcgcctaagcgcggcatgaagagcgcctgggacgagtggcaagtcgttgatggtcggcgtgtcgtttcgcggcacgacagtgaacagcaggcccaagattgggcgatgaaaaacccgaaattgtga

SEQ ID NO: 328858 - DNA, 156 bp, Pseudomonas aeruginosa
atgagcaagaacgaatgcgttcaacgcgccaggaacctgaatcaacaggccatcggctaccgcttgagcggcaccaagcgcacgttggaatgggccgctggtgcatgcaagcgccgcgacgaatacatgcagcaagcacgcgctgcccaggcatag

SEQ ID NO: 328859 - DNA, 282 bp, Pseudomonas aeruginosa
atgaagcggaaaatagaatgcccggaatgccgtggcccgttgaaagtctggatagacgttgatgcttcccttctgttcaacgtgtcctccaccggcaagctgagcaagcgagccatcgaagacaacacacaaagcgacggtcgttgtggcttgaaatgccaggattgcagctgggaggttttcggcaacgacatcgaggacgacactctattggaggtcatccagaacgctgacgaacagtggcagggactccagttgtccgtggtccgcgccaaatcttga

SEQ ID NO: 328860 - DNA, 183 bp, Pseudomonas aeruginosa
atgacgaatccagagactcacagcgactatccggcgctggaatgcccgaaatgtgagcgcctgcgcaaaccgcagcgtctgaaccaggacggcagtgtgacctatagctgcccgcccgatcatgtgaaccatggcaaccgctacacctggcgaatcgcccaggacgggacgctgatcgactaa

SEQ ID NO: 328861 - DNA, 207 bp, Pseudomonas aeruginosa
atgacgaccaccaccgaagcgcgcgccctggagcgcattaatcgcatcgctacagccaaaagcgagcgcgacgctgatcaccatgaatcggaagccatgggctacatggctgcgttgcgagacgagggcctgctgcccgagtgcgagcacgtccgcctgatgaatgcacttcgcgccgagcgcatggcctggcgcaagtccgcctga

SEQ ID NO: 328862 - DNA, 198 bp, Pseudomonas aeruginosa
atgaagcagcaggacgagtacaccgaggaagaccgaatatacggtgcctggctgggcctgcgtgggcggatcaacaagctcgactacggccaggctgttgaggatttccccgggcagcgcagcgacctctaccgccagatggtggaactggagtcgcagtatcgccaactcactggcgaatccatcaaacacggataa

SEQ ID NO: 328863 - DNA, 261 bp, Pseudomonas aeruginosa
atggccactgaaccgatgcttgataccgagggtaaggcgctgaaagtaggcgcgatgtactgctgtgtcagtccgcgtaatggctacaccgatttcgggcgacttgtccgctattgcggcaaagacgttgagtcgggtcgcgagctgtttgccgatgctgatacgtgggaagaatgctcgatccatggtgaaggcttggcgccccagttgtgcccggctgtagacccagtaactcaaggctggccgaagctggccgcgtaa

SEQ ID NO: 328864 - DNA, 171 bp, Pseudomonas aeruginosa
atggccaccagcccctcccactacaagtaccagtgccgcatctgccagaaagagcacctgcagccggtgcttgcggatgcccccgagaagaccccgattccgcgctgctgtggcggggatcgggacatggcctacaagggccatcacaacgaaacccaggaccaggaatag

SEQ ID NO: 328865 - DNA, 198 bp, Pseudomonas aeruginosa
atgaaagcgcaggacgaatacaccgaagaagatcgcctttacggcgcctggttggctctgcgcggacagatcaacaagatcgactatggccagtcagtcgaggattacgcaggccagcgccgcgacctctattgccagatggaagaactggagtccaagtaccgcctgatcactggcgagtccatcaagaaaggatag

SEQ ID NO: 328866 - DNA, 435 bp, Pseudomonas aeruginosa
atgatgaaccctttaagagagccttcggcgttcacccccaactattgggctgagcgtgtggccgtgctccaagcggcggtgaaaagcgaaagctgcgatagcgacccggttctgctggagatagcccttgaaggtgccgagaacgtgctgcagatggaggccgagctgctcgatcagcctcttgtgggatggacgtacaacgacaacgagataagcgatgtagttgcggcccgttccgctgctcaggccctggcgatcctccaagctgggttcccagaacagacctactatcccgagtgcattgagccggtaaacgagaatggctttccgaatcgtacttggtgcttcgatgaaaaccccgatgagaaattgccctggtcggagttcatcaagcgcatcacgatccctcgccatctggccggcgtttttttctag

SEQ ID NO: 328867 - DNA, 1980 bp, Pseudomonas aeruginosa
atgaagctgtccgactacaagaagtcaccgaaagagttcattcagggggtccgttctgacgggttccgggtgggcttgtccacggctttcgctccttggattagcgcctttttccgtgagaagcatggtggtacctggtttggccagggccgtatgtgggccttcgaccgctcgaaaatcaatggcgcattcgcggcgagtttggccgaaaacctgccatccggaatcctctacgatgtcgggcagtttgcgcaaaagcttcgcctcgccctggcgtctcccgatccggacctgttcgcgcccttcctggatgtccagatcttccctgttgagggcggagacttcgtttgcctatctcggtttgatcctctcctagttagcacgttgcagggcctgcagggcaccttcctgcgtaatcgaaatgcctggcgggtgaaggttgccctgccgcgattgcttgaggtgctggagacgcaggctgggatccgtcgagaacacatcttcctcagcgataccgaaatcgttctggagcagcatgcttcgatgggtgagggagaccgaccaggtgttcaggtgggcggtatggtccctgagcgagtcggcgctggggatgcggaaggcgagaacgcgatgttgagcgtgatcgcaacaccgatgaaggagctatggatcaacgaggcggatctggcgaaggctgtccaggcatatgggctgcatggtgagtatgcctaccaggaagtgggcgttcgtcatctcctaaggtactcaagctgtctgctggccgatgatatggggctcgggaagagccgccaggctgtcgtcgctgcgagcttggtcagggggccgggtgcagtgctggtggtctgcccagccagcctgcggatcaactgggagcgggagatccatataatccagcccgacgcgaaggttgtgatttgcggcgatggcgaggcctggtcgcaggctgactggctgatcgtgaactacgagaggttgggcgccgtcgttcaggccatgagcgacggcgatgtgcgcttccgagtgatgctgtgcgatgaggctcactatctcaaggagcccgactccacccgtacccgaaatgccttcctgctctcgaagcatatcgagcgccggttccttctgactgcgactccggtgctgaaccgggagagcgagctgcataccctgctgcggctctccggtcacccaatcggggccattccgcttggcgattttctgtcggactttgccggctctccagagctcaggaaggcattgagcgagcgcgtttccgaatggatgttgcgtcggcgtaaagatgtactggcttcgttgaagggcaaacgccacgaatttaagtatgtagatctagcgactggtgagcgtgatcagtacctagcggcggtctccgacaacacgcagaccgccatcgtcaaaatcggaaagatccgtcagctactggagcgtctaaaggcttcgtggctgatcgatacgatcacatcattgggtgacgacgacaagtcgatcatcttctgcgagtacaccgagtctgtggcctacctggccgacgagttcgccaaggccgggatccagacggtgaccttcaccggatctaattctggaacaagaaagcaaaaagcgatcgacaccttcatgtcggatccggcggtcaaggtgttcatcggcacgaccaaagcagccggtgtaggcctgaacctggtcgctgccaaccacgtgttcttcgcgtcgctaccgtggactgctgcggcgaagcgacaggccgaagatcgcgcctaccgaaacggccaaaagagagccgtcaccgtcttgatgcccgtgatctccgggacgatcgacgagcaggtcgtactgctgctgcagcacaaggaaagcatcgagcaggatctgctcgatgactctgttcaggatcccggcctcgtcgaagagcagatggccgccaagctttttaacgcagcgtga

SEQ ID NO: 328868 - DNA, 714 bp, Pseudomonas aeruginosa
atgtcgttatcgttgatgcgcttcatggtgaaagcagatgccaagctgggctttgttccctacgacacgctgctcaacaagaagctggaagtgagctaccggagtatcgaggcggcttttcggcgctgtgactcactcaaccaggtgtcagctgggggcacggcccgtgctcaacaggcgcagaccgctgtcgacggcaaggcgccggcgataaggctgctcaatgtgtacaaccgcattcacgaactctacagccggatctgcacgtcggtcgacgggctctcggtttttcgtgcccaccggagcgagtacgacgggctcttggatgaatatgtccagctcgcggccgcgcaggtcgtcaaccgatctgatccgtcgccctactgggaacatgatcgtttcactgtctcgggcgaaggcttctcgctggtttgctcggcgagtaatggtgatgtcctggaggtgagcatccagggcatcgtcaaggacgccgcggcggagacattgcgctcgatcaagcgcgtcgatatccgcgagctagccgagtggttccactctgtcagcgaccgcaatttcgacctcgctggtcgaacgctggatatccgtgccgtcgggtactggccgcgaggcggcggcgaccgcgtgtccgcagacgaagacttccgagaggacgcgctgcaacgccaggtcgggcgccctgctcttcggatgtga

SEQ ID NO: 328869 - DNA, 498 bp, Pseudomonas aeruginosa
atgattgctgagtgtatcggttgcgggtgcactgatgtgtgtgcctgcgtttcagaagatggcgcctgctactggctacgggtggactacagccgtggcgaaggtgtctgcagccattgccccgagcgcgtcgcagagtgggatgaagcgaccggacggaagtcgatcgacgaccagtttatcgagctcatggatgccctcgacgggtgtgataccccggcggcgatcagccagaagctgacggagctccaaggcactgttcgggatattgcttcggcttgtcggcagacggtgctctttagccgcgcccaggcagagttcgagtcgaccaaggccgacatcgagctggggccgatggagggcgggagcctctacaccgcctggtacctgctgatggaccgcatagcacgctcgccgaccaggttccacatgcggagctcggtgcggatcctgcttccccttgtcgccgattttctgccggaggatccgaatgcctga

SEQ ID NO: 328870 - DNA, 1359 bp, Pseudomonas aeruginosa
atggaaagacagctggaaaggcagctcaatgtgcctccgcactcgatcgaggccgaacagggcgtccttggtgggctgctgctggacaacagggcctgggatctggtcgcggacaaggtgcacccggaggatttttaccggaatgatcaccggcaaatcttcggagcgattttggagctggcggaccggggggagcccttcgacatcgtgacggtgagtgaggttctggagggtaagtccggctggggtggtctcgcttatgttgcagagctcgcgaagaacacgccctcagttgccaacattgtggcttacgccaaaatcgtttctgagcgcgcccatctgcgccgcttgatctctatcggcttcgagatgagccggcaggcttacgagcctggggccgatgttgccctggttcacgaagaggcggagcgagctctgtttggcctgagccaggatgagcgggatcaagatttcgccgatatgggggaagtcctcgacgctgttatcgatgagatcgatcgcaatttcaactctgaaagcgaagtgaccggggttccaacaggtcttccagacttggacgccatgaccggtggcctgcaaccggccgatctggtcatcgttgcagctcggccctcgatgggtaagacgtcgctggttatgaactgggtgaagcccatcctggatgcctcacctggcaagtcgatccagatttacagcatggaaatgccggcccgacagctgcagttccggtttctctcccagcttgggcggcttgaccttcaagcactgctgcgagggaaactgcaggatgatgattggccaaagctgcaggcagcagtggcggtcttcaacaagatgatggaccgccttgctgtcgacgatagtgccaacctgacgccgacttcattgagggctaaggcgcgacggggtgcccgtaaatacggtccgccggcggcaattatgctcgactaccttcagctgatgcgctgccctggctacgagggaaatcggacgttggaggttggggaaatctcccgggcactaaaggggctggcaaaggaattcaactgccctgtaatcgctttgtcccagctctcccgcgactgcgagaaacggccgaataagcgtccggtcaacgcggatctgcgtgagtccggcgcgatcgagcaggatgcggacatcatcatgttcgtttaccgggatgaggtttataaccccgacactgagttcaaaggcgtcgcggaactgattctgggcaagcagcggaacggcgccattggcaccgtgcgcacagcgttcattggcaaggagactcgctttgcgcctctggcgcctgagagcttccggagcttcgattga

SEQ ID NO: 328871 - DNA, 492 bp, Pseudomonas aeruginosa
atgagccgctgggagcagagttgccgtgtccagaaagtgatgcagcgcgatcgcctgggatgcggagtggcctgcgccgcgatggtgtcaggcaggtcctatagtgtcgtgcggcagctgttcgtcgacaatggcataggcgctcgcaagaagcggcccctcgccaccaatttctcagagctgcagtatgctctggcgctccttgggatcgagtctgagctgaagcgctggagcagctgggatgccgttgaaggccttggcatcgtggctgtgaacaacggccagggcactgccagtcggaattggcattgggtcgtggctgagcggcacctgaacttcgggatcgttattcatgatccggacttcgatctgccgagtttcagctcggtgccgccaccaggtgtgcattgccatcccttctcggagtacgagactcgcaagagctggattcggattgtgctcggaggcttggataacaagggagggcaatag

SEQ ID NO: 328872 - DNA, 744 bp, Pseudomonas aeruginosa
atgaatcacgagttgaagatccgcgcgaagcggttgcgccgagcagtctccgttgtcctgggccaagacatcaaaacgtcgcagtcacttgagttggtggcgagggaggaaaactacccgaactgggacgctgcttgcgcctgtgctggtgaatccgcccgatctgctgtggatatgatcatcaccgacaccagggaatctcactggagcatagaggggctggtaaaggagcacagtcaagtgcttgatctcttgcagcagatcaccgatcccgggtcgccgaagggcgcattggttgtagttggcggggtaattggcgttggaaaatctaccacgcttcaccggctattggcttacctggccgggcattaccaaggtgtgcgcctgctgtttgctggaattcaagaatatccgctaccgagtggctggcatgttcggcgtttgcacgacgaccgcacatcgtttcgcgccggcggacttggcacaccactgctagtggagaacctgaccgaagagttcgttgtacttttcgatgtccgcaatgacgctgaggctgagcaggcggtgatgctggcccaagctggttacaaggtgtttgcgacaatccattgccagccggggtgtacctctgacacctggtggaagtgcctgcgcggagtccaccagcgactcatggcgcagctgatcgccgatggtagagcagtattcatttcgaaggacataggctgcgcgtctgcagcctga

SEQ ID NO: 328873 - DNA, 1035 bp, Pseudomonas aeruginosa
atggccgaacggggcatgcagttgctgttcctagtcgatgccaccggcaagaagaaccaccgtctgaaacgagtgttgaatcgcgacgcttttccgaaagaattgactaataagaaacgatttatgagcgaacgagcccaacgcaagtcaaatagccacaaactgaatgagatccccgaagctgtgatcctgcaactcggcaagcgctcggatcgcgatctttcggttgaatgtggtatttcggcttacttcttgaagcagaagcggcttgccttgggtatcgaccagttcaaacgtggtgtatacccggaagaaatggttcagctgctggggaaggttactgaccgggaggtcggtgagcagtttgggtaccatatcgcaaccgtctgtgcacttcgaaaaaaaatgggcatagcctccacggttaagcctgcaaccacaccaactcaaacgcccaacgcaaaaaaacgcgagatagtaaaattgccgcaggagctggtcagtcagctgggggtgcgatctgatcaggacctatccactgagttcggtttcaccctgcactacctgaagaaagagcgcaaagcccggggcatttcgagtgtaaatgtgcctaagtaccccgaagaaatgttgtccttgcttgggaaggtagccgatcgtgatttggtggccaggtttggctactcatcaaccacactttcaatacttcgaaagaagttggggatcaagcggcaccataaggtctggacggccgaacgcattgcgttactgggcaaaattaaagactcagaggtcgcggccttgctcggcggcgcatttacaaaaggatcggtcggtcaatgtcgtcgctccctgggaatacctatttgccgaggaccaagaaatggcgccccaactgcccttttcctctcgctcagtcggggcttaaccagcgggaagatggaagcattgccaagcgcacaaccaggtgagaccggacaattgactcaatttccgctagtccctggttcagaagccaattcgtttcaagcctaa

SEQ ID NO: 328874 - DNA, 1287 bp, Pseudomonas aeruginosa
atgaaaaaagtgcttctcaagaacaccatcggtttcgctgtggccgtggcatccactcaactcttcgccgctggattcgctcttaacgaacaaagcatcagcgggatgggcactggttttgccggccgctcttcttctgccgatgacgccagcactgtatttggtaacccagccggtatggcacgccttaagcgggaacaagtgaccgtaggcgcggctgccattctcgccaagtcagatatcagcagagacggcagcaattccccaggcggcagcttcgatggcgacatggttcccaccgttggcgtaccgatgggctattacgtcaagccaattgatgatcaatgggcggtcggatttggtatttacgcaccgttcggcctggccaccgattatgaaaacggatttgccggccgttacttcggtagctacagcaaagtttcggttgtgactctgcagccgaccgtcagctacgccttcaatgacaagatttcgatcggtttcggtccgaccatcaaccgtattgacggcacattgaagtctgatgtccgcagcaactttgctggtacgaacgacggcgaagtgaaaatcagcggggacgacactgccgttggctacaacatcggcgtcatgatccaggccactgacagcacgcgtctaggtctaacctaccactcgatggttgattacaagctcgacggcaaaacaaggatcactggtgctccgttcagcgttttcagtggcaccaagtttgatgcctcactgaaaatcaagacccctgagtccgtggatttctcggttacccacgagctgaccgacgacgtgaccctttacgtcggcagcacctggacccgctggagccgcctggaggacatcacagtcaacaatagtggcgtacctgcgcagttgggcggcagctctggcgcaattggcactatcagtgagccacagaactggcacgacacttgggcccacgccatcggtgctagctacaaggtcaacaaagaatggactctgcgtaccggcctctcggtcgaccagtcgcctaccaacaacgaagatcgttcgccacggatcccgaccggcgaccgcaccgtgttcagccttggtgctggctggagcccaaccgaagacatcactgtcgacatggcatactcctacctgatggaggaagacgttaaagtcagcagctcgaagcctcttgccccaggtgtaaacaccacctacaacgccaagtatgaaaacagcgcacacggcctcggcctcggcctgacctatcgcttctaa

SEQ ID NO: 328875 - DNA, 963 bp, Pseudomonas aeruginosa
atgactacgcattaccggcagctgactcagggacaacgttaccagattgaggctggcttgagcgccgcagagagccaggcgagcattgcaaagcgggtcggcgtgcatccctcgacgatcagtcgcgaggttcgccgcaacagcacccagaatatctacaaggctgtttctgcggcccatgaaagtgatgctcgtcgagcgggtgcgcgcaagttttgcaagccggcgacatggctcagccatcatctcccggtgtggctcaagcatggcatgagtccggagcagatcgcccagcggttgaagcaggagcagccaagccgggcggtcagccatgagtggatttatcggttcattgccgccgaacagcgcgccggtggtgagctttatacctatctgcgacatcgccgaaagcgctaccggaaacgctatggaagccacgatcggcgcgggcagctgcgtaatcgcgtgtcaatcagtgaacgcccagccgaggtcgaaagccgcgagcgcctgggggactgggagggcgatacggtacatggactgggcggtaacctggtgaccctggttgatcgcaaaagcggctatctgagcgcctatccggtcaagcgcagaacgcgccggcaggtaacgcgggcgatcaatctgatgcttcagggccatgccgctcacacgctgacgctggataacggaagggagtttgccgggcatgaacgcatcgcgctacggagccagtgccaggtcttttttgcagacccctattcatcctggcaacgtggcaccaatgaaaacaccaacggtctgctccgccagtatttccccaagggcagcgacttcagcaagctgaccgtcgaagccgtcaatcggacagtagcgaggatcaatctacgcccgcgcaagcgcttgggctggaagacgccgtacgaagtgcatacaggggtgagcgttgcacttatgtgttga

SEQ ID NO: 328876 - DNA, 1602 bp, Pseudomonas aeruginosa
atgagcctatcgtcagtgttggcctgttctgacaaaatcggcggcatgactttgcttcctgatttcgaccaattaaaccctgaacaactgcgcgctatcgccgcgcagctgatgcagcgtgtcgagactctcgatcaaaaagtcgagtccatggacaagcagatccatcactacaaaacggtcaacgacaagctgacccacgagatcgcacagctcaagcgtttcaagtttgccaagcgcagcgagcagctaaatccgtatcaaaccagcctgctcgatgacgtgatcgatgccgatatcgcggccatcgaagccgagcttgagacgttgcaacccgctccagccccgaccgtggctcggcaaaaacctaaacgcaccgccttgccgcccgagtttccacgcacgcccatccatcacgaaccggacaacactcactgccaatgcggctgcgccctcaagcgtatcggcgaggatgtcagcgagaaactcgactacacgcccggcgtgttcacggttgaacaacacatccgtggcaagtgggtctgtgaggactgcgagaccctgatccaggcacctgttcctgcgcaggtcatcgataaaggcatccccacagcaggtttgctggctcaagtgatgatcgccaaatacggtgatcatttgccactgtaccgtcaggaaaagatctttggccgggccggcctcgccatcccgcgctcgaccttggcgcagtgggtcggcacttgcggtgtgcaactgcaaccactggttgatgctctgcgcgaagtggtgcttggacacaacgtggtgcacgccgatgaaacgccggtacaggtgctcatgcctggctcgaagaaaacccatcgggcctacgtctgggcctatgcaaccaccgcgtctgccgatatccgcgcagtggtgtacgacttcagccccagccgctcgggcgaacatgcacgcaacttcctgcaagactggaagggcaagctggtctgcgatgattttggtggttacaaagccagttttgcactcggtgtcactgaaatcggctgcatggcccatgcgcggcgtaagttcttcgacctgcacgccacgaacaaaagcacgctcgccgagcaagctctgcgctatatccagttgctgtacgaaatcgaaagtgaaatccgcgatttggagcccgatgtacggcgacgaatacgacaagaaaaagccgtccccgtgatgaacatgctgcacacttggatgatcgcccagcgcgagctggtacacgagggtgtggccatcgccaaggccctggattacagcctgaaacgctggacggcgttgtcacgttatctggatgacggcgcggtgcctattgataacaaccacatcgagcagcaaatccggccatgggcgctcggacgcaagaactggctctttgcagggtcgttacgcagcggacaacgcgcggctgcgctgatgagtttgatccaatcggccaagcttaacgggcatgatccgtatgcttatctcaaggatgtgctgatgcggctgccgacgcagcgcgccagtgagatcgccgagttgttgccgcataactggctgccgttacgcaacctgtaa

SEQ ID NO: 328877 - DNA, 336 bp, Pseudomonas aeruginosa
atgattcgtatcgacgccatctggctcgccactgagcccatggacatgcgcgccggcactgacacagcgctggcgcgggtggtggccgtgttcggtgcggcgcagccgcactgtgcttatctgtttgccaaccgccgcgccaatcgcatgaaagtgctggtgcacgatgggttgggcatctggctggcggcgcgccgactgcatcaaggcaaatttttctggccgggatctcggcacggctcgcagatggaattgggtgccgaacaactgcatgccctggtgctgggtttaccttggcaaagagttgggcaaaacagtgcgattaccctgatgtaa

SEQ ID NO: 328878 - DNA, 264 bp, Pseudomonas aeruginosa
atgtctgccaatgctgtagtccgtgcccgtatcgacgagcacatcaaggaagaggcgaccgtcgtgctggcggcgatggggctcaccgtgtccgacgccttccgcatcatgttgacccgcgtcgcccgcgagaaagccttgccgttcgagccgctgattccgaacgccaccaccatcgaggcgatgaaggaagcgcgccgtggtggcctgaagtcgtttgcttccgtcgaggacctgatggcggacctgaatgcggacgattga

SEQ ID NO: 328879 - DNA, 282 bp, Pseudomonas aeruginosa
atgcggacgattgaacagaccagccggttcaagcgcgattacaaacgcgaagccaaaggcccgcatcgtcagacgctggcgagcgatttcgtcgccattgtcacagcccttgcgaatgaccagccgctggccgagaagcaccgcgaccacgcgctcaatggcgactggaaagatcaccgggactgccacatcaagcctgacctggtgctgatttaccgcaagccggatgacgccgtgttgcaactcgtgcgtctcggctcgcatagcgagcttggcctgtaa

SEQ ID NO: 328880 - DNA, 336 bp, Pseudomonas aeruginosa
atgaccattgccatcaccgacgacgaatgggacgaactgactcccgagaatttcgataccacttcactgctgcgtgcagtcgatgccgtggatgtgctgcgcggcgatttgaatgacggcgcggacggcacaccgccgcaactgcgcaccgacctgttgaagctgcatcaactggcaatggccgcgttcaacgagggctcacgcagccgagtggctgagctattcgatctcgccgtggatcttcaggatcaggttgatcatctgatgacctcgctggaacaagtgcaggaaaccctgtcccggttgacggcgctctacccagaaagcctgtcctga

SEQ ID NO: 328881 - DNA, 453 bp, Pseudomonas aeruginosa
atgagcgatgaaaagatcccggatcgcatcaaggcgaagctgactatcgagctagatttcgcaaaggaagatcaaccgcttattggagaggtcctgcagggcattctggataatctggggttctccagtgaaggtaatggatcccgcacagcgcagagccactacagctacaagttggaatccaacctcccgaaagagcccatgacgatggagcgcctgttcgatcttatggaccaggctcgtgagccgggagaaccgactactgcagagcagatcgccgaatccatgcacccgaattacgatgaggcagtggactggtgggagagcctcagcgaagggcagaagcagtggttcatcaagaagtacccggaagtaaagctggtgaccaaggcttgggaagtgcatgaggggatggactttgccgatcgagtcttcttccagaccttgaagtaa

SEQ ID NO: 328882 - DNA, 621 bp, Pseudomonas aeruginosa
gtgggaggtcctgattaccactcgatcacgacccgcatcgacagagctctgcttctcgaccctgactggcgtacaacctccaccttcaggctgcacagcaaccatatggaacgtgttctgcgcgatcaggtgaccgtcgtagacgactgcgaccccgacggcggcccctggtcccagatcgatttcgagggcgagctcagtgccctgcactcgcaatcaggtcaaagcgatgaagaattcttggattggatacggtctgccgaatggggtgatacccccggcccagtcgttatcgagaggctggttgaccatggctactactacgagtgggaacgatcagaaatgagtgacgcactttcgcatcgaggtccggtcgacctgacagtggtgtacgccgatggccaccaggcgaatcgcccggccgccgacgtcgtgatcagccgcgtcgccgccggcgcaacagtcgcagtgctgcttgataccgccttgggattcgcgctgctcagccgcggggaggtgaagcgggctcgtctcgttctgccaggcggcgcggttatcgctggcaacgtcagcgaagtattagcggactatttcgagctgattgaagatgggcccccgtag

SEQ ID NO: 328883 - DNA, 351 bp, Pseudomonas aeruginosa
atgagcaaacgcctgcagcatcagttcgaccgcggcgatatcgtctccttggacatgggtagcgcttcagcacaggcggcctgcaaagcgctcgtgctttcccctgcagcgtacaacgtcctggggctcgccctagccattcctatcaccgagcacgacagcagccgctacgccggctttgccgtcgcgatcctccttccagggcgcacgccggcgaagggggcagccttggtcaacctggtgcggccggtggatcttgctgcaagaggtgcaaagctgctcgggaaggcgccccagacgaccatagatgaagccctgcagcgcctgcaggcggttgttgggaaagactga

SEQ ID NO: 328884 - DNA, 249 bp, Pseudomonas aeruginosa
ttgaaaacgactatccgtgcgattgggaactctcagggcatcacaatacccaagccgttgctggccgaactcggcgtaagccttggcgaccctgtagacgtctccttcaaagaccagaccttggtggtgaccaaggtcgccaccgaatatgacctcagcacgctagtcgcccagtgtgacctggaggccccggagccgccggacatccaatgctggagaacagctacgccggtaggaaacgaagcatga

SEQ ID NO: 328885 - DNA, 702 bp, Pseudomonas aeruginosa; identical to SEQ ID NO: 328656

SEQ ID NO: 328886 - DNA, 1725 bp, Pseudomonas aeruginosa; identical to SEQ ID NO: 328657

SEQ ID NO: 328887 - DNA, 1134 bp, Pseudomonas aeruginosa; identical to SEQ ID NO: 328658

SEQ ID NO: 328888 - DNA, 1347 bp, Pseudomonas aeruginosa; identical to SEQ ID NO: 328659

SEQ ID NO: 328889 - DNA, 966 bp, Pseudomonas aeruginosa
atggcagctagctttcgaaagattgattactccctgcgtcccgcaaaatatgcagagagaaaaatgttagtcgatgtctttcgtcgcctaacaccattccaagctattgaagactattgctacgttggttttggctccgtctggttttctgattttatattgttccacaaatcgcttggcatcaagaatatggtttcaatagaagagtcagaaggtgcacgcgaaaggttcgaagagaaccgtccattccaaataaaaatggagttttcaaattcagcgacagccttacccaggctagattggagccaacggacaatcgcttggctagattatgatgacaccttagtaacatccatgttgcaagatatcagatctgtagcagcacgagcagtgtctggctccattttagcagtatccgtacaatgcatgaaagccaaggcgctcattgaataccatgcagaaaacgacccatccaaagaaagcgctatcgaaaggtttcgacaaacttttggtagatcacgcgtaccagatgacacccaagatgaggatctcgcaggctggccatatggcacactatgtcgaaatataataaagactgagattgagcttgcattatcagatagaaacacaaacccagaaaccgccatgcaattcctccccatctgtgaaatcgagtatcaggatgatgcgcgcatgaccactatggttgggatatttgtctcgccggacgagatgagtcgctatgagctttgttcattcaacaaactagacttcatacctccagacaataaggccatccgtatagaaatgccaaaactaacaattagagagcttagaaagatcgagcagcagttaccgaagactgatggcatggagctttccctgggttccatccctccatcagacgcggaaaaattctgcaagatgtatcggtacttcccaaattttgctgttatggagtcttag

SEQ ID NO: 328890 - DNA, 1365 bp, Pseudomonas aeruginosa; identical to SEQ ID NO: 328662

SEQ ID NO: 328891 - DNA, 1137 bp, Pseudomonas aeruginosa
atgcgtatcgacggtcatcgtcaggtggtttctaacgcaacggcacagcccggaccgctactgcgccctgcggatatgcaggcacgggctctacaggacctgttcgatgcgcagggggtgggggttcccgtcgaacatgccttgcgcatgcaggcggtggccaggcagacgaataccgtctttggcattcgcccggttgaaagaatcgtcaccacgctgatcgaagagggtttcccgaccaagggcttctcagtgaaggggaaaagctcgaactggggtccgcaggcggggttcatctgtgtcgaccagcatctcagcaagcgggaaaaccgcgacacggcggaaatacgcaagctgaacctggctgtggcgaagggaatggatggcggagcctatacccagaccgacctgcggatctctcggcaacgccttgcggagctggtgcggaatttcggcctggtggcagacggtgtcgggccggttcgcctcctgaccgcgcagggccccagcggcaaacgctatgagttcgaggcccgccagcagccggacggtctctacaggatcagccgcctggggcggtcggaagcggtgcaggtactggccagcccggcttgcgggctggcgatgactgccgattatgacctcttcctggtagcgccctcgatcgaggcgcatggcagtggtggtctcgatgcaagaaggaataccgcggtcagatacacccccctcggtgcaaaggatcccctgagcgaggacggattctatggcagggaggatatggccaggggaaacatcactccgcgcacgcggcaactggtggacgccctcaatgactgcctgggccggggggagcacagggagatgtttcaccacagcgacgatgcgggcaacccaggctcccatatgggtgacaacttcccggccaccttctaccttccccgggccatggagcatcggctcggagaagagtccgttcgcttcgacgaggtctgcgtggtggcggatcggaagagcttttccttgctggtcgagtgcatcaagggcaacggctatcacttcaccgcccatcccgactggaacgtgccgctgcggcccagcttccaggaggcgctcgactttttccaacgtaaggtctga

SEQ ID NO: 328892 - DNA, 759 bp, Pseudomonas aeruginosa
atgaagaaatccctgctctgctccaccctagccctggcggtagcctctgccgcccaggccgcgccgaagaccgtcgacatcatggtcctctacacccccgcggcgacccagaccgcaaatggccgcgacatcgatgcgcggatcgccagctacatcgagttcgccaacaccgcctacgagaagagcggcgtcaacctgcgcctgcgtctggtgcacaagcagcgcctggactgggccgactacccgacggtgaccggcgccaacctcgatcgcttcatgcgcgacccgcaggtgcagcgcctgcgcgagcagtacggcgccgacctggtcagcctggtcaaccgctcgcagaacagcggcaacggctacatcacctgcggcatcggctacatgggctcgggcgataagaacagcgggcgcttccacggcaacgccaaggacattgcctacaacctcaccggggtcgactgcgggctcaacaccttcgcccatgaagccggccacaacatgggcctgcgccactcctacgagcaggacctggagtccagctactacgatccgcgctacgcccacagcggcacctacgaatggagccgaggctacggcgtgcaggggcgcttcgccaccgtgatggcctacccgcatgccttcggcaccaacaagcaggcaccgttcttcgccaacccgcgcctggtcaacgccgaatgcgccaaccagccctgcggccgcgaccgtcgccgacccgtacgtccgcgctga

SEQ ID NO: 328893 - DNA, 1341 bp, Pseudomonas aeruginosa
atgaccccgcttcagctcaccgaggagtacctcctcgcgcatgacttgcgccaggccagccagaagacctaccgggcagctgctcgcgccctgatccgccacttcggcccagccgtctccgtacatgagataacccaccgcggcatactggaatggcgccgcgaagtcctggagcagggattgtccaagcggagctggaacacctattcgagccacctgcgcaccatctggggacatgccatcgagtccgaactgttgacgcacacccaggtgaatcctttcaataaaaccggcgtgattccaccgaagcgacccagtaaaaccgtggcgctcgaggccatacagaacgcacgggcctggctaaaagtactggagagctccgagcactgtacgggcgagcgcgcccagatcaccccggcctggttctggcgatgcgtcttcgagacgttctacgataccggcatccgcctcaatgccctgctgtgcattcgcaaatgcgacgtgcagtgggacaaccgaatcatcgtggtgcgcggcgagacggaaaagacccaccgggaattctccatccccatcactgacggcatggctccccacatacatcgactcctgaatgaagccgagaccgcgggaatcaagagcacggatcaattgttcaacgtcaatcgcttctcgccccattactcgcgccaggaaatgaacagcgatcaggtcgaagccatgtaccggaagctgacggagaaagtcggcgtgcgcatgacaccgcatcgcttcaggcatacgctggcgagtgacctgatgaagcagcatgagcgcaatatccatgtcgccaaggatctactcaaccactccaatatccaaacaacaatgagctatatcgagacggatcacgatcagattcgggccgtgctcgacgaaaggcgacaagcgcacgatgcgttgagacaccggcacaaaatcgactacagccgctcgccacaggctgccgcgccggttccgccttctcgctccgagcagccatcggctgcccggccaccctcttcacacgccaagcaaccatcggcaacgcgggctgcacggcctgccgcccgtgctcgcgcgccggagtcggctcgaccggcgacgcgcttgtctctcccccctcctgtcatcagcgagatgccgtgccatggggccgagagctgggcttcgccatcgccagagcgcttcgaacagacggtcgtgatgggtttgatggcgcagtacatggcacgctctgcctcagcgttaatgaccgcagcaaggccggaacaggggcgctcaccccggtgggagagtgccagccaaagcggaatgacctag

SEQ ID NO: 328894 - DNA, 204 bp, Pseudomonas aeruginosa
atgttgaagtcacccgaagaccagcaggttgagcagcgggaggccatcagagcacagcgccgccaggcataccgggacgaggctgatccgctgcgcctggaggccgagtttgacgccatcgctaccggcacagcgccggacctgtcggcctgggtcgaagctgtcaaggcgatcaaagaacgctatccgctcccccagtcctaa

SEQ ID NO: 328895 - DNA, 225 bp, Pseudomonas aeruginosa
atggacgaggtgcttagacgaaggctgcgggcggagctgcttgaggtggggttcctcaaccagtgctgcctcgatctgatggaagctatgaattccgagttcagtcttaccgaggaccagcgcgaatgcatcgagcagctcggccggttcctgcgggagggcatcggcaagctgaccgctctgtctgagcgggtggccgatggcgatattgtcgtcctgtgctga

SEQ ID NO: 328896 - DNA, 690 bp, Pseudomonas aeruginosa
atgctgatgacctacgagaacctgaagcgtctgctcaacatctgggacaagccagacctctccgcgctcacccgcctcctggtcgcgcgtcgcatggccaggcagtaccagttcggctgggaggccgacaggacctgtgctgatcgaaagatcaaggaggcaaggaagggccttccattcaccagggcccagttggaacaggcgaaggagtttcggagaacatccagcagctaccacgagaaagcccaagccgcccttggcgcctggctcctgcaggccgagaggtggatcgagggagagattggagtcgatcgcatctgcgatgccctcggcgtcaatccggtccaccgcgccgccatccaaggcgccaagcctgggcagatgctcaatcacatcgccttcgtcgaaggccttgaggacagctcgaacgctttcagcggaaggcgagaggcggacctgaaggacggcccactgttcaactgcatcatagccgagatgctgcgattcgcagaggagaaccctgaggctctacccgatccgttcgcacccggcgggccactttacggtgtaccacagaccgtgatccgcaacgacggaacgatcgagacgaggcgggccgcgctgacgctgcactgccgagacggatcgatgcgcgtgatcgaacggaaaccggaggtagggcgtgagtag

SEQ ID NO: 328897 - DNA, 183 bp, Pseudomonas aeruginosa; identical to SEQ ID NO: 326362

SEQ ID NO: 328898 - DNA, 192 bp, Pseudomonas aeruginosa
atgagaggctccgatattccgccaccaccagggtatcgccctaccccgctcgccacccttggccagcagttggtccgcctgggccaggcgatgcagaaccccaacaccaagctcggcgagttgaccgaactggtccaggcctgcggcgtcgacctgcggatctgcgacacgaacaaggggcgccagccatga

SEQ ID NO: 328899 - DNA, 1263 bp, Pseudomonas aeruginosa
atgagccccatcaccatcgttctccgctcaggcatgggcatgcatatcgactcggtacgcccatacctgcggaatggaatgcccatagcaatcgggcgcgcaggcgcggttatctcgcactttgctgacggggacgcacacctggcgctccgcaccatcgccgagttcccctgtcccgagcaggacaacatgccggcggcgaacatgcgacagatcgcactggcggcattgagtggcgctggagcgagttcggagccgggcaatcctggcggtgaacctgtttccggaccgggtaatgccggcgagcgcccccaccccgcgccgggatcgggcgacagcaaactggccgaaagcctccaaactctggtgcgctggcttgatcgcgcggaaatcgaggacggctatgtcggcgtgccagtgattgaagccgtcgaggtggtggtcaatgagctgaggcgcctgcaggcggaagtcgcagactggcaagaagccgccgggagatctcgttccgatgtcgtggcgtacatcgcggagcgcgcaaagctgctggaagagcgagatagccagcaacgcctcgccatcaaggctatggaggaagtcgcagcactgcggtcggaacttcaaactcagcgagagcgcaacaccgagctgattttcaagctcggtagcgcaacgaacggctgggggcgctgcgaaaaagagcgagacgccgccctggcaagagccgcagagcttgaggggaagctagccgagctggagaagccggtgccgacacacggcgagcactcggagcttcgccggatcgctgtcgcgctcaagaacccgctgctcagcggagaggaggcctcggacctgatggtgcgttacgaggcattgacaatgcccgatcacatcatcgcgttgatcgaccgccaggctcagcacagcgtgccggaagagttcatcgggcgcctgtccgaattcctcgcgcagcgcggcgctaccgggaaagctctgctccgagaactgcgcgccatgctcgccgccgaaccaaccagttcggcatccccgtcgtgcaaatggaccgaaagcagcggcatctgggaaacaggttgcggccagacctggggcttcgttgaggatggaccggcagagaacggcgcgctgttctgtcaccactgcggcggacgcctggtcctcatcaagagcgacgaccaggaagatgacggtgagccgtgcccggactgtatggaaaacgcgccagcgcctggatgtgaagcatga

SEQ ID NO: 328900 - DNA, 231 bp, Pseudomonas aeruginosa
atgaaacgagcaaccgttgtaaccgaactgccggccagcaccagccgggacatggacaagttcgttgtccgactgccggacggactgagggccgaggtcgaagccgaggccaagcgagacgagcgcagcatgaactccttgatcgtcgttgccctgcgcgagtacctgcatggccagcgccgaaagcatgcgctcctcgatgcgttgaccaccgccgtcggaggccgctga

SEQ ID NO: 328901 - DNA, 1041 bp, Pseudomonas aeruginosa
atgagcggcgaagcgcgcgaggggctgcgcagcccctggctgcaggccggacgcctggcgttcctcgcactgttcggcgtgaccctcctggcggcgctggcctgggcgttttccaacgtccgccagatcggcccggagaaccgcgccgtagtgctgcgcctgggcgcgctggagcgcctggccggtcccggcctgctgctggcctggccgcagccgctggagcaggtggtgctgctgccgtccgccgaacaggtgatcgaacgccgcgtcgagggcctgctgcgctccgagcaggcgcgtcgcgccgacctcgacgtcagcctgtccagcgacgcgctggccggctccggctacctgctgaccggcgacgccggggtggtgcaactggacgtgcgggtgttctacaaggtcgatgacccgtacgcctacgtcctccagggcgcccacgtgctgccggcgctggaccgcctggtggcgcgcaacgccgtgcaggtctgcgccgcgcgcgacctggacaccatcctggtggcgcgcccggagttgctcggcaacgacagcgcggtcgccgagcgccgcgaacgcctgcgcggcgacctggtgcagggcatcaaccacagcctggcggcgttggccgcggccggcagcgggctgggcatccaggtggtgcgggtcgacgtgcagtcgagcctgccgcgcaatgcggtaagcgccttcaacgcggtgctgaccgccagccaactggccgagcagaacgtcgccaaggcgcgcaccgaggcggagaaactcacccaggccgccaccgagggggccgaccgcaccctgcagctcgcccgcgccgaggccggcgaacggctggcccaggcgcgccgcgacaccgccagcatcgttggcctggccccggcgctgggcgcgaccgatgccggcctgctctggcgcctgtaccgcgaacgggtgccggcgatcctcggcaaggccggttcggtcggcagcgtcgatccgcgcgacgatggccgcctgattctgcaaggtgggcagccatga

SEQ ID NO: 328902 - DNA, 939 bp, Pseudomonas aeruginosa
atgaccagcctcaacctccgccgcctggcagcggcggccgccaccttcagcctctcgttcacggccgcggccgcgatcaacagcgccgccatcgtctcctccaccctttcccctcagtgcctcgaatacaaggtcgtcgggatctgctactggctgctctgcggcccgcatggctgcaaggtgaagacgtcggtcaaggtccgccactacgtgcctgacgcagtcgtctccagctatgcgaataccgggagcaacccctggacggaagtgtcggcgctgggcacaccgaatcccctcgcccaggccggcaatgacgcgaccaccaaccacaaggccgagaacagcatcggccgcttcaaggaagcggatgtgatcggccatcctggcggggccacgttcagccggttcgccagcgcctctgggtacgtttgccctggcgccaccttcccgctggtgccgtacttcctcagcacactggacgccattggctggcggcatggcattcccgagcaggtgtaccccgaagcgttggtcccagggctgcgcgaggtgggtggaatcttctccggcgacatgtgggggaacctctatccgcgcagcggattcctgcaccagaccgacgactacaagacggcggccgtcatcgcccagcgcgccggcgacatcaccacgcgaatcggccagctccacgtctacctccccatgcgcgcagcacccaaggacggctactggccggcgggcgagctgaaagagggcgatgcctcgaccgggaaatggcaggagctgaccccgtccctgagcctcaactgcgcggtgtttcccaactcagggccgaagacgcaagccgtcgacggcgattacgcctgggcgctctggcgtccctactcctgctgccagcgcaaggggcagatcttcctcggcagtaccgacttccaataa

SEQ ID NO: 328903 - DNA, 1023 bp, Pseudomonas aeruginosa
gtgcaggcctcggctgaatgcgtacaggtcctccaggtcgcgcagcgagtaactgtcgataccgcctacccagtagaacttgggtgccggattattgcgcacacgctgcagggcattttcgatgacgccgataacggtgcggtgaatgaaagtgcggtgaggaaggtccgccgggagggactttttcaccagcgtctgcgggcccagtccttgaagtttccgtgtctcgcccttgtaggagaggatgatgttggccacgtgcgcaatcgcggggccgaaccgccagctctgggtcaggtagtgctcctcggcgccgaccatccagtcgctgttcagggcatcttccgcgcctctgaaccggtagagctgctggtggggatcgccgacgatagccattttgatgcgctgccagtgggcaatgtccgcgatcactgggttgatgtcctgtccctcgtccaggagcatgcagtcgaagcgctggctcaaatcgggcttgctcagttgatacagcttcaggtagccgtcatggggcatcagcatgccggtgtcctggagatctaccatgcgcctccagactactcgcgccatgtccaggccctgcttgaggaagcgttcctgggcactggtgaggaacgccttgtcgcggaagcgcgggaagtgcggtcggccgagttccgcgtcggcgctggccatgtagttgttcagcgtggccagcacgtcacgtaccaactcccagtcttgggtatcgagtccgcgggcgatatcagtcagacgcaggttcttcgtcttcttgtgggcgtactggatgccgtacaccgcatgagccaggctgtgggcggtcttgcacactacgttgcgggggaacttgcccttcgcggctttctccaccgagctgttgtagcagagatagaggattctcagggtagggttcgccttggcaaagcccaccagggtggtcgtcttgccagtgccggcgaaggcccgcaccaggatcttcgatgccttcgactggatgatcggtga

SEQ ID NO: 328904 - DNA, 1167 bp, Pseudomonas aeruginosa
gtgaacatcgatgcgttgttcgtcgaatatgcccagaaatacatcagcgagcacgatcccagggcctgggacacgatcatccagatcgagggcaagctcaacgacaagaacatcccgttcaacatgaaaggacggcccctgcgggtcgtggccatcgaccagtacctgacacagaaacgcatcgccgacccggtcatggaaggcctgaagagcgcagtgcgctacgacaagacctacttcgacaagatcgtggcctcgctgctgccgctgctggagaaactcactaccgggcggatctcggagcttctttcgcccaactacgcggacctcaacgatccgcggccgatcttcgactggatgcaggtcatccgcaaacgcgccgtggtctacgtcggcctcgacgcactatcggataccgaggtcgccgccgcggtgggcaactcgatgttcagcgacctggtctcggtggcgggtcacatctacaagcatggtgtcgatgacggcctgcccggctcgctcgctggcggcaaggtccgcatcaacctgcatgccgacgagttcaacgagctgattggcgacgagttcatccccatggtcaacaaagcgggcggcgccggcgtgcaggtgacggcctacacccagaccatgagcgacatcgaggccaagatcggctcccgcgcgaaggccggtcagatcatcggcaacttcaacaacctgttcatgctgcgggtgcgcgagaccgccacggccgaactcctgaccaaccagctccccaaggtccagatctacaccagcacgccggcgagcggcgccaacgacgcaatcaacaacaagaaggcagccttcacctccagctcgcacgaccaggtgcaaatgaccagcgtgccgatgctcgagccggcccacatcgttggtctgcccaaaggacaggcgttcgcgctgctcgagggcggcaatctctggaagatccgaatgccgctgccggcggtcgatcccgacgaggtgatgccgaaaagcctgcaggagctggctgccggtatgcgcaagggccaggccgccaacagcgagtggtgggaggcgccgggatactccgccctgcaggatggtctgccccaggacctggtcgacgatttccgtcacctcggcgccagtgaggatgccgcctga

SEQ ID NO: 328905 - DNA, 315 bp, Pseudomonas aeruginosa
atgaaaatgccagagaaggacccgtcattctgggccacagtgctgctcgcgctgcgagagcaagggctggcgatggggctcgccttcatccttacctggctccgtacccagtacgaggggaaggagccgagcattgttcggcaactgatcgaagccgcccttggcgcgatgttggtcatggttgtcggtctcaccgcgaaggagtttggctggagccctgcgtggcagttctttgctgccggcttcgttggtgtcctcggggtaagcactgtgcagaagctgggcgcacgttgggcggaaaggaaggtgggctga

SEQ ID NO: 328906 - DNA, 531 bp, Pseudomonas aeruginosa
atgagtgaaattgatcttgatgaggccagcctgcgtgacctggtaatggtcaatgacggccaggtcgtaacgacatcgctgaaggtggccgaacgcttcggaaagcggcacgacaacgtccttcgggctatcgacaacttggattgctcggctggtttccgtctcctcaattttgaggagacggtcatgtggcgggaaaatccgagcggcggagaaccgatcaagagtcgaagcttcgacatgaccaaggacggcttcatgttccttgtgatgggctttaggggtaaagccgcagctgcctggaaagaagctttcatccatgccttcaactggatggccgagcagttgttcaaacgctcaatggacttcaacaccatgcgcaacgagctgatggcggagtaccgacaggagcgagggattgccagcctggccggcaagaccctgcgtcgatggcagatcaaggcacccgtcatcgaacagaagatcatcgaggtcgagcgcgaagggcagttgcagctgtttcacgcctga

SEQ ID NO: 328907 - DNA, 492 bp, Pseudomonas aeruginosa
atgagctctgtgtctgatgcaaaacgccctcgtcgaggcaagaagccacaggggatatctctccacccgcgcgccaaggaaacttggcagcgcttgcccttcgtaggcaaggaccatggtcgctactcaatgtgggatgttcctttgactggtagctacctcaccggtctcgaggccggcaagagtatcgcgcacatctatctgaagtatgtccgggatgtggacgactggatggccgccgaggtgctcaggagcatggtccgcgatctgatcgccaaggcgcctttggatgagcgagaggaaactgtcaaacgcggccagttcgcgggattcatgagcgagatattcaactggctcaaagcgtctgcccagtttgccggaagcagtctagaccgggtggaagaccaggccctggtagatcgggtgaaccattacctggatgcaggcgtagccgatgcaatagatgcggctattacgagggcttcgacatga

SEQ ID NO: 328908 - DNA, 279 bp, Pseudomonas aeruginosa; identical to SEQ ID NO: 327138

SEQ ID NO: 328909 - DNA, 309 bp, Pseudomonas aeruginosa
atgaacctcgcgacactgctcagcaatcagtgctccccggtccccgatgaagttctgaccgataagcagatccgctccatcaagttggatcgtggtacggctcgccatgcggctcagaacatggcgcttggtgtcgccgcagtcgggaaactgctggcgcttaccagtgcagaaggcgagctcgatcaggagaccgccgagcgtctcggatggttcttggaggaggttggcggtgccatctaccagttggcggagttcgaacaggtctgttctgctcgaatcgatcggcagaaggaggctcagcaatga

SEQ ID NO: 328910 - DNA, 288 bp, Pseudomonas aeruginosa
atgaacgcgcttctgagagctcgccctattgacccggagaacagcttcttcaaggtcaaccctggactttccaagcgggaagccttggacgaggccagcgtcattctggccggactcagcgacatcctcatctccctcgtcgagggtagccccatggatggcaatggctaccacgcgctggcgtacctgagtgatgcggcaaaggcgctagtggatgccgccatccctctgcctgcggaggaggcggaaatcgccgctgcgctcaatgcaaaggagcgccgccaatga

SEQ ID NO: 328911 - DNA, 312 bp, Pseudomonas aeruginosa
atgcatctcaaaaatatcaaaacgtcaagccaggcgcaacagtcagtgaccactgaggaggttggatttctcctaacccccagcgggctctgtgcgctccaggtctgcgagggggttcccatcgtagaggtaatgcaacgttacgaggagtcgctcaacgctctctgcgctttgctcaggcgcatggccagggatatcgatcaccctatgagcgactccgaggcggaagctatcgcgctgctcaccgaggtggtggcggcgatgcacagtagctgcgtgcgcggcttggatgcagcgggaggtgtggcatga

SEQ ID NO: 328912 - DNA, 438 bp, Pseudomonas aeruginosa
atgccgctgctctggattgccctattgctcaccctgctcaccggaacctggctgagtgtacaaagcgaccacgcgacctcgagcgccgaactggccgaggtcgacaccctggccaggagcttgctgctctaccgctccaggctggcggagtacgcacacgccaaccccggtttcagcggctcgccggcggactccgctcttggtttaccggcctggttccgcaagccagcgcggcttcagggctacatcgccgccggcaccagctacgccttcatcgcctcgccgccggcggggctggcggcggccgtggatgctggtacggaatccgacctggttggcgtcaggcgcaacggccagttagtcacgcgccgcctaggagccactgccattgtgctccctgcgcccatccccgaggacgcggtggtcgcggtcaaataa

SEQ ID NO: 328913 - DNA, 957 bp, Pseudomonas aeruginosa
gtgagtgtgaacccgatcatccaggctcagttcgtcgacctttacctcggtgaaggcttcgccgacgtgaagggcctcgccggcgccgacgcgcgccgggtcgaggtgcccggcgagtgggttccccacgctcaggagctccttcagctctgcaggaagacgatggaggagctgcaggatcccgagttcgccatcgtcgtcgacggtgtgctactacgcgtcacccaactggaagatgctttcaacggcgggagtgtcttcgtgctgcgccggtcgacagcccaagttcgaagcttcgaggatatcggctatccgagcgaggtggtcgctacgctcctgaacccgcaactgcagggcttgatcctgttctgtggcgatatggcgaccggcaagaccagctccgccgcctcgctgattctcgctcgactgcagaccctgggtggggttggcttcacagtcgaggatccacaagaaaccaacctcagcgggcaacatggactcggccgctgtatccaggttaggacctcgcgacgcttgggaggctacagcgaagccctgttgcgcacgctgcgtaccggagccgacctgatattgatcggcgagatccgcgacgaagacaccgcctaccaggcctgcaaagcttcgctgaacggcaacctagtcatatcgaccatccacgccaagaactgcccgcaagccatcgaacggcttatcaccctggccaaacccctcgcgtccaatgcctacgacgtcgtggctgaaggcattcaggccgtgatctgccaggaactggtaagcgatggcgcagctcgacgactgcatgcggaaccgttgctattcaccggggtggactccgtcgccatgcgcgacaagattcgccggcagcagattcacctgcttgaggacgacgtgagtcgccaggctcgcagaagcctgtgggagccaacctatgaataa

SEQ ID NO: 328914 - DNA, 1326 bp, Pseudomonas aeruginosa; identical to SEQ ID NO: 324435

SEQ ID NO: 328915 - DNA, 1710 bp, Pseudomonas aeruginosa
atgcgtgcccccctgaagaacctcttgccttgcctcctgatccccgcgctggccagttgctcggtcgcacgggtgaacgagtcggcggatcgtgtcgaagctacggcagattccgcgtcgacgatcgcagcacagatgcgcaacacccgaccggatcgccgcgatacggtggtgttctccgacaaaccctgggtcagcacgaagcccctgagcgtttcgcacaccttgtccagtgactgcatcgtgacgtggcgccctgcaggcgcagcgtcgctgcaggaggccgcccaggaagtcatcaaccaatgccacctggcggtcagtatcacgcccgacgcgctgaacccggccgccttcgccctgcaacctcagcagcgcgcgagcaacgccccgccgcccatccaaggcggccaggacatggccaccatgctgtttcctgcctccgtcgccaacggcatgtccctaggtgccggcggcagcatgggatcgagcttcgggtcctacggcccgcggtcgctgtacaacatcaaatggaacggcaaggtcagcgggttcctcgatctcatcgccgcccgcgccggcgtgtcctggcgctacaacccaaccgagaaacgggtcgagttctactacctggacactcggaccttccgcatctacgccttcgacgacgtcaacacggtggactccaccgtgcgttccggtatgacgacggccgccggcatcagcggggatggctccggatccactggacagaatggcagctccggcatcagcggcgactccggcagcaagcagaccaccagctccgagctgaagacctcgatcctcagcgacatagagaacagcatcaactcgatgctgacgccgagcatgggacgcatgtcgctgtcgcgtgccacgggcaccctgaccgtcaccgaccgaccagaggtcctcaaccgcgtccagcagttggtcaaccgggagaacgagagcatcaccaagcaggtgctgctgaacgtcaacgtgctctcggtcgccctgaccgacaaggatcaactggggatcgactggaacctggtctacaagtcgctcaacaacaagtggggcatcggcctgaagaacaccatgccaggcatcgatcaaagcgcgatctccggctccgtgagcatcctggataccgccaacagtgcctgggcaggatccaaggccatggtccaggcgctggcccagcagggtcgcgtctcgaccgtccgctccccgtccgtgaccacgctcaacctccagtcggcgccgatccagatcggccgctacgacagctacctggcctccagccagatctccaacgtcgcccaggtcggcagtaccacctcgctgatcccgggcgccgtgaccagcggctacaacatgagcctgctgccgttcgtgatggaaagcggcgagatgctgctgaagatcaacatcaacatgacctccagaccgacgttcgaaatgcagaccagcggggactccaaagcccagttcccgagctacgacatacaactgttcgaccagaaggtacgcctgcgcagcggcgagaccttggtgctctccggcttcgaccagaccaccgaggataccaacaaggtcggcaccggcgacgccggattcttcggccttggcggcgggctgacccgcaataccaaacgcgaggtcatcgtggtgctgatcacccccgtcgtgctgggctga

SEQ ID NO: 328916 - DNA, 471 bp, Pseudomonas aeruginosa
atgcgcacctatcagcaattcgggcagcgctcgcaacggaagcaccaaatgcctgatcccgcatccacctcggccggcagcgccgcgctgctgaaaatgtttggcatccatatcagcgcgggcgccctggcagccgccctgggcttcctggtcctgtggcccaggaccatgaaagaggggtttgcccggctgttctgcaccatcgtcgcgtccagcgtcttcggcccgatcctggtcgtttacctgcactccaaccgccccgagctgttcgagtccgcccaggtggtggccgggctctaccagttagagccggcagtcggcctgctgttcgtttccgctccgctcctggtgattgccggtctgcccgcctggtggctgatcggggcggccctgcgcctgtttgagcgggacggcgattcatggctgggcgcgttcgcccagtgggtaaaacgcaaactggagaacacctga

SEQ ID NO: 328917 - DNA, 348 bp, Pseudomonas aeruginosa
atgagcacatctagccccccaacgtctctacgcagcccccgcgactacgccgccgccatcctggccgagcccagccgcgagcgtcgtaacgctctgctggaagcctgcccggtcaactggcagccacttgttcgggcgcacgtcgaggacgccttcgcgaaggtcaaggcgtatcgccagatgatggaccaccgcgccgagtcgatccggcgcggcccgcctccagctccccgcgtcaccgacaccgatttccgcatatccaactacaccaagtccgccccggaggtaggcaatgcgcacctatcagcaattcgggcagcgctcgcaacggaagcaccaaatgcctga

SEQ ID NO: 328918 - DNA, 408 bp, Pseudomonas aeruginosa
atgagcctacgcgccgtcaacctcgcaaaaatccacatcgccaaggcccagctgggcatggacgatgacacctatcgcgcattgctcgctcgcgtcgcgggcgtgcgctcggccaaggacctagggccgcgccagatcgaccacgtacttgtcgaactccagcgcctgggctggaaaccgaagagcaaccggcagggccgggcgacgccaaaagtgccgcaaaaccggcaaaccgtgctgcgcaaaatcaccgcgctcctggccagcgcccatcgcccctggagctacgccgaccatatggcccggcgcatgttccaggtcgagcgggtcgagtggctggacgacagccagctctaccggctgatgcaggcgcttatcatcgacaggagccgccatgagcaggtctga

SEQ ID NO: 328919 - DNA, 207 bp, Pseudomonas aeruginosa
atgcagcagtccaaccccttcaatcaccccggacagagctacggcgccgtagacgtcgatagccgactccgcgccgttgccggcttcgacctggagcaatgccgcgccgcgctcgcggtcaccggcctccagaagatcgtcgagcagaaaattcgcacccgcatccgccagctggaaaagcaggcatccgcacagaaggaggcataa

SEQ ID NO: 328920 - DNA, 1395 bp, Pseudomonas aeruginosa
atggacatggaggaacgcgacgcccacctgttcgccgaaatgagcaagcgcaagcgcgctgtcctcggcctggactggaccatcgagccgccgcgcaacgcctcggccgcagagaaggccgacgcggagtatctccacgagctgctgctcgacctggagggcattgaagacctcatgctcgattgcatggacggcgtcggccacggctatagcgctatcgagctggactggtcgctccaggggcgggagtggttgccgcaggccttcgaccaccggccgcagagctggtttcaactgaacccggacgaccaggacgagctgcgcctgcgcgataacagcatcgcgggcgaggtactccagccgttcggctggatcatgcacaagccgcgttcgcgctcgggatacgtggcgcgtagcgggctgttccgggtgctggcctggccgtacctgttcaaacactactccacggccgacctggcggaaatgctcgaaatctacggtctgccgatccggctcgggaagtacccgcccggcacgccggacgaagagaaggtgaccctgctgcgagccgtgaccggcctcggccatgccgcagcgggcatcatccccgagagtatgtccatcgacttccaggaagcgtcgaaaggctcggccgagccgttcatggccatgatgcgctggtgcgatgactcgatgtcgaaggccatcctgggcggcacgctcaccagccagaccagcgagtcgggcggtggtgcctatgccctggggcaggtccataacgaggtgcgccatgaccttctggcggcggatgcccgacagcttgccgccacgctgagccgcgacctactctggcccctcctggtcctcaaccgctccggcaacctcgacgcacgccgcgccccccgcctggtgttcgacctcaaggaccgggccgacctggccgccatggcaacgtcattaccgcccctggtcaagctgggcgtccaggtgccggtcaactgggtccaggagcagctgggaatcccgctgccggccaaaggcgaggcagtcctggtcgatcaggccggcgcaggcatcgcccaactgagccggcgtcctggtcctcgcatcgctgcgctggcccaggtgattggaccacgctaccgcgatcaggaagcgctggaccaggtgctggccagcctgccggcccaggacatgcagaaccaggccgatagcctggtcgcgccgctcctggatgtgatcagccgcggaggtagcgaggccgagctgctcggcgccctggccgaggcattcccggatatggacgacagcgccctggcggatgccctccatcggttactgttcgtggccgacacctggggccggctcaacggcacgctggatcggatcgactga

SEQ ID NO: 328921 - DNA, 1287 bp, Pseudomonas aeruginosa
atggcaacgccaaccgaggccgatctgcgggccatcttcgccatgcggccggaggccgccattgagtacctggagcgcaaggggttcgccattacctggaactggcacgatgttgacgcggccacccatgcccgagcgctgacggtggccaaggtggcacgcctggacgtgctccaggacatccgcgacgccctggtcgataacctggaacgtggcggaacgctgcgcgacttccagcgcaacctgcggccgatcctggaggccaaaggctggtgggggcgtcagatagtggttgcgccggacggcggggccgaggtcgcccagctcggcagcccgcgccggctggaaacgatctaccagaccaacatgcagtcggcctacatggccgggcgctatgccgccgcatatgaggccagggaaacccacccctactggatgtatgtggccgtcatggacagcgtcacccggcccagccatgcggcgctacatggcaaggtgttccgctgggacgacccgatctggcagcacatcatgccgccgaatggctacaactgccgttgccgaatcgttccgttgacggcggccgctgtgcgtcgccgtggtctgacggtcgaatccagcgtcggcaagaccggtcaggtgaccgtcgagacgggcgtagacaagcggacgggggagattcgggaacagaccctaaccaccctggagacgaccgaccgggccggtcggaagatccaatttcgccccgatgccgggttcgacggcagcccgatacagagcgccctgatggaccaggtgctgtacaacaaggccgagcgcaccctgggagcgcctgccgccctcggcgaggtccaggacgtgctcctggacccggtacgccagcgcgcctggaaggcgtttgtggaccgctccacgtcgccccagggacagacgatgtcggtcggcgtcctcgatccgaccgacatcacctacgcggctgcccagggtgcccagctccaggctggcgtggtatcggccagcgacaccgtgatccgtaacagcccggtcgctcgcgagcagctggcgaacctgccgcagcgcctggcccagcccgccatggtgctgtgggagcgtggcagcgagtcgctggtctatgtcgtccaggatggcgactcgaccctggcggttcggctgcgcggtggcgtctatgggccgggccaaatggagaacatcagccaggttacagaggtgacgatggaaagcatcgacgacgggctcgccctgggccgttacaggagggttcgctaa

SEQ ID NO: 328922 - DNA, 468 bp, Pseudomonas aeruginosa
atggccaatcgcatcgagctggagctggtggaccgcgaggtccaggagcgcctggcggcgctctacgcggcggtaaccgacaccctgccgctgatgcgcggcattgctgccgagctgctggccgagacggagtttgcattcatggacgaggggccgggatggcctcagttgagccccgttaccgttgcagcgcgagcggcgaaggggcgcggcgcgcatccgattctccaggtcaccaacgccctggcgcgctcgatcaccacccgcgccgaccgtgaccaggcgcagatcggctccaatctgagctacgcagctatccagcagttgggcggtcaggctgggcgaggccgtaaggtgacaatcccggcgcgcccgtatctgccggtcctcagaaacggccagctcaagccaagcgcccgcgatgcggtcctggacgtccttctagctgctctatcccaggggcgctag

SEQ ID NO: 328923 - DNA, 198 bp, Pseudomonas aeruginosa
atgaaaatcaccaatgacaccaccacctatgaagtggccgaactgatgggttcggaggcggacgaactcgatggacgcatcatgttgggtctgctcagccgcgaatgcgtggtagacactgacgagctgagcgaggatcaatggctggctctgatcgacgagtcgcagaaagttcgccgcgaacaggaagcagaatga

SEQ ID NO: 328924 - DNA, 303 bp, Pseudomonas aeruginosa
atgatggccatcagtaagacagacattgactgttacctccagacctacgttgttatcgacccagtaagcaacgggtggcagtggggaatcgatgagaatggagtcggtggcgccctccatcatggccgagtagagatggttgaaggtgagaatggttacttcggtttgcgtggcgccactcacccgaccgagaaggaagccatggccgccgcgctcgggtatctgtggaagtgccgacaggacctggtggccatcgctcgcaatgatgcaattgaagccgagaaataccgtgccaaggcctga

SEQ ID NO: 328925 - DNA, 252 bp, Pseudomonas aeruginosa
atgatgcaattgaagccgagaaataccgtgccaaggcctgacgcctccagccacaatccagacccgcgctacctgcgcgggctgctcaagaaagccggcatcagccagcggcgcgcagccgagctgctcggcctcggtgacagggtgatgcgctattacctgagcgaggacgccaaggacggctaccgtcccgcgccgtataccgtccagttcgccctggagtgccttgcgaacgacccgccatctgcgtga

SEQ ID NO: 328926 - DNA, 981 bp, Pseudomonas aeruginosa
atggatgtgccgggctggcggatcgatgccgccagtgccgccgcagtgatcgagcgcgcacggtcgcgcaagactccgcccgtcctggactacgagcaccagaccctaaagaaagagcagaacggccagcccgcgcccgctgccggccgtttcctggacttcgaatggcgcgaaggctccggcctgtgggggcgtgtcgaatacaccgcccgcgccgcgaagctgatcgaagacggcgagtacctctacttcagccccgtcttcagctacgccccggacggcacggtcctctccatcctcatgggcgcaatgacaaatgaccccgccatcgacggtctggagcctctcgcacgccgagcggccgcgacctttggcctctacaaccccgacgaggaaacccctgtggatgaactcctgaaagccatcatcgcggccctgtcgctgaaagaaggcacgaccgaggcagaggccattgcggccctgaccgccctgaagccggccctggacgcccaagcgaccaacctggccaagctgcgcgaaaccctcggcctggcccaggacgcggacgtcgagcagatcgccgccgccaccgcccagctgaaggtcgccgcccccggtaaccccgacccggcgaagtatgtgcccgttgaagctgtcacccagctccagggccaggtcgcggcgctgacctctcgcatcaacggcggcgagctggacggcctgatcaacagcgctatccaggagggccgactcattccgtccatggagccctgggcgcgtgaatacggcgccaaggacttggccggcctgaagaactacctgggccaggccaagcccatcgccgccctgacccaacagcagagcgccgggcgtacctcggtgcctacctcggtggaccagctggacgaggccgccctcgcggtttgctcggccttgcagatcaagccggaggattacctcaagaccctgaaaggccagtaa

SEQ ID NO: 328927 - DNA, 399 bp, Pseudomonas aeruginosa
atgactgccctgaccaccgaccgcaacaccccgctccaggacgccgaggtcatcggcgtgccggtagcggccaacgtccaggtcttcgccggcgccatcgtcgtggcgaacgctaccgggttcgccgtaggcggcagcaccgccaccggcttgacctacctgggccgcgctgaggaatacgtggacaaccgcaatggcgcggacggcgccaaggtcgtccgtgtgcgccgcctgaacgccttcaagtgggcgaacgacggcagcgtcacccaggcgcacctgatgaaacccgcctacatcgtggacgaccagaccgtcgccgccacggacggcaccgaaacccgctccccggccggccgcatcatcggcgtcgaaccggacggcgtgtgggtggaataa

SEQ ID NO: 328928 - DNA, 909 bp, Pseudomonas aeruginosa
atgctgatcaacaagcagagtctcaacgcggcattcgtcgcgatcaaaaccatcttcaacaacgccttcgcggcggcccccaccacctggcagaagatcgccatggaagtgccgagcaacaccagcagcaacgattacaagtggttgagcacctttccgaagatgcgccgctggatcggcgcgaaggtggtcaagaacctgaaagcctacaagtacgttgtcgagaacgaggacttcgaggccaccgtcgaggtggaccgcaacgacatcgaggacgaccaaatcggcatctactcgccccaggcgaagatggccgggtactcggcggctcagctcccggacgagctggtctatgaagcggtcaacggcgccttcaccaagccctgtttcgacggccagtatttcatcgacacggatcaccctgtcggtgatgcctcggtgagcaacaagggcaccgctccgctttccaacgccagccaggcggcggcgaaggcaagttatggcgctgctcgcactgcgatgaagaagttcaaagacgaggaaggacgttccctcaacgtctcccccaacgtgctcctggtcggcccggcgctggaagaggtggcgaagatgctgctcaccaacccgaagctcgcggacaacaccccgaacccctacgtcggcactgctgagctggtagtggacgggcgtatcgagtccgacaccgcctggttcctgctggacaccaccaagccggtaaaaccgttcatcttccagcccaggaaacagccggaattcgtttcccaggtcaacctggattcggatgacgtcttcaacctgcgcaagctgaagttcggcgccgaagcccgcgctgctgccggttacggcttctggcagctggcctatggctccaccggcactggcgcataa

SEQ ID NO: 328929 - DNA, 315 bp, Pseudomonas aeruginosa
atggcacgcaaagccgcaactaccgccaagccgaccgccaagccgaccgccaggctggcccgccaggcggcgggcgatgaagcccagcagagcgtcgagggcatcttcgtgcgcagctatccgccgaccttccggcgtgctggcttcgcgttcaccagcgaaggaatcggaatcgccctgtccgccctgactgaggcgcagctcaaggcgatcaaggaagagccccagctgcgcgtcgagtcctgcgagttcttgccggacgacgtcggcggcgagggtgagccgtccgcgtcggacaacgacacccaggaataa

SEQ ID NO: 328930 - DNA, 177 bp, Pseudomonas aeruginosa
atgagcgaccacaccctggccatcagtcaactgaccatcgccgcgcagaacgccgagcacaacgctccgatcatcgaagcccagggcgacctcgcccaggccgagctggatcgccgggtcgctgccgagtgccatagcgccatcgacgttctggagcaccaggagcagcaacagtga

SEQ ID NO: 328931 - DNA, 417 bp, Pseudomonas aeruginosa
gtgagctattgcacccaggccgacctggtcgagcagtacggcgaggcgtccatccgccagctgagcgaccgcgtcaataaccccgccacgaccatcgatccggcggtcgtggcccaggctatcgccgatgcggacgcggagatcgatctccacctgcacgcccgctaccagctgccgctggcccaggtgcctgtggtgctgaagcgcgtagcgtgcgtgctggcatttgccaacctgcacacccaggtcaaggacgaccaccccgcgatccaggatgccgagcgcaagcggaagctgctgggcaatatttcctccgggaagctcagcctggccctgaccagctccggcaccccggcgcccattgccaacaccgttcaaatcagttcgcaacgcaacgatttcgggggcacctggtga

SEQ ID NO: 328932 - DNA, 480 bp, Pseudomonas aeruginosa
gtgagcactgccgagccgttcgattacctgttcctggagacgctcctggtcgagcgcatccgcgccgaggtgcccggccttcaggacgtttcgggcgtccccgatctggccaccctcgacgaacagccccagggctcgccctgcgtctatgtcatctacctgggagacgggatcggcaccggagcgtcgcaccagggcggtagccgggcgattcagacggtgacccagcactgggcggccgtgctggcgttgtactacgccgacgcccagggcgacggccagggcgcccggcgcgaagccggcccgctgctcggccggctgctcatggcactgaccggctgggttcctgatcagagcgtcgccccgctggcccgcagcgctcaggtttcgccagtcagctacagcaacgggttcttctattacccgctggtattcaccgccaactttgtcttcccgaggctcaagtcatggaaaccgtaa

SEQ ID NO: 328933 - DNA, 180 bp, Pseudomonas aeruginosa
atggaaaccgtaaaagtcaccatcaccgccgagaaacccaatcacacccatgccggcaagccggtgtcgcagggcgacgagatcgacgtcagtcgcgccgaagccgagttcctgctgcgccgccaactgatcaccaagattcccgccgagcccaaggccgacgagaaacgcgacaagtaa

SEQ ID NO: 328934 - DNA, 216 bp, Pseudomonas aeruginosa; identical to SEQ ID NO: 323779

SEQ ID NO: 328935 - DNA, 1965 bp, Pseudomonas aeruginosa
atgagtaccttgcaaccctggatcagtgatctgcgcactgcggtcaagctgggtttgcagggaatgttcaaagagccgccgatgacggcggtggagtgggccgacaagcatttctacatgtcggccgagtcctcttacaacgagggccgctggaagactgcgccattccaggtcgcgatcctgaacgcgatgggcaacgacctgattcgagtggtcaacttcgtgaagtcggcccggatcggttacacgaagctgttgcttgccaacatcggctacaagatccagcacaagcgccgcaacgtgatgatgtggagtccgaccgacccggacgccgaggatatcagcaagagccacgtcaacggcctgatccgcgacgttccggtcatgcttgaactggcgccttggttcggtcggaagcacagcgataacaccttggacaacaaggtgttcgcgaaccgacgcaacctctggattcgcggcggcaaggcctcccggaactaccgggagaagtcccccgacgaggttatctacgacgagctgtcgaagttcgacgccgacgtcgagggcgaaggctcgccgacattcctgggtgacaagcgcctggacggtgcggtctacccgaaatctatccggggatcgacgcctggggtcgctggcgcttgccagatcaccaaggcggcggaagagtctccgcaccggctgcgcctgcatattgcttgcccgcattgtcagcgggagcagcacctgaagtttggcggcaaggattgtgagttcggcctgaagtgggaaaagaacgaactgggtgaggccgagcgcgcctggtacgtctgcgagcactgtgcagcctgttttgaacaccgcgacatggtggtggcccaggctaaaggccgctggatctgcgacgagaccggcatctggacgcgcgacagcatcgactggttcggcccgaacaacgagccgatccgcacgccgcgctcggtcagcttctactgctgggcgatctacagcacctggacgacctgggtgtcgctggttgacgagtggctcaaggtcaagggcgaccgcgagaagctaatcaccttcatcaacaccacgcgcggcgaggtgtgggaagaggagcagggcgaccgcgtggagtggcagacgctctacgctcgccgcgagaactacccgaaggtgccgccgcaagcgcttgttctgatgggtggaatcgacacccaggatgaccgctacgagggccgcgtttgggctttcggtcttggcgaggaggcatggcttgttcaccgtttcattctgaccggcgatccggccagtgaggaattgcggcgcaaggtgggcttggaaattcatcggcagttcactcgcgctgatggcgttccaatgcgtgtcgagcgttggtgctgggatgctggcggccactatgccgatgaggtagaggccgagagcatcaagcatggcgtgcactgggtggttccgactttcggggccagcacatacggcaagccaatcgccaacttcccgaagcgccgcaagcgcaaggtctacaagaccgaactgggcaccgataacgcgaaggagctgatctacagccgcctgcgcattgatgcgcccatcccgtggcaaccgacgccgggctgtgtgcacttcccgatcgacagcgacatctgcgacgaagacgaactgaagcagatcaccgccgagaagaagaagccggtgatggcgaagggtgttcgcgtcctgcgctgggattccggcgggcggcgaaacgaggcgttggattgcttcgtttacgcccttgccgcgctgcgcatcagccagcaacgcttcggcctcgacctcgaccagctggagcgcgtgcgcgttgatcccgtgccggagccggtcgcccaacagcaaccttcgaacgataaccatgccagcacctcccagggctggctcaacactggaagcggaccatggctctga

SEQ ID NO: 328936 - DNA, 546 bp, Pseudomonas aeruginosa
atgagcaaaaacgaaacaaccaagcagcgcggatggttgaacaagtccgagatggccgcgagcctcgggatttctccgcaagcctttgataaatggggcgttcaaccaatcgagcgaataggtcgagaggccttttacacggtggcggatgtggtcgaaaaccgcatccatcacgccgctcggaaacaacaacctgagggggagctaccggaaggtctcgatccctacgctgaagccaagctgacacaggagcgactccgcctcaccaaggcccaggcctacgcccaagagcagaaaaaccaggtccaggacaaactcctggtcccggtcccgttcgccactttcgccttggcgaaaatcgccgccaagatcggctcggcgctggagaccgtctgcaaaacggtcagtcgccgccacccggatgctgatcccttggtgatggagtccttcgagcgggagatcgccttggcgcgaaacctttccgctgagttcagcgacgacatcccgggaatccttgatgagtaccttgcaaccctggatcagtga

SEQ ID NO: 328937 - DNA, 180 bp, Pseudomonas aeruginosa
atggaaaccgtaaaagtcacgatcactgctgagaaccccaaccacacccacgcgggcaagccggtggccaagggcgacgagatcgaagtcagccgcgccgatgccgagtttctgctgcgccgtcaattgatcaccaagattcccgccgagcccaaggccgacgagaaacgcgacaagtaa

SEQ ID NO: 328938 - DNA, 300 bp, Pseudomonas aeruginosa
atgttgatcaagctttcgccgtttgtaccgctgcccggcgacggcgttgaaatgcgcgtgtccgttcgaggggatgccctcactgtgaacggtgtcgagttcgatttttcgccattaacggagggaggtcagctacctggcgcggcgactggttcgtcctggtttgagggagtgattacccgccaggctggccgaatcgaactgacgctgcgtctaccgctggcgcctgacgcaagcgatgccgctcgcttcccgactcccatcgaggttctcgaaggggatgtggagttaccgcgatga

SEQ ID NO: 328939 - DNA, 933 bp, Pseudomonas aeruginosa
atggctgatgtacgcccgacgaaactccaggccgacggcaacggctacggcagtctccgtgagttcaccgacggcgacacggtgccgcttgctctgggcggcactggcgctgcaaccgctgccggcgcgcgctcgaatctcttcgacacccgcctgcagaacttcagcctgctgctcggtggcgttgaccagcttccataccagacagggccgaatagctgggcacagacgccgctcacgagcgtaggtcgggcaatcctggcggcgtctacgcaggcgaacgccttgagctacatcggcggcatgcccaaaagcttgtcgtccggtcgcgcaataagcgacccgaataccgcgccggacgaatgcggtttctacggtatcggagcaccgccgtggtcgaacttgccgcccggcctggagtcttttaaccctatcgggtcgatgctctatcaccatccatacgacgtcgcgaccgcagtgcaactattcgtgccgcggacctcgaacatcctgtatttccgcaggagggtcgccggggcgtggcagtcgtgggttcgcgtgctgtccgacgctcagttgctgggcacagtggttcagtctggaggagtcccgcttgggtcgatattggagcgaggcagtaacgcgaacgggcaatacgcccgcctcgccgacggcacgcagatttgcacgatcagcctgcttggcgccaacgaccgcatggcgaacacaagctacacgctcacattgccagcggcgttcactccagattggaccgttggggtatcggtatcctgggcgtcgcacgcaacgaaccccgcaacgtacaacggtgtgaaggtggcgtatgcgaacggcaccttgctgacattcatcctggccgagaacctcacgacaaaccgtttgatcttttcctgcatagggaggtggttctga

SEQ ID NO: 328940 - DNA, 681 bp, Pseudomonas aeruginosa; identical to SEQ ID NO: 323742

SEQ ID NO: 328941 - DNA, 1344 bp, Pseudomonas aeruginosa
gtgagtgttctggaacttacgccgccgcactccgtcgaggcggagcaaggggtactcggcggtctgatgctggacaacgcggcatgggacattgtcggcgatcaactgcagaaggaggacttcttccggcatgagcatcggctgatattcaccgccatcagcgagttggccgcgaaggacgccccgtttgacgtcgtgacggtgtcggaagcgatcgaagaccttccagaagccggcgggctggcctacctcggccagctcgccgacaacacgccctccgtggccaatatcgaggcttacgcgcagatcgttcgcgatcgggcgcacctgcggcagttgatgtctctcgggcaccactgcaccagaaccgcctcgaaccaccaggcgaatccctgtgaggttcaggaggagatcgagcagaagctgttcgccctcggccaagatcagcacaagtccgactttgtcgatatcaacaagggcctcgcgaagatcgtcgacaccatcgattaccgcttcaacaacaacgtgacggtaacgggggtcccgacaggcctgaaggatctcgacgagctctccggcggactacagaagtcggatctcatcatcgtcggtgcccgtccctcgatgggcaaaacgtcgtttgccctcaacttgatcgacgccgcgctacagagcgaccaacagaagtctgtccaggtttacagcatggaaatgccagcagagcagctgctgttcaggcttgctgccctgctcggccacctggaccttggcaagctgatgaagggccaactgcaagaagaggattggcccaggctgaccgtcgcgatccagcgcataaacgactatggcagccgactggtcatcaacgaccagggcaacctgacgccgacagagctgcgcgccaaggttcgccgtgcagccaggaagtacggccaccccgtactgatcctggtcgactacctgcagctgatgcgctgcccaggcctggaaaaccgagccaccgagatctcggaaatctcccgctcgctgaaagcactggccaaggaaatggattgccccgtcgtggccctatcccagctcaatcgcagcctggagaaccggccgaacaagcgaccgaacaacgcagacctgcgtgagagcggcgcaatcgagcaggacgcggacgtgatcatgttcgtgtaccgcgacgaggtctaccaccccaacaccgaggccaagggcatcgccgaaatcatcatcggcaagtaccgcaacggcccgatcggcaccgtccgcgccgccttcatcgccaaccagacccgcttcgccgaccttgcaccaacttggcagggagctcttgcatga

SEQ ID NO: 328942 - DNA, 630 bp, Pseudomonas aeruginosa
atgctggaacccgagctgctcgacaccgatgcctggaactctgccattgaatgccaggactgccaggtttacatcgggccgtcctactgcgagccagacccggtaacagcgaggtattcagcacaggtcgactggaacaggcgcccaaacgcaaaaagccacgcggacgagcgtgagcagttcttgatggccaacctgctcgccgccctggaggtcgcactgggcgacgtagcagccctggctattgtcgaccgggtaaggcaggtcgcagaccgaatttaccccacctcgagcctatcccctgttccccaagcatggctcgatgtccaagccgagcgccgccggcagatcgaggccgaaggctggacgccagagcacgacgacgagcacagccacggccagatggcccgagccgccgcctgctacgccctggccggctccagcgctccgaacgatggaaccgccgccctgctggtgtcgctggcatggccttgggatgagcagtggtggaagccaaccacggtgcgacgagatatggtcaaggcctgcgccctggcgctggctgagatcgagcgcctggaccgcaccgcgcccgtgcagggctcaacctgctgcaagggggacgcgtaa

SEQ ID NO: 328943 - DNA, 486 bp, Pseudomonas aeruginosa
atgaagaagccgaacgacacccccgtcgatgacagcctggaagttctgttccccgaccgtcgtttgacggtcgggggcgaggacctggttgtccgcgagctgaccttcgaagagcagctcacccaccacgcggccctcaaggccattgccgaggcgttcctccaggtgccgcgtgaacacctcgaaggagtcgagggcgcgaccattgcgctggacgtgctgacggagcactggaagctcgttctgccgttgattgccgtgagctgtggcaaggcggatggctgggtccggtcgctccgtccaagcgacggtgagtccctgatgctggtctggtgggcagccaaccaaggttttttcgtccgccgtctgtggcgaccgatagtcgtggctcaagccctccaacaacgtggggtcgagtcttcgcctgcctcgtcgcagcaggacaccagcgcgaccagctcggccgctacaccgagcgacagctaa

SEQ ID NO: 328944 - DNA, 129 bp, Pseudomonas aeruginosa
atgctgttcttccgcgaagccgaggcagaaaagggccgccaccaagcccgcgagctgatggcggtcaaccatggcttcgccgggggctctgtagcgattgccgcctatgatcagctcatgagtaattga

SEQ ID NO: 328945 - DNA, 3561 bp, Pseudomonas aeruginosa
gtggccgaccaagaccttgtattagccctgcgcatccgcgctgaccttcagcagggtgcggaccaggtcgaggaactgtccaactcgatccaggccgctggtgaccatgccagccaggctggccgggagctgtccggtttgggggagacggccgaccagcaggcggcccggatcaaggcgatggtcgccgcctccctgcaacagcgggaagcgctggacgcgctggcggaaagttcggatcggatgaacaccgccacgcgggcagccaccagcggctggcaggaaagcgcccgtgcgcaatcggcgtcgatgaatgcctaccacaacgccgagcgcgcccgcgaacagcaggttgcagccgagcaacgagcggccgaggcagcggcgaaagcgaccgccgagttcgaccgccagcaggccgagctgggcaaactgctcgcggccatcgacccggtcactcgcgagctggagaagctcgacagcctccaggcgcgcctgaatgctgccaggggtcgagggatcgacccggacgtctttacgacctacaacgccaagctccaggagcaacgggaccgcctgctcggcacgtctgacgccatggccgtggccggcatttcggcaggtcagtaccgccaggccatgcggcagttgccggcgcagatcaccgacgtggtcaccagcctggccagcgggatgccgctgtggatggttgctatccagcagggcgggcagatcaaggacagtttcggtggcgtcggcgcgacgttccaggcgctgggcgaccaggtcaaatcgttcttcgggatcgcgagtaacgccagcgacggcctggacgacatcgcccgaggggcggacgctgccgcagcgtcggccaacaacgccaagacggctatggtaggcctcagcggagcaggtagcgcctttatcgtcatcggcgcggcggtggccgctgcgggcgtggcgctggctctggcgtatgagaaaggcagctcagaggcggacgagctgaacaaggccatcgtcctgaccggcaactatgccggcaccaccgccgggcaactgtccgccatggcggcgtcactcgccagggcgaacggcactcagtatgaggccgtggcggtactgtcggaaatcaccgcgaccggcaagttcacggttgaccagatcgagcaggttgccactacctccattgcgatgcaggaagcgaccggcaaggctgtttcggatacggtcgccgagttctccaagctggccgacgaaccagtcaaagcctcgcaacagctcaacgagaaatatcactacctgaccgcctcggtttacgagcagatagccgccctcgatcagcaaggcgattcgctgggtgccgcccaactggccatggacgcctatagccaggcaatggacgagcgggcgagccagatcgtcgagaacctgggcaccctggaaaccgcttggaagaccgttgccggggtggccaagggcgcctgggacgaaatgctcggcgtgggccggacggagacacccgaggaacgcctggagcaactgaccaaggggcaggccttccagccgggacgcgctgtggccagcggggctgtcttcggcccgttgggctggttcaacgagcttcgcaaggcgtatcagcgcagctcgatgtcggacgacgagcgcgggaagcaattcaccgatgcccttcaggaaatccaggacgagggcgagaaggcgcagaaggcgcgcctggatcgctacctggaggacgaggcaatacgcggccagcagagcatggacaagctgctggagtcggtgcgcaccaacaaggaaaagcgcgacaagctcaacagggaactggaccggagcattgccgcgatccaggcggctaacccgaacgacgaacgcctgcggccggaaaatatcgccgccgctcgcaaggccatcgatcagaagtacaaagacccgaaaaccccgaaagggccgtctacgcccctcgaccagtccagcgtcaccgaggcgaagaaccgcctggaccagttgcaaaccgatttcaggaacgccgagcagaagctccaggcgcagcagcgcgccggcctactgagctatgcggactatgtcgcgcagcgcggcgaactgatcagccagaacaaggaccaggtcaccgcagcctatgagggggaaatccaggcgctggaggcgctgcgcgacaaaagttccaccacggcggcccagcgcatcagcctggaccagaagatcgccgaggccaggaacaacatggtcaaggcgcagaagaaggccgacgccgacctggaagtcctccagctcaacgaacagggccgcctgaagaaacaggcccaggcagtcaaggcctacagcgacgcgctccagcaacaacaggatgcgctggccctccagggtcaacgtgccgccgctgccgtgggcatgggcgcgcaacagcgccgcttgttcgatcagcgtggcagccttgacgaccgattcgcgcagcagcgcctggacctggcgagccagtacggtgacggctcgcgaggcatgagcctcgacgagtacaacgacaagatcaaggcgctggaagctaaccatgccgcgatgacccagcagctgcaacgcaactacgccgacctccaggccgcccagggcaactgggtcaacggggcggcgtcggcgttcgctgactacatcgactccgccagggacgtcgcgggccagacctacgaactgtttagtaacgccttctccggtctggaggatgccgtcgttacctttgtgacgactggcaaggcctcgctggatgacttcgtccgcaccatgattggcgacctggccaggatggcgacccgccagctaggggcgtctctgctttccgggtttggcctgggcggtggcaccgatggcggcgcccaggggctgacggtcggcgcctcggctgtatccgcctcggccggcgccctggcgactgctggcggcacgctcctgagcggcgccgccgctatccaggccgctgccgcctcgctggccgccgccaatggtgtcagtggggtgaccggcgctgcgggagctgccggggctgctggagtggctggtggcgggagtggctggttgtcttcgatcaccagcattttcggcttcgcgggtggcggccaggtccagggaccaggcacaccgaccagcgacagcataccggcctggctatccaacaatgaggtcgtaatccggtcggcatccgcgatgcagccagggcttactccgctgctgctggacatcaaccaacgcggatgggcggcgctacatgactgggcgggggccgtccgccacgccaccgggggcgtcgccggcattcccgcgccatccctaccacgcccaagcatgggcgccgctcagatacaggaaccatccaagaacttcagcgcatcagtctccaacgcggtccacctccatgctgttcaagaccccgaccaggtggcggccgacatgtgggccggcaagggcggcgaccattacatcgtctggctgaacaagaaccgccaggccgtcaagcaaatactcggaaactag

SEQ ID NO: 328946 - DNA, 351 bp, Pseudomonas aeruginosa
atgacctctctcaacaaccactccagcgcaggccacactgctgcgtacctcaaactcccgatcgttctcaccaacgcggcctggctgcgcctggtctatctcgccaaccctgccagggtcgacgagatgggcacccggctggccagtgtcgttcaaaccgcctggcaggagctttcgctccagccgaccgcgaagcacatccaattccacctgtaccacaaagaggaagaggggcaggaccgcgcgctcgcgctgctggtcctctcgatagtcgagccgtccgatgagccttcctacctgcgcatcgagctgcaggaagaaagcctcccgggcaacccggataccgagtag

SEQ ID NO: 328947 - DNA, 495 bp, Pseudomonas aeruginosa
atggccaggaagaagcctgttaaccctcgcggccagccggccgactcggcgcccgacgacagcctgagcgtgctgtttcctgaccgtcagttggcggtcgggggcgtcgaggtgacggtgcgcgagctgaccttcagcgagcaactgcgccataaccacctgttggccccgctggccgatgccctggcggcagttcccccggagcagctcgacggacctgagtcgatcaacgtcatcttcgacgctctggcccggcacgccgacgcgctgcgcgagttgctcgcgatcagttgcggccaatccgtggactgggtggacgcgctgccggcagacgacggcgaagcactggtgttgacctggtggacggtgaacagtggttttttcgtgcgaaggctctggcggcctcgcctactggcgatggcattgggcaaccgacgccctggagccgagtcttctccgatctcgtccgcgccggccactgccgcgaaaccctag

SEQ ID NO: 328948 - DNA, 3483 bp, Pseudomonas aeruginosa
atggccactaatcagcaactctcgatagcactacgcatccaggctgacctggctgaagcgcagaacgcgctcagacaactaacgggcaacctccagcaggttgaccggggggcggtgcagaccaggagcgagctgtctgcgatgggtgggcagttggacagccttcgcgcacaggtgcttgggtttgtcggagcttgggctagcttgagtgcgctgggcggcctggtgaccatggttgaccaatatgggcaaatggccgaccgcatccagatggtcaccagcagcacggccgaatatgaacaagtgcaggcccggctgctggagacggccagccgcacctatcggccgctggcggaagcccaagagttgtacatccgcaccgccgacagcctgaagtcgttgcggtacaccaccgaacaagcgctggacatcaccgattcgttttccttcttgctggtaaccaacgccgcgtcggcggaccgtgcggcgagcgccatcgacgcctactcgaaatcgatccagaccggcaaggtcagctctgacgcctggcagtcgatcatggccgccatgcccagcctggtgaacgccctggcagagtccaccggcaagagcaccgaggaaatccgcaagctaggcatcgagggcagcctgtcgttgcgcgacctgaatgaagggctgcgcaagaccgtggcggcgaaccgcgaggcggcggacaacatgggcacctcggtccaggacgcgctggtcagcctgaacaacgccctgagcgcctacctgggcgagctgaaccgcacctatgacatcaccggtagcgtgtcctcggcgctgaacgtgctggccgagaacatggaggttatcgtcaaactgtttggggtcgcggcggtggcggggctgacccgctacgtggccagcctaacgctggccacccaggcgaaactggcggcagtgctggccgctcgggcgcaagccgctgaagaactgcgggcagcccaggctcaggtcgcttcgacggcagcggcagcggccaatgccagggcacaggcgggcctgacggtgagccatgctcaggcggcggcggccgaggcggcgcataccgccgcgacccagcgccttgctgctgcgcagttggcggccggcaccgcgatgcgcgggatgctggccgtgatcggtggtccggccggcatcgcgatgctggtggccggagcggcggcaagcttcttcctgtttcgcgatagcgcccaggcggtcaagagtagcctagatgacctgagtgagccgctggaccaggtcgtcgagcgcatgggcaagctgagcgagattgagcaagatcgcgaactgacccggctttccgagcagatcgacggattgcggcagacggctgtggaagccgcccgcgaaatgcgagaggtggccagcaccgccctctatggtgccaggctggatcgtatcccgtctgccgaagcacagcaggccctccagcctctaatcgatgcgtcggctgacgctgcgcgaggcgtggaggtggactggaagtcggtgatggactccctggctgccagcggcgctgttcccgattcactcaagcgcaagctgctggacatggcggctggtcaggcagaggcaggccgtactgctaccgagctggggcagcgtcatgcggaactcaaggcacgcctggagggttcgactgccgccatcaatgagaacagcgatgcactgagtaaagggtcggacaaggcagccgagtatatccagtccctgcgcctggccatcgccgacctggaagatccatcggtcctgggcaaggccggccgtcgcctccagcagttcggggccgacctcaatgccgagcagagtgccgaaatactccgcctggagaccctgaaggccaataccgaaaaggcggcccaggcccgcgaggatgcacggcgcaaggctgaatccagtgcgcgacaacaagcctccacggctgagcagttggcgaagagccaggaaggctatgttgcggggctggaaaagcaagcccgcaccctgggtctcaccagcgcagaggtgcgggcctacgagctggccgagaagggtttgaccggagccctccaagctcgggcagcggcagcacttgccgccctcgcggcggacgagaagaagcggcaagccgacgccactgcgcgcaccaacgccggactggaggccgaatatctgcgggcgaccggccgcaccgttgacgcggggctgctggagattcggacgaaatttgacgcgatgcgtcgtgacttcgaaaaggcgggcaacgacgccggcctggcctggatcgacaagctaatccccgtcgccgaggccaaggtccgcctggatgacgtcaagcagcagatggacgatttgctggccgaccagcaacgggccgagtcgtccgttaacgtccagcaggatgccggcatcatcaacgaaatggacgcccggcagcgcatcctggacattcaccgagcgacctacgagaagctccagcagattcggccgatcctagagcagatggcccgccagcctggcgaggtcggccgagccgctgccgaatcgctcgcccaactggacgccgaggcggcgcgactccagcagaccacgacgctgctcgaaaccaccctacgggacggcctcaccagcggctttaccgacgccatcaaagggctcgcttccgggaccatggacttgcgcgacgccatcacgtcgctgggtgaagctgtactcaatgccttggtgaacatggcggcgcagaacctcgcgcagtcgttgtccagcggcatcatggggctgtttggtggcggccagcaggacaccagcatgactaccggcgcggcggctgtgaccgcgtcggccggtgccctatcgactgcgggcgcctcgctgctgaccggggccgctgctatccagacggccgctgcgtcgctggcagccgccaatggcgtccaagggctgggcgctgctgcgggtggtgcgggtgcggcaggagcggcagcgggcggcggcagttggtggtcctccatcgccggcgtgttcggtttcgccaccggcggccacatcaagggaccaggaacaggcacaagcgacagtatcccgattctggcatccaacgacgagtttatgacccgcgccgcagttgtacgacagcctggcgccctggcatttctcgaacagttcaaccgctacggcatggccgcgctggccggctgggcgaaccctgtccgtcacgcaaccggcggacagatcggcattcccgctcccaatctgccggctcccgtccgtggcgccgctcagatacaggaaccatccaagaacttcagcgcatcagtctccaacgcggtccacctccatgctgttcaggaccccgaccagatggcggccgaaatgtgggccggcaagggcggcgaccattacatcgtctggctgaacaagaaccgccaggccgtcaagcaaatactcggaaactag

SEQ ID NO: 328949 - DNA, 594 bp, Pseudomonas aeruginosa
atgtcagctatggatgagttggacttcagcggcctgagtgatgaccaactcgtcgagctggccatcgccattgcaaaagaggcggcccggcgcaatccagcgctgcaagcagctttcgccgaagcgctggccaccgaaagggagaagatcgatgctcgccttcggggcgccgaacgggcccgccaatatgaaattcaacaagccgagcgagtagcagaagctgcaagcaaggccgtcgctgacgaaaagatgcgatcaaaacgcaccgagttgctgcgccgatatctagagcaagttgcctatctgattgggagaccgcctcaagagctgacgttagtctggaaaaccagcgactggacacgacgagtatcaggtccccgcctccaggtgaatctcggctccaccggcactgacgtgaagtggcacctgattgactatgccgaggccacggatcagatctggacctcgccagccctggccaagctcactccctccttgcagccttgggctcgtgaagtttgcgtggctgtacgggcgataaatttcgatagaactacggtggcacgaggcgccgaaatatgtccaatgaactga

SEQ ID NO: 328950 - DNA, 2484 bp, Pseudomonas aeruginosa
atggctgacgtaaagatccggctgaccgctgacctcgatgatgcgctgcgcgaggtgtcaggtttccgcaaggaatacgccgaactggtcagacaggtcgcgcaacctctcaagcgtttaaacgatttcactgctctcgaaagcacccttgaggacacgcaacgccaggcgcgctcggcgcgcgagcagatccgcacgctcggcaacgagctggcatcgacgatcaggccaagtcgcgaattgcagcaggcttaccgggactccatttcggacctgcgaagcctggagcgggcagagaccgtccaggtagccaagctcggagcgatgcgccgggagttgaagcaggccgggctggatacgaggagcctgacatccgaacggcagcggctccagcgtgaactggatcgaaacctccaggcgggccggaatgatgcggccaccaccagcctccggcaacaggccgcagcgatcaagcagagcgcgatagagcagcgccgcttcaacttggagcaagcgcgtagcaccctgggagtcgccagggtgcgcgaactgcaggctgctatcgggcagttgaaccagcaatatcgcttgcttcgatcgagcggaacgctgtctacaagggagcttgcgattgcccagcgggcgctcaagaagcagatcgcggagaccaagggtgaactcaactcgctgggtgccggctcgcggctgtcgagcatcggctctctccgcgggagcggtccagcgctggcggttgcgggtctcgccgccgcagtaggcgctgcaacggcgaagctagcgaacggggctgacactgttggccggctcgattcccggcttcgcctggcgacccgctcgcaggaagaattcaacaccgcgcagatcgaactcgaccgtatcgcggatgatgttcagggcgacgtcggcgacctcatcggcctttattcgcggttgcagcgcccgcttcgggatgcgggcatggatcagcgcgccgccctcgaaaccgtagaggcggtagcccttggcctgaaaatcggtggagcctctgccgaggagtcggcgtcggtcattacccagttctcccaggctattgccagtggcgtcctgcggggcgaagagttcaataccgttctggagtcctcggatcgcattgctggcgccctggcggactccttcggagtgactgtcggccggcttcgcgagatggctgccgccggtgaactgacctcggagcagatcgttatcgcgctgcggaaggagttgccgaagctccgcgaggagatggcgtcgtttgccccggagattggtgcagggctgaaccggatattttccgaaacccagaaatattgggggcgtcgcgcgaaggaaacaggcatcgtcgactgggttgcgaaccagttgaacgatgttgccaaggggatcaacacggcgaatacgctggtgaaaaagggcgagggcagcctcacagccacgctcgccgcagagaaggcgcgtcaagagcagatcgtgaagcgccagaatgatgccttgaagcgggctcgggaacagaacgtcgctgatctccagtctgaagttgttcggaccaaggccctccttgagcagtcaaccaagaacctcaacgacgcgctttcgcgccaggcagatgtccgcaaggagtttgccgacctggtgaagggtatccagtcgacgcccacctccggaacgcagaccttcggtgatgccactgcggcccaggcatcggctcgcaacgcgctgaccgccggcaacaaccaaaaggcgatcgaggaggcgcgccgcgcgctgcagatccttcagcaactgaaggacgctggcgcgaacagctacggcttcgaaggcgtggccaaggaggtggagcgcatcgccaacaaggccgcagaggtcgaggctggtaatgccaaggctgcggatgacgtcaaccgcctgaacctggccgacctcgaggagcgcatcaaggctgtgcaaaacgtcgaggtgtcgttcggaatggacttcgaaagcgcggagaccttgaagcaacaggtcgccgacatcgccgccggactggctgagcaactcgtgatacctatcacgctggttccgcctccggagatgggcttgcctggcgtgcccagcatcacccccaagatacccgggtttgccactggtacgcagagcgctccccctggtatggcgtgggttggggagcgtgggccggagttgatgatgatgcgcggaggagagcgcatcttcaacgcggtgcagtcgctgcagatgtcgcagaggtatcaacgaactctccccgagatacccgcgattccgaccgcggcgcttcagcaggcgaatccgctggcagccatgcaaaacctgggatcgctgaccctcaacctgggtggagacgatgccggtttcaccgttttcgggacacacgacacactccgagatatacgcaaggccgcctcgaagttcgggcggacgcgcccaaaatga

SEQ ID NO: 328951 - DNA, 1560 bp, Pseudomonas aeruginosa
ttgaagctgctacagcgccttgagaagttcgacgatgccgttcctgtactcagctcttacacccagcgggcgcacgacctagccacacagatggccagggacgacctcggacttccacatcgcctcgtgtatccgagccacagcaacaagcgctactactcgccgaggcgccagttctacctgaagcagatcggagcggtcttgcgaaccttcaggcagttcctggaccaagacctgctgttcgctatccgctcggttcggtgcctctcgccccagctctacaactggctggctcaaggcaaccgggtgcgccggctgcaaatgctgaaggctcagccggtcttgacgccgctactggtggattgcgaggagggagtctggcctcacacgacgaccaacgacaacggcgagagcatctgccatttccttccttgccctttttccctgcttgtcagtgaacgaccgcaggccgccgccgtgccatgcgacttgtacctcgatatgggccgtattcttgggcaggtcgcggacgaagggatttcggtcatcaactttttcgcctggctatttcaggcgccacgggcctcgattcgatttcttagtcacgtcagtcccggccgtgcgggaggagctctcttccatcgcaaacgggaaggccgatgttcgggatggcatgctctcctactggcagcatcgttaggtaaccggcggccgatcactcgcgctcaatggacagcattctatgccgcctacaatgcgatcccttggcaaattcacaacgccaagcccgactacaaccgtctcttcaacggctgcccgtcggattggcaggatccggcatggcttgcaatcactgcacgcctgagagacatcaaggagttctataccgccctcgaccaggggaactcacaggttgttcggcaggcgcgcagcgccctgaaggcgtatctgggtcattgtacctaccgacaggctggcaacctggtggacgactaccatcaggtccagagggagctgcgtgctgcagtgcagagcagcctgcccgatctggtcgacaccgacgagtacaccacctgggagggaatgctgcctgtcggccttgtcgattgccctaatggcctgcagatcgtcgagctccgctgtcctgccgacctctatgccgaacatgtcgctctggcacattgcatcgatagctacgaccaggccgcctaccgaggagactgccgactgctctcagtacgtgaggctggccgtccactggcctctgccgaactggagctcaggcgtgagcatggcgagccactaggtaggccctggaatccccagcacctttctacggtgcaacttcgcgaattcgataatgcccccgtgccgacagactcgcctgccggccaggcataccgctggttcatggaacgaattcgctctggagccatagcgacgaacctgaactggcccgacatgaccgtccacatgacacgcttcgccgatggtcgctggaaggcgggcctcgccgaagccacggcgaagtggctgctcactcggttggaaaaccgatga

SEQ ID NO: 328952 - DNA, 423 bp, Pseudomonas aeruginosa
atggctctatcagacgagcgccgcggcatcggcgcgaggaacgaagcgatccgccgcgccggcggccaacgggttgaagcggagcgccgcggtgaccaaggcctgactgcggcgctcaaccggctgatcgagccggaacgccaggcgcggtcgctgcggaaaatcgatccgcgcggcgccctggatgcaaagcgcgggcgggcggactacaaccccgctggcaagcagatcggcgggggtggcggtattgcgagccccctgatcgaggaagatgctggccagcgcgaatactacgaactgcagacaatccccaccagcgatggcctggcctggctccggtatcgcagcgtgaagaagatcgtcatgaccgacgcgtcaggcgcagaagttgtgatggagtacgcgaacgatgtttcccaatag

SEQ ID NO: 328953 - DNA, 588 bp, Pseudomonas aeruginosa
atgacgccggcctgtgtacccctgcgcattgaaaaaggggcgacgttccgcgacacgatgcggatcatgcaaccgagcctggtctatcggccgatcacccaggtcgcgccgactgctcccgtccggctgaccatccctgggcacggattgcccggcacgtggctggcatggatagatggcgtccagggcatgcccgaactgaaccgcgcccggcttcggcaactgcctcaccgggtcgcgtccatcgacgacaacaccgtcgagatcaacctgctttcagccgttgggctggcgcctgtgggcgggcaattgatctaccagccacccgttgacctggctggcgccgaggtacggatgcagatccgcgacgcgccaggcgggactgtgctgatgacgctggcgctcggctccggccttgagatcgctggcgccggaacgatctcgcgcgagatatcggcctccgataccgcggcgttggcatgggcgtcggcggtctacgacgtggacgtgacatacccagatggcacggtccaccgctactacagcggaccgatcactgtgagccgtgggggagggtgcgatggatga

SEQ ID NO: 328954 - DNA, 2091 bp, Pseudomonas aeruginosa
atggaccgactcaagcgcaagcccttcgcggcccaggccgaggtcgtccaggccatcaccgccctgctgctggaccgtaacgagcaggccgggatcatcaacgccgagatgggcaccgggaaaaccatgatggccatcgctgtcgcagcggtcatgcacgcggccggctatcgccggaccctggttgtctctccgccgcacctggtctacaagtggcgccgcgagattctggagaccatcccagccgcccgcgtctgggtactcaatggcccagatactctgctcaagctgctcaagctacgagatcagatgggcgacgcctacgacggacgccaggagttcttcatcctcggccgcgtgcggatgcggatgggtttccattggcggctcgcctgctggaagaagcgcgccgccggcggccaattgctcgctgcgtgcccggattgcggccaggtcctcgaggacctggaaggcaacctggtcacggtggaggagttcgagcgtggtgaccgtcgacgtacctgttcctcctgtcgtggggcgctctggacgctgatccggccaggcaagcctgacggcggcaaccggcgcgcaacgatcctcaagtcgatgtgtcggattccaaccatcggcccggtcagggcggagcgcctgctgaacgacttcggcgaggacttcctggccacgatgttggtggacaacgtctcggagttcatcaacctgatggacgccaagggcgacttcgtcttcagcgatcggcaggccaaacgcatggagcgatcgatggcgaacatcgagttcggcttcggcgaaggcggctaccaaccgaccgagttcataaaaagacaacttcccaacggctacttcgatctgttggtggtggatgaggggcatgagtacaagaacagcggttcggcccagggccaggccatgggcgttctcgcagccaaggcacggaaaaccgtgctgctgaccggaacgctcatgggcggctacgccgacgacctgttctacctcctgttccgcatcctcacccagcgcatgatcgaggacggctaccggcccaacgcgcgtggcagcatggctccagcagccatgtcgttcatgcgcgaccacggcgtgctcaaggacatctacaccgaacgcgatggtgactcgcacaagacagcccggggcaagaagctctcggtacgcacggtgaaggctcccggcttcggcccgaagggcatccaccgcttcgtattgccgttcaccgtgttcctgaagctcaaggatatcggtggcaacgtactgcccgactaccaggaggagttcgtcgacgtgccgatggcgcctgatcaggcttcggcctatcagcgcctggcggccacgctgacagcggagctccgccaggctctggcgcgacgagataccacgctcctgggcgtggtcctcaacgtgctgctggcttggccggactgctgtttccgaccggagatcgtcaagcatccgcgaagccgggacacactggccttcgtgccagcgatcttcggcgacgagcagttgatgcccaaggagcaggcgctggtggacctctgcctcgaggagaaagcgaagggccgcaaggttctggcatacaccgtctacagcgggacgcgcgacaccacgtccaggctgaagaaagtgctcgagcaatccgggctgaaggtggcagtgctacgtgcttcggtcgataccgctcgacgcgaggattggatcctcgaccaggtcgatcgcggcatcgatgtgctgatcaccaacccggagctggtgaagaccgggctggacctgctggacttcccgaccatcgcgttcctgcagacggggtacaacgtgtacaccttgcagcaggccgcgcggcggtcgtggcggatcgggcagaagcacccggtgcgggtggtgttcttcggctacgccggcagctcgcagatcacctgcttgcagttgatggcgaagaagatcgctgtggctcagagcacgtcgggagacgttcccgagtcaggtctcgattcgttgaaccaggacggggactcggtggagatggcgttggcacgacaactcattgcagcatga

SEQ ID NO: 328955 - DNA, 255 bp, Pseudomonas aeruginosa
atgactaagcagttctaccccaggctcacggaaaataagaaccaagagccaagccgccaggcttgggttttcatggtcgcaatgccggccttcgtcctgggttgtattttcacgttcgctatcttgtggttcggcccggtggccgtgcgtgacaaggtaatcgcagagtatgaggccgatgttatgctcctggccaaacagctggacgaggccgaaaaataccggcgcataccatcgccagcagcggcaaactga

SEQ ID NO: 328956 - DNA, 1302 bp, Pseudomonas aeruginosa; identical to SEQ ID NO: 328571

SEQ ID NO: 328957 - DNA, 1653 bp, Pseudomonas aeruginosa
atgaagggtagcaccagagacttcctggcggatattgcccagctcgcgggggagttccgccgccagatcgaggccgaggtcgcaggcttcgaccccgacccgaaggccagcgccgtccggcgtgaacgggccagcgcggactatgagtatttcgcccggacctacttcccgcactacgtgaagcgcggtaacgcgctgctccacgactacctctacaagcggttgcccgagctggtggaccacccggacggccagcacgaagccattgcggcgccgcgtggtaatgccaagtccaccctggtgagccagatattcgtgatctggtgcgtactcaccggccgcaagcattaccccctgatcatcatggatgccttcgaacaggccgccacgatgctggaggcgatcaaggcggagctggagttcaacccgcgcctggccatggacttcccccagggcgccggcaagggccgcgtttggcaggtcggcaccatcgttacggcgaacgatgccaaggtccaggtcttcggctccggcaagcggatgcgcggccttcgacacggcccgcaccgtcctgacctggtgatcggcgacgacctggagaacgacgagaacgtccgcagcccggagcagcgcgacaagctggaaaactggctgaagaaaaccgttctgtccctcggctcggccgacgacaccatggacgtgatcatcatcgggaccatccttcactacgactcggtcctgtcgcgcctgctgaaaaacccgctgtggaagcggcgcaagttcaaggcgatcatcgaatggccgcaccgcatggacctgtgggagaagtgggaggaacttctgctcaactccgacgacgagggcgccgccgctctggccttctaccaggaacgcgccgccgccatggaggacggcgcgatcatctgctggccggatgggcagcccctctacaagcttatggtgaaacgtgcccgcgatgggcactcggcgttcgactcggaacagcagaacgacccagtccagggcgagaacgcccccttcgccgcctgcatcacgttctgggtcaaccgcctggcgcagtggatgttctacggcgcgtgcgacccgtccctgggtaagcaaggttccagccgcgaccccagcgccatcctggtgggtgggttcaaccgggagacaggcgtcctggacgtggtcgaggccgccatccgcaaacgcctgccggacaagatcatcgaggacatcatcgccatgcagcgggcctatcactgcctggtgtggggcgttgaggcggtccagttccaggagttcctgcgcaccgagctggtgaagcgctccgccaaggctggctgcccagtacctgcccgagcgatcacgccacacgccgacaagctactgcgcatcgaaagcctccagccgcacatggccaacggcctgatccgtctgcatccaagccagaccgtcctggaacaacagctgcgccacttcccggccgcagaccacgacgatggccccgacgccctacacatgctctggatgctggccacgacggggttcgcgccgatagaggcgactttggtcaaacgccggcatgaatacgcgcccggccttgacgattcttttgacactggcggccgcttcggcggcgcatggtag

SEQ ID NO: 328958 - DNA, 714 bp, Pseudomonas aeruginosa
atgggttacgaacaaacggatggcgccccgactgaattgtctgggcatccgattccccaggatggaatcggatacttcaaaatccgtctgaaacaggcgatttcctcgcaaagcctgcgaggattttctaaggaatgcggcttgtccgaggctaccctgcgcagttatctgtcgggggagactttcccaaccttggatcgacttgaacagatcgcccaggccgcagggacttccgctatgtggctggctttcggcacccctacgtctgcggaagatagtcgcgagaagggagacgacagttacgcctatatccctctgtatgacgctcgggtgagcgctggtcacggctcctggacagagggggcacggatactcgctcagttggcgttcactcgctacagcttgcggaagcaaggcctggagatagcgaatatgtcggccgtccgcatcggcggtgactcaatggagccgctgttgagcgatggcgatacggtgatgattgatcacagctgcaatgaggttcgtgacgaagctgtctacgtcattcgcctggatgaccacttgtacgccaagcgcgtccaacggcagatcaatggcggcctcgcgatcatcagtgctaaccctgcctatcagacaatgttcgtctctaagcaggacttggaagcagttgacatcatcgggcgcgtcgtgtggtcaggccgatggatggcttag

SEQ ID NO: 328959 - DNA, 567 bp, Pseudomonas aeruginosa
atgtccaagcaatccaccagcttcgaaataggctttgccctcggcagtgttgtgcgtgagttccgcagagcgctcaggcgccctccggtcgtagtgcaagcacaagcgccggttgcgttgagcgtccggcgcatcgatcctgccttcctggccggcccgaccgctggcgagctagaacacatcagcgacatcccagccatcgtccggctgaagaaggtcaacctgaatgactggtatctagccaatacgcgcgaggtgcaaaagcccaagcgcgcacgcaaacccaagccggccaaggcgaccgccaaagctgaaacgccagtcaggaaggagctcaagatgggttccctcgaccatttgattgcacccaactccgaaagcgaaatggggaggccccctctccagttagagtccctgaacgatcatgagattgctcttttgccagcacctcctggtagcgcagtctcttgggaactccatcggcgtactcaggagcaataccaacaacgctggcaggactacttgtccaccatgacggatgaacaagtagctgctctcggccgctaa

SEQ ID NO: 328960 - DNA, 999 bp, Pseudomonas aeruginosa
atggcccaatatgacagcgcctacaaactcctattctcccaccctgacctggtccgcgacctgctccgcggctttgtccccgaacagtgggtccagcgcctggacttcagtaccctggaaaaagtcagcggccaattcgtctccgacgacctgcgcgaccgacacaacgacctgctatggcgcgttcgcctcgacaatgaccactggatctacctctacctgttgctcgagttccagagcaccgacgactactggatggccattcgcctgatgacctacataggtctgctttaccaggacctcgcccgacagagggtcgtcttgcctggacagcctctaccaccggtcttccctatcgtcctctacaacggtagcgcccgatggagcggcccactcgacaccgccgacctgttcgagatccccgcggactcgcccctggccgcctataaacccaaactgcgctacttcctgctcgacgaacgacacctggatgtcacaaccttgcccaaggacgacaacctggtagcccaggtcctgcacctggaaaacagcgcccaccctcaacacgcgatcgaagccgtcaagaccctgcaaaagctgttgcacgcccccgaatgtgatagtgtaaggcgtgccttcaacgtctggatccggcataccgtcgccgaaaaactcaaccggcaagccaaccagctaccgtcgaccgaaaccttggaggacatctacatcatgctcaccgaacacaccggacaatggtccgaaacctggaagcgcgaaggtcttcagcaaggtcttcagcaaggacgccaggaaggtcttcagcaaggacgccaggaaggtcaggcggcactattgacccgattggcggaacgccgctttggcccgctatcggctgccgaccgcgcccggctggaagccgccacccaggcccagctcgaagcctgggccgacgccatcctcaccgcccagagcctggctgagctgttcaccgctcactga

SEQ ID NO: 328961 - DNA, 303 bp, Pseudomonas aeruginosa
ttgaccgcggcactcaaccggctgatcgagccggagcgtcaggcacgcgcactgcgcaagatcgacccgcgcggcgccctggatgctgcgcgcggcagggccgactacaaccccgccggcaagcagatcggcgggggcggtgtgtcctggccgctggccgagaccgacaagtcgaagcgcacggtggccgacgaggagatcgtgagcaccgatggcctggtcgtcgttgtgttcaagcgcgtcaccagcttcgagatgcaggatggcggctcgaatattggccgcatggagttcaaggcatga

SEQ ID NO: 328962 - DNA, 1776 bp, Pseudomonas aeruginosa
atgaacgccgaggaaaaagagttcctacgggaactatccgccatggcgcagcagctgcgccgcgacatcgaggcgcaacaggtcggcctcgatagctccccggaagctcgggccgagcggcgtcgtcgcgtactggtagatcgcgatttcgagttcttcgcgtatacctacttcccgcaccacatccggccgcctgcctcgttgttccatgcgcatttcttcaagcgctttccccagctcatcagcagctccagcggcctcaaggaatggtgggtagctccgcgtggcgaggcgaagtcctcgctgctgaccaaggtcgggccgtgctatgtcgttgtccaggggctgctccagcgcccggagattcgggccgaactgggcatgaccggcccggcgccgtacttcgtcgactacatcacgctcctaggcgccgaaacgcgcttgcccaccaagctcctggaagtagtcaagaccgagctactggtaaacgcctccctgtccctggacttccccgaagtctgcggcaagggaagcgtctggaagatcggcgagtttgtttccctctccggggtcaagctggaggccttcggcgctgaacaggcgatccggggcacattccacggcgcgagccgtcccaagctgctcctgggcgatgacctgatcaccgacaaagaggccaagtccccgaccgagcgcaacaaccgatgggactggctggaaaaggctatcgactatctcggcccaccggatggctccgtcaaatatctgggcgtgggcacagtgctgaataaggatgatccgatcagccgagccaaacgcacggtcgggcacctggtccaccacttccgcgctatcgagacgttccccacccacatggacctatgggcacattgcgaagaggtgatgctcaacgacgataagcccgtgatggagcaatacgccgagcgcggtagcgtcgcgcccgatagcgctctgccgtcgtttcagctctaccaggacaaccgcgagcagatggagctgggggccgtcaccagttggccaggtgtccggtcgctctactggctgatgcgtcagcgggcgaagaacaaagccgcgttcgcgaccgagctgcaaggcgacccgcgatccgatgaagacaagacgtttaccaacccgcgcttttgggtcatgcgctccggccgttggcagatgtttggcgcctgcgacccctctgtcggggcgagcgcacagtccgacccgtcggcaatcatcgtggggggctgggacaccgagaaacaggtactcaacgtcatagaggcggccatcaagcggcgcgtcccctcgaaactggaatcggacttgatcaaggcgcaaagggagtaccagatgcgcgctatcggtttcgagaacaacggggcattcgaaatccagcggcagaacatcgccaaggctgcgctgatgcagcgcgtagcgctccctctggtcggtgttaccagcatggcggaccagtccgttcgaatcgatgccatggagccgttcatcaacgacgcatttgcgccacggattctgttttcacctggattggtcgccctgctcgacgagctggacagctggccagaaccgcagaccgggcaccactacgacggcctttgcgccctgtcgatcctctggatgatcgctagcacccgcgctggttcctatgaattcaccccggtgcctggccgtcgcagctctgcggattccagtgagttcaaagactcttttgacataggtggccgcatgggcggcgactggtag

SEQ ID NO: 328963 - DNA, 1014 bp, Pseudomonas aeruginosa
atgcagccgggcaagatcgcctcgcgcgaaaccatagccaaggcactcacggttcttcgattgacacgctggctcagcctcggccgacgcctgcgcaacgacctcaacgggcaagtacagggcaacgtctacatcctccacgacgaaccggtatccccggcagaagccctggagctggaccccgactacatgcagttgctgagccaatccaccgaccacggcaaccgagccatacgcgaagtaggacaggtcacctggacggaattcagggacgatccggacgttggtcggcgcctgccttcccacctggagaagcttgaggggcgcttgaaccatcagcagtgggctctcgatagtcagctcgaagcggatccagcggcagagttcggcatccgaactctgcccgatttacctcattccaccccgagttcggatgccgaactcagtgaaatcagcggcaagcgatgcgctctaccgctgagttcggatgccgaacccagacagaatccgccgagtacacccttggttcggatgccgaactcatatagtacgtatacatacaaacaagattctgtatgtaaaaagccagtacaaccgcgagcacgcgaggacgcacatccgaactggcaggatctcctgaacggactggaggccgagcaacggatccaagccgtaagcgcgctccgacgggtgtccgaggagctgcgtcgtccggtcatcgagcagtggcggcaccgatgtgcgggaggaagtgtcggtaaccccttcggctacctcatgacgctcatccagcgtgcagtccagggcaagttcaacgcctcttgggctccggaagaaatagcggaacgcccctgtcgtgctccggcaccaccaagccccacaacgcctacacagcctcagattcagccaaagggagacacccggacagggagcgaggtcctcagccggctcaaggacctcattcggcccaggcacggatcgagcgtgccatccgaacggggtgacgagccatga

SEQ ID NO: 328964 - DNA, 198 bp, Pseudomonas aeruginosa; identical to SEQ ID NO: 324448

SEQ ID NO: 328965 - DNA, 780 bp, Pseudomonas aeruginosa
gtgtacgcagtgagaaccatcaccctcctgggcgtcggccccgacaaaaagccgctgcgcttcggcgccaaagggaagctgttgagcgtgcctggctggcgaaaactgctgcagggcgatgacgcagaggagcagaagaacgaaacgccttcaaatcccatcccggcgctggagcctggccagatactcaaggtctacagcggcgaggtcctggagaagaaaaccacccctcccaagcgattcaccgacgccagtctggtgggtgagatgaagcgccacgggattggtcggccatcatcctacgcctctatcgtgaagaacatcatcgacaagggccaggtgcagatgaaggggcgaagcctgatccccggcgagctgggagaggccaccatcgcgctcctggagcacaacttcagcttcctcagcctcgacttcacccgcaacctcgaggtcgccttggaccggatcgccaacagcgaggacacctacatgaacgtggtccagcagttctaccagctactacagacagaactgcagacactccgctcgctccccagcgcacaggacgaaccacgcgcaagctccaccgccagtatctcctcggcgccgaccagcgacttcctttgcggcaagtgcggtctgcccctggcccaccgcaagaaagccggcaagggcggcttcgacttctggggctgcagcggttaccgcacaaccggctgcaaggtcagctaccctgacaagaacggccagcctgatcttgacaacccgcgcgggctatag

SEQ ID NO: 328966 - DNA, 753 bp, Pseudomonas aeruginosa
atgacgacgcagacccgcactgatagaaacctcaacttcgatttcgtgcgcaggcaagtcgagcaaccgccagcatgggcatcagaggtcctgctgtcgtgggaggaagcctacccccaggaaaagcacgccttccttcaaagccactactggaccgagacgggatcgatcaatgtgttccgcgtcgtgggtaccgaccgcaaagactaccggggaaggtcctggctcgacttcctcactggcggcaagcgaatgcagcgaaacctgcaggccttgttggacaacccgagctactacctgcagccaacggagcgcaggcccgcgatccactacaacacactcgatggcttgaatttctacgtcggctccgacggcaaccaccgcacctgtattgctcgattcttcctggccgagcagcagaagagccagctccacgacgtgacgctcaaccactaccaggtcaacgacagcttctaccgcctgtacgggcaactccggcaacaactcctgctacaagggctacctgtgcaaatccatccggagcgtgtgcagttgggccgggaagatactgctggctggaagatggatacctaccagaccacattgaactggttgaacctcaagacccaggaggaaagatccctgaatgaagcacaggcgagggagcaactcatcgacctcatgcggggaaaaccatctgaagagcaaccgcgaggctggaaggcaaggctgaaatgtctcatttcaggctga

SEQ ID NO: 328967 - DNA, 891 bp, Pseudomonas aeruginosa
atgaaaggggttcgtcgcccaatcctgcgctaccacggaggcaagtggaaacttgctccctggatcatccagcacctggcgccacatcacacttacgtcgagcccttcggcggcgcagcctccgtcctgctccggaaagcccgcagctacgccgagatctataacgacctcgacggggacgtggtgaaccttttccgcgtcgcgcgcgatcacggagagaagctgcgccaagccctgactctcactccatttgctcgggaagagttcgaagccagctacgcggaaacgtccgatccgctcgagcgcgcgcggcggatggttatccgaagcttgcaaggtttcggtaccgcagctgcgtccggcgaacgtacagggttccgctcaacctcgaccagatccggtaccggacctgcactggactggcgcaactaccccgacacgctgaccgcgataacagaacgcctgcagggcgtggtgattgagaaccgcgacgccctcgcgctgatggagtatcacgaccggccgaatacgctgcactacgtggatccgccctatgtccactcgacccgcagcacgaaggtgcgccacaacgccaccggcaagtcgtaccggtacgaactggacgacaaccagcacaaggagttggcggcattcctcaaacggctgcgcggcatggtggtgctctccggatatccctgccccctctacgacgagctctacagcacctggcacagagtcgaccgccacgcctatgcagacggctccagagagcgaatcgagtgcctctggctcaacagcgcagcgcttgaggggttggcacaactggatttcttccaggccagtaatgcgtctccatcgccctcattccagaccacggccgctcattactga

SEQ ID NO: 328968 - DNA, 270 bp, Pseudomonas aeruginosa; identical to SEQ ID NO: 324452

SEQ ID NO: 328969 - DNA, 678 bp, Pseudomonas aeruginosa
atgaccagcttcctcaagtgggcaaaatggctgaaccaggaggaggtaaccgaggcagtcattcgccaggtgatctccccctccagccaggtcaaaggcaacgtctataccgactatggtgggcaggtgggcggtacggtctggaacggcatcgcgagaaccgcaggaaccttcggcgttgccctgggcagcctggcctatttcccggcgatggatatggtccgccaagcactgccgatggtgatgtcgttcctgaagatggccatggtcatctgcattccgatggtcctggtcatcggcacctatcaactgaaagttgccatgacgatgacggtcgtattctttgcgatgatgttcgtcgacttttggttccaactggccagatatatcgatagcacgatacttgatgctttctatggttcggggtcaccgcatctttcgttcgatccagtcatggggctcaatacggcgactcaagatgcaatcttgaacttcgtgatgggctctatgttcttgattcttcctgcactctggatcactgccatcggctgggcaggtcttcagattggaacggtgctcagtgggctcgagacaggagttaaaagggtagatgcagccgcagcccaaggtggaggtctagctaaacaaggaattagttctttccagtcaaaagactaa

SEQ ID NO: 328970 - DNA, 273 bp, Pseudomonas aeruginosa; identical to SEQ ID NO: 324362

SEQ ID NO: 328971 - DNA, 507 bp, Pseudomonas aeruginosa
atgtggggcgacgccaccaacgttccctctgccacccacaccgacgaagcgcataccgccgttccgggaggcacgatcgcgctcgacttcatgccgctggagatcaccagcgtgaagagcgatgacggcaccactacctacgaagagttcgacgactggaacatgaccggagctggcctcgaaatcgttgaagggggtgcgatctctgcggccacaccgatcaaggtgacctacaagtccgccaccgtcgatgtgatcgaggcgctgaccaacagcggcaagacgttcgagttcctcttcgagggcgagaacgccgctggtacccagcggcgcatccaggcgcgctacttcctctgccgcttaaacccgtcgagccagcaggattggatcaacaccgaagacttcctggccgccgaggccactgccaaggtgctgatggacccaaccaaggtcggtgctggaaagtcgaagtacttcaacatcaagaaggaactggcgacggtgtga

SEQ ID NO: 328972 - DNA, 1542 bp, Pseudomonas aeruginosa
gtgatccattcgtcgtaccaggctgtccaccaaagcgccctggaagagaactactacaaccgcttgtggctgattccgaccacaatggagctgggcaacgtcgtcagcacccaggtacgaccggcatcagtctggaacgcatatttcagtccgcgcacgctgaccgccatcgagcgggaagatgcagacggcatcacgctatccggccaggcgtcgccgccgctgggttttgccgccctggaagaacgcacttggacggtcagcattggcacggacggcccgcccgtcgtcaatgcgcggatcgtctggacgctccagggcgagccggacctggtcctggtcatcaccggcaatcgcatcatcgcctggaccttcgcgccggactggggcgacagcatcgtcgagcgcctgagcgcctcgacaaatatcctgcaaagcgaatcagccgtgacccagcgccgggctatgcgcctggcgccgcgccgggagttcgaagcgaacatgtacgcggtagaccgcgagcggcagctcctggacatgacgctgtttggctggggcgcgcgaatttgggcgctgccgatttggcctgatatccaactgctccaggaaccgctggcggccggctcgctgaacattccgtgcggcacggccggcctcgacttccgcgacggcggcctggcgatgctgcgcggcgaggacgcttttacttatgaggtcgtcgaggtcaagacggtgaccgccagtggcctggacctggttcggcccgtccaggccgcctggggaactggctcgcgactgtacccggtgcgcaccgcgcagctgaccgaacagcccacgctgacccggctgaccgataccgcgcagtctgcgcgggtgtcgttcctgataatggagcccagcgcctggcccgaggtaatgccggcgacgacctacagggggcggccagtgctggagcagcgcccggacgaaagcgaagacctcacctccagctatcagcgcctgctgtccaccctggacaacggcagcgcgattccccgcgtgaccgacgtcgccgggatggcgctgcccgtcatcggtcatcgctggatcggcatgggccgagccgagcggtcggcgttccgcagcctggtctatgcgctgcgaggccagcagaagccgctatgggtgccgacccacgccgacgacctgaccctagtcgccaccgtctcgcagctgtccaccgcgctggacgtgcgcaatatcggctatgcccgtttcgccaatgggcgaccgggtcgtcgcgatatccgcatcgagctgtacgacggcaccgtctatcaccgccgcattctcaccagcaccgagctggacgccgacaccgagcgcttggccatcgacgccgccctgggccgcctggtcgagccgaccgatgtagcgcgcatctgtttcatggcgctctgtagcgccgccagcgacgtggtcgagattgagcacgtcaccgatagcgagggcgtcgcaactgccgccctgacgttcagaggggttcgtgacgatgagttttaa

SEQ ID NO: 328973 - DNA, 849 bp, Pseudomonas aeruginosa
atgagcagacaacgaagacccctagccccccacgaagctcttgagtgcgcccgactcaaggcgatttacctcaagcggaaggcagaagcttcggcgcgagggcaagccatcacccaggaaagcgttggggaggcttgcgggtgggcatccgcacaaagcaccgtcaaccagtacatgtccggcaagctggccttgaatatcgatgccttgctgaagttctcgcaggtgctgagcttttctcctgcggaggtcagccctcgccttgctgcagaactggaagaaatgaccaggattgcaaacggattgaccgaccaaggccctgcagcactgaaagctgtcgagcccaatgcggaattgatcggatgcatgtccccttgggatgactccacgccgcttggtccagatgaggtagccattccgctgtacaaggaggtcgagttggctggaggaaccggagctacggaggtcgttgaggttcccggaaggctcttacgctttgctaggtcaacgcttcgcgaggcaggggttgacgagaagaacgctgcgtgtgcgaccctccgaggtaggagcatggagcgcttgatcatggacggtgccactatcggtattgaccggggtgctacgcatatcgaagatggtgagatatatgcctttgaccacgacggcatgcttcgagtgaaattcctctatcgccttccaggcggagggttgcgaatccgtagcgagaatgatgaggagtacccagacgagttcctaacaccggagcaggcacagcaaatcagggtcctcggctgggtgttttggtggtcaaccgttagaagaaagcgagggcttcgcttagcaaaatga

SEQ ID NO: 328974 - DNA, 390 bp, Pseudomonas aeruginosa
atggattgcgccaccaccatcagcactgatacctggcaaggccgtctcggcatgggtctcgctccgcgcgaactggaggccaccctgcatgcggcgagcgacctgaccgcaaaggagatcgcgaagctgatgggcatcgcgcctggaaccgtatccaagcggttggatgatgcgcggttcaagctcggcgccaagactatccgcggcctggtgctggaggcgtacaagcgccagattatcagccccctgtgcgttggcatcctcgccctcctggcggcagcacaacccctcctcgatgaagacccggccatgcgggcgcgccgtggcggcgaaaggaagatcgaaactcgtctgactgctcgccgcgatggcgtggcctgggtggcgtga

SEQ ID NO: 328975 - DNA, 960 bp, Pseudomonas aeruginosa
atgcgtgaccagcagaccacgaccaatcctcccgaggcttgcgcccagaatccagactggcgccaagacctgtcctatgcactaatcgagtccctcatggccgaacccgaagagcaggcaaaagccttcctgaaggctcatttggagcgactcccctactacgaacgcttcgggctctcacatgagaacctcgtcctcctgatggaggacctcttcaagcagttgcagtacaccttttccttcctgggtatcgatgcgacctggctcaggcagcgccagctcgagcgacaagtcgctcagacgaatgcttactctgtcttgaaggcactgcaaagcgccgtcacacagttgcggacccacgaagggccgagccccgtactctggttcacggggctcggccggacgacccggccgttcgttcgggccactgcattggagcacgccctacgccaggcgctcaccgacaaaggctggtcaaccccgcaaatcgaggacgcctggccaagcgcaggcctgcaaccctacctacaggcccttggcctgtgccggcagacgctcgccttcgcgcttgacgaccccagccaagccttggacctgccgacccagcgtgcagccgtcctggccgctcatgacgaactcatcattgagctgagagggcggcttctctgggagagctggaacagtccgccagcagactacgaatggggtgagagcgcgatcgttccaatgacctctagctcgcccacggatgctactgggcaagtgcttcccgccacacctcgaggtcgtcctccctactatctatgggaactggtccccgcacctgcctctcatcgcgccacacccgacgcgcctcttccgggacatgaagcggctccagctcatcgcatatggctagccatttttgagcaggagacagcgcctgcacctgctggggcgtccaggagtagcgccttatga

SEQ ID NO: 328976 - DNA, 780 bp, Pseudomonas aeruginosa
gtgtacgcagtgagaaccatcaccctcctgggcgtcggccccgacaagaagccgctgcgcttcggcgccaaagggaagctgttgaacgtgcctggctggagaaaactgctgcaaggcgatgacgccgaggagcagaagaacgaaacgccctcaaaccccatcccggagctggagccaggccagatcctcaaggtctacagcggcgaggtcctggagaagaaaacctcccctcccaagcgcttcaccgatgccagcctggtgggcgagatgaagcgccgcgggattggccggccatcctcctacgcctcgatcgtgaagaacatcatcgacaagggccaggtgcagatgaagggccgaagcctgatccccggcgagctgggcgaggccaccatcgcgctcctggagcacaacttcagcttcctcagcctcgactttacccgcaacctggaggtcgccctggaccggatcgctaacagcgaggacacctacatgaacgtggtccagcagttctaccagctcctgcagtcggagctgcagacgctgcgcgcgcaccccagcgcacagggcgacccgcgagcaagctctaccgccagcgctcccacggcgccggccagtgacttcctctgcggcaagtgcggtctgcccctggtccaccgcaagaaagctggcaagggcggcttcgacttctggggctgcagcggctatcgcaccaccggctgcaaagtcggctatcccaccaggaacggccaacctgacttcgacaacccgcgcgggctatag

SEQ ID NO: 328977 - DNA, 306 bp, Pseudomonas aeruginosa
atgaacaacctcaagtcgctcaggctttcagcaaaaatcacccagcgcgcgctggcgaaagagatgcgcgtgacgcagggagccattgcgcactacgagtctggtcgaagggttcccagcttgagtggatgcaggcgaatcgtccacgccctggagcgtctcggtgtgcgctgctcgctcagtaccgtcttcccggatcaggtagagcgctccgccgaccttgagcccattctgccgtccgattcccacttggtgcagtgcgctgatgctgctgtgcaggcatccagtgccgaggtggctccgtga

SEQ ID NO: 328978 - DNA, 252 bp, Pseudomonas aeruginosa
atggtttcggatgggtacccaagctttcctccgggcatggccatcctcatcagacctgaaggtttcgagttggtaagcggtaagttttacgtagccaagcatagggatggcgaaacgacattcaagcaatacatctatgatgcaggcactaggtacctgtcccctctaaatcctgcttacaagctcatcgagatggacgatgactgggccataattggccgagtcgttgacgcaaaactgatcggcctatag

SEQ ID NO: 328979 - DNA, 387 bp, Pseudomonas aeruginosa
atgaacatggacaccaccatcaccgcacacggcttcaccggcttcctcggcaaaggcctgtccctgcgtgagcttcagtgcgtcctgggcatcgcggctggtcgtacctcgaaggagttggcccgcgacctgggcatgcagccgggcacggtgggtaagcgcgttctggcagcgaccaccaaactcggcgtcacccgccgtgccgccctggtggctgaagccatgcgccgcgggcttatctcgcccgccgtgatcgcccttgccttcctcgtcgccggtcagccactgctcaacgatgaccacatgatgcgcagccgccgtggcggcgaaaggaagatcgaaactcgcctgactgctcgccgcgatggcgtggcctgggtggcgtga

SEQ ID NO: 328980 - DNA, 678 bp, Pseudomonas aeruginosa
atgaccagcttcctcaagtgggcgaagtggctgaaccaggacgaagtgaccgaggccgtgatccgccaggtcatttccccctcgagccaggtcaaaggcaatgtctataccgactatggtgggcaggttggcggtaccgtctggaatggactggctcgtaccggaggcaccttcggcgtggccttgggcagcctggcctactttcctgccatggacatggtccgccaggcgctgcccatggtgatgtcgttcctgaagatggccatggtcatctgcatgccgatgatcctgattatcggctcataccagttgcaggtggcgatgaccatgacggtggtgttcttcgccatgatgttcgtcgacttctggttccaactggccagatacatcgacagcacgatacttgatgccttctacggctcaggatcaccgcatctttcattcaacccagttatgggactggacacggctactcaagatgcaattctgaacttcgtcatgggatctatgttcgtgatactgccaacactgtggattaccgcagttggctggtccggcatgaaagttgggacagttctcagtgatctcagtaacggcactagaggagtagaacaagctggagctcaaggtgggggagtagccaagcaagcaatatcatcaatttctaagggagactga

SEQ ID NO: 328981 - DNA, 354 bp, Pseudomonas aeruginosa
atgaacgcacatgccaacaaaggtttcgccgcccgggtcggttatgctctggggtcgattgtgcgcttcttcctgcatgaccgccgccctgtgctgcgttgggtcaagcgcgtcagcctgttcgtggctctgttcattatccttgtccagaactttacctggctggccagtacattcatgaccttgctgtcgtttgggttgattgggtgggcgctggttaaaggtgacttttcgatcttccagcagttggagaaagatgcagcccaggccgcgtcatatagacgagatttttttggaaacaagctagactggatgggacgacgagaggatgggatccactctcataatgagtaa

SEQ ID NO: 328982 - DNA, 768 bp, Pseudomonas aeruginosa; identical to SEQ ID NO: 324450

SEQ ID NO: 328983 - DNA, 756 bp, Pseudomonas aeruginosa
atgtcgaagtcgttgatcaatgaagcggtgctgacccaggtgctcaaccacctgcgcaacggccagctcaggcgttgtgccgagatggggctacggccggaaattctggctcagctccaacagcctgccgtcatgagcatcctgaccaataccccggtttcctgggtagacgtcagagtgaacaccgacgtcatggaaaaaatcctggccaccgccgagcgcagcgcgcaggaagagctgcaaatcgagcgcgcactgaagctaggagccaccaccacgatgatccagagcttcttcggcctgtcgccggaggacaccgccaccaagcgcttgatcctggagatccacccgcgccgcggtcgctggcggcagctcgacggaacactggaacaccagatctggtatcgctgggatcacttgatgcaggagaaccaggtcagcctggacgatagcttggcgcttctcgacatcgccatgatcttgaccgaggaaatcaacgcaggcaccgatcaggatagcccagagttcatcagcctcgccatcgtttggtctctcatccagagttggttgaaagacaacctctatcaaccaaacaggaaaggacaggccaagcccaccaccatttacctggccagcgtcagcgctcacctcccctcgcctgcggctcacccgccacagagtcccgccctgaagattgagtctgcgcagcagcaactcctcaacctggttcagtcggatggcgatacgacaccatga

SEQ ID NO: 328984 - DNA, 366 bp, Pseudomonas aeruginosa
atgaacaagccaaactcacaaaactcagcactcaccgcccgcaagctcttgagcgccacgctgctcggcgtgctaatgctgctcctcctgtcgctggccggcctctttctcagcgtggtggccgtgcactacttcggcggcattcaggcttttgagacctggcgcgaccagcactacgactcgctactggcctggcggctctgcctgtacggcctgatcgcgctcggctggctgaaagtgaagcagaagagaacattctccgcagcgcagcgcactcgcatcctgcgcatcgagttgttggtcattctgctgttcgtcctgctcgagtccagcaaagcctacgttcacacggggggcttagcatga

SEQ ID NO: 328985 - DNA, 234 bp, Pseudomonas aeruginosa
gtgatcaaccagctccgcgactctttcagcaagttcccgctgaaagctttgcagttcgtcacccgcgaaaccgaggggcgccgctatctgggcgatttcgacggcgccttctacgtgccgacgctcaactccggcgccgaagacgtgattgtcgaggacggtgtggaccacgtcgttttccaaaccgcttggcgtagcggtaacccttggctctacgcgatcaggaaggactga

SEQ ID NO: 328986 - DNA, 348 bp, Pseudomonas aeruginosa; identical to SEQ ID NO: 324364

SEQ ID NO: 328987 - DNA, 693 bp, Pseudomonas aeruginosa
gtgttacgggatatcaaaaacttggaatgtcccgaggattttgcactcctcaattttgaggagtgttcccgcacgggagcgaacaacaggccagagccatacgtgcgcatgactcgcgacggcttcacccttctctgcatggggttcactggcaaggaagctatgcactggaaggtcgcttacatcaacgccttcaacaagatggaacaggcgatcatcgagcaacccgagatcctcagccacaaccacctgctccagttcgctatcaagaccctcgacctgatgcgcgaccacaccctcggcgagccggcccgacccaggacagaacaggtcgtatgcaactacctggccgtcgagtccttgaacgcggcgactcccgagcagatcaagcaggccctgaacttcctccagggtcagatcatcggtgaaggcgtggccgccaagtccttgcccagcgtggccggctcctccatcgccaaggacctgctctacggcttgctgcgctcggcccacgatgccgagttgctgttcaactccctctacgacagcggcgtcgaaaagctcgccagcgatgtgttcaaggagcacatggccaacaccttggccgccacgtcacgacaggcgcgcgagctgctcgggtacgtggccagccgcgccactcgcgcccccttcaaaccacgctccacccactaa

SEQ ID NO: 328988 - DNA, 486 bp, Pseudomonas aeruginosa
atggctacccccgtcttctgggaaggcaacatcggctcggcgccggagcaccgcagcttccccaacggcaacaatcctccgcggcagttgctgcgactgaacgtgatgttcgacaactcgattcccgatggccagggtggctacaaggatcgcggcggcttctggtgcagcgtcgagtggtggcatcaggatgcccagcgtttcgccgaactgttcacgaaaggtatgcgcgtcaaggtcgaaggcagggcgatcatggaccgctggccggacaaagagtcaggcgaagaagtccaggcgctgaaggtcgaagcctcgcgcatttccatccttccgcatcgcctggccgaggtcaccctgttgccgtctaccaacggccagtcgacacaacatcagtctcggcaggtgccgcagcaacctgctcagcaggatgcgcaatcgcagcaggactacgacagcgccttcgacgacgacatccccatgtag

SEQ ID NO: 328989 - DNA, 846 bp, Pseudomonas aeruginosa
atgcaattgctgagccaatccaccgaccacagcaaccgagccatacgcgaaatcggccagatcacctggcgggagttcagggatgacccggacgttggtcgccgcctcccaacccatctggagaagctcgagggacgcttgaaccaccagcaatgggctatcgatagtcagctcgaagcggatccagcggcagagttcggcatccgaactctgcccgatctacctcattcaaccccgagttcggaagccgaactcagtgaaatcagcaacaagcaatgcgctttaccgctgagttcggatgccgaacccagacagaatccgccgagtacgcccttggttcggatgccgaactcatatagtacgtatacatacaaacaagattctgtatgtaaaaaaccagtacaaccgcgagcacgcgaggaagcccatccgaactggcaggacctcctgcacgcactggaggccgagcaacggatccaggcggtaagcgcgctccgacgggtgtccgaggatcttcggctacccatcatcgagcagtggcggcaccgatgtgccggcggaaccgtcggtaatccgttcggctacctcatgacgctcatccagcgtgcagtccagggcaagttcaacgcttcttgggctccggaagaaccggctgagcgaaccatcctcgcaacggaacgccccattcgtgctccggcaccatcaagccccatagcgcctacacagcctcaggtccagcccaggggggatacccggacagggagcgaggtcctcagccagctcaaggacctcattcggcccaggcacggatcgagcgtgccaactgagcggggtgatgagccatga

SEQ ID NO: 328990 - DNA, 804 bp, Pseudomonas aeruginosa
atgcaccccgtagtacagctcggcgttgtactcggtgtcctgcagcggctggtacagcgggttgtcgtagtcgtcgatgccgttcacctggttcaccaggcgctggcgcttcttcacatcgtcgttgacatggatgcgcgcgatgcccaggccgatgtcgtccttcggccgcgcgtcgaacggccccttgtagaccaccccgagctgctggtagttgtccaccacgttggtcgccttgtcgtggaccgtcaggttggcgaacaggctcaacccgcgcgaggcatcgccgttgtgcgaagtgacctgctgctgcgccaccacccaccagccatgcttgctgccgcgcgacttgaagtcgttgccggtcagcccctgcggctggccgtcgacgtcgtcgtagacgtcatcggccttcgccgtgctgtagtagtaacccagccggtactcgcccggcagttgctcggcgccgaccttcggctgccagatcagctccaccggcagcagcgcgcccttggtcccgctgccgctcatcttgaagccgttgccggtctccaggttcgacgggttctgctcgtaggcgccgacctgcacgtaccagtccggcgcgaagttgtacttcacccgcaacgcccactggctaaccggccagttgtaccagatgctccccgcccagttgcccacctgcgagccgcagaaggccaggttctggaaatcgcaggggaagctgttgaagtcctcgccctcgccgaaacggccgaatttcacgtccagcgcgccgtcgaagtactgctgcttgagccatag

SEQ ID NO: 328991 - DNA, 1014 bp, Pseudomonas aeruginosa
atgcagccgggcaagatcgcctcgcgcgaaaccatagccaaggcactcacggttcttcgattgacacgctggctcagcctcggccgacgcctgcgcaacgacctcaacgggcaagtacagggcaacgtctacatcctccacgacgaaccggtatccccggcagaagccctggagctggaccccgactacatgcagttgctgagccaatccaccgaccacggcaaccgagccatacgcgaagtaggacaggtcacctggagggaattcagggacgatccggacgttggtcggcgcctgccttcccacctggagaagcttgaggggcgcttgaaccatcagcagtgggctctcgatagtcagctcgaagcggatccagcggcagagttcggcatccgaactctgcccgatttacctcattccaccccgagttcggatgccgaactcagtgaaatcagcggcaagcgatgcgctctaccgctgagttcggatgccgaacccagacagaatccgccgagtacacccttggttcggatgccgaactcatatagtacgtatacatacaaacaagattctgtatgtaaaaagccagtacaaccgcgagcacgcgaggacgcacatccgaactggcaggatctcctgaacggactggaggccgagcaacggatccaagccgtaagcgcgctccgacgggtgtccgaggagctgcgtcgtccggtcatcgagcagtggcggcaccgatgtgcgggaggaagtgtcggtaaccccttcggctacctcatgacgctcatccagcgtgcagtccagggcaagttcaacgcctcttgggctccggaagaaatagcggaacgcccctgtcgtgctccggcaccaccaagccccacaacgcctacacagcctcagattcagccaaagggagacacccggacagggagcgaggtcctcagccggctcaaggacctcattcggcccaggcacggatcgagcgtgccatccgaacggggtgacgagccatga

SEQ ID NO: 328992 - DNA, 1014 bp, Pseudomonas aeruginosa; identical to SEQ ID NO: 328991

SEQ ID NO: 328993 - DNA, 384 bp, Pseudomonas aeruginosa
ttgttcatctccaaccctctcggcttcaaggcagtctatctcctgaccaactacgacgaactcgcccgtcgaatcctgctggcccagcacgtcgggctggtcggtcgccgcgacatggaggtctggctcgacgaaggcgcgtcggtgctgcgcagcctctttggtctggcccagagctaccagttctcgggtgccactcgcgacgacttcgccgcaaacaatgctcgcgccgaagccgcgcggaagatgtacgagaagttcggcgagatcccgcaggacatcctggagggcactcgacgctcgaacttcgctccgccgatcacccggggccgctctgacggtgatgccgatgatgacgctgaccgtgtcgagctcgaggactga

SEQ ID NO: 328994 - DNA, 549 bp, Pseudomonas aeruginosa
atgcggcagctcgataaggaccagcaaggcgctctgcaacaaagtgccttccgcccactgcaacaaactgccttccaggcgttgcaacacagtgcctcactaaaaggccttttaaagccttttaaaggtaatagggagctggcccagttggcggaacagtgcgaagccctggagcagggattactggaacttgcccagggactgctggcccaggttcgtcgccctcccttcactcttctgcccacccgactcatcgagcagcgtacatccgcccgcaccacctttcttcgctggcagcacattgcaacccggcggatgggcgtcggggtgtgggcggaaatgctgcgccaggacaagaccccggaatacctgctgcaagacctctaccagatggagctgcagcgcatcaccctcaacatgcagatcagcttgatccactccatcggcaagcaggccgccgagtgtgcggaaaagatgggccaggccgaggccgagttcatgggccgactgcagcagagtcagacccgccctggttccgtgggcatgtag

SEQ ID NO: 328995 - DNA, 219 bp, Pseudomonas aeruginosa
atgatcgttacggctcagcacctgcataccgtgccgacctggaccactcggcagggctactgtcatcgccaggcgagggagttcttcaagcgccatgacctcgactggatggcgttcctacgggacggcatcgaggccgacgtgctggtcgcgaccggcgacgcgctcgcgctcaaattggttgaacatgcacgccaggagatcgcgaatgggcgctaa

SEQ ID NO: 328996 - DNA, 678 bp, Pseudomonas aeruginosa
atgcgatttcaccgtctcgcagaagttggcgaacgtgtcggacctggtccattcaaagcacagcccgaaactctcggcatacagcttgtcggcagcggcccgccagctcgcctcgtccatccgcgtgcgagccagtccccggaagtcccggccggtgtagacgagataaaggatgtgtgccgggttcatcgccttgatctgaccgtccgcgagccagataaattgcttttcgggataccaggggttgccgtcccacaggcggttcccgcctcgacgcaaaatctcccactttttcgggtaccagttaaccgaggtaaccaggccggaatagaagcacgtggtaacgccccggaacgccggcaccaggccgccgagcatcgccgccaggcgcggcaggacgccctggtcctcttcaccgaacaggacatccagcgtcccatcgagcccaccttcgcccttgtcaccaccgaacagctcaggcgcattgatgcggacctgtccgttgctggtgatcgaccctttccacgcggttttgccactcgcccggattgcacaaacttcatcgactttcttgcccagggcgaaatggatgtcgaagtagtagcggaacccgaccgtctgtgccttcggtttagcgcccattcgcgatctcctggcgtgcatgttcaaccaatttga

SEQ ID NO: 328997 - DNA, 255 bp, Pseudomonas aeruginosa
atgccctggccgaaaccgctgctgatcgcgctgcctgccgctttcctgctggcgtcatgcagcagctcgaaaccgcccgtcaacgtgccgcccaggccactaccggcggccttggctcaaccgtgcccgaccccggtggcagtgactgatgacagccccgatgccgccgcaattgccctcaaacaactctacgaccaatacggcgtttgcgccggcctgcactgggacaccgtgcggcaccttcaaaaggactga

SEQ ID NO: 328998 - DNA, 189 bp, Pseudomonas aeruginosa
atgaccgaaaagaaagcctctcccgagttcgaactgctgcaacgcatcgacggccgcctggagcgcttcgaggaccgattcccgcagatcgagcgtaaggccgtgctgtacggctcggcggccggcgcgctggcgggtggcctggttgcctgcggcctgctcgcggcgcgtatcaagctcggtatctga

SEQ ID NO: 328999 - DNA, 642 bp, Pseudomonas aeruginosa
atgtactctaggtcgcgcggatttacccttgtcgagctgatggtcattgtcgtccttttgggtgtcatggtcgctttcgccattccgtcttttgtgaatctcataaaaggcaacagcacggcctcggcgcgcaatgatttgcaaaagagtctcgattatgcgcgcgcgatggcgatgacaaataagaccggtgcgcaggtctgcgtagctgatgggacaataactatcagcaatgcacgtaaagcggaaaaaatcataacaggcggaagcgggggctctgttcagtacggatttaagtatgactgggaggtcgcaagtaagctctcgtctacagagtacaaagctattgggtccaatgggctagattctggctgtgttgtgtttgcgtacaatggttcaatacctgagattgctaagaaggcgccgaagtctcctaagccgcctcttagttctgagggtaagtgtgacaccagttcttcgcctcctccatatgtaaataaggatggattcttcggccgctcggatggctctgccgatccggaatgggagctgatcttcaacggcgccggtttctatgttgtcagaaagcctggaggggctgactttacaagtgagctgtcttgggacacttctggctgctga

SEQ ID NO: 329000 - DNA, 672 bp, Pseudomonas aeruginosa
atggaacccaacaaagccctggaaaaaatcaagaaactgcttcgcctagcaggcagcagcaacccacacgaagcggcggccgccatgcgccaggcgcgggcgatgatggagaaacacggcattggcgagagcgatattgctctggctgacgtcaccgaacacggcaccggtagcggctccaaactgaagcccgcgcagtgggaagctaatctcggcggcaccgtcgcgaaggcatactcctgcaagctgttcttcgcggctggcatcggccaatggcgcttcgtgggcgaaatggccgaggtggccagctacaccatggcgatcctgctgcgccaggtgcgcaaggcccgccgcgactacatcgccaccgagcttaagcgctgcaaggcctccaccaaaaccaagcgtggcgacctgttctgcgacgcctgggtgtggtcggtgcgtaagcaggtcaatcagttcgccgggagtgcgcagccgtcgctggcagccgaggcgtacatggtgaagcaccaccccgacctgaccaccgggcaatgcaccgaccgcagcaagaaaggcccgctcagcaaccgcgacctgggcgacgtagccaaaggcatcgctgcggctgatggcgtccagctcaaccatggtgtcggcggatcggctccgctggccttgacctga

SEQ ID NO: 329001 - DNA, 708 bp, Pseudomonas aeruginosa
atggaagtgcagccgagcgttgcagctaccggcccgattgtcggtcggcagcgtgcctcgttcgagatcgagtcggacaaggcttcgggctgggaaagcgatccgatcaccggcggcagcacagggcacagcgatgagaaggacgacaaccggcgcttgtccgcactgaactgcttgttggcccagggcgccacgacgctcatcgccgcgcaccgcgggacgactgtgacgtgggacgtgcccaccagcatggtcctgccgatcgaccttgtgcatacgatccggctcgatgatcagggcgctcgcgcggtgggcaagtgccagcggattgtcgaccgactcgatctcgcatccggaagcgccctgaccacgatctctatcgcggtgatgcgcggtggtggtggcgccgctgatgcgctggcgcctccgtctggctcagttgctcctgacagccctccgtctggtggtggccagctaccgacgcaactcggcggccgcaacagcagcccgatctatgacgacgaagcggatgggttcgcgggcaactggacagagaatgatctcgacatcaatccgagcctggagctgttcccgcgccgcttctcggtgaccgcaaaagacattccggagacctaccgggacgagcatgcgccggagcttgcggccacctaccgggtatccgtgcctgacgacttactggagatgtag

SEQ ID NO: 329002 - DNA, 357 bp, Pseudomonas aeruginosa
atgaacagaaccgaaatcccccgcgacaacaacgcccgttgggagtggatcaaataccagctccgcaccagaggatcgtccctggctgaggttgctcgctccctcaacgtctccagcccagcggtcaaaaacgcaaaactgaccccctaccctcgggtagagcgcgccatcgctgccgtcctcaacctcagccccctagtgctgtggccggagcgctggctcgacgaagagaatccgaagcggcagcggccgaatcgttcggagaccttgcaggcatatgtcagacatatgccaggtgctgaggaaaataccagatacgctgaccaagcgcagcgtaaagccgacgcgggggcttga

SEQ ID NO: 329003 - DNA, 240 bp, Pseudomonas aeruginosa; identical to SEQ ID NO: 323738

SEQ ID NO: 329004 - DNA, 696 bp, Pseudomonas aeruginosa
atggaagttcagccgagcgtggcggcgaccggcccgattgtcggtcggcagcgtgcctcgttcgagatcgagtcggacaaggccgagcgctgggaaagcgacccgatcaccggcggcagcaccggccacgacgacgagaaggatggcaaccggcgtttgtctgcgctgaactgcttgttggcccagggcgccacgacgctcattgctgcgcaccgcggcacgaccgtgacctgggatgtgccgacgtccatggtcctgccgatcgatcttgtacatacgctccgcctcgatgatcagggcgcgcgtgcggtgggcaagtgtcgacgcattgtcgaccggctcgacctcgcatccggaagcgccctgaccacgatctctatcgcggtgatgcgaggcgggggcggcgcagcagacccccttgttcctcctgctggctcgtccgatcccgccagcccaccgtcgggcgggggacagctctcgacgcagcttggaggacgcaacggcagtcccgcgtatgacgatgaggcggatggtttctcaggcaactggagcaatcgcgatcccggcgccgaactgttcccgcggcgcttctcgttgaccgcgaaagacattccggagacctacagggacgagcatgcgcctgagatcgcggccacctaccgggtatccgtgcctgacgacttactggagatgtag

SEQ ID NO: 329005 - DNA, 528 bp, Pseudomonas aeruginosa
atgaacactgaagcccgctttccgagtatccacgcctcggccgcgttcaccgactcggcagtggttcatgccaatcacgttggggtcaaccccatcgagctggacgccctcagccaagtgatctcgcgcctttctcgtgacgagagcacggtcgcacccagctcgatggagcgagagcttcgtgagctggaggaactggggtacatcgaaatctcaaccacccaggccgggaccctggtggtcactacgcgcgctccggggcaactgctttcggcctacttctggtcggtatggatcccgcgacacatgttcagctgctcgctgaaagtgagcctggtgccgcacctctgctgcggcactcaggactcacagcacctcaccgccgtgttccgcattgcaggcagcaaggacgccgcgcgtgagttcctgcatcagttggccaacaactatcccgggcatgagccggagttgcccgaactggtggccgttcaggtcggtgatgcactcagcaaggaggccgaatcatga

SEQ ID NO: 329006 - DNA, 234 bp, Pseudomonas aeruginosa
atggcctgggacagaaacgacccgctcaacatcctggcgctacagctcgacggtgaactgcgcgccgcagccgacttctgccattgctacaacgggccggcacagcgcgctttcgcccggcacatccagggcctgggcaagacgctcgacgagcttaccgtggcagacctgaaggcggcggccgcatttgcggacgcagaactgaacgacctgcaacagagagggctgatctga

SEQ ID NO: 329007 - DNA, 267 bp, Pseudomonas aeruginosa
ttggcaaagctgctgctgaactatcgcaaggtccacggcctgcgcaccgtcgaatcgttgatcgcacgctgggcgccgtccaacgagaacgacacccgcgcatatgccacggccgtggcccgagccatgggggttccaccgcaggccggcctgcacatggaccaggacaccctggccgccctggtgaccgcgatcattcggcacgaaaacgggcagcagccctacagcgccgagcagatcgcccaggccgtgcgggaggtgctgtga

SEQ ID NO: 329008 - DNA, 546 bp, Pseudomonas aeruginosa
atggcaactgttacgcacgtcctgtccggcgccggggagccgctcgatccgccccccagcatcggcgctcactacgtgaacacgaacaacggcgcgctatacatggcgaagggcaccgcgagcggtgccgattgggtgaagctgggtagtggcggtggcagcgctccgagcgaggtgctgcatgtcaataccgatggccagttccttctcgagcctcaacactcatttgttgaggcccgtctgttcgcaattcccgaactcggcactgcagcaattggaatcgatcccagcacatcccgacagttcgacctgaatctcagaaccgcggctccgagcgggcaacaactgcagatcagagttacatcgggtgaattgcccggaggtatgtcgatcgtgggcacctcgaggcagtgggcggttcaggagtcgtatggattcgtgatcaatgcaaatgacctcaacggcgaggtgtgggcgcgcgtctatttcgatgctgacgagctcaccctgtcgatgcttgtgttcagcgatgtgccgaacgcgtag

SEQ ID NO: 329009 - DNA, 534 bp, Pseudomonas aeruginosa
atgcactacggcgacgccgaggcagcggtttcttgggtaggccagattggcgatgtggactggccgaccgtggatagctgccgcataacgtgcgtgtccgaagacgaactgatggaccagcccggcttgatcgacacctactgccgcacctgcacggcagtcgttggcgaccatcgctgcaaggtcaacctcgttccgtatcgcgtgacgctgacgccgcagagcatcagcggctgggtgatctccagcggcgtggtcgccggctatgccgatggctggtttaccgggggctacgtcgagtggcaggtggacggcgacaactacgatagccgctacatcgagcggcacgccggacccgatctttacatcctgggcggcaccgagggcattccggcaggtggccaactgcgggtttatccgggttgcgacgggctcgcgcagacctgcgacgacaaattcagcaacctccccaacttcagggggtttaacgcgatgcaaggcaagtcgccgttcgatggcgatcaggtctggtga

SEQ ID NO: 329010 - DNA, 534 bp, Pseudomonas aeruginosa
atgcactacggcgatgtcgaggcagcggtttcctgggtgggggagattggcgacgtggactggccgaccgtggacagcagtcgcataacgtgcgtgtccgaagacgagctgatggaccagccaggcttgatcgataccagttgccgcacctgcacggcgaccttgggcgaccaccgctgcaaggtaaacctcattccgtatcgagtgacgctgacaccgcagagcgtgtccgcgtgggtgatttccagcggagtggtcgccggctatgccgacggctggtttaccggtggctatgtggagtggcagggggacggcgacaactacgaccgccgctacatcgagcggcacgccggggccgatctgcacatcctgggcggcaccgagggcgtcccggcgggggggcaactgcgggtctatccaggctgcgatctgctcgatgaaacctgcgccggaaagttcgacaacatcctgaatttccggggctttaacaagatgcaaggcaagtcgccattcgatggcgaccaggtctggtga

SEQ ID NO: 329011 - DNA, 159 bp, Pseudomonas aeruginosa
atgagcaatatccaaatcgtagatctgcccgccctgccggaagtagaggaagtttgcctctctgacatcgaggacgagttgctgctcagcaggcatttctgcaacttcgcctggctgttcctggccagcaacaatgcccaggtatctgccctggcctaa

SEQ ID NO: 329012 - DNA, 246 bp, Pseudomonas aeruginosa
ttgaccaccgcacacaaggccaaggggctggaatgggatttcgtctgcctgtacgacgacttcaacgcggacccgctggcccccgacaccgacccaggcaagcgcgacgatgagttgaacctgatctacgtcgcagtgacccgcgcgatgaagatcctcgccatcaacagcctggtgctgtcgatcatgcagcggtacgtggacgagagaaagctgaaggaactggtggtcagtaatagggagtaa

SEQ ID NO: 329013 - DNA, 234 bp, Pseudomonas aeruginosa
atgcagatccgcgccgagccaggcgggactgtgctgatgacgctggcgctcggatccggccttgagatcgccggcgctggaacgatctcgcgggagatatcggcctccgctaccgcggcgctgatgtggtcgtcggcggtctacgacctggacgtgacatacccggatggaacggtccaccgctattacagcgggccgatcagtgtgagccgcgggggagggtgcgatggatga

SEQ ID NO: 329014 - DNA, 207 bp, Pseudomonas aeruginosa
atggaaaccaccaacctgacggcgctgctcagcaacctgcggcacgccaccgagttctggaacgcagtgaaggaatccggccctgatcaagacaccaccactactggcgtcttttcggacgctcgtgagtggctgacaaccgccgcgcttgccctcggcaacgccctgatcgcccagcgcgaagctgctggaggcgaccatgagtga

SEQ ID NO: 329015 - DNA, 243 bp, Pseudomonas aeruginosa
atgcaacgccccagcggaatcagcctcagcgatctgttcgcgatctgccgtgaagacccggccaaccgatggctctggatacgcctctatctccgcgacctgctggcccgcgtcgtggttctggtcttcatggcaatcggtgccgcaggcctcgcctatggcctgggaggggcgttcgcctacggcttcatgcagaccgttgcgtcctaccaggtccagctcagcgtcgagaaatcgccatga

SEQ ID NO: 329016 - DNA, 234 bp, Pseudomonas aeruginosa
gtgatcaaccagctccgcgactctttcagcaagttcccgctgaaagctttgcagttcgtcacccgcgaaaccgaggggcgccgctatctgggcgatttcgacggcgccttctacgtgccgacgctcaactccggcgccgaagacgtgattgtcgaggacggtgtggaccacgtcgtttttcaaaccgcttggcgtagcggtaacccttggctctacgcgatcaggaaggactga

SEQ ID NO: 329017 - DNA, 273 bp, Pseudomonas aeruginosa
gtggggctgatcgacgcgagcgcaaacgagctgaacagctcgaccacccctgtgccctgcgccatctatgcgttcggcgctcagcagcgctcgcggtacgtgggcgaggtgccggactttggcatatgcaacatggcgttcctcgcgcctggcgatccgctggtgatcggcagcgacacttggcgcgtctatccgttgctccaacgcggaagcgctaccgatttcggcaacaccagcgcctgggtcggctactgcttccgggtgcttgagtaa

SEQ ID NO: 329018 - DNA, 192 bp, Pseudomonas aeruginosa
atggatgacgccgccgagccctgggcgctggcgatcgaggttgattgcgagccgcttgtgctcagcgagatgcaggaatacgcggtcaccgtgacgccaccggccgatgtgcttgtggttgttgcgggtgaccaagggcctcccgggagggatggcgtagacggtgcccaatggggtgcgactgattggtga

SEQ ID NO: 329019 - DNA, 237 bp, Pseudomonas aeruginosa
gtggccggctcctccatcgccaaggacctgctctacggcttgctgcgctccgctcatgacgcggagctgctgttcaactccctttacgacagcggcgtcgaaaagctggccagcgaagtgttcaaggagcacatggccaacaccttggctgcaacgtctcggcaaacccgtgaactgctcgggtacgtggccagccgcgccactcgctcccccttcaaaccacgctccacccactaa

SEQ ID NO: 329020 - DNA, 1203 bp, Pseudomonas aeruginosa
atgcttacagacaaacaagtccgctcgctcaagccagaaccagggcgcgactacgtcaaatcggatggccgcggtgctcgcggggaaggcgtactgctcctcaaggtgcgggaaaacggcacgaaggagttttactaccagtggcacgttcagggaaaaaagagacagcggaagctcgggacatggcccgcactcggcttggctgaggcgcgcgagaaggtccggcagcagaccccgagttctgagggtgatggatcgttggccgagctgatcgagtcctacttgggtaagctggacgccgagggcgcagcgtcagccggcaatgttcggtgggcgatgaagaagtatgtcaccgggccatggccgcatctggcgaagcgggcggccagtgagatagagccaggggacatacgcgatatcctggccaagatgatcggcgatggagtgacgacctactgcaaccgggtccgctccagtctgcacgcggcctatcagcatgggctgggccaggaattcaatccgcgcagctacggcagcacctcggttaagttcggactcaaatacaaccctgtagcaagcattcctgtgcaggaggactgggagcgcgcagggcagcgtgccctctccgccaaggaacttgcgacactctggaacctgcttccggagcagctcagcctagtcacggctgagttgatcaagttcctgattgcgtccggagggcagcgacctgagcagttgctggggtcggatcgtcgaatgtttcagaaggatcactttgccatccggagcttgaaaggagtcgaaggggagcggcagattcacctggtgcctttcaatgtactgagcaaagcctgtctcgctcggctggagccgatcagtggtgaggcggcatatccgttcatggggcgttatgaaaacgagtcgatcaacgtgcaatcactctctcgggcagtcacaaagctctaccgacgccatcctgataagttcgacgggccgtttacgctgagagatatacgtaggacgtgcaagactttaatgggtgtcgctgggatcagtaaggaaacgcgcgatcgtatacaggggcatgccttcaacgatgtgtcgtctaagcactatgaccgttatgactacttcaaggaaaagcgtgaggggttaagagtgtgggcgacctggctgatgaaggtcgccaaggtaaagccttga

SEQ ID NO: 329021 - DNA, 1239 bp, Pseudomonas aeruginosa
atgatcacgaataattcaaaggctccttcatgcacttgcccgagtggcgacggctccctcgtccatccctgcccggcacatccggcatcggtaaagcaggcaggcggagatgagcgcgcggcgttcgaggcgtgggctacgcatttaccgatggatcggcagtacctgcgaccagacctctacatgccgccgactcaatgggcgtgggacgcgtggcaagcccgcgccgccctggcgcaaccctctccggccccaaccctgcgtgccgccattgatgttgccaacgaccggttcgaagtgcctgtagcgaagtgggggaccgacctggcaggggaaaaggagcggccggaagtggtggccttcatccacgagaggaccggcaccatagctaacgccgatatggtgcgagcgatggaggaaggctcagtaccttccggctacaccggcggcctgatgaccgttacccagcacgaccgcatggccctggagcgctggcaatacttccgccggaagatgcgccagatgcgtgacctgatgcgcggaatgcgtgatcggctcaacgccgcccaggccagggtcgcggagctggagatgattctgcgcgaactgaacaccagtggcctgatgcaattcagcaccgcagatgaggaaaaggccgtccgggcagcgctgagtggcgcccaggctcagcacagcgcgggctatgccgaggctcgccagtgcgtgaactgccggcacatcggcatcaacgattccgccgactacgccgcttgccatgactgcaattggactggaccagaaccggatgaggacaagtgcccagggtgcgcgggtgagaactgcatggcggcagcttgcccggagtgtggtggtcgttacgacctggtcgcggaggcgaacatcactgccccggctgggcaagtgccgcaggcatggctcgacgtccaggccgagcgccgccggcagatcgaggctgagggctggacgccggagcacgacgacgagcacagccacggccagatggcccgcgccgccgcctgctacgccctggccggctccagcgctccgaacgatggaaccgccgccctgctggtgtcgctcgcatggccctgggatgaacagtggtggaagccgagcactgctcgacgcgatatggtcaaggcctgcgccctcgggctggccgagatcgagcgccttgaccgggtagcggcgagtcagggagggccaagtgatgcgtag

SEQ ID NO: 329022 - DNA, 432 bp, Pseudomonas aeruginosa
atgaacactgagcagttcattcgggagtccgccgcgcgcgggctttcccggcgcgccacccggctggccctgggcatcggcccctgggtgttccgcgaaatgctgaccctgatgccggacatcgagtggccggcgaagggccagtcgctggaccacaaacgggccaactcgcagaaacggggctactgcacgccggcactcgcccgcgcactggaccaggcccgccaggcccgcaaggaaaagcacacccacaccgtgcgcgaccgaaccggaaccctcgaagagttggtcgacctgctgccgagccccgtctcggccagcaccgtccgcaggcggctcgccggaggcatgccgcttgaggaagccctcctcaccccagcgactccgccgttcagcaactacaaacgggagaatcccgatgatcacgaataa

SEQ ID NO: 329023 - DNA, 546 bp, Pseudomonas aeruginosa
atgacatggataatcacctacaccggcagccgcttcgacctgatccagcctgacccggcaagcattcacccgaccgacattgcccacgctctcgcccagcaatgccgctttaacgggcactgcgtgtcgcactacagcgtggcacaacacagctacttcgttgccgacttggttccggaagaacaccagttggctgcgcttctacacgacgccacggaggcctacatcggcgacatggttcgaccgctcaaggaactgctacccgagttccggcagatcgaggccgtcatctggtcagccatctgtgagcgcttcgacctcgacgagcaactgccagcagaggtgaagcgcgcggacctgattgcgctcgccactgaacggcgcgatctgatgcacttccatcaggttgaatggggttgcctcgaaggcattgcgccccatcgagcacgcatcagtccctggtcggcagccgacgcccgataccacttccatcggcgcctgcttgaacttctcgcggttacccatcgcaagggggtgacggcatga

SEQ ID NO: 329024 - DNA, 735 bp, Pseudomonas aeruginosa
atgcctatcacctatcagttcattatcggcggactggctctcgcctgcgccgcggttctgttcttcgcactccgcgcctctcgcgccgcatatgccaatggctacaactccggccacgacgatgcatcccgagcctgtgaactccgcatcgaagaccagcaggtccacattcgagcgctccaggccgacctgggcgcgatgcaagcgaaacacatcaacgatcgtgccgcactgcttctgcaggccgaccaggtcctggacagaaacaacgccggtaaccagtacgctcagtttcagccaggcgacgtagacaccctcaccacctccgcgaagctgctccgcctggccggagacgtgttcgcccgcctgcgcgctaacgacaaggctgaagaggcccacgccgcgcaggaagcaatccgcgcgttgctccagcgcaccccggccgcactcgccgctgaagttcccccgccgcttgatacgaagctgtttgacttcctcgagcagcatgcaaccggctccgcagacttcggcaccttcaccttgagcttcgaggtcggcgacaccttccggggcaccaggacgatccgcgaggccgtcacctacgccttggtcaaggccgaggagtccgcaatacctgcggccaacctgctgcccgccaagtcgacagatggactctccgcctgggaggcggttgacctcgactacaccggcgacaccgcgccgatgtgcatgtga

SEQ ID NO: 329025 - DNA, 822 bp, Pseudomonas aeruginosa
atgcaacaagccattcaacagttggtcaacctctcacaagccctgggcaaaccaatcgaccatcctgggctatccgcgcctctcgcccttgtaccgaacggggtggaaatcgaaagcctggaacacctgctgccggcccccacccgaacccggaagcaagtcaccctcctcgatgctgaaaccttcatcgcgtacgtgtcgcgattctccacggctgcaaccgccgtgttctgcaacggaccggaaggccggaccttctcggcgatcatcgactaccaccaacccgagcagcccgcctggtgcgaccacgttgcaacctatcgctgcccgacaaccgtcgaatggggcaactggaaggggcacgatcgcaagcggctgaatcaggccgggttcgctgagttcatcgaggacaacgtgaaggacattgtccagccggctgaccaaccttcggcaccgtctgcggcggacatgctcgagatcagccgcaccttggaggcaaagaagaacatcactttccgccagggcacccggctcgataacggccagatccaactcacctacaacgaagaaatcgatggccgcgccggggctactggccagttgagtatccccgagcagttcttcatcggagtgaagcccttcctcggtggtgacgcgttcctcatcaccgctcgcttccgttaccgcatccaggaatcccgactggtgatgtggtacgaactcgtccgccccgacaaggtgctggaggaggcctatggagccgtccgcgcgaagatccagagcggaatcggcgaagtgccgctgtacgaggcgaccatctaa

SEQ ID NO: 329026 - DNA, 339 bp, Pseudomonas aeruginosa
atgaaaagaccctttctcgacaccctgcgcgacgttgagtccggtggattgctggacgaactcaccgacgcccaacacagcctgatcgacgccatccgcctgaccaacaaagccggagaactgaccatcaagctgacctacaagcccgaaggcgctggacagatgacgatcaaggccgacgtgaagaccaaggaacctgttctggcacgcggcacctcgctgttcttcctcacccctgaggggaacctctccaggcgcgacccgcgtcagcaggaactgagcttgcggaccgttgataccgacccggagcccgagcttcggcaagcggctagcgagtaa

SEQ ID NO: 329027 - DNA, 237 bp, Pseudomonas aeruginosa
atgacgacactcgagcagctctaccagcagtggggtacagcgacgctcaccctcgcccaggtccgggcagcgtacttcccgcacctgaagaccgataagcgcctgcgggctctgatcaagagcggagaggtggcactggtcacccgcaagctcacgacgtcccggctggaggagccgctggtgtacctgacggacctggccgagttcctcgacgctaagggcgtcaaggcagcctga

SEQ ID NO: 329028 - DNA, 369 bp, Pseudomonas aeruginosa
atgaatccaacaccgaaccccatcgccgacgccgtcggcacgctcaagctgatcggcatgcacttcgcggcaccgaccgcctacccggccgacgctctacaggccgccgcgacagagtgcatcgaccgcctggccggccagccccaggaagtaactcaactggcactgctctatgccgccttggtagccatcaccccgcgcggctggctgccccacgtcacgctcaccaacgacgaggcgcgcccctacggcgccatagtcaccgacgcagcgggcaacgtcgccgccagcggcctcggcaagacagtcaacggcctcgtggccctggtgtcggcccgcctaccggcggggtgcggggaggctctatga

SEQ ID NO: 329029 - DNA, 285 bp, Pseudomonas aeruginosa
atgaaccgggatatccgccaagcagctgccgccctcggcgtcagtgaacgggacctgcgcaaccacctgcggcagcacaaggacctgaaccaggacggcacccttgcggccaagcacataggccagggccacctgttcatggatccgcgttcgcgctggaacccgaggctgggccagtacacccactacagcgtggtgatggtcaccgaggctggaatctcctacctggccaagcgtctcggcgtgtccatcaccgtcacccagcacaaggacgacgtggcatga

SEQ ID NO: 329030 - DNA, 570 bp, Pseudomonas aeruginosa
atgaagcccttcctgatcggcctcactggccgcgctcgctccggcaaagacactgcggcgaactacctcgccacccagttcggcctgctggtctatgccatagcctcaccactgaagctggccctgctcgacatgctgaacttgcccgggtccgccctggagggcccggccaaggaacagccgctgccgtggctgggcaagtcgccgcgcgaactgatgcaactgctgggcactgagtggggccgcaacttagtgcatccgcagctctggctgatgctggccgacatgaacctatccaaccacctggaggcgatgccacaggcccaggggttcgtcatcagcgacgtgcgcttcgacaacgaggcggactggatccgcgccaagggcggcgtagtcgtccacctgcgccgacagggtgccgctgacgtcgccgcacacagtagcgagtcgggcatcacaccgggggcacgcgacctgttcatcagcaacgacggcagtctgaacgacctctaccagacgctggacgaagtgatggcactgctccatctccgcgcaaagaacgcagcctaa

SEQ ID NO: 329031 - DNA, 306 bp, Pseudomonas aeruginosa
atgaagcccaccatcgaagaactgctcctgcagatcctttctacctgcctgctgatcgacagccagggcaagtggaaggccaccttctatctgtcctgcatcgacgcggacgtctccgtttcaatccaccgggccgacgacaccacgccgttgggagaccgagttgcccatgcctacgagtacgccttcatcggcgccgacacccgtggccgtcgcaggaacctcacggaggacgaatcccggcagaacctgtcgatgctcctgaccttcacccagcgctacctcagcatggaggccgcggcatga

SEQ ID NO: 329032 - DNA, 210 bp, Pseudomonas aeruginosa
atgcaatcggcacagcacacgcccaaagcccgctgccaggtgctacttcacccggctgcggccaccagccccagagtcgttcaggagatccaagcccgaaccggcctgctggtgatcattagcacctcccaccgcgcctgcctcacccagccgcggcctgctgcccacagcacggatgacgagttcggtccgtggggaggtgcggcatga

SEQ ID NO: 329033 - DNA, 243 bp, Pseudomonas aeruginosa
atgctgcccaagttctccgatggcgaaaaggtagtcatagacccctcgctggaggccttgcctggccactacgttgtcgccaagaaaacgaagtcgcaggaggtcaccttcaagcagttgcgcagagaaggtaccgagtacttcctctacgccctcaatcctgactggccagaccgaatcatcaagctcaccgaggagtggcagatttgcggccgcgcccgctggaagatcacagacctttga

SEQ ID NO: 329034 - DNA, 237 bp, Pseudomonas aeruginosa
atgatgaaactacgcgaatacatcgaccagatgggcgatgaccaactgcggtcctatgcgaagcgctgctcgatttctgtcaactacctgcgtttgcacgtcaagtacgcgagcaaagatccaagtgtttcattgatcaaggccctcttccgggaaagcgagggcaaggtaagtcttgccgcagtgcttgagcattatcggattaccgaagaatccattactgcccaagcggcttga

SEQ ID NO: 329035 - DNA, 501 bp, Pseudomonas aeruginosa
atgagccggaaagacctgctgccggacgccggtccggtattcgatctccgccaggcgctataccgcgcagggcgcgactacaagggaggcttgacctccctggcccacgacatggtcctgccctatgaggacctgcagaagaaactgaagcttgacgaggaacgccggtggcccacccccgacgaactcgaagacatcatccgcctgaccaaggatccacgtctgctggacgcgctgatgcgcccggccggtgctgtctggtatcggcctgaggcggtcaatgccacggcttccgccctgaaggcggtcggggatttgctgcagcgcgaaggcgagtttgttgccagtctgcataaaggtgcggatgacaaccgctgggagcccgtcgaggtcgccgatctggagtaccacggtgcgaatgtgattcgggctgtcctgggcatcatggccggcgcccgccaggcaatggtgcaggatctggaggatagagccaatgggtga

SEQ ID NO: 329036 - DNA, 2739 bp, Pseudomonas aeruginosa
atgaggcctggcgaagatagtctacgtagcgagtgggctcgctggtatgtcgaacaaggcatcgcgctggtagtcatcgaaccggggaacaagatccccaagggcaaggcctggcagaggccaggtggttactacaccgatgctgcccaggctgaggctttctggtctaagcatccgaagcacaacatgggcgccgtactcggccccagtcgtgtttgctcgctggacgttgacgacgtcccatccactcgccaggtgctgtgggactgcctcgggttggatctggatgcgttgccggtagcctaccccaccgtggtagggaatccggagcgcttccgaattctgttccaggtgccggatggggttgagctgagtcggcactcactgagctggcccaacgagaaggacccggacggctccaagttcaagctcgcgcaggcggcgatcctcgcagcgaaagagaagggggatgccgagcagcagacaaagatgcaggtgctggccgacagcctgaagcgcttcaccgtgttcgagctgcgcgcaggcctagtgcaggacgtcctgccaccctccatccatcctggcaccgggcgaccgtacacctggcgcaacccgccaaagggtgaggggctaccggtattgccggacaacctgctgaacatctggaagaactgggacatcttcaagcgtgacgccgaggcggcatgcccttgggcgccggtgcagaaaccgaagaaggttaccaaaccgaagcggctggctccggctggtagcgctgggtcggttatcgatgccttcaaccgggcacacgatgtcgaggcattgctcgaggcgcatggctacctcaagcgtgggaataagtggctgtgtccgcagagcagcaccggcttgccgggcgtcacggtcagcgaggggcgggtgtattcacaccatggctcagaccctctcgccaacggccaccagaacgacgcgttcgacgtgttctgcatcctcgaccacaacggcaaccagggcgaggcggtcaaggccgcggcgcgcctactgggcatcgagcgcgagtccagggcacccagtgttcgcgaggcgctggagcagttcgaccagatgcttagcggcgatgagccgccccccagcccggccaaggagcttccccgctccccatcggtcgaagacgtggatgccgacggcgacgccgcagatgacaggggggcgggggagggcctgactctggccaaggcgctgcggcgctacgccctggtcgaggggacaacccacgtgtgggacatcgacaaggcgatgaagatgaagaagaccgccttcgtcgccttggtgggccagaaggttttcaaggagtggtcggaggttaccgacgagaagaagaaaaagcgcatcagcgaagagcaggtcaaggagatcgagcgagcccggtccatggccggaaaggccgtcgggccgatgagcatgcctccagcggtgcgctacgtctacatcgatggcaccaaggacgtgtgggacctggcgaagaaacggcgtgtgcccgagggagcagtgaagatggccctgggcgatgcctactcgctctggctcaacagcccggagcgccgggtggtagacgttgccgacattgtctttgacccgacgatgacgtgcgacaccaagacatgcatcaacacgttcgagggcctgccgctggagcccaagcgcgatgatgcggcgtgcgagaacctccgctggctgatcgcctttctgtgcaaccacgctgaggactcgatgcagtggctggtgcgctggcttgcgtatccgctgcagcacactggcgcgaagatggacacggcggtgctgatgcactcgacgatggagggttcaggcaagagcctcttgttctccgtcgtgatgggacgcctgtatggtcagtattccgccacggttgggcagacccagcttgaggggaacttcaatgcctggcagagcggaaagttgtgggcagtgttcgaggaagtggtcagtcgtgaccagcgctacaaccaggtcggcaagatcaagcagttgatcaccggtcagaccgtgcgcatcgagagcaagttcgtgaacggctgggaagaagccagccacatgaacgctgtgttcctttccaacgaaatcatgccctggccaatcagcgagggtgatcggcggttcttggtcatgtggcccgaggaaaagctgccggaggccaggcagaaggcgatcaagcacgagttggccaatggcggcgtcgaagcgctatatgcctggctgctggcccaggacttaggcgacttcgacccacagaccaagccaccgagcacgccggcgcgcgaacgcctggtggccttgagtaggtccacctggcagacgttcgtacacctctggcgcatcggtgaacttgggcacgggctgtggggggcatgcatgagcaaggatctctacgcgctgtttctggagtggtgccagcagaacaaagagcattcgataagccacacgaagttcagtctgttcatcagcacggcaagtatcgagaagaccaggccaattccctggacggacggcagcaaccgtcggttcgcggcgttcttcttccctgaggacccggagtccttcctgcccccatccccttcctcggccgcgctgggtgcgcacgtggtcgagtggcgggcgcgagccaagctcgcgggctggaacgtggacagttgggaccatgtgaaggggcacacgacgtga

SEQ ID NO: 329037 - DNA, 366 bp, Pseudomonas aeruginosa
atgggagaaccagcgagcacgactgcttccgctgttgtggccggtgccgctggtatcggtctggccgggtatctggccggcatcgatggggccgctgctgtgggcgcgctgttcggcgctctgctgtattcgacgacgaacaaggagtatccgacctggcagcgggtgctgtttctgctgatctcgttcgtcatgggctatatgaccgcgccggcaatcaaggacgttgatgtatacggataccggccgttccactattcgggtctggctgcctttgtcgcggcgctgctggtggtgactgtttctctgtggttgctccggcgaggtaaggcaggacctggcgcaataggaggccaagatgggtaa

SEQ ID NO: 329038 - DNA, 291 bp, Pseudomonas aeruginosa
atgggtaaccatctggtgcaattgctgctgacgcaagcgacgttctggctgtgcgtcggtatgttcctccggctcttcacctaccagcggggggaagcacgctatcggttcggtatctcgtgcctcgcctggctggttatggggagcgctggttctgcagcgctctacatcctgaaaggctggctggttgtaccgccgcatgcctggcccctggtcgtcttgctcggcgtgttcgcgtgggcgttgttccggactcggggcaaccttgcccgggtctggcggattcagtag

SEQ ID NO: 329039 - DNA, 576 bp, Pseudomonas aeruginosa
atggaactactaacccagtcggagttcgcggcgcgtcgtggttggtcccgcgcctacgtctccaagctcaagtcgcagggccgtctggtcctgggcgagggtggaaagatcgatgtagaggccaccgagcaactgctggccgagtccagcgacccgagcaaggccggggtggccgagcggcaccagcgcgaccgcgccgacaaaggcgtgcacgcacacgttacccctaccgctccggcctccctccctgcaccgtctggcggtggcagcctcaatttccagaaggctcgcgcccaccgcgagcactacctggcactgctggccgaagacgagttccgtaagggccgaggcgagctggtggagcgcgaagtggtggactgcgccgcgttcgacgtggcgcgcagtctgcgcgacctgctgatggggctgcccacgaaggtcgcgggtgagctggtggctatcagtgatccttgggagatggaacagcgcctgacgtcgctgatccgcgttgctctggaggaggctgccagtcagatccaaccacccgaagacagcaaggccgaggaggctgcataa

SEQ ID NO: 329040 - DNA, 2010 bp, Pseudomonas aeruginosa
atgcaacaccactatgccgacggtgccgccgtgtaccgggcggcatatgtcaggggcctgacccccgaccccgaactgtgggtcgatcaatgggctgacgagtaccagcgcatcccgcgcgaggccggtgcagcagagcccggcaagtaccacaccgagcgcacgccctacgctcgggagccgatgcaatgcctatccccagcgcatccagccaagcgcgtcgtcaccatggtggcgtcgcagctgatgaaaacccagattgggttgaattggatcggcgcctgcatccaccaggcgccggccaacatcctggcgctgttgcccagcctggccttggccaagcgggtttcctcgcggatcggcaagaacatcgatgctgttcccgaactgagggagcgggtcgcaaaggcccgttcccgagatgcccgcaacaccatcgacaccaaggagttcgagggtgggacgctgtactgcaccacggccggctccgcctccaacctcgccgagctggcggcgcgctacatctacggcgacgagatcgatcgttgggaaatcgacattaacggcgagggtgaccccgtcgaactggccgaagcacgcggctcaaccttcgggcgccgggccaagttctattactccagctcgcccacgatcaagggcgtgtcgaagattgcggacctgttcgagcagagcgaccagcgccactactacgtgccctgtccgcactgccggcatatgcaggtgctggagtgggagaacctgaagtacagcgatgacttctcccgcgtcgactacctctgcgccaatgaggaatgccacgcgcagattgaggagtcgagcaagagctggatgctggccaatggcgagtggcgctcccacgccacaggggatggggagacggttggtttctatctcaatgcgctctatgcacccctcggctgggtcagttgggccggcctggccaagcagtacgtcaaggctaggcgtgccgaggagcgcggggacctggagcccatgcaggtgttctacaacacccgcctggcacgggtttgggattcctcccaggaaatgaccaacgccagcgagcttagggcgcgggctgaagactaccccctcggccaggtacctaacggcgctgtcatcctcaccgccgcggtggatacccagggcgaccgccttgagttgctggtgatcggctggggcgagggcatggagcgctgggtggtggatcaccaggtgctgatgggcaacccctccgacctgcggacctgggacctgctggacgagcaactgaaacgccgttaccggcacgcctcgggcgtcgagctggcaatcgtggccaccgctatcgactccggtggccaccattcggacgaggtctaccagttcgcccgcctgcggcgctggcgtaacgtcctggctatcagggggcacagcaagcccggacggccggtgatcgcccagcggccgtcgaaggttgacgttacctggcaaggcaagacggaaaagggcggcgtcgagctgtggatgatcggcaccgacaccgcgaaggactggatctataaccgctatcccctgagtgaggggcccggcgcgctgcacttttccaaggacctggcggacgacttctacgaccagatcgtggccgagcggaaaatcacccgattcgtgaaggggcacaagcgcaccgagtacgtgaaagcgaagtcggcccgcaacgaaggactcgacctgctcacctacaacctggccatggcccattacttgggcatgaaccgctacagcgtcaacgactgggcccggctccggcaggcggtgtcccagaccagcctgttcgccgacccagtcgccacggtgcccagcgcagccgacgaggcggacgcgcatgagccgcagaacgaggcgccaagcgccccagtgcggccggcacctcccacgcggagcgcgaacccaccatcccaaccaactggccggcgtacctcgcgcagcgggtatctgagccgccgatag

SEQ ID NO: 329041 - DNA, 693 bp, Pseudomonas aeruginosa
atgagtaagcctactatcgtcttggtacatggtttctggggcggagccgcccattggtcccaggtaatcatagggttaaaacgctgcggctacgataacgtgcatgcagtggagctaccattaacgtctctggctgaggatgctgaacggactcgcaagatgctggctcaagtcaatggtccagtagtgctggtcggacattcctacggtggcgccgtcatcagcgaagttggcaaccaacccaacgtcgcggctctagtctatattgctgcgttcgctcccgacgctggagaaagcccaggaggcatcactcaacagcacctaccgttggccgctcccaatctggagtctgacagtgatggctatctttggctcaaggcagacaagttccatgaaagcttctgccaagatctcaacagcgatgaagctctggtgatggcagtgacacaaaaggcaccattggccgagacctttggacatacaatcacagaaccggcatggaggcacaaaccttgttggtatcagatatccagtgcggatcgtatgatcgcgccagagaatcagaaaatgatgtctgatcgcatgaacgcacgccaggtcattactcttaatgcaagtcacgcctcgctagcctcatgtccttccgaagtagtagcactgatccttgacgcagcggcggcaagcacaagctga

SEQ ID NO: 329042 - DNA, 909 bp, Pseudomonas aeruginosa
atgccgaaacgccagaatatcgtcctccctgatgcggatgctttcttcgatatattcgagtccacacgggtaaaaagcggtaatgttgtcactcgggcgctgagtggaggtgaggtttatgatgttgcctttgcacctgcagggtttcattttgtcgaaggcgaacactgctcgttgcgtctggcgggggcgaactcatctaccgctctgaagtctggtgatctcatcattctgccccacgataggccgcatctactcgaatgctctctaggcgacgcatgtatcactaccggagaatttcggctggaaggtccaagcggaaaattgcttacgaacctgttgccggtgcaattgcggctatcagatgtggataaaccccctttggcgtttccagatacgccattggattggttgtctgtgactcttgcggccattcgattggaagctggccaaccaacgttgggtagcagcgtcatgctgtcgcgactgattgacctgttattcgtttgggcgctacggcactggatagccacttcagctgttcaggaatcgagctggatgcgcggtttgaacgacgctgtagtggggcgcgcattaatgcttctgcatgcgcatccggaacgtacgtggagcgttgatctccttgctagaaaagtcaatcaatcacgatctggcttttcgcagcgtttcgcttctgtgatgggtgagtccaccatgcgttacttaacccgaactcgtatgcacatagctgctgatctcctagaaaccacaggcttgcgtgtttcacaaattgccaagcgtgtcggctatgagtccgagcctgcttttagtcgtgccttccggcggcagatgggaatggctcctgtggattttcgtatgagcttcaaggcgcagcgttccgaagtttag

SEQ ID NO: 329043 - DNA, 411 bp, Pseudomonas aeruginosa
atgaggctcgatgcggtggaactgggcgaccagttcgagtgggtggacgagttcacctgggatgcggtggcacaagagcaggaacgctccctgaccggcgcgctgttggtgcaggaaggcaccaagctgcatggacgcccgatcacactgcgttccgggggaggggtatggacgccgctgtgggtcgtgcggcagttggaggtgctgcgcgaccagcgcctgcgggtcatgccgctggtgctgccagacggccgcgagttctcggtgatcttcaaccgcgccgaaggggcgccgctggaagccgaaccgctgttccgcgaggtcaaccccggtccggacgccgactacctggtgacgttgcggctgcttaccgtagcgccgccctcggcaccgcccacccccgacccttga

SEQ ID NO: 329044 - DNA, 369 bp, Pseudomonas aeruginosa
gtgatctcgtcccgtgttgtctcggtcgcgctgggctgcctgctactggtcggcctcggcgccgccggcggtgtctggctcggcgcgcggcactaccggccgcagctcgatgctgcgctggcggatctggtcgcctgccgcgccgccaggggcggcctggaggccgcagtagcggagcagggcaggcaggtcgccgcgttgcgtcaagctggcgagcagcgtgcccaagaggccgcccaagcggtgacacaagctcgccagcaagccgccgagcactatgccgcggcacagcgcctgctgcgtgagcgttccgctggtgatcagtgcctggcagccgaagtggtcattgatcaggagttgggtctatga

SEQ ID NO: 329045 - DNA, 261 bp, Pseudomonas aeruginosa
atgagggtggtgctgatgctggtgatggttgcgctggcgggatgcgccggccaggtcgagcctgagccgcgaacggtgcgagtggaggttccggttgcggtgccgtgtcgtgcaccgaagatcgcagagccggtgtgggccacggcggggctgatgaaaagcgacgacctgcaaacgaaggtgcgtgcgttgctagcggagcgccgccagaggatcggatatgaggaggaactcaaggctgccgtgacggcgtgcaaatag

SEQ ID NO: 329046 - DNA, 267 bp, Pseudomonas aeruginosa
atgctggtgattcggctgaaaagcaagtggaccctgaagttggaccgccagataggcagttctggaaagcacggaatatgggcgttccactgttcagaaagtacgtttgcgcccgcctcgaacgacctccggcggactgcggccatcctgccggcggagcctaaagatggtcaatctgtcgaggtgtcgatctgcgacaccgcgcaggctcaggacggctggatcgtcgttggctcaggtgtcgcagcatatgaggccgagcgctga

SEQ ID NO: 329047 - DNA, 348 bp, Pseudomonas aeruginosa
atgaactctccgtctgacttcaccgtcgaacaaaaaaagcaagctgtagtagcccacctgtacgattcgctgctgcatgctgcaaaccgttttctgcaccaggcgaagaattactcgatcagtgtgcttcgcttggagaaccccacctacgctcagattgcaaagcagttcagagaggtggccgatctgatcaatttcctggcgcagcaggtcaatgacccgctcaccggtgacaaggctcaagagtacatccactgcatggagggcatagccaaagccatcgaggatgacgacaaagacgccttggacacttttgtaaaacaacttgacacgaggcctttcctgtga

SEQ ID NO: 329048 - DNA, 1038 bp, Pseudomonas aeruginosa
atgcgcatagcccgactcttcgttctctgtttttccctgctaggcttgcccgtcttcgcggcaacggtccccaatctctaccaggtccacgagccggtttcgtcgcagcagcccggggagcgcgatgccggactggtgcgagccctgcagaccctgctggtgcgcctgaccggcaatccgcaggcgccgcagaatccggcattggcggggtacctgaaggatccgcagcaactgatcagccagtacgccttcgaaaatggtccgccgctggcgctggtggtcgatttcgatccgaccgccaccggtaatgcgctgcgggccgccggcctgccgagctggggcgccaaccggccggcggtgctggcctggtggctgaacgaaagcgccgatggcagctccctggtcggtgacaaccaggcctcggccgaaccgctcaagcgtgcggcgcagaaccgcggcttgccgttgcgcctgcctctggcggatctcgacgaacagatcgtcggtaccccggaaaacctcaccgccgcccaacccgatgccctgcgcgcagcctctgagcgttatgccgccgatgccttgctggcagtggacgccaaggaggcggacggcaaatggcaggcgcaatggcggctgtggatgggcgattcgcgagagcaaggccaggctgaaggcgctacgcccgacgcgttggcagacagcgtgatgctggccgtcggcaaccgcctgtccactcgtttcgttgccacgccggaagcggcgaccggcctgaccctccaggtccagggcgcgacactggcacgctatgccgagttgcaacgcctgctcgatccgttcggcgcgcgtctggtaggcgtgcggggcgatcgtctcgactattccgtgaaggccagtcccgagcaattgcgtgcccagctgggcctggcgcagttgcaggaaatcccggccgacagcgtaccgctggatgcctccggccagcccgcagcgcccagcgcggcggtgccgtcgtcgacccaactgaatttccgctggcagtga

SEQ ID NO: 329049 - DNA, 204 bp, Pseudomonas aeruginosa
atggtaaggcaggagccccctcctgccctgccgaccgccgggaagcctgcggacagccagcgctccgatactgccggcgcatggatggagagacggatagaaggcggtcacttcctgccgcaagcgaaacccaaggactgcggcaaggccatgcgggagttcgccgacggactgtcgacgcttaccagccgagggtttccttga

SEQ ID NO: 329050 - DNA, 2208 bp, Pseudomonas aeruginosa
atgagcgatgattcacctattattgtttacgcaaacagtccagcggaagttattctaaacccgactcgcgacaggaatgacatattaaacaattacccggccgggaatcccttcattggcttaacgtatgccattgaaaaagatttcaaagagaggaaaaagaacctggaagcaggggtgcagtcagaactggatgcgatagacgcaaaatatccatcattaccgaaaggctttacaccggagcaatggttggagagggctactgccgttgtcaccgagttgctcaatcaaaagcggccgaagctagattatgagctgggtatagtcaagaattcggctagttttgataagctgcaagcaagctacaacgcaatcatcctgaatgatcagatcaatagtcttcaagagcgcttgaacaagctcaatgctgaaaccgaccgccgccgggcggaggcagaagcccagcgtcaggcagaagcggacgccaaacgcaaagcggaagaagcggcacgcctggaagcccagcaggtcactcaacagctcggtgccgacttcaacgcgatcaccgctccgaccgccaccaaggtccagcaacgtgtgaaagcagtggatgctagtctgtctcaggtttccacccaggtcagtggtgcagtcgcctcggcaacccaggcggtgcaggtcaagacagcgcaagcccagcaacaagccaacagccagatttcgtccagccagaacctgatcagcgcggcatttcggaatcagattgccttggcagcacaggccagtggagaagcccaggtcacggctttcaacaccaaagtcaagcagatcgtcaacgaagccacggcgttttcgacagcacgaaaacaagcgctggctcagtttgctgccaatgcggccgccgaggtcgaaaccgaggtcaacaggctaaccgcccaggtcaaggccagccccaccaaggcggcttcgcaagctgcacaagcaacccttcgacaattcactgaaagcacctatgccaaggtgaacacctttgcccagcagaccgaagcagcgctgcaggctaaggcaaaagaggtctcagcagcggtagccgaagcacagcgtgcggcgaccaacgatttgcaaaaaacagccgatgtagtaccaggtcagatcatccaggctgcgaacaccttggcgatgccggcaacctctgcgccgctggtttcggtggccgggtttggtagtgcggcagtggagacggctcgcctggcggcttccctaacgaatgctgtcaatcgcttgattcagattgctggtagtggacctggcgcatacgtggccaccttcgcggtgctgtcgctgtattccgaccaggctggtaaagacagtgacaaggttcctgccggcgttcgcaatgtattggcactggatgcgtccgctttgggtcttcctggcacggctgatttgcaaagcgccgccaaggcaggtggcacggttgatatgccggtacgactcacgagtgctgcacaagagagcccgagtggtaaatcgcagattgccgcggtgctgaccaacggggcaactgtccccaagggcgtgcctgttcgcgccgcgaccctcaatactgcgacgggccggtatgaggtgacggttcccgcaaagtccaccgtgccgaatacacccccgctgatcttgacctggacccctgctacccctccaggaagccagaacccctcaagcaccactccggtcgtgccgcagccggttccggtgtatgagggagcaacgatcaccccagtacaggccgagccggagtcctacccgggagtgccgttagatctggacgatctgatcgtgattttcccggcggattctggagtcaaacctgtttatgtaatgctcagtagtcctcttgatagtggtatattcacgagaaagcagctgcttaagaaatatcaaagtcatgccgatgactttggcttcgccggcagaaatgcaaatagcaccaccttggcggagttcagagataaaattctggaacaccttggctcaccttcaactattgaaaaaggtgtttatcatagatatcaaggatccaaggtgttttacaatcctgacactaatattgtggttgttctcaaagaggatggaatgtttttgtcagggtggtatcttgaaccaggaagcaagcaggaaaaaaactattttgagaatgaggtgctttaa

SEQ ID NO: 329051 - DNA, 1932 bp, Pseudomonas aeruginosa
atggctggagagaatcgttccaaattacttagcatgacagttaggaatataggttgtattggcaatgaaggcgtagaagtaaagttagacagagtggtttgtctagttggtaaaaataatgctggaaaatcaactatattgcgagcctatcaactagccaggggttctgaaaattttgttcctgctagagaccgctatcagcatgcagataatgatcagccttccgagatatttcttgaggtacatattcctgagggcatgggaaatgttgatgcaaagtggaagcaagagcaagacggtctattagttgtaaaaagtcggtggcaatggcttcccccaagctttcaagcggttcgtaccacttgggacccttctgcgcaagattggtcatctgatgaaaaagcaggtggtgccgatcaagttttcaggtcacgcttacctagagcattgcgaattggctccctagatgatgcagcaaaaacagaagacatgttattaagtatagcgctatctcctttactaagcggaatagagagtgaaagatccgatccagggtcagatttagcaaaagcaatatcaagtgtttctgaaagcatgaatctgcttggcgagcggcatcaagaatattttaactccatatctggccgagtttccgagggatttaaacgtgttttccccagtttagatgtgaagttaaatgttggatctgcacctttagtccccaaaatctctgacttgattaaaggaggatcaagtttgcgggtaaaagacggtgcttctgatactgcattggagcaacagggaacaggagcaagacgggctttattttgggcaatgctgcaagtccataacgagcttaatagagataaagaaatcagagccgattatcaaaagcgattagaaaaatctttaacagaaatccagaaaaagctaaacaagcctggaaagactgataacgctgatgaacttaaggttgaggcggcggatatactcgctcaactacaggcccatttggatggggctcccataccagaaagccctgaagatcctgcttttccaggttacttattgctgatcgatgagccggaaaacgctttgcacccgatggcagccagggcagctcaacgtcacttgtataaacttgccgaaaaccctgactggcaagttattatgacaacacactcgccttattttataaatccgtttgaggatcacactaccattattcgtcttgagcgagatgggggggatgatcgttcacctataactccaaaaacttacacttccgaccttattgagttcgaaggggacgacaaacagcgacttcaagcactccagcatatagatccaagtttctcagaagtattcttcggctcctatccggttattgtagagggtgatacagaacatgcagccttcttatcttcaataatcgaaaggcagcatgagctaatcgaccgtgtgactatcatccgcgctagaggaaaagctataatagtccccttaataagggtgttaaggcatttcaaattagactttggcctcattcatgacgcagacagtaaatacgataagaatggtagaaataatggaatgtggactgaaaacataaaaataagaaatgaggttctgatttcacggcgggcgggatcaactatccgccacagagtaagcgtgccggacttcgagagatttcttgaggccgatgaggcgtcgaaagacaagcctttaaacgcgtacctcatggtaaaagaaagtgataaattagctgaaaaaatacaggccctgcttctaagcttgatttcttcagagcaacatgagccctacaatgacattggagaggattactccaaaactctgaatgaatctgtatgctcatgggcaataagaaatggattaaatggtgatgtaagattttttggacagaactaa

SEQ ID NO: 329052 - DNA, 213 bp, Pseudomonas aeruginosa
atgcgctacctcgtagagatttgcaccttccacggcccgacccggcaacgtcgctggcatcgcgtccatcagggcggttcccgcgtggaatgccaacgctgggtcgaagagttggtggctgtcttcccgactgaagaagaagctcgccgctccttcggcctgacccgcgaacgcgctcggcaggtgtaccgcatccgtggggtgagggcatga

SEQ ID NO: 329053 - DNA, 636 bp, Pseudomonas aeruginosa
atggaaatcatccaacagctgcaagcgctgttcaatagtggctacagcatggtggtcgcagttgcggccattgtgacaattttgttcaaaatattggcgcagctgttcagagccttggagtggcataataagtaccttgtccgcaagcgcctcatccgcctcaaggacatccggtcaagtacaagcagctcacagctcatccattatctggatggagcaattgagctggagatttttcgcatcgcgtctggcgtgagcaccagccgatctaagatggaatatctgcttcagctggggcagactgggttttggagccgagagcaacttcatagtctttccaaattccttattttggagccaggcagcgcaacaccttccttaaccgttaccttgctggatcgcttaggtgcctgggcgggtggcatcagcgcattcagcacactggttttgggggcgatgtacttcattaaactaatgctcactggcgagccgctcatgtggctactagggctgttgctcttcggattgtctgtcgtggctgggcgatttcttgcaacggatctaatcgactacatcatcgttacgcgtgctcagcactacttacagcacgctactctccctgtagcgatgctgtaa

SEQ ID NO: 329054 - DNA, 2085 bp, Pseudomonas aeruginosa
atgtcagaagcctatttgaagttcggtgggaaaataatcgaagagctgtcgcagaaaataccatcgacgttatttgcgcttaatgagctgataaagaatgcgtatgatgccttttcgccagatgttactattaaggtgaatttgtcaaaaggtactgtaaccatttctgataatggaaatggaatgggggttgatgaaattggaagcctttttcatatatcgcagagttctaagaggtatggccacgccattgagcaggatggcgtcaatagaatcactcaaggttctaaagggctaggttttctcgctgcatttaagtttggtgataaagttgagtgggttacacgtaagggaggggtacagagtactttttctctgaagaagtctgacttagtcgaaaagaaggatcttgcggggactaagataccgatattcacggagagtcatggggggcgggggaccacgattactattcactcaagcacgaaagatatcgaggaattacttgatgatttgaataatgaaaaggtttcggagaagcttgctgcagcaattctagatgaaacttttgatataaaaatcgaaatagaaaatcagaagaataaatactcaactaagagtctcaaagattttaagctggaaagtgagagcgatcagctattctatgttaattttgattcagaagctaatgatattgagttttatcatggtggagagctgttaaggacgattccgggtctgcctgagcccatgcgtagaatggagtactcaataaaattggaattgataatctttcattttgaaaaaggtaggaattcgaagtctatatcttcgttgaataaaagagtgcacgatggtgcgctttatcctttggtttattttaatcgaaatctttttaataatattgttgtttttgatccggagcttctcaggaaaactagttcaggcagttcgttgccgcagatgatcggtcgagttagcttaatgagtcaaagtgatgaggttgagtttaattcagataggacaaattttgttgagaactctttgactaaaactctagtaaagaaccttaagctccttaacgagctcattcaaactaagggggcggagctaaagagagagttgcaagagggagcttataagaaaaaagttcccacgggtaaggccgccccggtttctaggctgggcgaacagaagaggaaagctgcgtccatattgatggatagaaagatccccgtggaagtatatatcccctctggtcaaattgagctggatagatatgtttttcagattagaaatagctttggtgtagaggtcgaaaaaagtaaagtggaaatcactattgatggcgagccatcgagtgatggaatattgcagtcgattgaagagccctgtgagaaaataattggttttcgatatttagaccctcacacgggcctggtttctactgaagtgaggttacagttttgcaaaaggatctccaatgtaactggtctgccacaaaataaatctcttttcacgattgagtcagagtctggatatcatataagtcagggggtaatttcaagcctaatttatgcaatagataaagcttatcagtcgcgaaataaagatgaataccttcctctcattgcgtgctctattagatgtatatttgatgtctcttggataaagttgtctaaggctagaagaaattggtttgggaagattgataagggcagtctgactcctgagttgaagaaagagctgaactcggagttgatgtttggtgttatgcatgtgttaattcttttaaaaaagaatcaaaggcttttaaccgaagtttctgaggtttctggtataacttatactacaatgagcaatcttcttgacttggcggattttggacgtgcagttaagctgtcaaatgttggtgcgcactcatcctctagttacttatccaagcccaagatggaggagtgtgctgataaatgtggtttgtttgcggtgatatgtgatgctttaattaatttggatgccagtaaggtaggctcgctcagcatagtaaaactagttgcgagtgattttgaggcttatatgggctga

SEQ ID NO: 329055 - DNA, 1350 bp, Pseudomonas aeruginosa
atgactgctaggcagactggccttagtggtaccacggatggaaaatcagcagagttgcgtcatagattatctgcacgaactgacggcgacactaatttctgggcgttctcaaacttaagaagtagatccggaaatcatgcactctttcaatatccggccatgatggttcctgaacttcagggcgcgctactagatgatctaatcgcggtagagggtaacatttctttagtgtacgatcctttttccggatctggcaccgttatgctagagagcctatatagagggatcaactattacggcaccgacattaacccgatggcaattttgctatgcgaggtaaagtctgcccccccgaccgttgaaatagcaacgaaagcggtatcttccgtaattactcaggcagaagaagtcgaagccttaccgtttgacttccccaatataaataaatggttcaagccagagataaaattcgggctaagcagattacgaagatcaataattgaaatctccagccagcctaccagaaaatttctttgggtgtgcctggctgaaactatacgattagtctcaaactcaagaatttccacattcaagctacacacatatagccaagaagacattgaaagacgagaatctgacgccattaaagtatttaaactcgtatgcgagcagaacctgactcgccttaaggcacattgggctcgagcctccaacacaggaagagagcccaccgtcattaccttatcctctggttcagcctcagaaaaatgggaagcacctcaactagctgacgtgctgatgacgtcgcctccatatggagacaataaaacgacagttccttatggacagcacagttatttacccctccgatggattgatccagttgacctccatgaaggtttcgactcgagcctattagagtccacctcaaaaatagactctcttagcttaggcggctccttaaagcatgccgaccagtcccgactcgaacttggcacctcctctccatctctagagcgttttattcaaaaaatagaacatgcgcctcctctaagaaagaagactctatctttctgcagagattaccaagagtctttgataaagatcagttccagactaaaactaggtgctttttgcttttttaccctaggagagaggaaggttggaggcaagacctttccactggtagatataactaaagagtttcttacagaaagcgggcatgaaatagtttccaccatagaacgtgtgctacctgcttcccgcaaacgaatggctgcaaaaaatagtgagggatcaactatggctagtgagtggatcttagtcactcgatcctggggcggattatga

SEQ ID NO: 329056 - DNA, 930 bp, Pseudomonas aeruginosa
atgcaaccgttcgacagccggcaggccgatgaagtcgccacgctcctggccctggccgagcacggttcgttcgccgccgccggccgcgccctgcaacgccatccctcggtgctctcgaagcggctcggcgcactggagcgtcgcctcggcatccgcctggtcgaacgcaccacccggcaactgcgcttcaccgatgaaggcgagcgcctggcgagccgcttccgccaggccgtcgacctgctcgacgaggccgagcacgaagccagcctgggcgccgcgcaactgcgcggacgcctgcgcatcgccctgccgtcggcgatgggccggctctggctcggtccgctgctggcggagttcgccctggcgcatccgcaggtggtgctggaaaccgactattcggagcgcttcgtcgacatcatcgcggaaggcttcgacctcgcgatccgggtcggcgaactggccgacagccgcctggtggccaggcggctgtgcgcccatcggcgcatcctcggcgccgcccccgactacctggagcggcatggggtaccgcgtatcccggccgacctggcggcacataattgcctcggcttcagcggactgcactcgtacccggagtggaagctgacccgccaggacgaacagcagcccgtgcgggtacgcggctcgatggtcagcaacgacaacgaggccctgctctgcgccgcacgccagggcctgggtatcttcgccgccggcgagtggctgatgagccgcgacctcgaagccggcaggctggtacgggtgctgccggagtggcaactggacgccgacgccggcgtctacctggtgcgcccctcggcgcgctacgccacggcagcggccagcgcgttccgccaatgggtggaagcgcggttcgccgctggcccgccctggcagcgccagcgggcctga

SEQ ID NO: 329057 - DNA, 792 bp, Pseudomonas aeruginosa
atgtcccccatagaaagccgcgaataccggatcgacacgccccgcgggcagctcttcgccaaacgctggacgcccgccgcagccggctccgcgctgccgatcgtgctgctgcacgagtcgctgggctgcgtggcgttgtggcgggacttcccggaacggctggcagccgccagcagacgtccggtggtcgcctatgacaggcttggcttcggcctctcgcctgcccaccccgatgccctgcccctggacttcatcgaagacgaagcgcgccgggactttcccgtcgtcctgcgacaactagggatcgaacgcttcatcgccttcggccacagcgttggcggctcgatggcggtggcctgtgcggcggcgtggccgcaggcctgtcaagcgctggtggtcgaagcggcgctgaccttcgtcgagcccctcaccctcgacggcatccgcgccgccgaccgcgtcttcgcccgcgacggacagttgcaacgcctggaacgctaccacggcgaaaaggcacgctgggtattacgcagctgggtggatacctggctttccgaagacttcgccgactggaacctggacgccgacctggcgcgggtgcgctgcccgatcctgagcctgcatggcgaactcgacgagtatggctcgcaacgacatccgcaacgcctcgcccgccttgccggcggtccggcaacgttgcgaccgctaccgggttgcggccacgttccccatcgccagcagccagaagcggtgctggacgcggtggtcgcgttcctccgcggtcatgactga

SEQ ID NO: 329058 - DNA, 963 bp, Pseudomonas aeruginosa
gtgaaagaagttgcggtgctagcctacgatggttgctgggggatgggggtgttcgccgtggcggactttttccgcatcgtctccctgttggaggcgcatatcggcctggagccatcctttcgagtgcgcatccttgcatcggcccgcgaggtgacggtcgccagcggccattcgctgcgagcggacgcgatcctggagatcgacgcggactgcgacctgctggtgattcccgccatcgagggagcgcggctggccggcttcgtaccggatgcggcgagcctggcctggatcgcgcagcggatcgacgccggtgcccgggtcctcgccctcaccaccggggccgcctggctggccgccagccggcgcgccgacggtctcctgctggccagccactgggcctacgttcggcagttggccaggtgctatccgcaatgccgcttcatcggccagcgttcgtacctgcaggccgacggactctataccaccggctccttgggtggctgcttcgatgccttgctggaaatcatcgcccgggagcgaggcgaccgcttctcgcagctctgcgccacccacctgctggtcgccgatgcgcaacgcctgagtccgatactgccgggtcgccgcaaccatcgcgatgagagcatccttgcgttgcaggactggatcgaggccaaccacgccgagcccctcggcttggagcgtatggccgcccaggccggccttgcgctgcgtaccctgaaacgtcgcttcggtgctgccaccgggctttcgccgatccgttacctgcaacaggtccgggtcgaccgggcgaagaagttgctgctggccaccccgctgtcgatccgcgagattgcctacgaggtgggctacgagaatgtcagcttcttcgtcaggctgtttcgcaaagaggcgggcgacaccccgtcgcattggcggggccgggtgcgcgggccggagcgttga

SEQ ID NO: 329059 - DNA, 1419 bp, Pseudomonas aeruginosa
atgattcacgcgcagtcgttccggagcgggctcgcgtccgccctgggtctgttcagtctgctggcgctcagcgcctgcacggtgggtccggactaccggacccccgacaccgcggcggcgaagatcgacgccacggcgagcaagccctacgaccgcagccgcttcgaaagcctgtggtggaaacagttcgacgatccgaccctgaaccagttggtcgaacagtcgctgagcggcaaccgcgacctgcgcgtggccttcgcccgcctgcgcgccgcccgcgccctgcgcgacgacgtggccaacgatcgcttcccggtggtcaccagccgcgccagcgccgacatcggcaagggccagcaaccgggagtgaccgaggaccgggtcaacagcgagcgctacgaccttggcctggatagcgcctgggagcttgacctgttcgggcgcatccgccgtcagctggagtccagcgacgccctcagcgaagcggccgaggccgacctgcagcaactgcaggtcagcctgatcgccgagctggtggacgcctacggccaactgcgcggcgcgcaactgcgcgagaagattgccctgagcaacctggagaaccagaaggagtcgcgccagctcaccgagcaactgcgcgacgccggggtcggtgccgaactcgacgtactgcgcgccgatgcgcgcctggcggccaccgccgccagcgtgccgcaactgcaggcggaagccgagcgcgccaggcaccgtatcgccaccctcctcggccaacggccggaagagttgacagtggacctttcgccgcgcgacctgccggcgatcaccaaggccctgccgatcggcgatcccggcgaactgctgcgccgccggccggacatccgcgccgccgaacggcgcctggccgccagcaccgccgacgtcggcgtggccaccgccgacctgttcccgcgggtcagcctcagcggcttcctcggcttcaccgccgggcggggctcgcagatcggctcaagcgccgcccgcgcctggagcgtcggcccgagcatcagttgggccgccttcgacctcggcagcgtgcgtgcccgcctgcgcggcgccaaggccgacgccgacgccgcgctggccagctacgaacagcaggtgctgctggccctggaagaatcggcgaatgccttcagcgactatggcaagcgccaggagcgcctggtctcgctggtccgccagtcggaagccagccgcgccgccgcgcaacaggcggcgatccgctaccgcgaaggcaccaccgatttcctggtgctgctggacgccgaacgcgagcaactctccgccgaagatgcccaggcccaggccgaggtcgagctgtaccgcggcatcgtggcgatctaccgctccctcggcggtggctggcaacccagcgcctga

SEQ ID NO: 329060 - DNA, 915 bp, Pseudomonas aeruginosa
atgaaccgaaacgacctgcgccgcgtcgatctgaacctgctgatcgtgttcgagaccctgatgcacgaacgcagcgtgacccgcgccgcagagaaactgttcctcggccagccggccatcagcgccgcgctgtcgcgcctgcgcacgctgttcgacgacccgctgttcgtccgtaccggacgcagcatggagcccaccgcgcgagcccaggaaatcttcgcccacctgtcgccggcgctggactccatctccaccgccatgagccgcgccagcgagttcgatccggcgaccagcaccgcggtgttccgcatcggcctttccgacgacgtcgagttcggcctgctgccgcccctgctccgccgcctgcgcgcagaggcgccggggatcgtcctcgtcgtgcgccgcgccaactatctattgatgccgaacctgctggcctcgggggagatctcggtgggcgtcagctacaccgacgaactgccggccaacgccaagcgcaagaccgtgcgccgcagcaagccgaagatcctccgcgccgactccgcgcccggccagctgaccctcgacgactattgcgcgcgaccgcacgcgctggtgtccttcgccggcgacctcagcggcttcgtcgacgaggaactggagaaattcggccgcaagcgcaaggtggtcctggcggtgccgcagttcaacggcctcggcaccctcctcgccggcaccgacatcatcgccaccgtgcccgactacgccgcccaggcgctgatcgccgccggcggcctgcgcgccgaggacccgccgttcgagacccgcgccttcgaactgtcgatggcctggcgcggcgcccaggacaacgacccggcggaacgctggctgcgctcgcggatcagcatgttcatcggcgatccggacagtctctga

SEQ ID NO: 329061 - DNA, 690 bp, Pseudomonas aeruginosa
atgtcccgagtgatccgttttcatcagtttggcccgccagaggtcctcaaatgcgaagagctgccgaccccggcgccggccgcaggggaagtcctggtgcgtgtccaggcgatcggcgtgagctggaaggatgtgctctggcgtcagaacctggccccggagcaggctgcgctgccgtccggtctcggcttcgagctggccggcgaggtgctggcggtcggcgccagcgtcggcgacctgccgctgggttcccgcgtggccagtttccccgcccatacccccgatcattatccggcctatggcgacgtggtactgatgccacgcgcggccctggcggtctaccccgaggtactcaccccggtggaggccagcgtctactacaccggcctgctggtggcctatttcggcctggtcgacctggccgggttgaaggccgggcagaccgtgctgatcaccgaggcggcgcgcatgtacgggccggtctcgatccagttggccaaggctctcggcgcgcgggtgatcgcttccaccaagtccgccgaggagcgcgagttcctccgcgagcagggcgccgacaaggtggtggtgaccgacgagcaggacctggtcctggaagtcgagcgcttcaccgagggcaagggcgtcaatgttgtagcgccgcgcgaaattcatcggcctgttgcgcgataa

SEQ ID NO: 329062 - DNA, 342 bp, Pseudomonas aeruginosa
atgaccctgctcggcgatgtctccgccacccgcggcaagctggtgctgtatggctgcaacggcggcaacgagtcggcgttcccggcctgcgccgcgttcaagaagcacctgcagttctaccgccactgcctgatggatttcaccggtcatccggagatgggcctggaacgcaacgacgagtcggtgagcaaggccctcgcgcacatcgagcaactgacccgcgatcgcctgctcaagccggtggtcgaccgggtattcgagttcgaccaggtggtcgaggcgcaccgctacatggaaacctgtccgaagcgcggccgggtggtgatccacgtcgccgattga

SEQ ID NO: 329063 - DNA, 330 bp, Pseudomonas aeruginosa
atgaaactgcaggcgtggcgaaagactgcaggtgcagcgattttcggcaggtgcagccgaaaggcgcaggtggtgcaggtgctggggttggtgttcgcgctggcgggatgcgccggccggcaggatgccgagccgcgcacggtgcgcgtagaggtgccggtggcggtgccgtgccgagtgccggcggtggaagtgccggcctgggccgcggctgggctgcggaagggcgacgatctccagaccaaggtccgcgcgctgctggccgagcggcggcagcggatcgggtatgaagcccaactgctggctgccaacagggcctgtcagaattag

SEQ ID NO: 329064 - DNA, 444 bp, Pseudomonas aeruginosa
atgcatgacctccgcccggtgatgttcaccgtacccggcgagccggtagggaaggggaggcctcgcatcggtcgcgtcggcgcccacgccaggatgttcactccggcgaagacggcgaactacgaggggctgatcgcgcacagcggacagcaggcgatggcaggtcgcgcgctgttcgatggcccggtgctggtcgagctcgacatcgcgctgagcatccctcaatcgatgtcgaaaaagcggaagtcgctggcgctggccggcggcctgtaccccaccaagaagcccgatatggacaacgtgatcaaagcgatctacgacggcctgaacggcgttgtctggaaggacgatgtccaggttgtgaaggcggtggtggggaagcgctacggcgaaacgccgggcgtgcgagtgaaagtcgtccctctcctcgagggcgagcagtga

SEQ ID NO: 329065 - DNA, 996 bp, Pseudomonas aeruginosa
atgagcgaacccacccaactggagcagttgaagaccagcgccgtcgcgaggtcaaccaacgatgcgccgatgtccctcctcaccggcgccggcttcgaccagatccaacgcgtcgcaaaggcgctcagcgcgtctaccctggtgccggtgcagtaccgcgccttcgccgaggtgaaagagtacggcaaggtcaccggctacaccccgaacggcgccgggctgccgaactgcatcgtcgctctgaacatggcgcagcgtatgggcgccgatccgctgatggtgatgcagaacctgtacgtgatcgagggccggccgagctggtccagccagttcatcatcgcctcgatcaacagttgcggccgtttcaacccgctccgctacgacctcagccagccgggcaaagagcaggaggtttcctataaggcgaccacctggaagaacaagcagaaggtcgaggagaccaggaccatcaaggtgcgccatcagacctgcacggcctggaccaccgagaggggcgttcaaatcccgaccttcagccccgaggagcttcgcaaaaagtcgatgctccagttgtgccgcgagtacggagtgcccgtgatcgaaagccccgaagtgtcgattcaaatggcgctcgacgagggctggctcaccaagaacggcagcaagtggcagaccatgcccgaggtgatgttgcgctaccgcgctgccagcctactgggccgcctgtatgcgcctgagctgctgatgggcctgcagaccgtcgaagaggtcaacgacttcatcgaaccgcgggacaccgatatccagggtgaaaccgtgacggtgcatgtcgatgatctccgagacaaagaaccggcgccgccggctgtcgccgccgaagacgatggagacgagccctctccgccggacggcgtgaacaccgagacgggcgaaatcaccgaacccgccccgggccagcagccggacaccggcaccgacgagctcaatctcgagtaa

SEQ ID NO: 329066 - DNA, 201 bp, Pseudomonas aeruginosa
atgcccagcctcactgtccttgagcggtacggccaagtcggggagttcgccgcgctactcggcgcggccgagctcaacgccgctacggactgggacgagcagttcctggccgacctccgcagcaacttccagcgctacggcgcccacacctacctcagcgacgcccaactcgagcagttggaacggatcgccaacgaatag

SEQ ID NO: 329067 - DNA, 765 bp, Pseudomonas aeruginosa
atgagcaacaacccgcacttcatgaacatgaccgccgacacgctcggcaagagcttgctgcagggactgatccaggaaatccggatcatgccggactgctggcagaagcttcccgaggccaagcagcaggacatcatcgaccgcctggagcgccaggtacggaatgccgccaccatcgcggtccacaccattgccggcggcgaccgcgacacggtctacggcaagctggagtcgatgaccgcgaaggacaagatgaaggccgtattcgtggtgaatccgagcagccctcacaaggaggacctgctgttcgcggtgaacaaggattgcctgctcatcatcggcggcgccaacgagttcaccgagggcatggaccaggtcaagcctgacccggaccagaacccgctggacctgaatggcggcgaccacgacatggaagacgccggcgcctggggcggtatgcaaccagcagacgacagcgacgtcgtcgatgccgagttccaagagctgccgcaactcaccgtcgagcgcttcgccggccacaccctgggcgagatcgccatcggcgtcgccaccaagaaggacgtgttcgacgcggcctggctgcaatcgcgcttcgctctcaccaccgaggaagccgagcgcgtcgttctccaactgctggaccagggagtcatcgtgctcgagcaggaaaacgaggagtcccgcgagttgaacacttaccgcgtcgtcaagaagccgggggatatcgccctcgacctggagtga

SEQ ID NO: 329068 - DNA, 801 bp, Pseudomonas aeruginosa
atgagcagtcaggtcgacatcatcaagcccgaatcgcgcatcgtggtccagttcagttgcggcgcggcctctgcggtcgccggcaagctggccctggcgcagtacggcgatacccacgacgtccagttcctcaatgcctatctggccaacgagcatcaggacaaccggcgcttccttgccgactgcgaggtctggactggccggaaaatcacggtgctacgcgacgaaaagtacggcgccgacgtgctcaacgtcttccgccgcgagcgctacatgaagggccgcactggcgcgccctgcaccaagctgctgaagcgtcgcctgctggacacctggaagcgccccggcgacgtgatggtgctcggcttcactgcggaagaagagcaccgcctggacgacttccgggagcggaaccccgaccgcccggtgatcgcgccgctgattgagcgcggcctgggcaaggaggactgcaaagccatcatcgctcgcgccggtatcgaactgccggccatgtaccgcctgggctacgagaacgcgaactgcatcggctgcgtgaaaggcggagaaggctacttccgggcgatccgggaggacttccccgagcagttcgaagccctgtgcaaggtgcaggacgagcttggcccgggttcgtacctcttccgcaaccgtcagaccggggaacgctattcgctccgcgaccttcctcccgggccgatccgccgcaacgaagccatcccggcctgcagcttcttctgcgagctcgccgaggccgacatcatccataaggaacccgccgcatga

SEQ ID NO: 329069 - DNA, 1917 bp, Pseudomonas aeruginosa
atgatcaagcgcaccctctaccacttccacttctgctgcggcctgggcggcggcgccgcaggcttcaaccgggcgcgcccgcgggtcggcaacgtcgaggccgaatgggtctgcctcggcgggatcgacgtggacccagccggcctgcgcgacttcgagcgcctggccggtgtcccgggcaccctgctggacctcttcacacgcgaccagtacgtgcggttccacggcaaggagccgccggcaggctggcgtgaggccacccccgaggatgtgcgccgcgccgcccagggcaagcgcccggacgcggtgttcatctccagcccctgcaagggcgcctctggcctcctctccgagaagatgagcctgaccccgaagtaccaggcgctgaacgagttgacgctgcgctgcatctggctcatgggcgaagcctgggccgatgaccctgtgccgctgatcgttttcgagaacgtcccgcgcctggccagccgcggccggcacctgctggaccagatcaacagcctgctcggcggcttcggctacgccgtggcggaaaccactcacgactgcggcgaactcggcggcctggcgcagagccgcaagcgcttcctactggtcgcgcggcacgtcgagaaagtgccgcccttcctgtacgagccggagaagaagtcgctccgcgccgtcggcgacatcctcggccgcatgccgctgccgggcgacatcgatgctgcaggcccgatgcaccgcgtgccgtcactgcagtggaagacctgggtgcgcctcgctctggtgcgcgccggcagtgactggcgcagcctgaatgacctggccgtcgaggacggctacctgcgcgatctgatcatcgtgccggagtaccgggctggctacatgggcgtgcacggttggaacgacagcacgggcaccatcgccggccgcagcagccctacgaacggcgcattctctgtcgcggatcctcgagcacaaccctctgccaactggaaccacggccagaattacggcgtagtcgattgggacggatccaccggcaccatcagcggtcagcagtggccgaaccagggcaaattctctgtcgctgatccccgcggccagagcttcggcaagtacccggtcaccgactgggacggtccgtccggcaccgtgatcgccgccagcaccaccggccagggcgctttcgccgttgctgatccgcgcccttccgtggcgtggcacaagaacgtgttccgcgtcgtcagcatggaccagcacgccggaacggtgaccaccggccacgggcccagttccggcggccaggccgtggccgatccgcgctacagcaactggcacccgggcgccagcagcaggaagctcaacgtagtgccctgggaaggcaccgccggcaccgtcaccggctcccagcaggtggccagcggcgctctgtcgatcgctgatcctcgagcattcgaccggcagcctggcgatgcctgggtaggcggtggccactacggcgtgatgggctgggaccaggtgtccggagccgtctccgccagcgcccgctacgacaacggccgctggagcgtcgccgacccgcgcatgccggcggcgaacgaccggctcacctgcatcatccagtcgctggacggcacctggcaccggcccttcaccaccctggaactcgccgcactgcagagcttggtcgaccccgaagagcagttggtcctcgacggcctgagcgacagcgactggcgcgagcgcatcggcaacgccgtaccgccggccgcggccgaggccatcgccggcgtgatgggtacaacgctgctgctggccgaggccggcgaaaccttcatgctcagcaatacgccgatctgggtgcgcccggttgcggtggcgctgagcgtcgcgcaacaggaggtgaacccgtga

SEQ ID NO: 329070 - DNA, 450 bp, Pseudomonas aeruginosa
gtgaacaccgaacagttcattcgcaacgcggccgcgcgcgggctctcccgccgcgccaccatgcacgcgctcggcatgggcccctggaagttccgggaactgctgaccctgatgccggagatcacctggccagcacgcggatgctcagccgaccaccagcgtgcgaacgagcagaagcgagggcgctgcacaccggcgcaggccgcagcgctggagcgcgcgcacgaacgctggagcgagagccgacgcttcaccgtcgacggcgtgaccgggaccatcgccgagctggtggagcacttccagagcccggtccacgcaacgaccgtccgccgccgcgtcgccgccggcatgagcctgcgcgacgcgctcaccaccccgcgccagcagcccaagcccgggcgccggcatccctggaaccgctcgaagcaagagcacgcactctccaactga

SEQ ID NO: 329071 - DNA, 336 bp, Pseudomonas aeruginosa
atgcacaccctcaacctgaccgcgctgttcctggacggcgaggatggccagcgcctggccgaggtcagcggcctcccacgcctcggcgccctgctctcctcatctcaactgcgccagctcgcgcgacaactgaacgagatcgcaaacgccgcataccgccgcataaacgccctctgctctcccgcgccagcacgctatctgcacattcccaccggcattcactgggtcgtcatcgacagcctgggcaatgtcattcaactcgaaaacatcgagcgccggcgccgactgataaccgtttctgacctcgaaaccgaggcctggagaaagctcccatga

SEQ ID NO: 329072 - DNA, 1320 bp, Pseudomonas aeruginosa
atgaacaaagtgaatgaatgcacctgcccttctggcgacggctccctcgtccatccgtgcccggcacatcctgcggtagagcaggcaggctgggatgagcgcgcggcgtttgaggctgcttttgccgcaatgggtaggccggtatgtcgtgctgattacgaccaggacgcctacggaaccccattcgatgatggcggatggactggctggcaagcccgcgccgccctggcgcaaccctcccagtctcagtatgaagccagcttcgaagagtggctggccaacgaactcgagggcgaggacggccagcctgttccggctgcggtatgcgacattgccctagcccgtcgagcattcaaccattggcccaagctggaacagccagccaaggtcggtggcgtccgcttcagcgctggcgtgtcgtctcggctggtagtcgaagccgcccagcggctgtacgagttcgagtccactccggagaaagaggcggagcgcatcgagcggctccaggcgtttcgcgagcaactcgacccactcaacctcgccccgcatgcggaagcgttcaacgaagcccccgatgaagcaatcaggcctgagcaggcagaggcggagcggccggaggttgttgcattccgctaccactgcaccaatgccgagggagagccgcttccgggctggttctatagcgatgatgcaggaacgctcggtctgcgcgaaccgctgatgaccgtcgcccagcatgagcgcatcgtcggggcgctgcgggctaaggctgttcaacttcgcgaagcactcgaatggcgtaaggagaatcaggcaggtcagcgcgaactactgcgctcagtgacagcagagcgcgacgccgccctggccagggtcgctgagctggagaggcaggagccggtagctctcgccaatcggggccttcatgccttctgggtgaagtggacggaggccgccgccgggctctacggcccaggcatcaagctctacgccgcccctgtagcccaggctcagcaactcaacgacctggacaaacagtgtcgcgatgacgtggcacgtgcgcttggtttgcgcccgaatcaggagcgcggcttcgcctggtcctacctgttggcgtcgatcaagtcatgcgtgaaggcctccggggatagcgcccaggctcagcacagcgggccggagggctggaagctggttccggtagagccgaccgaagacgtactcgaagcgatacacaacggcggttatgtcggcgatgaccaagaactgcgttggttttaccaatccatactcgccgccgcgccggcaccgggaggtgagtga

SEQ ID NO: 329073 - DNA, 291 bp, Pseudomonas aeruginosa
atggagctgaagcagtcgtttggtgccgccttaaagcaagcgcgggcggtgcaggagaagacgcaggaggatttcgcgggggtcagtggcaggacgtatctgagtgccttggagcgtgggatctatagtccgaccatcgacaagattgatgcattagcttccgtgctggagctgcatccgctgacgcttgtggccctgtgctacatgaaggcagagcctcaggcctctgcagatgggcttttagagcgcgtcaggtctgaattgaaggctttggatgttacggctctttga

SEQ ID NO: 329074 - DNA, 372 bp, Pseudomonas aeruginosa
atgcttcaagacaactcaatatcctttcgagatctcttcaaagccataacccagcaccgcagcaaattagttctgccagaggagcaggatgccttcatcgagcacgttgagcgctgctttgagaaggaagccggcctcagcatctcggatccaaagattgaaaagggtggctatgaacaaaatctgaccaagctgctttacgtcttgtcacgatccctcgaaccccaaccacgggcaccccagcagcgcttcgaattgatctgcgacagtctgattcaggaagctgctgatggcgccgccggggcaacaagagctgatgtggcagcgcttatgagcgcgtttgagctcgctgaactcaaacgccaggaataa

SEQ ID NO: 329075 - DNA, 3153 bp, Pseudomonas aeruginosa
atgactcaacaacctcgctccgaacgccatacccagaaccgagtggtggcgctgtttaccgacaaagcgcggcctgactgcctcggttacgactacctgggcgagtggagcaagcgcgggcacaaccgcaacattgaggctgagctgctgcaggccaatctgaagcagcgtgggtatagcgaggcgcaaatatcggcggcgctgcaaaaactgatggctgcggcggatgccacgggcatcacgttgtatcaggccaacctgcgcacctatcagttgctgcgttacggcgtgccggtgcaggtggcggttggccaggcccacgagacggtgcatctggttgattgggaaaatcctgacgctaaccacttcgccatcgccgaagaagtgaccttgcgcggcggccatgagcgccgcccggatctggtgatttacctcaatggtatcgccatcggtgtgattgagttgaagcgcagttcggtggatgtggccgatggcatccatcaactgatcagcaatcaggaggcaatcttcaacctggggttcttcagtacggtgcagatggtgtttgccggcagcgattcccagggcttgcgctatggcactgccaccacgcgcgccgagttctttgtggagtggaaggcgcagggggtaaacgccgagccggttgagttgaataagcagcgtgagatcccggcgaactatcaccttttgcctggagcagagcttgggcaatcgggttatttgctggataacccgttggcgcagatgtgcgagaagtcgcgcctgctggatttgatccgcaatttcatcatcttcgatgcgggtatcaagaaggtgccgcgtgctcatcaatatgccgccgtaaaggccgcgcaggagcgggtaaggcgtaaagagggcggggtgatttggcacacccagggcagcggcaagagcatcctgatggtgttgatcgccaagtggctgctggagcatgacccggacgcacgcattctggtgattaccgatcgcgacgagctggataagcaaatctccggggtgatgcgcaatgccggggttatcggccctgattcacctgcgccgcgtattacctctcgcgctgatttcgtgcagaagttgtctgccactacgccgcgtttgctgtgcgcgttgctgcacaagttcgagccggatctgagcgtgccgccgcctgccatgcatgggcggttttatgtgtttgtcgacgagtgccaccggactcagggtggcgatatgaacaggcagatgaagcagtggctggcgggggcgttgttcattggctttaccggcacgccgctgctgcgcaagaacaagcagaccacgcgcgatgtgtttggcacttatatccacacctataaattccatgaggcggtcgcggacaaggtggtgctggatctgaagtatgaggcgcgtgatgtgccgcagcgtttgacctcgcgcaaggccatcgatgcctggttcgagcagagaaccaaggggctgaataactatcagaagtcgatcctgcgtaagcgctgggccacgatggaggcactgatgagtgctggtgagcgcaagcagcgcattattgccagcatcattgaagacttcagtttgaagccacggctgaacaatgatcggggtacggccattctggtggcggcgagcatctacgatgcctgtcattactttcgcttgtttcaaaccaccttgttcggcccttactgcggcatcgtcacgtcgtatgagccgaaccataacgccatctcccgtgaaccggcgcagagtgatgagcgctacaagttcgatacctacacgcagtacgttctcaagcaaggccagagcacgacgacttacgaggaagagaccaagcggcgctttatcgaggagcctgccaatctcaagttgctcatcgttgtcagcaaactgctaaccggcttcgacgcgcccagttgctcgtatatctacctagataacgagctgcgtgaccacaacctgttccaggcgatttgccgcaccaatcgactcgacggtgaggacaaggactttggctatatcgtcgatttcaaggaattgtttggcgatgtgcaggatgccatttcggtctacacctccgacgagctggatatcgatacgggtaacggtggcagcaataacgtagagctgaagaactggctggttgagggcaagaaacaactggatgcagcccgtgaagcattgagttatctgtgtgccccggtggcgccaccgcgtgaggtcgagcagttcatccattacttctgcggcatggccgccgatgccaatggcctggatgagagcgagccgctgcggatttccttctacaaggccgttgcctcattcgtgcgggcgtttgccgacgttgcgcagcatctgaccgaggctggttactcggaggctgaagcgggtcggctgcagactgaagtgcagttttatgccgacgtgcgtgaggcaatcaaaaggcatgcgggtgaggagctggatatcaagccgttcgaggcggatatgcggcacctgctcaacacctatatccaggcagatcccgctgatcctttaagcaccgtcgataacttctcgttggtggagttgatcgtccagacgggcgttcacgatgccattgccaggaagctcaatgccaagggcaagctctccaaggatgcgattgccgaaggcatcatcaataacgtgcgtaagaccatcatccgtgaacaattgaccgacccaaggttctacgaggggatgtcgcgtttgctggaggatctgatcaagcagagccgtgatgatgctgctgcttacgaggagtttctgcgtaaggccgaagcgctggtgcggcagatggctcagaagggctcgggtggttctcctgcgggccttaatggtcgtcgtgaggcgactgtgctgttcaacaacctcgatagcatcgccgcgacgacctttcagtgcccacacgatgaggctgaaaaagtgcagctggctttggcgattgatacggccatgcggggctcggctccggccgcttggcgtggagaccctgcgcgtgaggcgcaggtgttgaatgcgctgttccccctgatggggcgcgaccgtgaggcaaccttggccatttttgaaatcatcaagaaccaaccgggctattga

SEQ ID NO: 329076 - DNA, 1974 bp, Pseudomonas aeruginosa
atgagtgaggcgatcacccagttttccatcaagagactgctcagcgggaatgttgagtacgttatcccgatgtatcagcgtaattacgcctgggaggagggtgagatcacccagctgattcaggacgtgatcgactacctgcccgagccaaatcagccagcgcgcaattactacattggcagcctggtagtgtatgagcgaccgggtaccaaaacgccggtattcgagaccatcgatggtcagcagcggctgacaacgctgtcgttgctggcgtcctatctgaagaacaccaaggccgccgacctcgactggtatgcaaatctgagtatctacttcgatagccgcgagcattcgcgggcgacctttgcggccatcttcgaggggcgcttcaaggatgaccctgccgaggtgctggctgaaaagcagatcaataccggcatcctcaatggttaccgtctgatccagaaggtcttgccgcagaagctcaaggagaacggggtttcagcgcagcagtttgcggatttcctgtttcgctatgtgcagatcatgcgcgtgaaggtgccggcggatacggacctgaaccactactttgaaatcatgaacaaccgcggtgagcagctagaaaagcacgaggtgctcaaggcgcggatgatggagaagttgcagggctgccagcagagtcagaattgcctgcacaccgtatgggaagcctgcgcgaatatggagcgctacgtgcagatgggcctcacgcccggccagcgcagcagcatttttggtgagcagaattggggccggtttgagccggcgaactttgatgagctttctgctgcactgcaccgtacgcaggaatttgtagaccggcaggacgccctattaacccttgagcagatcattgccaagccgcctgttggtgtcgagcaggatgaggcaggtgatgaggcgcccgagcgcttcaatacggtgatcaattttccgaactttctgctgcatgtgctgcgtgtcgcgacgcaagcggacatccccctggatgacaagcgcctgctggatacctttgaagcccatattctgaagcagcctgacccggctgctgcggtgaagcgttttaccttcagcctgctgcgctgcaagtacctgtttgatcagtttgtgatcaagcgcgaattcattaagggtgcggacggttggagccttaaacgcttcaaatggaacgacggtggcgagcgcagccgagcggggcgcggcagctatgtgaatacctttggtgaagaagaaggcaacgaaggtatcaatcgtcgcatcttgatgctgctgtcggccttccatgtttccacgccaacgttggtttacaagcactggctcaatgccgcgttgcattacctgtttcactccgagcaggtcgaggctaaggcctatctgcagcacatggagtcagtcgccaaggcctttgtgtttgaccgctttctggctgccgaggcgggtttggaatacttcgcgatcatctacgggaacaagggcgtttgtcagacctgccgcgaagacgtcaccgccgagacgctgagtccgcgcctgcgcttcggcaatatcgaaaacaacctggtgttcaacttcctggattacctgctgtggcttgagcacggtaagagtgagccggtgaagtcttacgaatttaccttccgtagttcggtggagcattactacccgcaaaagccactgcagggcatcgagccactggatgaggatgaccttcactcgttcggtaatctgtgcctgatcagccacgagaagaactcacgcttgagcaatttcacccccgagcagaaaaaggcgttctatctgaagaacaccctcgacagcgtgaagcagcacttgatgatgcagcctgagacctgggatgttccggcgatacgtgagcatcaccagcaaatgatcgacgtgctgctcaatagcctcgccagccaatacgagaccgagtga

SEQ ID NO: 329077 - DNA, 1410 bp, Pseudomonas aeruginosa
atgaccaacctgagcatggacgcaaaccaagtgcctcaggctactgagctctccagcacgatcatcagtgtgtatgacttgctcgcggatcaggcgctggaaattccccaataccagcgcccgtacaagtggaccggcaagcatatcaaccagctgttctccgatattgccatccataaggacaagtccgcttaccggttgggcaccatcgtgtttcaccgggagggtgggaaaaagaacatcgtcgatggccagcagcgcaccatcagtctgctgctggcggcccgtgcgctgattcagcggtgtaaggtcagcaagcttgagcgcaaagacctgcaggagcgtttgctcaagcttgagcaggtaatggtcaaccccagctttagcagcgaaatctcgcagaagaacatccacagcaattaccttgaggtggcccgcatcgtctcccgtgcggactttaccgaggcgcatatcgacttcttcctgaacaagtgtcaggtcgtcgcggtggcgctgacggatgtgtccgaggccttccagttcttcgactcgcagaatgcgcggggccgcgatctggaaccgcatgatctgctcaaggcctatcacctgcgtgagttcagcccgcgtgacgagccattgaaggtggccacggtggcccgctgggaaaacagtgatacccaggagctggccacgctgttttcgcagtacctgtaccgcatccgcaattggtcaaaaggcgtatcggcgcgttacttcagcaaggacgacagcgacctgttcaagggcgtgaatatcgatacggtggccagctatccctacgtggagcaactgcgcatcgcccaccattttgttgaccactacaacgcgcagtacgagcgccagatcgactcacgggagatgggttttccctttcatctggaccagatcatcatcaatggtcggcgcttctttgagctgatcagccattaccagagcaaggtagcgcggatcagcgccgagtcctggaatgggcatgaactggtgggtgccgcagggctggatggctatgcgaaagaaatcatggatgttctcaacagctacccggctagaacccgcacgggcgattgctacgtgcgggcaatgttcgattgcctgttgatctattacatcgacaagttcggccatgcggagctgtcgcgtgccatcgagaagattttcatctgggcatacagtctgcgtctgcagatgcaggtggttcagctggccagcatggataaccacgtgctggcgaacaatctgttcaggctgatcaaggatgccacccgcccggcggactttatcaactgcagcctgccggtcgtcagcggtaagaagtccaccaagactggggagatcgaggcgctgttcagggagatgaaatactatgagtga

SEQ ID NO: 329078 - DNA, 1071 bp, Pseudomonas aeruginosa
atgggtttcattgacttttccgaagagtgctatttagggtcagaggcactttatagtcgttggatgacgaggggggatgttgagaaggacgacatcgtattcacaacggaagctcctttgggaaatgttgctctcatcccagatgacaggaagtacatcctcagccaacggactgtcctgctgaagatagatccacgacaagctgtaagccgttttgtgtttcagctgatgctgtccgagcaattccagaaagttctcgctgacaattcaagcggtacaacggctaagggaatccaaaggaagagctttgagctactaaaagttgtctgcccaagcctcccagaacaacacgccattgcgacggcgttgagtgatgtggatgcgctgctgggtgcgctggagcagcttatcgccaagaagcgcgatctcaagcaggccgccatgcaacaacttctcaccagccaaacccgtctccctggttttgatggtgagtgggacttgaggcggttgggtgacatcgcgcgaattcagcgcggagcatctccgcgtccaatcgatagccctgtgtggttcgatgaaagctcggatattgggtgggtacgtatttcagatgtgacgaagtcaggtatgtaccttcgcgaaactacacaacgactctcgcaacttggagctaaacacagccgaccagttgcccgtgggagtctgatcatgagcatctgcgctaccgttggcaggcctattgtcacagaaatcgacgtgtgtattcacgacggtttcgtcgtatttgacgaccttcaagctgacaaactattcatttactacatgctcaagtggattgagcctgactggtctaaacatggtcaaaccggctcacagatgaacctcaataccggtctgattgctggtacagaaatcgcgcttccatctctgccagaacaagctgccatcgccgccgtgctttccgatatggacgcagagctggtcgcgttggagcagcgattggccaaaacccgcgcccttaagcaaggcatgatgcaagaactgctcaccggaaggacgcgcttagtatga

SEQ ID NO: 329079 - DNA, 2484 bp, Pseudomonas aeruginosa
gtggctatcaagaaatccgacctttactcctccctctgggcttcgtgcgacgcgctgcgtggtgggatggatgccagccagtacaaggactacgtcctgttcatgctgtttatcaagtacatctccgacaagtacggtaactcggatgatttcgcaccgccggtgaccatcccggccggtgccagctttaaggacatggtggccctaaagggcaaggccgacatcggcaacaagatcaatacgcagatcatccagccgctgatcgatgccaacgcccggcttgcccgcagtgatttccctgacttctgcgatccagccaagcttggtgaaggtcaggatatggtggaccgactgactgatctggtggcgatctttgagaagcctgaactggacttttcgaagaaccgcgccgacaacgatgacattctcggcgacgcctacgaatacctgatgcgccacttcgccagcgaaagcggcaagagcaaggggcagttctataccccatccgaggtcagtcgcatcattgccaaagtcatcggtatcagccctgccaatgctgtggccgcgaccactgtttatgacccaacctgcggttcaggctcgctactgctgaaagtggccgaccaggctggcaagcacatcaccctggaagggcaagagaaggacgtgaccactgcgggtctcgcccgtatgaacatgattctgcatgacttcccgacggccaatatcatgcctgggaatacgctggcggcacccaagttcaaggacggagagcagctacgtacatacgactacgtagtagccaacccaccattttcggataagaagtggaccctcggtctcactcccgagaacgatccctatcagcgttttgtctggggcgttcctccgaacaagcagggtgatttcgcctacctgctgcacatcattcgttctatgaaaagcaacggcaaagctgcctgcattctgcctcacggcgtactgttccgcggtaatgccgaggcggtgatccgtgagaaactggtgcgctccggctacctcaaggccatcatcggcctgccggcgaatctgttttatggcaccggtattcccgcctgcatcctggtgctggacaaggaaaatgccagcgcgcgcaaaggcatctttatgatcgatgccgccaaaggctttatcaaagacggccccaaaaaccggctgcgcgatcaggacgtgcataagatcgtcgatacctttacccgcatggtcgatgtgccgcgttatgcgcgcatggtcgccttcgacgagatcagtgatccgaagaatgacttcaacctcaacctgccgcgttatatcgacagcaccgagccggaggatattcaggatatcgacggccacttgcgcggcggcatcccagagcgggatatcgacgccttcgatagctactggcaggtgatgcccgcactgcgtgcggccttgttcaaacccgccaaccacgccggttattttgagctagttagccccgaggtgaagccggtgatcttcggccacccgcagttcacggcgttcaaggccggggtggatgtgctgttcaagcaatggctggccagcagcacgccgcaactcaaaggctttgctgcggattcggcgagcagccaccccaaggagttgatcttcaaactctccgaggaactgctcagcgtctttgccaaagcacccttgctcgaccattacgacatctaccagcacctgatggactattgggccgagaccatgcaggacgactgctatctgatcagcgccgatggttggaaggctggcgctacagtgcgagagatccacaaggtaaaggacaagaatggcaagctggtttgggctgagaagcacgattacagccagggcaagcgccgcttcaagtctgatctgattccggttgagttactggttgcccgctacttcagcgctgagcgcagcgccattgaggggctggaaactcagctggccagcatcgagcaaagcttgagcgagctactcgaagagcatagcggtgaggatggctcgctgagcgaggtgatcgaaggcgagggcgacaagcagaaggtcaccgccaaagccatcaaggcccgccagcgcgagattgataacgacccggactatgaggatgaactcaaggtgctggccgagtacgacagcctgctcgaccagcacagcaccctcaaggccaaactgaaaaaggccgaggaagacctcgacaacaagattcacggcaaatacccgcagctgagcgaagccgagatcaaagctctggtggtggacgacaagtggctggtcaccctggcggttgcggtacaaggcgaacttgatcgtgtgtcgcaaaccctgaccgggcgtatccgtgagctgagtgagcgctatgccactccgttgccgcatctggttgatgaagttgccaccctggccggtcgcgtagatgaacatctgaaaaagatgggggcggtatggcggtga

SEQ ID NO: 329080 - DNA, 453 bp, Pseudomonas aeruginosa
atgaacaatgccaagccatggatctttaccgcttcgtacaacagtgggattgccaccagagctgaacaccagagcgtgcccaccgtatcactcgcgctgattcagcttagtggcgcgggcggccctaaatgcctgtacacaacactctcatggcagcaagccacccaccttggccaccacttgatggagcacgtgccacagatcagctccttcgagcaggcccaggcggcgctgcaaggtgaactgaataccgagctaaacgcagcacctgcatatgcagccaccatcagcgccgccaacggcatcgtctttcacgacgacacctttctggctacggacttcacgctctatggcatctgggcagaaaccgtctggggagacctacaccaggtgcggctggaaatgatcgactccagcgcacccgcccccttcgcgatctgtcttttttactga

SEQ ID NO: 329081 - DNA, 870 bp, Pseudomonas aeruginosa
atgaacacagatactcaaaatgcttacctttcactggcgagccacttttacgctacgcacctgccagatacccccctcagtgatctcaacgagttcaacatcatcggtgctttgctgcgtgctgctcctggttatcggcctgactatttccggcggttgcgcaatgccttggctctggatcaaaagctaaggggcaagttttggattgctcaggagatcaacaggacgctcaaccccgttaccgtgcttggcttgccgcgtaagcgaaagccagcccgtcggcagagaatttctgatgaggattttggtcgctgggttgaggggcttttggcagatggaatgcttgtcgaggcaggagcgctgatgttgatccgcatgactggggcgaggccctgtgagctggcgggcatcactgtagatgggccgcggatcaggattcagggcgctaagcacagccacggtggattgcgcggtgctgaccgagagcttgaggccagtcaggatttctgcaacctcgtacgtaatgcgttggaagcttttcacaaagaagatcgaagcttggactctatacgcatggcgatccacgaggtggccaaaaaggtctttccgcgtgggcggactccctccatgtatacgttgcgacaccagttcggtgcgaatttgaaggcctctggaatgtccagggttcagatggcgtatgtgatgggccaccaggcaacggattctattggccgctatggcgacaaacgcttcgggcgagccgaagctgtccaggtaaggcctgccaaggacgcggatttatcggctattcgaacaacgcatgcggcgtatgctcgcactcgctcaaaggcactacgggtagattgctga

SEQ ID NO: 329082 - DNA, 540 bp, Pseudomonas aeruginosa
gtgaaggacagcgtctggttcacctacaaggcccgcattcaggcccatcaccgcttagattggctggacttccactcgcagatgctactggtgtggtacgcaatactcagcgcaacattaggcgtactgaccattcgctacgaacatctcctcggccccgacaccgacatgatggccactgtgctttccatcgctttacttggtgtctcgctcgcagtgactaaccgcgactttcgggcacgcgccatgatgatgcgcaaaaattacctgcaactgcaggccctataccgtgatctttcccccggcgccgccccgaccccagtgcaagcgacacagtatgacgagctgctagcggagtgtgagaatcacagagaaatcgacgaccgcatcgcacgcgtatttgcaaccgggcttaccagccgaaacccgacagcgtttgaaaaatgctatgccatttcctggctcagcgctcgcctgattattactgtagccctatatgtacttccccttacagtaggtttgctgacctgggtgtgctaa

SEQ ID NO: 329083 - DNA, 1365 bp, Pseudomonas aeruginosa
atgagcgctgcgcgtagtttcaagaaatactttgctcgcaaatcgctcctccgcgtctatgccgaaaagatcaaaaactcgggggccatcgggcttgaccgcactaggccggccaagctggacgccaagctgacagatgagctagagctcatcattcagaaggttcaccagggcaaatatagattcacagcctataaggaaaagctaatcctcaagggggccacctccctccctagacagatatcaatcccaacagctcgggacagaattgtcctgcgagcactgtgtgagtgccttgctgaggtatacccggcagccaagctctcgctgccccagggagtcattgaagacctgaagagcgctttagcatctggggtctatagcgagtacgccaagattgacttgaagcatttctacccgtcaatcccgcactctctgatcaatgccgctgttcgaaaaaagatccgcaagacggagctgaagcaactgattgcgtctgcaatcaccacgccgaccgtgcctgagtccaaaggcagaaaagacacccccagcacaaccattggcgtacctcagggcttggcagtctccaacttgctggccgaaattgcacttcaagacatcgacttagctttcaagagtcgaccagatatttggttcaagcgctacgtcgatgacatcttgatccttacgccagagaatcagtccgaggcagtggccaatgagctcattaccgagctcaagaacatgggactacagccccacgagtttggtccggaatcaaagtctaagttcgcgcctcttacagaaccctttagtttcctggggtatcaggtcgaaggcggtcagatcatcatccgccgcgagagcatcctccgcttcgagtcctcgattgccaaaattttcacggcttaccgacacaaggttgcaaccgcaaggtcaccagaggatatagagcgagctagggcgtattgtgaatggaaggtaaacctccggatcaccggctgcttcttcggcggcaaacgacggggctgggcctcgtacttctcccaaattacgtcgacagcgcagctgcggtcggtcaatcacacgatccgcaacctgactacacgcttttcgcttgacggaaaaatcagaacaaagtcgttgatcaagaccttctatgagcttcgtcgtggaagagctggcaaccatacctacatccccaacttggacgatcacagtatcgctgacaaacgtgcactactggctctgtggattggggatgcagcccagcgcctacgcgatgaccagatagagcggcttttcgaggtcaaggtaaccaaggccgtacgggagctcgaagaagatattgcacaaacatcttga

SEQ ID NO: 329084 - DNA, 1023 bp, Pseudomonas aeruginosa
ttggggctagaaatagagattgtgtctaggattctcggtactagcaggcctccaatccctagcgatgtgcttgtgcgaactctctttgcaaacaggtggctttgttgcgtctgccgcgatgagagccgtcccatcatcgttcatcacataaaaccatgggcggaaagtcacgatcattcgcaagaaaaccttgctgtcctttgctcagttcaccatggcgaagcacacgccactcgtgctctagagctaactctgacgcaagagcggctcagggcggagaaggctcgttgggagcaggaggtagggcgacttgatccacatgccatcctcaagtcgactcagttccaaggctgtcagtggtggtacttcaaccacctcagggtttttgaaatttctcagcagctcggagttgtagttacggagcttgagggattcgagcgagcatttgacgcccagctctgtgatgggaatggctgcccgtgcttgagcgttgggccaatgtacagtgggccagctggtctcatcctatcccgctacatggtaagtatgctgcaggacgctatgggccatgcatgcgtgagaaatatttcgaacgaccttgaccgaggggcgctcggattcctggttacagacggtgatttgattttcgtacaggggagctatcgtttttcatcactccccgctgatggctccggatcagatctcgtagcgggagtacgatcagtgaatggtgtggagatcacttttgtctttgatcgaaatgaggggacctctggctctgcccggaacctttggctcaggggtactaacaccttgggttgtctcttgcgcgtgaatagattgcgacgacatccagggggtaggctgcacattgatgccacggtccttgcaattcgcagtgctcaccatgaactgaagtcgagagtctacgagataagtctctaccaaagtgggctgatagggcagtctgatgtcgacgatggcgcatatgatgaggctatcgacgaggagccacagggctag

SEQ ID NO: 329085 - DNA, 1470 bp, Pseudomonas aeruginosa
atggcggggaccacaagcaagacagcggcgagaaagcatctcacggatatcgctcttaaagccttgaagccaggggagacagctactgatcccctgccaggtagaagcagtggcgcattgcttttcaagtgtcgagcatctggcgcagtcgaagcctattacaggcgtcgagacaatgggctggatcagctgatcaagctcggggtctataaaaaaactccgaagagcccagggctctctctagccgaactgcgcgagcaagcagctggttactcaaggattgccgcagagcacggtgatatcaaagcctatctggccaagtgtgccgctgaggaagaagcacagcgggctgagctccagcgtgaacggcaagagcagcagcgcctcgccgaaatcgaagcggcaaagggcacgctgtctgagctatttcgagagtacatcgaagatcgcaggcgcaacggtgtttcagctcagcagcttgatgagtttgagcgcgtgctgcgtaacgatctagaaggcgaaaaagtagtctctgtaggtgacgatggtcaggagcagagactcaatgtcatgtccatgaaggctagggatgtcaggccagaccatgtgtatctgctcataaagccaatttggcagcggggggcgcaacggcaggctcggaaggtgcgttcctttcttgtggctgcattcaatttcggcctgaaggctgagcacgatatcgagcggagcagtaacaaaagctacggactgcaaatgaatcctgcggatccagtgaccgtacgagatacatcaaagccaggtgagcgcgcattgactgatcaggagttgaagcagttttggcagaccatcacgcaggtagggacggcagtaggcccgattgtggcgcgtgtttttcactttgcttttgctactgctgggcagcgacccctccagttcattcgtgagccttggagcagctacaacctcaaagaaaagtatgtgaaggtcatcgacagcaaaggtcgtggaggtaagcctcgtgctcactgggtgccactgagcgatagggcactgcaaattttgggcgaggtacgggccttacagcccaaaggggctctctacccttggagtaccgatggaaagcgccctatccattcgtccagtgtttcgcatgcggttgcagagtggctagagacggagcatgcccagttgggtgggcacccagttcctaaattcaccccgaaggatattcgccgcacgtgcacgcagttcatgcagcgtcacggcatcaaggatttcgatagtgacgtcttgcaatcacatggtcagacaggtgtggttgctaagcactaccgtaacaacccagaagccaagcttcctgatatgcgactgactatggttgcatttgatgctgcgctgggctgcctgctcgatggtgaagatgaggatgagccacgggctgagcagctcgagttgttcgagattggataa

SEQ ID NO: 329086 - DNA, 162 bp, Pseudomonas aeruginosa
atggcaacaatcgtcccccttcccgtggtccgcaaaacggactggccgaccaacgaaaaaaccttccgcaccaagcgcgacgccgaagactgggcacgccgcaccgaagacgagatggtacgcggcgtgtacatccagcacagcggctccgagcgcatgtga

SEQ ID NO: 329087 - DNA, 2658 bp, Pseudomonas aeruginosa
atgaccgcatcagccggaagcccgaccacgatcatcatcgatctcgatcacagcgacactaatgcaaaacttgaagtgaaccagctcgttcagcatcagagctataacaagctaagacagcgcattgccgcggatctggagagtttccagaggaaactgccaaccagagcggtaggtagcgcccctcctggcagcgggctggtttacttcattgatggcacccgcggcgcgggcaagtccactttcttgcaaagcgcttttcatgccctaggcaatgaaaagatcgggctaaacgtcagccctctggcctatatcgatccgagccggattgagcgtagtgaaatcatcctgctaagcatcctgaaggcccttaaagaccgcattacgagctttagaaaaggcgccagtttggctggggagcaacttatcgagcgcttccgcgaacagttcaaaaagctcgctggtggcttgagcctgtttagctcgaaccacgaccagcttcaggatctagatccagagctcttttttgaatggggattagagcgcgcaggacacagtacggagctacgcaaaagcctccatgagctgctcgagttggcttgcacgattctagatgccgatgcgctcgtcctcgccttcgacgacgccgatacccatgcgcaacacgcacgcagcgtgctcgaatgcatacgcaaataccttgatactccaagccttgtggtcctggttactggcgatattgagctgtactcgctgatggtgagagaccatttttacgacagcttgggtgatgctaagcacggccaggggaaagaacgtgcggatcagcgccataagatggtcgaccacttagaagaccaatatctgctcaagcttttccccatgcaccgtcgcttacaattgcgcccactgtggaatctgcttcaacacgatgaaaatcggttccggctgacccattccaaatgggacaagcagttaactgccaaagaattagtcagtaccttgatccggcgcggcctgcgaatcaaaaatccacgcgatcttgagctctatcaagagttcttacttaaacagcccttgcgctcggtgcttcaggtaatgtcgcgatgcgcgccctacctcacatcagaaggcgcaaatgatcaaaccgatacatgggacctagaactgtccgaagccctgagcgagagcttgcgcgcgttggctctgggtagtttgtataaattcggtgtggatgttgacgccatcgccgctcacgaattacctgcacttaccaaggctgttttcgacttggcagtccgcgatggtgacttcgacacggctgtgtacctccgcccccagccaagtgacgccgatctcaagaacagctttgcggcgctttcagcagatgtaacccgcctgtgcgcggaaaaaccggcggcgctaatcgactacatgctggccgcccccggtagcgtggcgctattcgggcaggttttacggcgcaagggtaaagaccttcagaccgaagaagctcgccagagccttcgcatacagttcgaacaatatatgggcattggtcgcaaagaggacgcactcaactgggcccgtcatgctgtggcaattttttccgcacctcatggagctaacccaaagagcccactggtctactccggtattattggactcaacaagggtaagcctgaccatgccccccttgagagcgaatcgggctataaagcagctgctagcgtcatcaaagaatgccctgaacttccggctttcgcgttaagccttgtggacgtatcggggacatcaactaggacctatgcatcgatctacaacatccttggcctcatcgcccggttactctcgcttcaaccgaaagatggccaataccctgtcctgagcgtattacccaaaccgttccccccgctgagcgtatcccgaccacagtgggaagctgacgctgcagatgaggaagagctcgagcaagatgcgtcggaggacgcaggaaagctctccacgcttgaagcatcaatcaagcattggttggccataacagtaggagttcgtaaacagctgaacccatcggctgtattgattggcaagatctggactcgtctgtatttcagtctagagaaagtgtgtgacgccaatagaccgagggtctcctcgatgtcaacggggacagccggcctgatggagctctttgcgctgtgcgtcatcaatgctgtctatatcgaggagcgagattaccatttaagcagcagcgcgggcttcactgagagcagctctgcattagatcgcactaaccctctgacatctggcaaagcttttattgagaagttcaaggacattaaggagtctcaccaaaagctccccctaacctaccttatagccacctgccccttactcttaggactgttgcaggcaaccgccaggtcgaaggatctagttgatggtcttctttcctgccacccaacatcactggttgcgcaagatgagttaaacggctctagacttggggattcagtgcttcaggctaaagattttatgtgctctaccaaaacttggaacaagatcaataaaacatatattgccggcacaaaatggaagaaatttacttccaacggcctccctcaagacagcgctgatgaggagtccgcagagtcttga

SEQ ID NO: 329088 - DNA, 2541 bp, Pseudomonas aeruginosa
ttgaagaacgacacacatgaacagcctgcctcggttattgctcagataggcacgacgttcctctccagttacaaagtacttgcgttggtgcggcgtaagccgtttaaccagcacctgaacttgatcgacctacgtgaggcggtctatctggggtatctgccctggtcggcacgcctgccggatcacgtgtttggacatagctggcatctgctggcacagcagtcgacgaacagaggcagcacagggctgcttttaggtgcgctgcaggcaatggccgatgagtttttagaacaaaggcactggagcttgcatgtaaagcaacagaaattcggtgcttggcagcaaagcgtcgtaagtcgtatttcggggctccccttgctggcggcggcacagctcttggcgcagccgcctgcgaggggaacaactgagaagcacacacaatggccttgggaacccccgcaaacttgggccagcaagaatttgtctgtcgttagcccatacgaccccttagtagaagattacttagggcgtgaagggctgcacgaaacgcacttgcatctcaacggcagcacccatgcggagaattgctggctgcgcgcccttcgcgcgcctaagcaagaaacaaaggacttcagcctaaagtggcacacccccaacgccgccgacgccacagcagtgcgcgagttggcgcgatcgatcaacccggacctctcacctgctgagttgcaccgtcaactagtggcggcaggccgcttgagaaggtggctggttgcggcagcgaccgacacactcaacgccgatgtccaactgccccacgatctctccgaactgatggaagacgagagcttgcagagggatgtcccgctcccagcgtcggcgcactttcagctctccgtacaaagctgcacggcgagtgagttgtattggatgcaacagcttttactaaaactcaagagtcaacccagcgtggctcttgagcgcatgttccatacttatctaatgctccagaaccaacattaccgccttctggtacaaagcgaggagcaatttggcttcgatcaatttcagaaatttacttacaacaagttgcgagaccccgcagaggaagactacctgcctcgattttgggcgatacatggcagagcgcagaatgtaagccgcactacctacctggaaggacgaatctctcctaaagacacattgcgcaagaattaccaattgctcaaagctgttctgggcggctactggcgttacctacacaatcaaaacccgcagggtcatagcgaaaatctagtgcctcacaagcttggtgagctgttggaaaaactggaagaacattttcgtaaaacgtccccccttgatcggtcgcatcaccgtcttgctctggttgtacatttcatcaaaaaatcttgggcgcctgatcggaaggcaggtccgtaccgcttttataagcaacgtcaggaactggagcttgcagctaatgtgttgcttgaatgcctcgctcgttggccacgcctgcggacctgggtgcgtggaatagacgctgccgcgaatgagctgcacgcacctccggagatatttgccagttgctatcgcgtgtgcaatcgggctggcctaactcaccgcacttatcatgcaggcgaggattttgcgcaccttttgagtgggctgagaaccatgtatgacgcactggagcttcttgaccttcgtgatggtgaccgcatcggccacggcactgcgatgggcatttctccccggctttggctggagcgtatgccgggacagttggtggtcaaaaaaggcgagtggatgctggatttgctggccgcttggcgtctgctgcgtaccgtgccttgcgcagcggccacaaccgctcgcgtggcagacgatttggccaagtgcgccggcgaggtgttccgccgagatatcagctgtacctcactagacgccgctatggcgctaaggcatctaaacatccgttttgtgcaagctgccttagaaacggactggtcagctgacataactccgttgagtgacctctggcagagtgaagcacaaagggttttggatgcgaaacgccgcagccctcaacacttaaagctgctgtgggaatgggttagcgaccgagaactgtgggaacgcagtgaggcactgcagagcgttgacgcagcctacttcgatgaagccacctatctgcatctccagcaggccttaatgcatgaggtcgctcgccgtaacgtgatcatcgaaacactgccatcgagcaatgtccgcatcagtcagtacaacagctttagcgagcatcactctctgcgctggatgcgagcgccgggctttgtgcaagaaggagatccagaaattatggtttctctcggttcggacgatcccggtattttcgcgggggacttgaacggtgagttctaccagctatacgtagctttgcgtaatcaaggcattagcgaccacgcggcactggcgcttctagctccagtcaatgagcgtggccgggcgtatcgcttccatgacccatttctgggttaa

SEQ ID NO: 329089 - DNA, 1245 bp, Pseudomonas aeruginosa
atgacgcagataataaaccgggatgctgctgacaaaacaaaaggcttccggctccaaaagctccgggctgcaacgcttctactgaaagcagcaaatgacttgtcgaatgtaaacttctactacgcagcgattgaagcggaagaagatgtaacaataataaaaactgtaaatctaagcacagagcaaataattgaagaagacaaaaactatagctctgatagcaacttcaccatatactcagaagccgtactaaacaccctcgtaagctttttcgatatctatataggcaagtggcataaaagccaatccacagtattcaattttagcttttacaccacgacgaacttcggaaaagagaaaaagaaagaacttgcagacggaacaaccatagagcttcccgacaagcctatccttgaaatccttaaaaattcatctgaaatccccgacaacatatccagtattgtcaaagccattctgctttcagaatacaaaaagcaatatgaaaaaatccccggcaatggctacctcaaagctctagaagacatttctttagaagacttcaagatttttcttaagaaaataaactggctatctgggcaagaagacgagtcagaactccaagacagtgcagagaaactgataaagagctgtaaatattatcaactcagcatgagcggaaaggagcaactgatcctcgccaaaattctcgacaaaattgatgaaaagcaacacttcgaagactttgcagagagatttataaactcggccgaggtagagctaattttcaaaatggcagaatccgaagtcagtgaacaactgctcgaccccatatggaaagaacttcaagagctatcagccaaaatcaccgacaaacgcaatttagaagaaaaaatactagatagttgccctgcatacccaaaatcaaaaattgcaacccttgcaagaaaagcctgtagttcgaaaacagaagaagaagcaagcaacagaagctttttatcattaaagtatcgagtttttgaatcctgcgaagactattttttcgataacaacaaattcagcgacaccgttaatcaaacttcaatcgacaccacaataaaatcattacagcaaaaagcagcagacacgattaaagaactaaaaaaggattacacatacacagtatcaaacaaagaaaccatcaacggaatagtagtaaacttaatagattcatgtttcatatgcttcgacgaggagaaatccgaatga

SEQ ID NO: 329090 - DNA, 1965 bp, Pseudomonas aeruginosa
atgggaagtttaagaattcagaaggtagtttatgagggcgcaaattaccatttcgaatcccccctatttgatgaaaacctcattcttatagaaggtgacaacggaacgggcaagagcaccttctgcaatttgatctattatgggcttggcgggcgagttagcgaattcagccgtaaagagaagaaagagcagcacaaacaaattacagaagacaaagacaatcgcgtagagctttacataaaaataaacaatgaaagctacaaattaactcgccatatagacgacaacgatatagctgtatcatctaccctagaagcctgcgacatcggaaccaaatcaccagtattaatatacaacaacgatgagcccacctccatatttcaggtatttcgttctcctgaagttgagtatatattttccgactggattctctcgaagcttggaataaccgttgtagagctataccaaggctatagaaatttcaaaattaattttactgatcttatgcggcttatctatcacgaccagcagcccgaccctaaaggggtttacaaaaagatagatacccaaagcaatttcatgaatgactcagagcttctgagaaaagccatctttgagcttttagtcgggaaaacattttcggaatactacgaatccctttctaagtcaaaagcactagaaaaagataaaaatattgcagcggggcttctgaaagaatattcccgaatcattgaagagctatctggaagctcagaaccgctaaatatttcgttccttcagacgtccctgcaagaaaaagagaatcaattagaacgtttgcacaacgctaggaacaaattcaaaagcaatagagaggtcagaggcacagtagtagaccatgcactgatagacatcaaaaatcaaatcaccgaaaaacaactaaaattaagcaaatcaaatcaagacctgatctcaaccttaggtgaaaaacaacaactaaataccgtaaaagaaaatactctaagagaaatctctcaaatcgtaaaaatcatacactcgcatgatcaactaaatttattctcggcagacacatgcccttactgcttaggaaaggttgagcgagcaacaggtcattgtgtatgcggctcagaaatacaagaggaacaatatcaacgcttcttctacacatcaaaagaatacaaagaaatctataaagcaaaaatcaagacaacccaaaccattgaaatagcgatagctgattgcgaccaagacctaaatactattcagaatgacattcgcagactagaaacagaaattccagagttaatgcgaaaaatagaagaacggattgacaacctagatactccagtagacctagacacaattaatgatattgacgatgaaattctaaacactcgtcaagacatagaaaaaatacgccagcaaattgaagcagaaagcaaaaatgttcgcctaacaaatgattatgagcgaaagagaagcgagcatgaaaattcaaagctgcaaacagatgagttagaagcaaaagcaaaaatagatattcaagagaaggtagggaagctcagctccatctacaacaagttaatgaccgactctctacctgactgcaacactgctcgcataagcttagatgactacctcccgatagttggtagcggggagtatagagaggccagctcagccgtatcaaggcgactcatgtattatctcgccctcatgaatctatccctctcacaagaagacgtaccattccctagattcttgcttatcgatacaccagaaacatcaggaattgagctagataatcttaaacgttgccttgaaaaaattggcgagcttggtagctatggaaaatcttatcaagtcatactcactaccggcctcaaaaaatatcctgacagttttaaagagcatagaaaaatatatcttccagataagcagcatcgcttattagtcaaaaactaa

SEQ ID NO: 329091 - DNA, 342 bp, Pseudomonas aeruginosa
ttgaacgatctctacggctacgcccgcggcgacgacttcatgctggtactcggccccgaggactggcgcacacggatcgaccggttgctggaaaccttccagagccaatgccggcgcttctacagccgcgagcacctggaagccggctgtttcgttgcacacaatcgccatggccagcgcgaggagtacccgctgctgtcattgtccgtcggcgtggtgcatctaccggccgaagcctgccagggaatggatgccgcgcacctggcgacgctggcctccgaggccaagcgccaggccaaggcggtgccaggctacagcctgcacctgatcgaggccgcctga

SEQ ID NO: 329092 - DNA, 1848 bp, Pseudomonas aeruginosa
atgatccgtccccgcttcacccctctgctggcagccctgctgctcggctgctgcggcccgctcctcgccgccccgaaacatgcactgacgctctacgatgagcctccgaagtatcccgccgatttcaagcatttcgactacgtgaatccggatgcgccgaaaggcggcatcctccgccaggccgacttcggcggcttcgacagcctcaacccgttcatcggcaagggcgtctcggccccttcgctgggcctgatctacgacaccctggccttccagtcgcaggacgagccgttcaccgaatacggcctgctcgcggagaagatcgagaaggcaccggacaacagctacgtgcgcttctacctgcgtccccaggcccgtttcagcgatggcacgccggtcaccgccgaagacgtggtgttcaccttcgagacgctggtgagcaagggcgacccgatgtaccgcaactactatgcggacgtcgacaaggtggtcgccgaggacaagcttcgcgtgcgcttcgacttcaagcacgccggcaaccgcgaactgccgctgatcctcgggcagatcgcgatcctgccgaaacactggtgggccgaccgcgacttttccaagaccggcatggaaatcccggtaggcagcggtccctaccgcatcgccaaggtcgatccgggacgctccatcagctacgagcgagtcaaggactggtgggccaaggaccttccggtctcccgcggactctataacttcgacaccatcaccatcgactcctatcgcgacatgtcggtcgccctggaagccttcaaggccggccagtacgacgtcaacctcgaatattcggcgaaggactgggccaccggctacgagtcgccggcattgcgcgacgggcgcttcatcaaggccagcatccacaaccacaacccggtggggatgcagggcttcgccttcaatatccgccgcccggtgttccaggaccgccgggtacgccaggcgatcagcctgctgttcgacttcgaatggtcgaacaagcagctgttcttcagctcctacaagcgcaccaacagctatttcgagaactcggagatggccgcccaccagttgcccagcgaagccgagctgaagatcctcgaaccgctgcgcggcaagattcccgacgaggccttcgaccaggtcttccagaatccggtcaatgacggcagcggggtgatccgcgagcagcggcgcaaggcctaccagttgctcaccgaggccggctacaggatcgagaacaaccgcatggtaggtcccgacggccagccactgagcttcgagttcatgctgttccaggccaacatggaacgggtcatcctgccgttcaagcgcaacctggccgaacttggcatcgacatgcagatccgtcgcgtcgacgtctcgcagttcgtcaaccgcctgcgctcgcgggatttcgacatgacctcggcgacctggccgcaatccaactcgccaggcaacgaacagcgagagttctggcattccagcagcgccgacaaggccggcagccgcaacttcatcggcctcaaggacccggccatcgacagcctggtggaaagcctgatccagtccgactcgcggcaaagcctgatcgaccatacccgcgccctcgaccgcgtactgtcgtggggctactacgtggttcccaactactacgtcgatacctggcgggtcgcctactggaaccgtttcggccggccgaaggtgacgccactctacgactggggcctgatgacctggtggcagaccagcgacaaggcgctgccgagcaaggcgcaagccgaagccacgcaagacgccgagccggaacgggagtaa

SEQ ID NO: 329093 - DNA, 930 bp, Pseudomonas aeruginosa
atgccaaggccagaacctatcgcgctcatgcgccgaaagatccccagcaacacggccctgatggcgttcgaagctgccgcccgtcatggcagctttgctcgcgcagcgggagagttgtctctgaccgaaggggccatcagccggcagatcggcagactggaagcgttcctcggtgtcacactgttcgagcgcatcggcaaccgcgtccgactcctccccaatggggaacgctacgcggctcaagtgcgtgaagtgctcgaccgactggaccgagacagccagtacctgatggggcagccccgcgacggagcaagcctggacattgccaccatcccgactttcgccatgagatggctgatcccccgtctgtcacggtttcagcagaagtaccccaacatcaccgtgcatcttgccgagcgtatggaaccgtttgtcttggccggaagcggattcgatgcagcaatccatttcgagcatgcggcctggacaggcatgcggatgcaccgtctgctcaatgaggtgctggtgccggtgtgccaccccaaactcgtgaagggaagtaaagggataactgcgctggacagcctgccgcgcctgcaccgacggcaaaatcccgatgcttggcagcgctacgcccaggagactggtatcccgctggacaatcctgcaattggcgcacgctacgaccttcattcgatgttgatcgaagcggcgttggccggtcttggtgtggccttggtgccacgcctttacgttgagactgagttggcatccggtcgcttggttgcaccgtggccggagggcaacaccatcgccaaaaccttctgcctgatccttcccgagccaatcgaattgagcggcgaaccgatacaggtgtttgcccagtgggtgctggacgaggcgaggaagacggctatggctgattcatag

SEQ ID NO: 329094 - DNA, 543 bp, Pseudomonas aeruginosa
atgatctatacagtcgaatgcagctttgccgatccagccaccgaagcagaatggaacgatttctatagcttggaaaagttgcccgcactcatttccgtaagtggatttcatacctcacagcgcttcaaggcggtgagttcgggttgcccggtctacttcgccattcattcgattgacagcctcgatattctccagggcgatgaatatcgtcagaaaggcggtggcaatttcgcgcgctggcaacagcacattacggattggcaccgcaatctgtatgacggctttgaccgtgctccggccatcggtgacggcgaatacttactggccagttcggttggccccgagccactgatcaaaatgggcctcgcgcccctcccgatgcaggctgtcgccttggaaaaattccccgaacatcggtggctggcgaaagcacgctccattaatccaagcgaggaacgtcttccggagggcgtctatctctacgaagcgatgaccgcacagttgaagagcagccacgaatccgctccccaaacgtcacggtag

SEQ ID NO: 329095 - DNA, 831 bp, Pseudomonas aeruginosa
atgaacttcccgagccagcaggtaggagagttttcgatcacggcaatcagtgacggatacctttccgcgagcctggattttctctccaatatcagcccaatggatgcgtcaaagttgcagaaagacgcaggcgtaaacgatccatcttctattcacatcaattgctacctagtccgaggtcgtggccgcacgatcctgattgatacgggtgcaggaggattcaaacagtgggggggcaagctgaaagcgaatcttgcatttgctggagtacagccttccgacattgatacgattcttctgacccatgcgcaccccgatcacgttgggggacttgttgattcgtcgggagaagccgcctttcccggtgcggagttggtcgtgcaccagcacgaggtttccttctgggaggacgatgggaatctcaatcgagcaagtgagcgtgcgcgcggaaattttatttttgcacgagaagtattcgataaatatcgggaaaggatgcgcacttttaccgataacgaggttcttcccggcatcagtgcaatgcctctacttggacataccgctggacattccgggtatcgcatcgaatccgatgatcgaagtctgttggtatggggagatattgtccatttccctcaaatccagattgcccgtcccgacgtatccattgcattcgaccaagatccgattctttctgccaatacacgatcccgactattggatatcataagttcagataagctccttatcgccggcatgcaccttggcgaacttggatttgcacatatcgagcgaacaggaaatacatacaaaatttcttacgagccttga

SEQ ID NO: 329096 - DNA, 1128 bp, Pseudomonas aeruginosa
atggtgacggcggtgttcatgctatcgaactcgcccacgccgctctacgtgcattggcaggaacagatgggcttttcatccggcatgctgaccgtgatcttcgcgctctacattgccggtctgctgggcacgctgctggtggccgggcagttgtcggatcaccacggacgcaagccggtgttgctgccgggactgctcgccgcgttggtggcatgcgggctgttcgccagcgccgattcgattggtatgctcgccgtcggtcggctcctggccggcgttgcagtgggtgtgatcgtctcggccggcatggcggcggtggtcgatgctggcggctccgagcacaagcgccgcgcggcgctgctggcgtcggtggcgatggtgctgggggccggtctggggccgctgctggcgggcgggctggcgcaaacgctgacgcggccggtggtgccgatcttcgccatcgaagcattggtgctgctgaccgccctgaccgtggctttgcgcttgccggcccgccgcacatcggcgactggcccgctccgtctgcggctgccgcatgtgccggcggcgagccggcggcaagtgttgtgcggcatcgccaccttcggccctggcatcaccgccacttcgttcgtgctggcgctcgggccgtcgctgctggcgcgattgctcgatgtgcgcagcccgttgctcgccggtggcatggcctgcgcgatgttcttcaccgccgtcggcgtgcagttcgcggtgcggcagtggccggtcgcacgcatcttcgctgccagcgcggccgccacagtgctggcgatggcaagccttgcgctggcgatccatgcctcgctggttccagcgttgatcgctgccgcgctgctggccggcgcgggccaggggctaggccagcttggcgggctgactttgatcggactgcacgtaccggacagccaccgcgcgcaatccaatgccgtactcaacatcggcggctatatcccggcggggctgttgcccgtggcgaccggctacctgatcgacgcggtagggctggcgaccggggcaacgctgtttgccctggtgctggcgatagttgccttggttggtggcacttgggccgtgcgccgagcgggagcctga

SEQ ID NO: 329097 - DNA, 897 bp, Pseudomonas aeruginosa
atggaactgcgccatctacgttgcttcctcgccgtcgcagaagaactccacttcgcccgcgcagcggaacggttgcatattgagcaatccccgctatctcgggccatcaaggaattggaagaagacctgggcgtgcggctgttcatccgcaactcgcgcagcacgcgcctatcgcgtgccgggcaggttttcaaggagcatgtgccgcgcatcttcaccgccttgcagcaggcccgtgaaggagccaaggcggttgccgccggttatgacggccaactgcgtattgccctgtccgatggcatcacgccgccgcgcctgagcgcctttctggcgaagtgccgggacgatgaccccgaagtcggaattcatctggccgagataccactctcacagcagatcgaaggactgcgggccgacctctacgacgcgggattcgcgcaatcggatgacgtgggtgacggcctgctggcggtgcccgcatggcacgatccgctggtggtcgcggtgcccgccaagcatcctctgctgacccataagcgcatcccgctggaagaagtcctgcgttatcccatcgtgatgggcgacccgcacgcttgcgagggctattgccgccggattgcacgggtgctgcgcaccgtggatgtggagccgctggtggccgaagaagtcgcgtcgcttgacctgatgctgaccttggtttcggctggctatgccttggcgctagtcggggcatcacagatcgccgcctgccgttcgccggatgtgtccagccgcccgctggcaggcatatccccggtcctgacaacctatcttctgcgggccgacacggttccctctgaaccgctgtcccgcttcatcgagcgcgccatttcgggcgtttctggcccgcaccgctga

SEQ ID NO: 329098 - DNA, 2514 bp, Pseudomonas aeruginosa
atgccggatcaaccgcaagctaaacgcccgcatttcattcttcgagacacatcccaagccgttgagttcaaagcgcactctgctggtggcagatcgacgcgcgacgtgccagccctgccccggcagcagcacggtgcgtcccttcgcggtcagatcgaaaacttgaagcccgcagcagcggaggctgtgcaagcccagcgagacctgcaactggaaagcgggctgggtttgcaaatccagttctccagccagccggacgtcgaactggcgttcgagagcctggcgaatgagaccaagaagatcgagcttctcagcgttcgtcacgagggcagccagaccttcgccaatgtctttgtccctgacggggcgctcgtgcactttgagaaatacgtctccgactatctggtggagaagaaagacagtcgcggccaggcgcgtgaccaccggaagttgctggatgccatcgactccattcgggcagcatcagtccgagccttgtggactgatgatcccgacctcttgcctgctgatttgacgactgccttttggtgggaggtatggctgcctgttcgaggtcaagggcaacggcaggtcgtcgtggaagatttcaagaagctcgcccgcttggcagaatgtgtcgtcagcgacaaacaggtcaacttccccgagcgcacggtactgctgatgtacggatcgcagcagcagctttctcggtcggtaatgacgctgaattgtgttgccgaacttcgctatgccaaggaaaccgccgaattcttcgatggcatggacgtgggggagcaacgggaatgggcggacgatttgctgcgtcgtgcccagttgccgccgtcggatgatgcagttccccgcgtatgtctattggactccggcgtgacgcgcgcgcatccgctgctggagcctctgatggatgcgggagacctgcatacggtggagccggcatggggcgtggatgacgaggcggatcacggcacgggtctggccggcctggcggcctatggcgacctcacagataccctttcatctgctgactcgatcagcgttccgcatcggttggaatcggtcaagctggtgcccgcggaaggtgccaatgaaggcgatgcacgtcaccatgcctatctttttaccgaaggtgtcgcacgccctgaaatttccgccccgaatcgggcgcgcgtgtttgcatcagcagtgacggcttcggactaccgtgatcgcggccgtccttcgtcctggtctgctgctgtcgatggtcttgccgcagataccgatggggcgggtgacagtccgcgtctgttcgtgctgtccgcaggtaacacgcgcgatcccaatgcgtgggccgcgtatcccgatagcctcgccaccaatcttgtccatgaccccggccaggcatggaatgccatcacggtgggggcttgcactgacaagatcgacacggaagaccatccctccttgaatcccgtcgccgaagccggtggcctcagccccttcacgacaacgaccagaacgtgggatcgggcatggccattgaaacctgaagtggtgctggaaggtggcaatgcggccaaggatgaccttggtgcggtcggcatggccagcctgaacttgctgacgacccacaaccagccgctggatcgcctgttcaccaccagcaacgctaccagcgcagcttcggcattgtgtgcggggatggcggcgcagatcatggcggcctatccgcacctccgaccggagaccgtgcgtgcgttgttggtgcattcggcgcaatggagcgagaccatgcgcgggatgttcttgcccgcagtgccgaacaaggatgactatgttcacctgatccgtcactgcggatggggagccccggacttgaatcgggcgctctggagcgcaggggattcgctgactttgctggttgaagatcaggtgcatccgtatgcgaaggttcagggcaagggcatcgtgacgcgcgacatgaatctgcattccttgccgtggccgaaggatgagttggaggcgttgcaggacacgcccgtggaaatgcgtgtcacgctctcctatttcattgagcccaatccgtcggcgcgtggcgctgcatcgaagtatcactacccatcgcatcgcctgcggttcgatgtgcagcgtccgctggatgcgtccaccgagagctttgtcgctcgggtgaatgctgcggcccagcgcgaagatgagggcgatcctgtgaatccctccgatcccaactggctgctgggtgaacggcaacggcatcgtggttcgctgcaccaggatgtctggaaaggcaccgcggctgaattggccagccgtggcttcattgctgtctatccttcggcagggtggtggcggacgcggcctgcgttggaacgctacggcctgccagcaaggtatagccttgtggtgtccattcagacgcagcagacagacgttgatctttacgctgctgtcgcccaaaaaatccctgcggctaatgccattacggtggatacgtaa

SEQ ID NO: 329099 - DNA, 1032 bp, Pseudomonas aeruginosa
atggctaatgccgaacaactcaaggcgttggtgaaatcccatatcgaacgggatgaccagcacttctattctgtcgccatgcaggttgcggcccgtgaagcgaaggtgggccacggcaagctcgccgaagaactgcgcgacatgatcgacgcggcgaaagcccgtgtctcgccgggtggccccgagggcaaactggtgccgttggcccgcccgcgtggtgaactggcgaatctgctgacggtttcctatccgaagaatcgactttctgacatggtgctcgatgcggagatggctgaacagcttggccgcatcatgaaggagcaaaagcaccattcgcgtatccgcgagcatggtttgtcgccgagacgtaaattgctgctggttggcccgccgggcactggcaaaacgatgacagcctccgtgctggccggtgagcttggtatcccgctgttttctgttcgactggatgccttgatcaccaagttcatgggagagaccgccgccaagttgcgtcaaatattcgatgccatcaatgatgtgcggggcgtttacttttttgacgagttcgatgctatcggctcccaaagaggactggccaatgacgtgggtgagattcggcgggtattgaacagctttctgcaaatgatcgaaggcgaccagtcccatagtttgatcgtcgcagcgacgaaccatgtggagatccttgactacgcactttttcgccggttcgacgacgtgatcgagtatcggcttccgagcgcgccgcaggccaccaagctgatccagtctcggcttgggaagttcgcgcccaagcccttcccactcaaagccatcacagccaaggcggaagggttgagctatgcggagatcagacgcgctgtggacgaatccatcaaggaggccgtgatgcacgacgaggagcgcgtgaaggcagacgtgctgacacgcgccttcgacgagcgccgcaaattcagcctcagaatgaacaacaagaaggtcgcgccgaaccatgccggatcaaccgcaagctaa

SEQ ID NO: 329100 - DNA, 219 bp, Pseudomonas aeruginosa
atgctcgagaacaataagcgtgacccgacactttcgacggtcacaaaaattgccgaggcgttgcgtgtgcctgtcggcctgctgttcgttctggctgccgaccagaatgaactgggggcgatcgacgagaacgtcgccgatcagttgatgcagtctgcgctggcgtcgctgggaacatcgaccaacaagacagcgcaggtgggaggtcactatggctaa

SEQ ID NO: 329101 - DNA, 1218 bp, Pseudomonas aeruginosa
atggcaaagatcaagctcaccaagtctgcagtcgatgcggcacacccccaggcgcaggccatcgaactccgggatacgctggtgcctggcttcttgtgcaagattaccccagcgggccgcaaggtgttcatgctccagtaccgcaccaacgcgggcgagcgccgcaagcctgccttgggcctgtacggtgaactcactgtcgagcaggcccgcgcactggcacaggaatggatggccgaggtacgccggggcggcgaccccagcgcggctaaggccgcagctcgttctgcgcctacggtcaaggagttgtgcggcaagttcatggaggactactccaagcagcgcaacaagcccagcacgcaggaaggctaccagggcgtcatcgaccgcaacatcatcccgatgctgggccgcatgaaggttcaggacgtgaagcgcccggacatggcggcgatgatgaagaagatggcccacaagccggccgacgcgaaccggacgttcagcgtcatgcgccgcatgttcaatctggccgaggtatggggctatcggccagacggcaccaacccttgccgccacgttccgatgtaccccaacggcaaggccacccacctcatcagcgacgaggacatgggcaagctgttccggcagctcgaccggatcgaggccgaagggttggagaactacgtcatcccgttggcgattcgcttgcaattcgagttcgccggtcggcgcggcgaaatcgtcaccctccaatgggattgggtggacttcgagaaccggcgcatcgtctggcccgatagcaagaccggcggcatgtccaagcccatgagcgaggaggcctaccggctgctttcgacagcgccgcgtgtggcaggctgcccctatgtgctgccgtcccccaatcatcccggccagcacctgaccactggcgagtattacaacggctggagccgtgcactcaaggcggcaggcgcggcgcatgtcgggacgcacggcatccgccaccgctcggcgaccgacattgccaactcgggtatcccggtcaaggtcggcatggcgctgacggcgcataagaccgtggcgatgttcatgcgctacgtccacaccgaggatgatccggtgcgcaaggccgccgaactggtggcgaaccggcgcaagacggtggtggcgggcaagcagcccggtcagcaggccagagaggaagcggccttggcgtga

SEQ ID NO: 329102 - DNA, 702 bp, Pseudomonas aeruginosa
atgagcgaggccgagcaggcgcatatcgtcgccgcctacagcttcgaactgtccaaggtcgagcggcaatcgatccgtgagcgcgaagtcaaccagatactcctcaacatcgatccgcaactggccgccagggtcgcggcgaacgtcggtgtgcagctcgccgcgccggccaacccggcaccgcagccgaagccgtcgccggcgctgagccagatgaacctgctgtccggcgacatccgttcgcgcaaggtggcgatcctgatcgccgacggcgtcgccgagagcgacgtcagcgacctgcgcgacgcgctccgccaggagggcgcggacgccaagctgatcgcgcccagcgcttcgccggtgcaggctgaaaacggcgccgaactgagccctgagggaacctgggacggcctgccgtcggtagccttcgacgcggtcttcgtgcctggcggcgcggccagcagccaggccatcggcgctgacgggcgcggcctgcactacctgctggaagcctacaagcacctgaagccagtggccttcgccggcgatgcccaggcgctggccagccagctttcgttgcctggcgaccccggcgtggtgctcggcgccacggccaccgatgtcttccccggcctgcgccaggcattgatgcagcaccggatctggcagcgcgaggcggcgaccaaggcgatccccgcctga

SEQ ID NO: 329103 - DNA, 243 bp, Pseudomonas aeruginosa; identical to SEQ ID NO: 318880

SEQ ID NO: 329104 - DNA, 828 bp, Pseudomonas aeruginosa
atggcgaagatcaagctcaccaagaccgccgtagagtcggcgcaaccccaggccaaggacatcgaactacgggataccgtggtgccgggtttcctctgcaagattaccccgaagggccgtcgggtgttcatgctccagtaccgcacgaactccgggcagccccgcaagccctcgctgggcctgttcggggaactgaccgtggagcaggcccgcgtcatggcgcaggactggctggccgaggttcgccgaggcggcgaccccggcggcgccaaggccgaggcgcgcaaggcgcccacggtcgaagcgctgtgcaagaagttcatggaggactactccaagaagcgcaacaagccgagcacgcagcgcggctatcaggccgtcatcgaccgctgcatcgtcccgctgatcggccgcaagaaggtgcaggacgtgaagcggcccgacattgccgggctgatggagaaactggcctacaagcccgccgaggcgaacaacgccttcggcgtgctgcgcaagatgttcaacctggccgaagtgtggggctaccgcccggacggcaccaatccctgccgacatgtccccatgttcccggccggcaaggctacccgcctcatcaatgacgaagaaatggcgcgcatcttccgccagttggagaagctggaggcggaaggactggagaactacgtcatcccgctggcgattcgcctgcaattcgagttcgccggccgccgctccgaaatctgcatgcttgaatgggttgggtcgatctggagaaccggcgcgtggtctggcccgacagcaagaccggcggcctctccaagcccatga

SEQ ID NO: 329105 - DNA, 417 bp, Pseudomonas aeruginosa
gtggtctggcccgacagcaagaccggcggcctctccaagcccatgagcgcggaagcctatcgactgttctcgacggcaccgcgccgagaaggttgcccctacgtcctgccttcgcccaacgacccgaccaagcacctgacctttggcgagcactatggcggatggtgccgggtgctcaaggcagccggcgtcccacacgtcggcacgcacggcatccgccaccgctccacgaccgacattgccaattcgggagtgccgaccaaggtaggcatgaagctgacgggccacaagaccgtggcgatgttcatgcactacgtccacaccgaggacaagccggtgcgggatgctgccgaactggtggcgagtcggcggcaggccatcacgggcgcgcggcgccctgcggaggccacggcatga

SEQ ID NO: 329106 - DNA, 300 bp, Pseudomonas aeruginosa
atgagcaagaggacgctttcggtggcgccccccgctgccttggcggccgactatccccgttccgcaatttccgagacagtgtctgggaaattcggcctcgccgagctggccaaggtcttcacgctgccgtggtcggcctatgcgctgctgatttcggtcaaggatgcccgcggatcggtggccggcatcccgtccagtcggctccgattgtcgtgccggcgtcacgacaatcgggcgggccatcccttctatctaggtgctacaccggagactggaaaagtatgcccgtttcgggtatag

SEQ ID NO: 329107 - DNA, 384 bp, Pseudomonas aeruginosa
atgacggtcatcctcaagcgcaaggactttgcacgctggcagtcgggcgagaagctgtccgatgccgcgttgtgcaaggcggttcaggagatggaaagcggtctgatcgacgcggacttgggcggctccctctacaagaagcgggtggcccgccccggtggtggtaaaagcggcggctaccgcacactggtatcggccaggatcggcagccgctacgtgttcctgcatgggttcccgaagaacgacaaggcgaacatcacgcaggacgagaagaaggcgctgcaattcgccggcaaagcgttcttgcaactgtccggggaaacgttatcgaaggcgttgcagtcgggcgtgttattggaggtgcattgtgagcaagatcattga

SEQ ID NO: 329108 - DNA, 303 bp, Pseudomonas aeruginosa
gtgagcaagatcattgaatccctgcgtgacgacctggccacgcttcatgaagtgggtgcgatcagcaaggtgacgatgcgcgagttcgacgcgatctgcccgccgccagtgcgggagtttggcgccgaggacattaggcgcctacgggagacgctgaaattcagccagccggtgttcgcgcatcacctgcacacctcggcctcgaccgtgcgcaagtgggagcaaggtgaaacccgacccgctggcccggcgctgaagctgctcaacatcatcgccgacaaggggctccgggcgatcctttga

SEQ ID NO: 329109 - DNA, 468 bp, Pseudomonas aeruginosa
atggcagagaaaaggaacgtgtttatcagccatgtccataaggacgatcatgggctccaaaagctcaaagatctgctggctccgaaagggatggatgtaagggactcctccatccatacaggaaagttcaacaacgccacggatgagcattacatcaagacgcagattctggccccagcgataaactgggcgggcgtatttatttgctacgtctcaccccagacgaaagatagcgactgggtgacctgggaaatcgaatatgcagccaagcaaggcaaacgtattgttggcatctgggagcatggtgagaaggaatgcgacattcctgaggcactgaaagaatacgccgatgccttggtcggctggaatggtgactcaatcattgatgcgatcaacggaaaagatacatgggaaaaacccgacggtggcgcctgtgatccggttcctctgaaaaggcatccctgctga

SEQ ID NO: 329110 - DNA, 627 bp, Pseudomonas aeruginosa
atggcacgtgtccactcctacgtggtgcggtacgacagtggtttcgcacccaatcccttttacgaatactgcacgcttgcaacctgcaagccaaatatccgcaagggcgctgacatcggtgattgggtggtaggcagtggcagcaatgatcgaagtgttcggcgaggcgggtatctggtttatgcgatgcaagtcaccgaaacgatgacatttgatgaatatggggcagatccacggtttgaatctaaaaagccctatcgcaacggtagtcggaagcaaagttgcggggacaatatctacttcagagccgcaccagcggccgtctggcagcaacgagattcctttcactctcgccccgatggttcacttaatcctgatcacgtcactcgcgacacgggtgtaaacagggttctcatcagcaatgacttcgtgtacttcggaggagaggggccggagttcccggaagagctaaaagaccagcaaggccggtctctatgcaaaacaggaataggtctaactacttttgacgatccaaaactgattgcgaacctagagcaatgggttcgtagctttgggctgaatggatatcagggcgctccattcgaatggctgacgcttcggaggtaa

SEQ ID NO: 329111 - DNA, 1131 bp, Pseudomonas aeruginosa
atgcacaaggaaggttctctgctgctttcggactacgcttcggaaattgcagctacggatgtactcagtccaaccgatttcaatcctgtccttcaagggctttatggggaagtcggtggaataatgtctactgtcaaaaaacatgtccgggaaaaatctgcgtaccctggtttcagaagggcggcggaagaagaattcggtgatacgctttggtatttggctgcgatctgccggcgcatgcaagctccacttgaagatatctttgccgaggcggcgaatcacgggaacttcaagaacataggggcagcaagcgacatagccgaaggtgcattcgcttacatcgccatgcctgtggcggcccctgcgtcgttggacattaccttggtacgcttggggcaggcggccgcagctctgctgggaagtgggcctgcgcgcaatgacgtggtcaccttcgcgcgagcctatctcgatgcaatccatgccgcagagttggcgttctcggacgtagcgcgggggaacctccggaaagctaggggtgcattcttggagccacaggcggttgacctgattggccttgatttcgatagcgagtttggaatagaagagcagctccctagagagttcaagatccgagtcaatcaacgcggtagcggcaaaagctatctccaatggaatggcgtattcataggtgatcccctgaccgacaacatcgctgaccgagatggctaccgatttcatgatgttttccattttgcatatgcagccatcttgcattggtcacctgtaatacgggcattgatcaagcacaagcgaaagagccagtccaaatatgatgaagagcaagacagcggccgggcaatcgtcgttgaggaagggcttacggcatggattttctctagagccaaggaattaaactattttgagaatcaagaaaaggtttcccttgggattctcaaaaccattgaagagtttgtgagtggctatgaggttgagaagtgcccgctaaagctttgggaaaaagccatcatggacggatattccgtattccgtcaaatcaagaaaaatcaaggcggctggatcatcggcaaccgaaaagaacgcaccctacaatatatgccgcttgagtcttaa

SEQ ID NO: 329112 - DNA, 663 bp, Pseudomonas aeruginosa
atgaaaatccacccctttgttgaatcagtttcctcgctgcaatttgaggactgcttcaatccttattctgatcgctgtgaagttcatgatcgtcgagacgcgccccgccgccgcgccgccgcactttccgcattattgcgtcgcgcttcagaggagcctgtagatgcgatttggatcggtcgagatttggggtatcgcggaggccgccgaactgggttggccctgactgacgatgttcacatgagccaacatgccaaacgttggaatgtcgatctggctccagaacggcccacagtcggcaatgccgtagccgagcgaaccgctgcggttatatggggaatgctagagcacattgatgctcgcatctttctctggaatgttttcccacttcaccctcatgaatcaggggatccgttcaccaaccggcaacacaacgcccgtgaaaggcgagccggcgaagagctactacaacagctcatcgttctgcttcgtccctcgcgcatcgtcgccatcggcaacgatgctgccgcagccgctcatcgaatcacggatagcgtgcctgttatctgcgtgaggcatccgagctatggcggacagacgcagtttcaagggcaaatctctgaactgtatggacatccaatgaagactggatcgctgttctga

SEQ ID NO: 329113 - DNA, 231 bp, Pseudomonas aeruginosa
atgatcgaaagccgccgtttcagcgcagcggtgttcgtcggcggcatggaggggatctatgaggagcataaattgttcgtcgaacaccatcccaaagctacagtgctcccgctttcaacaacaggggccgccgccaaaataatttatcaacagggagaatatgatccaattttttcacgcgaccgaacctattccagcttatttcgtcgaaagcttctgcctgtggattag

SEQ ID NO: 329114 - DNA, 1188 bp, Pseudomonas aeruginosa
atgagcgagaactcaagcatgagatcaccctaccagcttatcctgctgggtgcggtccatgggcatgacactcgcctccgccgtagcgttgatctggcgcttcaggggctcgggattccgagcaacgcaattacgtttctcagcgatgccaacgcctctaaccgcagcttaaaatcgccggtgatggcagtatttttcggctcgtcggaaagcactgccgataccgcacttgtgacggagttgattgatgactcgatcgttatcgctccggtcgtttcggatttgtcccaggttcatgcagaaattccgccgcagctcagacatgtcaatgctattgtattgggcaccaacgatgaaggcatcacccgcctcgttacgctagtccttgagacatttaggctgttgcgacgtgagcgacgacttttcatcagttacaaacgaacagggtctcagccgctggccgatcggttgtacgatgcgctcgatgctcgtggctttgacgttttcatcgacgtgaggtcagtgcctccagccgcagatttccaatcacaactctggcacaggatgtcggattccgatgtcgtggtgctgatcgacacacctggcttcagagaaggtcgttggacggctgaagaattggcgcgcgcaaacgcgaccaatgtgcaaatcttgcacctactatggccggggcaaaaggaagaccctgcatcgtccttcagccacttcatgaagcttaggcgtcgggacttctttggatttattccaatgcgggggcgttgggccacgaagggattggtgacgagaatttgcgacgaggtcgaacggctacgcgcaccagcaattgccgcccgccaccgatatttggtcgataacttttgcgacgccgcccgcgacgagggacttgatccaagtgttcagattgaaggctggatttctctcaaaaccgagtccaatcgaacgctggcgatcgtaccggcagtgggaataccaaccgctgatcgcatcaacgaagtgttcgaagccattaccaaccccactgttgagacgagagaaatatgggtgatttacgacaatagaggtgtactgagaacgtggctctctcacctagattggcttgactcgtatttgccgatccgggccgtgcaaatgtcgaaggcgccacaacttctgaaggagctcaccgcatga

SEQ ID NO: 329115 - DNA, 477 bp, Pseudomonas aeruginosa
atggcgaataaatgctttctgagctttcactataaacaggatagttggcgcgtgtcgcaagttcggcaaatcggagctatcgaaaaacagcctctactggattcgaacaaatgggaagaaatcaagaaagcaggcgatgatgccatcaaaaaatggatcgccgacaacatgaaaggcaaagaatgccttgtcgtacttgtgggcgagaagactgccagccgccgctgggtcaaacacgagataaagaaagcctggaaggacgggctgggtgtactcgccatccatgtccacaatctgaaagactcagacggaaatcagtcgtcgaaaggatctaatccgtttacaggcctcaccgttgatggagaagctgtcacgggtaaagtctacgatccgccatacaccaccagcaccaatgtgtatgactacatcaagtcgaatattgaaacttgggtcagcgacgctataaaggcacgatga

SEQ ID NO: 329116 - DNA, 828 bp, Pseudomonas aeruginosa
atgcaactcgcatcccgattcgcttcccgttccccgtcgctgcgcagcgattacccgctgtccgatgaccaaatccgccgtgtggccccgtccatcttcgcggacgcgccgcacgaaagccgttccgaacggtacgcctatatccccaccgccgccgtgctggcggaactacgcaaggaagggtttgaacccttcatggcagcgcaaacccgcgtgcgccacgacgaccgccgcgactacaccaaacacatgctgcgcctgcgccacgccagccagatcaacggcgcggaggctaacgaaatcgtgctgctgaactcgcatgacggcacgagcagctatcagatgctggccggaatgttccggttcgtgtgcagcaatggccttgtctgcggcgacacggtggcggacgtgcgcgtgccccacaaaggcgacgtggccggttccgtcatcgaaggcgcttacgaagtcttgcgcggcttcgaccgcgtgcaggaatcccgcgattccatgcgcgccatcaccttgaacgatggcgaatccgaagtgttcgcccgcgccgcgctggccctcaagtacgacgaccccgacaagcccgcgcccatcacggaatcgcaaatcctgatgccgcgccgctttgatgaccgccgcccggacttgtggagcgtgttcaaccgcacgcaagagaacctgacccaaggcggcctgcgcgggcgcagcgccaacggacgccgccagcaaacccgcccggtacagggcatcgaccagaacatccgcctcaaccgtgcgctttggctgctggccgatggcatgcgccagttgaaagcctga

SEQ ID NO: 329117 - DNA, 1563 bp, Pseudomonas aeruginosa
atgcaccagcgcggccagcgcgacttgcggatgccgggcgacttcgatttgcagcgcggcggtgcggtgcgcgctcaaccgctgcgccagccggtcggacaggctcgcggccttgggctgctcggtgtcctcgccttcgtcgtcgttcccggcctcgccttccgcgctgccgaaaccctgccgcaagcgttccagcgtgcgcagcgccttggcttctgcctcgcgcagcagcccgcgatgaatcacggcttcgccgctgcggtcgagggtgacgatggcgccggccacggcgcgcacatccggggcgtagccctgcaaggcttcctccacggcttgcagttccccggcaacctgttcgcggcgcggttccagcgcttcggtcttgtcctcgtcctcggcgtcgtaggcttcttccagttcggtgtcgatcttgtcgaggcgggtttgcagcgaggcgatgcggcgggcttcgcgggcgctcggttcgcggcgctggcgcggtgcgttctggaacgcctgccgctcggcgtagctcatgtgcggcacggcttcgacccacgcccaaccctcggcgcgcacgtccccagccagcgcatccagcttgccgcgcaccagcgtttccagcagcgtggcgtcggtcaggtaggttccggcatcgccttccgcgaacaggtcgcggcggatgccgccgcccgccgccgtgtaggcgtccagcccggcgaagcgcaccagcggatgcgtggcgtcgatttcgcgttcggtcaggcgttcgcgcagcgcggacgcgccacgctgccattctggcgcaccgtagaacgcgctttcctgcgcggcgtggtcgtcggtgatggtcagggccatcaactgttccagggtgacggctccggcgcggtagtcggccagcaggcgcggcgagacgttggcgagtttgagacggcgctgcaccaccagcggggtcacgccgaagtcggcggcaatgtcttcgatggggcggccttccttgaccagtgcggcgaacgcctcgaactggtcggccgggtgcatctgctcgcgcagcaggttttccgcgaggctgacggtacgggccgaagcatcgggcaccagcaggcacgccacttcgtagtcggcagggatgcgcttcttcttcgccagcagcttcaacgcggtcagtcggcggtcgccggccaccacttcgtactgctcgccatcggcggcgaggatgacgacgagattttgcagcaggccgatgcgggcgatgctcgcggccagttcgggaatggacaggcgcggggtcttgcgtgcgttgcggccagcaggacgcgacaccagccgcgacagcggaaccaaaatcaggttcttgctcgggtcggccacttccagcggcgcggcagtttcgatggcgcgggtttcggtttgggtaacggcgttcatggtgataactccttgcggttagggatgcagcagcgagagaagcggcaagggctgctgcctgcccctgccgcgtgggggttcaggctttcaactggcgcatgccatcggccagcagccaaagcgcacggttga

SEQ ID NO: 329118 - DNA, 777 bp, Pseudomonas aeruginosa
atgccacaagcagacctcgatgggccgctgcaagatttcaaggagcggacaaaacaaattcgtgaagtagttgcagctgtggaagcggtaggtaagactccctcagcgattggaacatctagaccactagtagattttaatagcattggagcacaaacaagcaacacagccaactccatggcattaatttttctagcatccacttttgaagagtttgtccgagaaataaccattcaatgcgccaatgaattgatggacaaatatgcctcatttccggaagcacgcaagcacagtgtgcgtgaagcatattggaaagcatcacgagaacagttgaagtatgcaagtatactttcaaacaaggtcccggatgctacgctcatagcaaagttgcgaggagctttagaggcacagcaagggtttgttattggaaatgatccgacaaaactttccgtgcaagtattcccccatcactccaataacttcaaacccggaattgttactgagatactggctaggcttggcataaacaagacccttgaaacaatggcagaatacgcaaagttaaagtcttattttggagtcacaagaaaagaagattgctgcactagaataaagacaaaatggatcgagttctatgatcgacgtaacgagacagtgcactccctaggaggcacgactggcttcgcaattgaagttatttttgactacattgaattcctagaactagtggcggaatcaatgagagcaactgtgggacgtgctatctcaacatggtag

SEQ ID NO: 329119 - DNA, 1218 bp, Pseudomonas aeruginosa
atgcccatcgaaccacgtgacgttgcagaagatattgacgaggacgaggagttagtcgataccgaggaattagatgagtcctcagattcggtcattgatgaagatatgggaagccaacctttcagggttgtttatcaaactaataattttttcttaccccaaattcgtgaccttattactgatggcgaagatttcaatcttcgccctgaatatcagcgccggctccgctggtcgaatcaacaaaagtctcttctgattgagtcgttgctattgaacgttccaattccgtcagtttttctatacgaaaacgaccttgcccgatatgaggtaatggatggacagcaaagactgaacgcaatcaaagaattcttgagtaatgattttgcgcttcgcggactgcaaatagttccgtcactgaacggaaaaacatataataagttgcctcctaaggttaagcgaaacttagatcgcgcatcgatttctgctattgttctgctgcaagagtcccaagggaaaattcgaaaagcgggcgcctcaaggttttatgagctgcgccgttttgttttcgaacgtttgaacaccggtggaaaaagacttagcgctcaggaaatccgaaacgccatctatggcggcatttttaatgagttaattgtcaaactgtctcgcgatgtgactttcaccaaaatatggggcatcccaccatattccaagtcagatccaaacgaatactatgaggatgaggcgcgacagaaaaacactttatacaaaaccatgggcgattgccaattagtattgagattcttcgctctccgagatgagtcatttattcagggatcaatgaagtctatgctggataaatgcatgcagcgatacattgattgcaccagcgatgaagcggcgacactgggggaaagatttttatccgtattgcatttagcggacgagttatttgacggccaccccttctgtctaacattaccacgccggggggtcgcttatcgcccagtggctggtatttacgacggcgtgatgattgctcttgacgaagtctggggctctcgcgataaacttttgcttaacaagaagcttatcaaagctgattacatcaatctaatctccaaacacggcgaaggcgttctcactggctctgcgaacactgccgctgatataaaaaatcgaatcgaaattttccgtaagttctttggtgactacctttaa

SEQ ID NO: 329120 - DNA, 654 bp, Pseudomonas aeruginosa
atggctatcactctcattttgggttgcaagcaaggtgacttcaacgcacggcatgatggctcctgcgaaggcatttccttttatttctgcatgcgcgcgctcgacctgggtccggtgccaggacttgccgacctgatgcaacagcggaatatcggtgggaaggttgagcgaatcatggatctgcaggaccagatctgtggtggtctcatgagttccggcacctatgaaaccggtatcgacggcgtgccgatcagcaaccccagcgggggcaaccttcccggtattcgcaatcagggcaaggcgatccaggcgtttcataacctctactcacaggaggcacagaccctgggatgcaaatcgattggaaccttgtcttccttcttcgagggaggcttcgtccagttgctgacgcacaccatccaactgttgattcgcagccggcgcggcgcggccctggtcgccatgcaaagccctacgccccactcggtggcgcttgcctatgacggtagcgatctctatttcttcgatcccaactccggcgttcacgaattgacgaacctcgcctcggcagctacggaactggagaaccacctgacgacccgctatgcagtcccctattgcgttcacgccaatatgttcaagttgaaccactga

SEQ ID NO: 329121 - DNA, 357 bp, Pseudomonas aeruginosa
atgaccgcgcgccggctgacccgggccgagatgaaccacctgcgccgcctgatcggttggattcgttgcgaggtaggagcagagcccgaggaaatcgtcaccgccgccaaagaggctctcgtccacttccaatgcgtgacggaggacggcaagcagcggctgctcgagcactaccagaaatcagtagccataccgaagtacatccgatctgcgctcaaggccctggagaaggtgtgcctggaagaaccggccgaggtggttgacggtgagttggttgcccgcaggcggcacgaagcaccgcaacgcctggccgtagcgcgcaacgaagaggagatagggaatgggaagctcgattag

SEQ ID NO: 329122 - DNA, 192 bp, Pseudomonas aeruginosa
atgagaggctccgatattccgccaccaccagggtatcgccccaccccgctcgccaccctcggccagcagttggtccgcctgggccaggcgatgcagaaccccaacaccaagctcggcgagttgaccgaactggtccaggcctgcggcgtcgacctgcggatctgcgacacgaacaaggagagccggtcatga

SEQ ID NO: 329123 - DNA, 492 bp, Pseudomonas aeruginosa
atgagcaaggtcacccttcaccccgagtggcgccaagccgcgaaggatctcgccgcccagttcaagtatggcgacctggtcactctcgactggctgcgcgaggccttccaactggaagagccacagaccatcgaggagttcaagtcctaccaactggacttcctcagttgcatggatgccctgcgccaagagctgctggtggaatatcagctttcgctgaggaacatccgcggcgcagggtacgagctggtcaacccgaacaaccaagtagaggttgcctggcactcgacgttcggcaaggtgcggcgcgaactgggcaagctcgccggcgccattcgctacatccgccatgacgagctcaccgacgagaagcgccgagagcacgcggacgcccaggcaaagctgtccggcgttcacgccttcttaacccgcgagggatcgcgaaagctggggcagttctctgccgcgaccaagactgcagggagcaactga

SEQ ID NO: 329124 - DNA, 585 bp, Pseudomonas aeruginosa
atgcagacgatcaaactgaagctggtgggccagtcgccgctgttgatgcacggcgaccggtttgcgaatcccttggacgaggcgactaagcagcacaaggtgctgaccaacaagcgcaagaagctcgacgaggatcacgccgacatcgccaaaagcgagtggatggggtcgctctaccatgaccaggaagttggcgtgttcgtgcccggccagaacatcaagagcgccctggttggcgcggccaagatccagcgcctgggctcggccttcaagcgcgctgtcctggtcctcgatgacaaatgcaagctggagtactcggggccgcgagaccccgaagcgatcttcgccaatccccgcttcgtggatgctcgcagcgtggtggtggggacctcccgcctcatccggtatcgcccgaagttcagcgactggtcgaccactgtcgagatcatgtactcgccggagatgatcgagcgcgatgatgtgatccgcgcggccgagaacgccgggctgtttgtcggactctgcgattatcgccccgagaaaggcggcgccttcggccgattcagcgtcgaggttctgccatga

SEQ ID NO: 329125 - DNA, 123 bp, Pseudomonas aeruginosa
atgaacctgattccatacgacttcaacagcaagcaggtgcaggtgctcgtcgacgagagtggcgagcgtcgggttgaagttcgtattgcggccaggcgaatggagagcggctacgcagcctga

SEQ ID NO: 329126 - DNA, 291 bp, Pseudomonas aeruginosa
atggacaagctcgaaatcgaatacgccctagccaagcaggttcccgacatggctcgcggcttcaccatcgcgaccagctatggcgagcttcacgtcagcgccgttgacgcccctgtcgtgatgaaggtggtccgcgatctactcgagagtgagctcgagcgggccaaggtgcacgagcggcaggaggccgacccggagcaaccaagcgccacgccatacccgcgccagcccggcgtatcgatcttcgacgtgatcacgcgtacggcccctggcatgcgcgaccgagagtaa

SEQ ID NO: 329127 - DNA, 384 bp, Pseudomonas aeruginosa
atgacaaccgccaccatcaccgcacatggtttcaccggcttcctcggcaagggcctgtccctgcgtgagcttcagtgcgtcctgggcatcgctgcgggtcgtacctcgaaggagctggctcgcgatctgggcatgcagccgggcacggtgggtaagcgcgtcttggcggcgaccaccaagctcggggtaacccgacgtgccgccctggtagctgaagccatgcgccgcgggcttatctcgcccgccgtgatcgcccttgccttcctcgtcgccggtcagccactgctcaacgatgaccacatgatgcgcagccgccgtggcggggagcgtcggattgagtttcgagtggctgcgcgccgggttgaaacctggctgaccgcataa

SEQ ID NO: 329128 - DNA, 339 bp, Pseudomonas aeruginosa
atgagcaacgttgaactgtgggaaagcggcgagctcgggacgaccgaagcgcacgcccaagtctccactggctcaaagcaagaggtggatgacgcgctcggcctccaactgatttccattcgcctacaaaagcaattagtaaacgatctcaagaagattgccgagtaccacggagtcggctatcagccgatgatccgcgacctactcaatcggtttgctcggtccgagatcaagaaaatcatttgtcagcgactgaatgaaatcgaatcttccgaggaaactgttagcgaatccagcaccgctccggtgaaggagttcctcgaaaaaatgagggcgtaa

SEQ ID NO: 329129 - DNA, 480 bp, Pseudomonas aeruginosa
atgcctttatccacgtgggaagaaggtgatccacttgatctcgacgaggtagagatcccctacttcgacgaaattcaggtggctgcgggcggtggcagatttccagatctggagctcgcaaagcgcaaaatcaggttcccgagatccgtgctgcacgaatcaggagtgaatccgaaatgcgccgtctgcgttaacgtcaccggcaacagcatggaaccgctcattgccgacggagccgtcatcgggatcgatatgtcagtcaacgcgatcaccgacggcgagatctacgccctgaagcatgacgacctgctgcgggtgaaattcgtctatcgcctgcctggcggcggcatccggttgcgcagctacaaccgggacgaataccccgatgaggaatacaccagggaccagatgcgcgccggcggcatcagcgtgattgggtgggtcttctggtggtcggtgatgcgccggcggcgacactga

SEQ ID NO: 329130 - DNA, 351 bp, Pseudomonas aeruginosa
atgcaacagaaaactcaaagcgcgcaagtcccctgcgccgttaccactgaccaccaggtttgcttcgatcctctcaacggggatgagttcttgttctccattgttgccgaccggccggttgacgcggctctggccgccgccgaggacatcagcgaggcggttcacctgattcttttgagaatgacccgggcgatggacgatgccggggaaccgctgctctctcaggaactcaatactctcgccctgctggggagcatggctggcgcattgctcagagcttgccgggccggtgtcgcgacccaatccagaaatgctgaaaacgtgtcgcgacacgaaggcggtgcggcatga

SEQ ID NO: 329131 - DNA, 309 bp, Pseudomonas aeruginosa
atgaacctcgcaaacctgatcaataagcagtgttcccgcgacccctctgaggtgctcacggaagagcaggcgatgtctctttggggggagcgtgaagtagcccggcaggctgctcagaacatggcgcttggtgtcgccgctgtcgggaacctgctggcgaacgttggcgctgaaggcgaagtaggccaggaaacctcagagcgtctcggttggtttctggaggagatcggggggggcatcttccagttggtggagctcgaacaggtcctctcggatcgcatcaaccggcagaaggagcggaagcaatga

SEQ ID NO: 329132 - DNA, 336 bp, Pseudomonas aeruginosa
atgactgagctcgatatcaagaagtctttgcgctcgaggagagggctggtcccggacactccgtcaaggctgtgcgggacgtttagctacggcttgcactaccacggcccgcagcaggttctggacgattttcttggtcgggtagagcgcgagcaagatcacgccaagcgattaatgcaggcacagcgcacgatcggcgcgctgatggcgttgtcggcggcgaaggtcagtccggcttgcgcctggtacacacaccgcgacgtgttccgacgcctcgctgaccttaccggcgaaacggaaaacgcactggtgcagatggcgggagtagagcgatga

SEQ ID NO: 329133 - DNA, 186 bp, Pseudomonas aeruginosa
atgaagctcagagcaacgctgaaaactgaagtgggcctcgagggagatggggtcttcattgttcaagagggcagtcatggcgagcagcaatacgtcgaattgtccgccggccaggcaatgctcgtaggagcggagctcctgcgccttgctcgtgagcttgaagggagcagcgatgtcgtttcctga

SEQ ID NO: 329134 - DNA, 1008 bp, Pseudomonas aeruginosa
atgtcgtttcctgatccgatgactccggccgactgtgacctgcgggatttccagttcatgccgctcgacattgcccgcctctttggttcggagtttcacgcgcgggcctcggatggagagtggagggcagggcttaccttgtggctcaagtcttaccaccaggtgccggcgggcagtttgcctgatgatgatgttgccctggcccgcctggctgaatacgggcgcgacctgaagtcctggcgagcggtgaaggatggtgcgctacatggatgggtcaagtgctctgatggccggctctaccatcccgtggtcgcggagaaggcgctggagggctggctgcagaagttgcatgccaggctgcgcggcggcaaggggaatgccaagcggtggaaactgccgttcgacgccaaggtgctggaggacaagataagcgaggcggcccgtctgctgcgcgagcttaacccgtcttccaccatcgatcattctccgatccctgatgcacagaaagaggaatgcacggcgagtccttcaagcatccccgaagtatcgagcgagcaatccaccgaggatcgcaagggacagggacagggacagggacagagaaaagatcaagagctggcgccgcaggagcagcgcccaacaccagagtccgagcagccccctccagccgtcaggcctaagcgaggctcccgcttgccggaggactggactctgccggatgactggttggcttgggcgttggccgagcgtcctgagttcggtgaggccggtctgcgcaaggtcggtgagagcttcggtgatcactggcgatccgcaaccgggaagaacgcgacgaagctcgactggttcgcggcctggcgcaactgggtgcgaaaccagcggcctccgttcggcgcgcagcgcgctggacctcctcctgcttcgcctcatctgggcctcgaccagaccaaccacgaagagggcctggagcgccaggccgacggcacctaccgaattgcgagaccatga

SEQ ID NO: 329135 - DNA, 282 bp, Pseudomonas aeruginosa
atggctgtgctccagacccacaaggtcgtcgcgcagttgcctgcggtgctggagccgaacgcgatctacttcgtccggcgcagcaccggatacgaccagttcgtgaccaacggcgcgggcgtcgtggtggcatacccgatgaacgtccgcatccccgcggctgttcctgggtatctcgccgatggctccatgcttcggctcacgatgagccctgacggccaactgccggcctataccgcaggcggcgcaactctcaacctacaggtgcttttcaatggctga

SEQ ID NO: 329136 - DNA, 234 bp, Pseudomonas aeruginosa
atgatcgactggagccaggtaaagaccgctgaacagcaggcgcaagaacgctggcaggctgagtacgatgccgcagccgtggctcgggcaaatgcctaccgcctggagagtgacccgctcaagaccgaggccgagttcgatgcgatcaaagccggcaccgagccggactacagcgcctggatcgccaaggtcgaggagatcaaggccaggtatccgctgcctaaggctgattag

SEQ ID NO: 329137 - DNA, 987 bp, Pseudomonas aeruginosa
atgaatacccgcaatttttccctgccgcagttgcagaacctgcccatcgaagaagcacgcatcgttgccgatgcgctggccgtccacgctacttcccgccagatcgatagcgccgcgagcaagctggccgcgctggccgaggcagggctcaagggcgaccgccaggcctatgccgcgtaccagcagttgctctacgtcctttcgttgagcgacgacgtggcgaccgcccagacccggcgctggctggcccgggcgatctatcgcgtcgaagagcgtttcatgcccgccgccgatctttccagggcgttgtccgaggaggatttccagaagcgactcgaacaggaaatcgccgcgcagtcccgcgagcggcacccgatgtcgcagtacgtgttctccggctcggcctcccgcgcgcagctccaggtgttcctccgtcaccagtggttccgcaccttccgcctgtaccgcgatgcggccgacctgttggtcaacctgaccgatgtggacgaggccgcggcgctcgcgcgttacctctatggcgagttgggcgaggaagacgaaaagggttcgcatccgcgcctgctggccaagctgctcgaggccatcggccttgaggcggacttccaggccgtgtcgacgatgcccgaggaaatcgcctacctgaacaatcgcgcccgtgccttccggcatgccgaggtcggttgggggctggcggtgttctacatcaccgaactggtcgtgccggggaaccacgaaaagctctatcgggccctgctccaggccggcctgagcgaggaccaggcggagtactacaaggtccacatcagcctcgtaccgccgcgggccaagcgcgaatggcaactcatcgcgcggcggattccggacgtgcagttccagaatgcgttcctgacctcgctatcgcagcacttccgtgtggaaagggcctattacgacgcgatctgggaagagatgcagagcgtcaagtga

SEQ ID NO: 329138 - DNA, 1434 bp, Pseudomonas aeruginosa
atgccaagtcacattacggaatcccgtatacacgggggcgcctactcgtccccggcattcgccgcgatcttttccgataccaaccaggtgcggaggtggctggatgtcgagcgagccttggcggcgacccaggccgagatgggcatcatcccccacgaggcggcgcgggagatcgaccgcgccgcccaggtggagcgcttcgacctcacccaactgggccgcgaaagcctggagacagggcacctactggtgcctaccatccgcgccctggcgaggtcgtgcgagggtagctggggggagtacgtgcactatggcgtgaccacccaggacatcctcgacaccgggctgatgctgcaggtcaaggaagcctggggccatgcgctcgggctcctgcactcgatccgtggccatctgctggcgcttgccctgcgccaccagcacacgccgatggttgcacgcacccacgggcagcaggcgctgcccacgaccttcggctacaaggtcgccgtctgggtggatgaaatcgaccgtcacctggcgcgcttcgacgaagcgcgcgaacgcgtcctggtcggcaacctgaccggtgccgtgggaaccctggcgtcgttcggcgcccagggcttcgagctacagcggcgaaccctggccaggcttggcctcggcgcgccgtcgaccagttggcacagcgcccgggaccgggtgctggaggttgccgggttgctggtccaggtgtcggtgacgctgggccgggtggcgaacgagatctaccacctgcagcgcagcgaaatcgacgaggtacgcgagggcagccggccgggacaggtgggcagcagcaccatgccgcacaagcggaacccgtcgtcggtcgacctggtcagcgcgctgtcgcggctggtgcgggcacagatggtggcgctcaccgatgccgcgttccagttgcacgagcgcgacggcaccgcctggcgcatcgagtgggcggcgttgccggagctgttcgtctacgccggcgccttgctgacccgcatggaggcggtgctggccgaggggctcgaggtgcgcgaggaacgcatgcgcgccaacctcgacctgctgggtgggctgatcctgtcggagcgggtcatgctcgcgctggcggggcagttcggcaagcagaccgcccacgaactgctccatgagataacccaggcctcccagcggcagggcgttccgttccgcgaggcgctgctcgggcagccaaggttgcgcggctgtttcagcgccgaggcgctcgaagaactgctcgaccccgtcggctacgtcggcctcgccgcggagatggtcgacctggtcgccgacaaaccacgaaccggcgcgtcgggcgacaggcccgaaggcgccgcctcttcccaaggaaatcccggtcagtcccagtacgtgatggaggataggtga

SEQ ID NO: 329139 - DNA, 1452 bp, Pseudomonas aeruginosa
atggatgctgaatcgctggaaatgcttgcccgttcctcgtgcaccgcgcatccgcagagcttcggcggcgcaccggccgagtcgtcctgcaagcacgaacacagtcacatcgttgactctaaaacccatggcggcggctacgccggtccggtgagccgccggatcttctgtagccactgccgcctgcaacgctggctcgacgtggaggcggcgctggcgctggcgcaggccgatgtcggcgtcattccgcccgaggcggcgctggagatcgcgaaggccgccaggctttcggccgtcgacctgcagcagatcgccgacggcgtggccagcaccgggcactcgctgatgcccctgctgggcgcgctgcaaaggaactgcagccccagcgcgcgcgagtacgtgcatttcggcgcgaccacgcaggatatccaggacaccgcgcagtccctggaaatgcgcgatgtgctggatgaaacggagcgggcgctggacatcctcctggaccggctctcggtgctggcgagcgggacccgcaatgcgctgatggtcgccaggacccactcgatcccggcgttgccaaccaccttcgggctgaaggtggccggctggatcgacgagttgctgcgtcaccgcgaacgcctgggcgaggcgcgcaagcggatcctggtggtgcaactgttcggcggcgtgggcacgatggccgccttcggcgacgaggccatgctcctgctcgaaagcttcgcgcggcggctgtcgctggacgtgccgctggcgggttggcacgtgtcccgcgaccgggttaccgagttcgtcagcaccctggccatggtcaccgcgtccctggcgcggatcgccgacgagatccgcaccctgaaccgctgggagatcggcgagctggaggtgggctggacgcagcagcagatcggtagcagcaccatgccccacaagcgcaatccggaaggctgcgagcaggtcgtggtgctggcccggctggccaaggcccaggtcctgctcgcgttggacgccatgatcctcgagcacgagcgggactaccgcggcacgcgcctggaatggtgtgcggtggcggacgtttcccactatgcgctgatggcgctgtcgctgctgaccgacaccatcgacgggctcacggtccacgacgagaccatggcgcggacggcgaatgcatacagcgatgcgatctgtaccgaggcgttcgtcttcgagatggccaagcaactgggcaagagcagcgcttacgaaatcatcttcgagatcacccaggcctgccagcgcaagcggattccgatgcgccaggcgctcgagtcggatccgcgggtgggcgccgtcatgccgaaggaaaccctggccaggctgttcgagccgcggacccatctcggcatggccgggaccatcgtcgacaaggtgctggacaaggtcgccagccaccactga

SEQ ID NO: 329140 - DNA, 1074 bp, Pseudomonas aeruginosa; identical to SEQ ID NO: 321891

SEQ ID NO: 329141 - DNA, 852 bp, Pseudomonas aeruginosa
atgagagcgacgtcgttgagcatcctcacttccgagcattcgctacctgtagccgctcctgcggatagccgtctcgaaatcgaattccgcggcgtcgccaagcattttccgggccgcggcaaaagcgcggcgaccctcgcggtgcaggggctcgacctggccatccgccgcggcgaggtggtgtccatcatcgggccgtccggttgcggcaagagcaccctgctgaacatgggggcgggtctctacgcacccagcgaaggcgaggtgcgggtcggcggcgagcgggtcagcggtccggtacgcaaggtctccttcatgttgcagaaggacctgctgatgccctggcgcagcattcgccgcaacatcgagctgggcctggagatcgacggtcgcgcggccggcgaacggcgcgccatcgccgaggaaatgctggagaagtgtcacctcgccggtttcgccgagcactatccgttccagctttccggcggcatgcgccaacgcgccgccctggcccgaaccctggccaccgacccgcaggtgctgttcctcgacgagccgttctcggccctcgacgcgcagaccaagatgatcctccagcaggacctggcgcggatgctctgcgagcaacgcaagaccgcgctgttcattacccacgacctggtcgaggcgatcgccatgtccgatcgcatcctggtgatgagcgcgcggccgggcaccatcgtcgaggagatcgaggtcggcctgccgctgcgcgacaacccgctggagcgccgcaagctgccggagatcgggccgctggtcgggcgcctgatgaccctgctgaaagtgggcgagagcgccgagctgcactga

SEQ ID NO: 329142 - DNA, 1008 bp, Pseudomonas aeruginosa
atgtccaagtcattgctcaacgccgcattgtgcggcgcgttgttcgccgccggcctgaccgtccaggccgccccgcgggaagtcacctacctgctgccggcaccgccgaactcgccggccttcgcaccctgggtgatcgcccgggagaagggctactacgccgacctgggcctgaaggtgaccttcgtcgccggcaagggcggggtcgacgtggccaagcagatcggcgccggcaacgcaccggtcggcggcgccatcggcgatacgccgatcgtggtgcgcgccaacggcatcccggtgaaagccgtggcggtgctcggtgccggcggggtgaccatgatcgccaccgatggcacggccggtatcgacagcgtcaaggacctcaagggcaagaccctgaccgtgatgtcctactccgacaccacctactacgccctgctggcgtcgatgcgcaaggctggcctgggcaagtccgacgtggacatccaggcggccggcccatccggcgtctggcaactgttctccgccggccgctcgcaggccatggccggcgtgccggactgggtggtgagtgccgaggatgccggccggcaggtgaagttgctgccgggcagcgaggtgttcgagagcatggcccaggcgatcctcgcctcggacgaggccatcgagaagcagcctgaggtggtcggcggggtggtcagggcgaccctcatgggcatgcgcgacatcatcgccgacccaaggcaggccgccgccaccttcgctgccgcggtgcccgcctacaagggccgcgaggccagcctggaacgggtcctgcggctctatgtcgagcacgtctacgccaaccagcagccgctcgggcacatcgatccgcagcgcctggacaaggttcgcaggttctacgtcagcgaaggcatcgtcggccgcgagacgccgctggacgagctttacaccaaccgtttcgtcgagtccgccgacctgaccgcgcagcacggagcccgcccatga

SEQ ID NO: 329143 - DNA, 777 bp, Pseudomonas aeruginosa
atgaacctctccaccagacccttgctcggcagtctcgcgctgttgttcctgttcctcgctgcctggcagtgggggcccggcctgctcggcatgcccgagttcgtcctgccggggctgagccgggtggcggcggagggcgtggccatgtggcacggcgccggactgctggagcacacggcgatcaccagcctggagatcgtcgtcggtttcgccctgggcgcgctgcttggcgtgagcatcggcgttgccctcggcctgtcgccgaccaccgaggccatgctctcgccctacatcctggcgctgcagatcgcgccgaaggtggccttcgccccgctgttcgtgatgtggctgggctatacggtgtacccgaagatcctcatcgccgtgctgatcgtgttcttcccggtgatgatcaacgtgctctcggccatccgcaccgtcgacccggacatgatcaacctggtgcgcgcgatgagcgccagccgttggcagatcttccgcctggtggagttcccctcggcgatggccgcgctgttctccggcctgcgcatcgcctccaccctggcggtgatcggcgtcaccgtcggcgagctggtgggcggcaacaagggcctcggcttcctgctggtggatgccgaagggcagggcaacaccgccggggtgttcgtcgccatcgtcatgctcaccctgatcggcgtgctcgcctatggcgcggtggtctgggccgagaagcgcgtcctgcattacctgccgaaagccaacctgggcacggtgtga

SEQ ID NO: 329144 - DNA, 762 bp, Pseudomonas aeruginosa
atgagccagaactctcttctcgacggtcgccgcgtgctcctcaccggcggcgcccgcggcctcggctacgccttcgccgaagcggcggcacgcgccggcgcccgggtggtgatcgccgacatcctggaggaacgcgtgcagcgctccgcccgtgaactcgccgagcagggcctggatatcagcggcctgccactggacctggccgacccggtttcgatcgagcgctgcgtggccgcggcggtcgagcgcctgggcggtctcgacggcctggtgaacaacgcctccatcaccaactccggcggcaagagctgcgaagaactggagatcgaggtgttcgaccgggtgctccaggtcaacgtgcgcggcacctggctgatgacccgtgcctgcctgccggcgctgcgcgagtccggacgtggcgcggtggtcaacctggcctccgacaccccgctgtggggcgcgcccaacctgctcgcctacagcgccagcaagggcgcgctgatcgccatgacccgcagcctggcccgcgagctgggcggcgacggcatcaccgtcaacgccatcgctcccggactggtggaggtcgaggccaccgagtacgtgccggccgcccgccaccggctctaccgcgagcagcgcgcgctccagcgcggccaacagccggcggatgtctgcggcgcggtgctgttcgccctttccgacctttcccgcttcatcactggacaaaccttgccggtcaacggcgggttcgtcatgccctga

SEQ ID NO: 329145 - DNA, 531 bp, Pseudomonas aeruginosa
atgaccgatctgaaccagaacgccccgaaatcctgggaccgccccgaaggcgccagcttcgaggagtggtgcaacacccgcatcgcccgttactccacccgcaagtacgactggaacgcgctgaagttccaggccgactacgaccccaggttccgccgcgcgcagatgcgctacatcggcaccggcggcaccggtgtggccagtgacatgaacaccattccgtccgagcacttcaccttttccaccatggtcatcccggcgggtcacgaaggcccgccgcacctgcacatcgacgtcgaggaagtgttcttcgtcctgcgcggcaagctcaaggtggtgctggagaaggacggcgagcgcttcgagaccatcctcaccgaccgcgacgtgatttccgtgccgccgggcgtgtaccgcgaggagatcaacatcggcgacgaggatgcgctgatgtgcgtgatgctcggtgcgaagaagccgatcaccccgacctacccgccggagcaccctctggcgagcatcaagcgctga

SEQ ID NO: 329146 - DNA, 870 bp, Pseudomonas aeruginosa
atgaacatggcgcagacccacacccccgtcccgaacctgcaacagcgctttcccgagcggctggtgcaactggccgacggcgcccagctggccatccgcgaatgcggccagggcccggtggtggtgctgttgcacggcatcggttcgggttcggcgtcctggctgcattgcgcccagcgcctggccgccggcaatcgggtgatcgcctgggacgcgccgggttacggcctgtccacgccgctgccgccggcccggcccaaggcctgcgactacgccgcgtgcctggagctgctgctggatgcgctgggcgtggagagctgcctgctggtgggccactccctcggcgcgctgatggccacggcctacgccgccggcatcggcgcggcgcgggtgcgccgcctggtgctgctcagcccggcgcgcggctacggcgccgccgagctgcgcgacagcggcgcccaggtgcgccgccagcgcctggagaacctggagcgcttcggtatcgacggcatggccagcgagcgcaccgcgcgcctgctcggccgcaaccccagcgaggaggccctggcctgggtgcgctggaacatggcgcggctcaaccccgagggctaccgccaggccgtcgagctgctctgcggcgacgacctgctgggcaacgggcagcctgccgctccttgcgaggtgcattgcggcgaggacgacggcatcaccacgcccgagagttgcggcgccatcgcccgccagctcggcgcgtcgttctcgtcgattcccggggccggccacgccagcccgatcgaacaacccgaagtggtcgcaggacgcatcggccacgcgcaacgcctctctcttgaaggaaccgccaatggataa

SEQ ID NO: 329147 - DNA, 834 bp, Pseudomonas aeruginosa
atggataagtcagacgattcgcaagacaagtacatcgtgcctggcctcgaacgcggcctgctgctgctctgcgagttcagccggaaggaccgtaccctgacggcgccggagttggcgcggcgcctgaagctgccgcgctcgaccatcttccgcctgctgaccaccctggaggccatgggcttcgtcacccgcaacggcaacgagtaccgcctgggcatggcggtgttgcgcctgggcttcgagtacctggcctcgctggagctgaccgaactcggccagccgctgctgaaccgcctgtgcgacgagatccgctacccctgcaacctggtggtgcgcgacggccgttcgatcgtctacgtggccaaggtttcgccgtccaccccgctgagcagctcggtgaacgtcgggacccggttgccggcccacgccacggtgctcggccgcatcctgctgcaggacctgagcctgggcgagctgcgcgagctgtacccggaggagcagctggagcagttctcgccgaacaccccgcgcagcgtgctggaactcttcgacatggtccagggcgaccgccagcgtggcttcgtccagggcgaggggttcttcgaggcgagcatctccaccgtcgcggcgccggtacgtgatcacagcggtcgcgtcatcgcggcgatgggggcgaccatcgccgccgggcatatcgacccggaacgcatcgagggactggtcagccgggtgcgcagcagcgccgacgagctgtcgtacctgctcgactaccgcgccgacggccaggacaacgtcaccccgatcttccggagtcgcccgcatgaaaccgtatga

SEQ ID NO: 329148 - DNA, 798 bp, Pseudomonas aeruginosa
atgaaaccgtatgacctgtccgaggcggtggcggtggtcaccggcggttcctccgggatcggcctggccacggtggaactgctgctggaggcaggcgccgccgtggctttctgcgctcgcgacggcgagcgcctgcgtgccgccgagtccgcgctacgccagcgcttccccggggcgcgcctgttcgccagtgtctgcgacgtgctggatgcgttgcaggtgcgcgccttcgccgaagcctgcgagagaacgctggggtgcgccagcatcctggtgaacaacgccggccagggccgcgtctcgaccttcgccgagaccacggacgaggcctggagcgaggaactgcaactgaagttcttttccgtcatccacccggtacgcgctttcctgccgcaactggaaagccgcgccgacgcggccatcgtctgcgtcaactcgctgctggccagccagccggagccgcacatggtggctaccagcgcggcccgcgccggggtgaagaacctggtgcgctccatggccttcgagttcgcgcctaagggcgtacgggtcaacggcatcctcatcggcctggtcgagtccggccagtggcggcgccgtttcgaagcccgcgaagagcgcgagctggactgggcgcaatggaccgcgcagctggcgcggaacaagcagattcccctgggacgcctgggcaagccgatcgaggcggcccgcgccatcctgttcctcgcatctcccctgtctgcctatacgacgggcagtcatatcgacgtttccggagggttgtcccgtcatgcgtaa

SEQ ID NO: 329149 - DNA, 1683 bp, Pseudomonas aeruginosa
atgcgtaacgcaagccaagtcaccgtcggcgccgccatcgccgccttcctcgaacagtgcgaggtgaaggccgccttcggggtgatctcgatccacaacatgccgatcctcgatgccttcgccagccgcggcaacatccgtttcgtgatggcccgcggcgaggccggggcggccaacatggccgatgcctacgcccgcaccagcggtggcctgggcgtgtgcctgaccagcaccggaaccgccgccggcaacgctgccggggcgctggtcgaggcgctcactgccggcaccccgctgctgcacctgaccgggcagatcgaaaccccctacctggatcggagcctcgcctacatccacgaggcgccggaccagttgagcatgctcaaggccatctccaaggcggccttccgcgtgcgcagcgtcgacaccgccatcagcaccctcaagctggccgtgcaaaccgccctgaccgcgcccgccggcccggtgagcgtggaaatcccgatcgatatccaatcggcgctgatcaacctgccggccgacctgtcgccgctgccggtgccggtggccaggccctccgagcaagccctggacgacctagccgagcgtttcgcccaggcgcggcgaccgatgctctggctggggggcggtgcccggcatgccggcccgcaggtacaacgcctgctggccatgggcgtgggcgtggtcaccagcacccaggggcgtggcatcgtcccggaagacgacacgcgttccctcggcgccttcaacctgaacaaaccggtggagcggttctaccagagctgcgacgccatgctcgtggtgggctcgcgcctgcgcggcaacgaaaccctcaagtacgaactcaagctcccgcgtccgctttaccgggcagacgccgatgccacggcggagggccgctgctaccccagcgatttcttcgtctgcggcgattccgaacgggtcctcaaggggctcgccgaccgcctggaagggcgcctgtcggtggacccggccttcgccgcggatctcgccgccgcgcgcaaccaggcccgcgcccagttggtggacggccttggcccctacgcttcgctggtggagcaactgcaggcgctggccggccgcaatttcaactgggtgcgcgacgtcaccgtctccaacagcacctggggcaaccgccacctgaatatcttcagcccccgcgccggcgtccacgccctcggcggtggcatcggccagggcctggccatgggcatcggcgcggcggtcggcgcggcggaaaccgcgcctgggcgcaagaccttcgtgctcgccggcgacggcggcttcatcctcaacctgggcgaactggccaccgccgtgcaggagcgggccgacatgctcatcgtgctgatgaacgaccagggctacggggtgatcaagaacatccaggacgccgcctacggtggccgccgctgctacgtcgacctgcacaccccggactacgcccaactgtcggcttccctcggcctgcgtcatgccaaggtcagcgatctgaaggatttcagcgccgtgctcgatggcgccctggccgagccaggtcccttcctgctggaggtggacatgctcgcggtgggcagcttcaagagcattttcgccggcccgccgaccaacgatgccaagaccgacaaggccaccgcctga

SEQ ID NO: 329150 - DNA, 804 bp, Pseudomonas aeruginosa
atgctgaatatcgtcatgatcggctgcggcgccatcggcgccggcgtcctggaactgttggaaaacgatccgcaactgagggtcgatgcggtgatcgttcctcgcgactccgagacccaggtccgccatcgcctggccagcctgcgccggccgccgcgggtactcagcgcgctgccggccggagagcgccccgatcttctggtggagtgcgccgggcaccgcgccatcgagcagcacgtgctgccggcgctggcccaaggcattccctgcctggtggtctcggtgggcgcgctgtccgagccgggcctggtggagcgcctggaagtcgcggcgcaagccggaggcagccgcatcgagctgctgcccggcgccatcggcgccatcgatgcgctgtcggcggccagggtcggtggcctcgagtcggtgcgctacaccgggcgcaagccggcgagcgcctggctggggacgccgggcgagacggtctgcgacctgcagcgcctggagaaggcgcgggtgatcttcgacggcagcgcccgcgaggcggcgcggctctatccgaagaacgccaatgtcgccgccaccctgtcgctcgccggcctcggcctggaccgcacccaggtgcgcctgatcgccgaccccgaaagctgcgagaacgtgcaccaggtggaagccagcggcgccttcggcggcttcgaactgaccttgcgtggcaaaccgctggcggccaacccgaagacatcggcgctgaccgtgtacagcgtggtccgagcgttgggcaaccacgcccacgcgatttcgatctag

SEQ ID NO: 329151 - DNA, 1485 bp, Pseudomonas aeruginosa
gtgattgacctgaacccgatccaacccatctgcatcgccggcgagtggcgagcgggcggcggcgacctctacgaaagcctctatccggccaccggcgaggccgtcgcccgcctgcatgcggccagcctggaggacgtggaggaagccatggccggcgcccaccgcgccttccgtgagagcggctgggcccagcgcaagcctcatgagcgggccaccgtgctttatcgtatcgccgcgctgatccgcgagcgcagcgaagaactggcgcagttgcagcgcctggacaacggcaagccgatcagggaaacccgcaacctggtggccagcgccgccgccaccttccagttcttcgccgccgcctgcgagaccctggaggaaagcatcacgccgtcgcgcggcgacttcgtcagcatgagcgtgtacgagcccatgggcgtggtggttgccatcaccccgtggaactcgcccatcgcctccgaggcgcagaagctcgccccggccctggccgccggcaacgcggtggtggtcaagccggccgagatcaccccgctggccgccctggcgctggcgcgcatctgcgatgaggccggcctgccgcgtgggctggtcagcgtgctgccgggcaagggcgcgctgatcggcgatgccctgacccgccaccccctggccaggcgcgtgtccttcaccggcggcacccgcaccggcaagcacatcgcgcgcatcgccgccgacaagatgatgccggtgtccctggaactgggcggcaagtcgccgaccatggtgctggccgacgccgatctcgaccacgcggtggccggcgtgctctatggcatcttcagttccagcggcgaatcctgcattgccggctcgcggttgttcgtcgccagcgagcgctacgacgaattcatggagcgcctggccaccggcgccgcggccctgcgcgtcggcaacccggccgacgagcgcacccagatgggcccgctgatcagcgcgcggcaccgcgagtcggtggagcgctatgtcgagatgggcgtggccgagggcggtcgcctgcgcacggggggcgtacgtccccatggcgcagccttcgatcgtggctacttctacaccccgaccatcatcgaaggcctcaccaacgacgcccgcctgtgccaggaggaagtcttcggcccggtgctggtggccatgcctttcgacagcgaagaggccctgatcgaagaggccaacgacagctgctacgcgctggccgccggcatctggacacgcgacttccagcgcgcctggcggctcggccgcgccgtgcaggccggcaccgtgtggatcaacacctacaagcagttctccatctccacccccttcggcggctggcgcgacagcggcctgggccgcgaaaagggccgcctggggatactccagtacatggagcagaagagcctctactggggcctgaacgaacagccgctggcctgggccggcagccactga

SEQ ID NO: 329152 - DNA, 966 bp, Pseudomonas aeruginosa
atgagcgtatcgggaatcgacgaaatcacctacggcgtggaagacctggccaccagcgcgcgtttcttcgccgactggggcctggcgcaggtcgaggcgagcgaggaccaggtggtcttcgaaagcctcaacggctgccgcgtgatagtcgcggcgcgggacaagcccggcctgccgccggccatcgaggaaggctcgaccctgcgtgaagtggtttggggcgtggagagcgaggcggacctcaagctgtacgccgagcgcatcgccaatgatcccggcttcatcgagggcgagggccgtatcggctgcaccgacccgaacggtctggccgtgcgcttgcaggtcacccgtaaacgcgacatccaggtggcctgcggccagtccaacacctggcagttcaagggccggatcaaccaggccagccccatctacgaacgtgcgcagcccgtcgaagtcggccacgtggtgttcttcgtcaaggacgtcaacgcctgcgaacgcttctaccgcgagcgcttcggcttcgtctgctccgatcgctatccgaatcgcggcgccttcctgcgttgcgcggaggagggcggccaccacgacctgttcatgctgcaactgccgcaaccgcgcgccggcctgaaccacgtggcgttcaccgtgcgcgatatccatgaggtgttcggcggcggcatgcacatcgcccgctgcggctgggataccgagatcggcccgggtcggcatccggtgtcctcggcgtacttctggtacttccggaaccccgccggcgccctcgtcgagtactacgccgacgaggaccaactgaccggcgagtggcaggcccgcgagttcgaacctggccctacggtattcgccgaatgggccatcgccggtggcctggacggcaatacccggcgacagaaaagcgtcgaggcaccgcagggccggttcctcaccgacaaacccaggagttga

SEQ ID NO: 329153 - DNA, 318 bp, Pseudomonas aeruginosa
atgagcgacaccttgttgctgaccgtgctgctccggcacgaccagtcgaagaatctcgacgagatccaggcccgcatgaaggccatggactggtgggagcgctttccgggagagggcgtggcgatcgtttcttggaccgtcgccatgggcctcggccagatcgtcaccctgcgcctgccgccggccctgctgccacgcgtcaacgtcgaactggagcgctccgcctggggcgtgttccgcaccgaatgctacccgacctacgacttcgtcccggttcgcgaaaccatccgcgaacgggtccgcactggaggccaatga

SEQ ID NO: 329154 - DNA, 219 bp, Pseudomonas aeruginosa
atgcaagaccgttacctcgaaccccatcaggcccgtacccgcgagccgaacgccttcgaagacctgctcggcgattccatcgagcgcgcctacgccgccggcctgcacgacctgccggggctgctcggctacctcaaccaggccggcccgacctgcccgggcggcggtccctggaccgaggaagcctacaagaccctgatggcccgcctgggcgcgtga

SEQ ID NO: 329155 - DNA, 1020 bp, Pseudomonas aeruginosa
atgagcaccgtgaaccctgttgaacagcttctcgccaacggcctgaagaacctctggtacccgatctgcccggtgggcttcatcgaggacaagccggtgtccctgcgccgcctgggctacaagctggccgtctggcgcgataccgacggcaccctgcatgccctcgaagaccattgcccgcaccgtggcgcgccgctgtcgcgcggggtgaacctgggcgaccgcctgcaatgcccctaccacggcgtggaagtgcgctgcgacggcgttaccgcccgcgtgcccggcagccccggctgcaagctggaaggcagccaggccacgcgcttcttccacatcaccgaggcggccggcgccgtgtggctgtacaactcggcgggcaatgtcgaggaagccccgccgctggtgctgcccgagcaactgaccgaccccgagttttcccacttcctctgctataccgagtggcgcggcgactaccgctacgtgctggacaacgtcatggaccccatgcacggcacctacctgcacaagcagtcgcactccatgtccgagggcgaaagccaggcacgcttcgtcacccgcgacaccgacaccggcttcatcttcgagaaggacggccagcgcggggtcaacttcgactggaccgaatgggccgacaccgggatgcactggatgcgcctggagattccctatccgaagaccggcggcccgggtggcaacttccatatcgtcggcagttacacgccgatcgcccgcgacctctgcgcggtgttccactggcgttgccggccgctcaccggctggcagcgtgacacctggcggttcctctacaggaaccgcctggaggcgcgtcactgggcggtgctggagcaggaccgggaaatgctcgaattcatggagccggacgccaaccagcgggagaacctctaccagcacgacctcggcctggtgcgcctgcggcggcacctgaagaacctggccaaggcccagctggaactgatcgaggcccggcaactgtga

SEQ ID NO: 329156 - DNA, 435 bp, Pseudomonas aeruginosa
gtgaccgccgtacgccggatccgcgccgcggcgctacccgacctgccggatgcaagctggtccaatgccctgctggtgggagaggagctggtgatgtccggcatgaccgcgcacccggccacccgccaggccgccgagcgcggcgccgcgctcgacgcccatgcccaggccctggtggtgctgggcaaggtgaaggcgctgctggaggcggcgggaggccatgtcggcaacctctacaagctcaacgtctacgtcacccgcatcgccgacaaggacgctattgggcgcgcgcggcaggagttcttcgccggccagggcacttttcccgcctccaccctggtcgaggtgagcggcctggtgtttcccgaactgctggtggagatcgacgcctgggcgcgcctcgatatcgacctggcgaactgcgacgaagcctga

SEQ ID NO: 329157 - DNA, 957 bp, Pseudomonas aeruginosa
atgactcacgacaacagactggcggccttcgtccataccctgcgcttcgaggcgcagggtatcctcggcgtcgaactgcgcccgcagggcgaccaggtctttccgccattcagcgccggcgcgcatatcgacctgcacctgcccaacggcctggtgcgcagctactcgctgctcaactcgccggaggactgcggccgctatgtgctcggcatcctgcgtgatcgcggcagccgcggcggctccgcgttcgtccacgatagcctgcgggtcggcatgcaattgcagatatcccggccgcgcaacctgttcccgctggaggaaaacgctgcgcacagcgtactggtggccggtggcatcggcgtgacgccgatctactgcatgttcaaccgcctgcgtgcgctgggacgttcggtggaactgctctactgcgcgcgctcgcgccaggaagccgccttcgtcgaagaactggccgccagcgatgccgctatccagctgcatttcgacgacgagaagggcggccccatggatctcggcgccttccttggcgcacgggcgtccaccgcgcatttctactgttgcgggccgaccccgatgatcgatgccttcgagacgcactgcgaacgccttggccatccgcatgtgcacatcgagcgcttcgccgccgcgccccaggccccggcggcgccccagggcagctacgaagtgcgcctggcgcgcagcggcacgagcatcgaggtgccgagcggcaagtcgttgctcgacgccctgctggaagctggcgtggtggtcgattgcagttgccgcgagggcgtttgcggttcctgcgagacccgtgtgctggaaggcgagccggagcatcgcgacggcgtcctgaccaaggcggaaaagatcgccaaccagaccatgatggtctgcgtgtccggctgcaagggatcgcgcctggtgctcgacctctga

SEQ ID NO: 329158 - DNA, 1218 bp, Pseudomonas aeruginosa
atgaaaacccatccgctgttccccgtacttcttctttccagtctttcggccctggccgcttcgccgccgtccgaggcgtcgaagaccggcaagcctttcccgcatgtcggcctgcgcagcgacgacgggcgcagcagcctggatatcggcggcgcgctgcgggtgaactaccgcgacgaacactggaagagcacggaaaacaatggccgcctactgttcgataccttccgcctggatatccaggcaacccacgaggacttcttttccgacctcggctactggttccaggacgacggcaagcgggccatcgaccgcggcttcgtcggctatcgcttcagcgacctatccagcctgcaattgggcgcgccgttcaagccgttcggcctggagccctatccgcagttcggctggagctaccacatcccgttcttcctgggctacggggtcagcgccggcagcggcgccaagtacgtctacaaggacgccgactggcatgtccaggccggctatttcccacggatgctgccgggcggtgtgcgctattcgccggaagtcggccgttataccgacctggacgacaacgcggtcgcggcgattcattcgcggcaggacaacgagaaacgtgaccagctcaacctgcgggtcgcccgtaatctcgccggagatggctggaaaagcgagttgggcgcgtcgctggcggcctcgcgcctgtacaacgcgaccaccagggacgatggccgctactgggcggcggggttgcatggcgtgctcaacgccggcaactggacgttcagcggcgaagccattcgctacgctttcgatccgaagaacccggcgggcgtcagcgacgacgtggtactcatgggtaccaacggcctgaccccggcctacctgatggccgccagggcctcggtggcgtccttcaacgtcgcctacgacgtgccgacgccgaacctgggcatgctgaagaagctgcgcttctacaacgactacagccgcatgttcaaggacaaggccggctgggacgactcgcagatgtataccgcaggggtgcagttcttcgccttgccgatcatgggctggctggacttcacctggggacgcaacgccaatccctacggcggtgccgagagcggcacgggcttcagcagcaccagttcgtcgcgcagcaacgagtggatattccgcaccaacctgaacatcggctactacttctga

SEQ ID NO: 329159 - DNA, 1641 bp, Pseudomonas aeruginosa
atgaccgctgtcgacctgctgctggtcgcgaccctgctggcggccctgctcgcctggtggatacccgccctgcccggccaccgtggcctgctggcgctcgcctcgacgctggcgctcggcgccggcctgtacgctgcatgggacgaccgctggcaagccggcgtcggcgccttcgccggtttctccctgctgctcggcgcctgcctgcgccggaagcccgagcgcggcctgccgttccggaccggttcgctgtacggcctgctggtgctgctggcaatcgccgcgctgtacctgttcccggtcgcgccgctacctgcgccgagcggcccctatgcggtcggcgtgcgcgatttcgaactggacgaccccagccgacccggcctgctcggcgccccggccggacaaccgcggcgcctgctggtacgcgcctggtacccggcacgcccgatcgccggcaccgcgccgcgtcactatttcgacccaggcgaggcgcgcagcaccgcgcgaggcttcggtgaaatactcggctttccgccgttgctcgcctacctcaagcacctgcgcaccaattcctatccggacgccccgctgcgcgacgattccgctcgcctgccggtggtgttctacagccatggctacagcgccttcgccggcggcaactggaccctgatggaagaactggccagccacggctacgcggtctacgccatccagcacagcggcgacgcgtcgccgacccgcctgcccgacggcacgctgctgcccatggaccccgggctggtcgaacacctgcgccgggccgcccacgacggcttgccgcaggccatgcgccagggctatgtcagcgacgatctcgaccagcgcctcgacggccagttgcacaccgccctcgacctgcccgccccggccaaccgcgccgtcaacctcagcgcgccggtatggctggccgaccgcctgttcgtccatgaccgcctgcaggccggcgaggtcccggacagggtcgccgacctggtggccgccagcgacttcgcgcacaccggcgagatgggcatgtccttcggcggctcgaccaccggcgcggtctgcatggtcgaccgacgctgcgcggcggccgtcaacctcgacggcggcgacttcgacttcgcgcccttcgatagcgatttcccggcgccgctgctgatgctgcacgccgaccttggcaacttctaccggctgttcggcatcgaaccgccggcccgcccaagaagcttcaacgacttttcctacgaacgcttcgagcacgccggccagcgccagaacattcatcgcctggtactgcgcgattcggcccatgccgggcttaccgacaatccgctgttcatccgccggccgctacgcgacgggctgctcggctcggcaccgacggaggtcctcatccaggctcccaacgccctggtgctgggtttcttcgatcactacctgcgcggccgcgccaacgactttccgcaagcgcagatggcgcgcttccccgcctggctgacgcgctacgacaactcggcggtgcgcgactggtggctggccaagccggaagcccagcgcctggcgctgcgacaacgcatcgacgaaatgaaacggcgcaagaccgggctggatcttccctga

SEQ ID NO: 329160 - DNA, 612 bp, Pseudomonas aeruginosa
gtggtgcaaggcacctgtatggctctccatcagttcgcagatcacttggttcacgagttcgaaaacaagtttgagtccgagaccattaatgatctgttcggaggcggttacgagatagtggcataccacggtggtcagttccacaagatctcagacgtggcttacgtctatgcagaggcagaagtcgacgccgatggcatgcttcaggtcgaactgccaaaattcctgctcaagtccacctatcacggtgatgacctcaaaatcaggagcatgggaattcactacgacgagatagatgataattgcacaacccaaaatgaccggacgttcaccattgcccccattacccgtcactatgaaacccacgttgaagaaggctgcgaggacatcgaactttcaggggagtttctttgctttgtgatcaaagtgaagcttccaactggcagcttcacgattccctttatcagaaagtacgatggtcctatgggctttgcggaaaaagccttcaccgccattgcacgtcggaaccatgtgtatttcttctactcggataccctcaggagggagctacaagatcacgtactcgagtacatgcgcttgctccactcctag

SEQ ID NO: 329161 - DNA, 873 bp, Pseudomonas aeruginosa
atgaacgttctgatgattcatggaatcggtcaagagacttcgactaaggatgaactcctccagaagtggacagagtccatccactccagtcaactaggcttgctcgatggggcgttggtcgagatggcgtattacggtacgacgcttgccgactggacaaatggcaagacgaagaatgcagtcggtatgggcgtagagtccacggtggttgatgtcggtgatattgatgaattgaaattccttagcgccgtaatggaggagttcgccagcgaccatggtatcgaggaggctgagattgaggcctcgatagaaacggcggaaaatgatgtagtaccgatggataacttcatcgcaaggcgcctagtcggcttactgcgcgtggtcgagaagatttctccagccaaaggctcactccttcttcggataattaggcaggggtatacctacctttcttcacccggggcagcaaaggctgtcgatagcatcgtgcgaccattattacaaagaagccctcaggtgctgattacccactcgctcggaaccgttattgctttcaagttactgcgcgagatggaatcgaacggcactgaagttcagattccacttcttataaccatgggatcgccgctgggcctggacgcgctcaaggcgaaacttggggcgccgcggcgaaaaccagcctttgtggagcagtggatgaacttctatgacccatcggactttgtcgcgcttggaaagccgttgaataaggataatttcgcaagcaacatcgataacgatggcaccgttgataacaagaccttcaacgcccatggcattgttggctatctcccacacaagggcgtcatcgacacgcttaaacgcgttctatag

SEQ ID NO: 329162 - DNA, 1740 bp, Pseudomonas aeruginosa
atgaagctgtttttgaccatcggggtttcggaagcaccaccgctttcgcatttgccgggagcgattacagtcgctcgcgaaatgggtgactgggcacgaaagtccggatttgtcgcggaagtgattactgacgaaaataaaactccggtcacgattgcgcgtatccgtgaaacactgctcggaatgctttcgaccaacgacgaagtggagctttttattctgcacttcgccgggcatggatttcgatctggagcagaacaaaacgtttggctccctagcgattggcacaaggaaatgcgcgccatatctgtggagggactgaagagacaactctaccggcatggaataaagagcctgtcgatcttcggtgatgcctgccgatcattaccaacggacatcgatactgcggatattttcggtgaccctgtgctcccgagagggccatatgatgcagtggcccccattattgatcgcatcaacgcggttggggatggtcagcaagcgtacatgctgaaaggagatggagttgccccgcccaggtgcgttttttccactgttcttgtcgaagggctgtgcggtctcaaagacgaggcatttgacaagtataatccggattgcgtgattcccgagtcacttgcattgttctcgagggatcgattgaaggaaattggtgagacatacgatctgaaatgttctcccgattacgctaccggcatccctagggagcatgcgatttatttcaggcgcggtgagaatctagccgacctacccattcctcaatggcctgcgccaccttgccccctggttcacgcaccggataacaccggcgaagatttgcaggcaagtccccaccatattgagttccgagccttcaagcggcacttccgagacagcctgtcgctgcactactatcccgttacgctgggcatgaacctaactatccgcggcgcggtgccgaagaagatatggagcacatccccagttgaaaaatgcttgatcgatgctgatggagcaacctaccgagtacgaggcacggcagatggcgccatccaaatcctcgtcgaatttgacgatggcgtattcgcatcggccgtagtatatgagaacctcattacgctgataagtcgagacgaaaagggtgggataaattggacctgcatttctgaatttcctaaatccgagagggggctacgcacttctatcaatgtgatcgcggatcttcaggcgggcaatctctctgctgaccaagtggatgatatcgcggcaaaactgcgagaagcaaaacacatcgatccaaccttgggcgccatcgcgagctatttgtacgactacacgggagacatagatagcatacggcgtatggcgttctattattgcctgtacgctcaacccatgccgttcgacgtggcctttatggggctgctctcaaccaaagagcgccggggcggtattgtggcggaggtgccgccgattccagcaaggccgtggtcgcttgcaaatgataggttgcctggctgggttacgaaggcgaccgatggagaggaggggcgggttgcgggcctatggccttggctccgccagggttggcaattcatggaggatccagcgccgcaagaagaagcggctgcggaaggattgcgtgatgtcgctaaatttctgttgccgtcgcaattctcttcattcaaggaagagggggcgggaatactgatagataggtttaacatggaggcaagggaatga

SEQ ID NO: 329163 - DNA, 666 bp, Pseudomonas aeruginosa
atggcgctggaaggcaaggatgacaacggcatcggcgtaagcgccgtgcagaagctggtagagaccctggactcctacattccggagccggttcgtgctatcgaccagccgttcctgatgccgatcgaagacgtgttctcgatctccggccgcggtaccgtggtaaccggtcgtgtagagcgcggcatcatcaaggtccaggaagaagtggaaatcgtcggcatcaaggcgaccaccaagaccacctgcactggcgttgaaatgttccgcaagctgctcgacgaaggtcgtgctggtgagaacgttggtatcctgctgcgcggcaccaagcgtgaagacgtagagcgtggccaggttctggccaagccgggcaccatcaagccgcacaccaagttcgagtgcgaagtgtacgtgctgtccaaggaagaaggtggtcgtcacaccccgttcttcaagggctaccgtccgcagttctacttccgtaccactgacgtgaccggtaactgcgagctgccggaaggcgtagagatggtaatgccgggcgacaacatcaagatggttgtcaccctgatcgctccgatcgccatggaagatggcctgcgcttcgcgatccgcgaaggcggccgtaccgttggcgccggcgtggttgccaagatcatcgagtaa

SEQ ID NO: 329164 - DNA, 459 bp, Pseudomonas aeruginosa
gtggctaaggaaaaattcgaacgtaacaaaccgcacgtcaacgtcggcaccatcggtcacgttgaccatggcaagaccactctgaccgctgcactgaccaaggtctgctccgacacctggggtggttccgctcgtgctttcgatcagatcgacaacgcgccggaagaaaaggcccgcggtatcaccatcaacacctcgcacgttgaatacgattccgctgttcgtcactacgctcacgttgactgccccggtcacgccgactacgtgaagaacatgatcaccggtgctgcccagatggacggcgcgatcctggtttgctcggctgccgacggccccatgccgcagacccgcgagcacatcctgctgtcccgccaggtaggcgttccctacatcgtcgtgttcctgaacaaggccgatatggtcgacgacgccgagctgctggaactggtcgagatgtaa

SEQ ID NO: 329165 - DNA, 672 bp, Pseudomonas aeruginosa
atggacgcacaggaattgctggacgcactgcgaaagaagctcggcacgagataccagggagagttggccgaggcactcggcgtttcgctgcagacgctgacgaactggaagaacagcgacaagaaactgagtgtcgagcagatcgccggggctatcgcgaaatctcgccaggccgcggtgaaaacctcccagtacgaaaccatccgacctgtcgtggagttctacgggatagaacgctaccgttcgcgcgatgacaggaaatggcaactcttccaggcgaacaccctttatgcgcagggactcaaggacaagctgctggatgcccacggcatctacatcttctacgattcccgcgggcattccatatacgtgggcaaagcccgcgagcaaagcctctggaaggaaatgaacctcgccttcaaccgtccaagggccatccagaagatcgtcctggttcctcacccgaagagaaaccagacattcagtccaggccacgagaagttgcgacagccgaaggatactcagctggaactctgcgatctggcgtacttcttcagcgcctatcaggtcgttgacggaatgatcaacgatctcgaggctctcatggtccgggggttcgccaacgacttgctgaacgtgaagatggaaaccttcgcccatagccggagatga

SEQ ID NO: 329166 - DNA, 1356 bp, Pseudomonas aeruginosa
atgtctttcgatttcgatctgttcgtcatcggcgccggctcagggggcgtacgcgccgcccgcttcgccgccggcttcggtgcccgtgtcgcggtggcggagagtcgctacctgggtggcacctgcgtcaacgtcggctgcgtgccgaagaagctgctggtctatggcgcgcatttcagcgaggacttcgagcaggcccgggcctatggttggagcgccggcgaggcgcagttcgactgggcgaccctgatcggcaacaagaaccgcgagatccagcggctcaacggcatctaccgcaacctgctggtgaacagcggggtgaccttgctcgaaggtcacgcccgtctgctcgatgcgcacaacgtcgaggtggacggccagcgcttcagcgccaagcacattctcgtcgccaccggtggctggccgcaggtgccggacattcccggcaaggaacacgcgatcacctccaacgaagcgttcttcctcgagcgcctgccgcgccgcgtgctggtggtcggcggcggctacatcgccgtcgagttcgcctcgatcttcaacgggctcggcgccgagaccaccttgctctaccgtcgcgacctgttcctgcgcggcttcgaccgcagcgtccgcgaacacctgcgcgacgaattgggcaagaagggcctggacctgcagttcaacagcgacatcgcccgtatcgacaaacaggccgatggcagcctggccgcgaccctcaaggacggccgggtgctggaggcggactgcgtgttctatgccaccgggcggcggccgatgctggatgaccttggcctggaaaacaccggagtgaagctgaccgacaagggcttcatcgcggtcgacgagcattaccagaccagcgagccgtcgatcctcgccctgggcgacgtgatcggtcgcgtccagttgacccccgtggcgctggccgagggcatggcggtggcgcggcggctgttcaagccggaggagtaccgtccggtggactacaagttgattcccaccgcggtgttcagcctacccaacatcggcaccgtcggcctgaccgaggaggaggcgctgagcgccgggcacaaggtgaagatcttcgagagccgcttccggccgatgaagctgacccttaccgacgaccaggaaaagaccctgatgaagctggtcgtggatgcccacgacgacagggtgctgggctgccacatggtcggcgccgaggccggcgagatcctccagggtatcgcggtggcgatgaaggccggggcgaccaagcaggcgttcgacgagaccatcggcatccacccgaccgcggcggaagagttcgtcaccctgcgcacgccgacgcgctga

SEQ ID NO: 329167 - DNA, 1293 bp, Pseudomonas aeruginosa
atgaggaaatcggacatcggccttgtcagtctgggacatgggttgccctttccactcgacattgcgcaggcccggcattcacgctacacaacaaaaagctcgccaagcctctcagatcccagcatgagacacttcacaccacgtccggctgccgacaacaccatggacgagaatcccaagtccgagggattcttccttgccagcattcttctggacgcattggagacgctgcgcgcccgtggcatcgatgcagaagccattggccgggcgcttgatctgaacttacacagtctgctggccgaccccaatgcctggattccgactcatctgctggaaactattctgcacaaggcgctgcagctgtatcccgacccactcttggggctgcacgcgtcccaatcgccgcgcgactctgctttcggcgtactgggttacctgggacagacctgcgccaccctgcaggaggtcttcaccaccaaggcccgctacgaacggctggtgagcaacatcggtaccacttcgatgcgacaagagcctggcgtgatgctctgctgctggagctgtaacacctgtgacccgctattcgccaggcacgccaccgagttcctgctgggacaatggctgcggcacatccattcgatccgggagcagaaacacggcctgctgctgcgcgtacattttcgccattcgtcccccaagcaacccaatcttctggcggaatacgaacgcattttcggctgtcctgtcctgttcgatcagccagagtcggcgttggtgattccaaccaccgtcatgaggctgcgtctgcgtacccctgatcccggcctgcaagccactctgcagcatcacgccgacctgctgctcaatgaacgtaatggcgcgccgtcgctgctcgaccaaatccgttcacgtatgcgggtgttgctgatggaaggcagcgtctcccgagaccacctggcagaagagctcggcatcagcagccgtcatctgcatcgccagttgcagaaagccggcagcagctaccgcgaattggtcgacgatatccgcatcgaactggccaagaccctccttcgtgacgatgcactaaccgtagaggccatcagccggcgcctcaacttcaaggaaggtccctctttcaatcgctggttccgcgagatgacccaaaggacgcccggcgagtaccgccggcaattgcatgcccctgaggcctctatcgccccgcaggcgccactgtgccggggcgggacggcaagtccagcgacccgggaccgtaccttccgtctaaacgattga

SEQ ID NO: 329168 - DNA, 927 bp, Pseudomonas aeruginosa
atgaagaaactgatagctcccctggtactagctgccgccgcagtgggtgcaacccctgcatatgcatactccgattacgccaagaccaaataccctatcgtgttcgcacacggccttttcggcttcagcagcattggcccgatagattattggtacggcattcccagcgagctccggaaaaacggtgccaatgtttatgtcaccgctcaggtaccggcccagagcaacgatgctcgtggcgagcagttgctggcggagatcaaggagatccaggccatcaccggtgcggccaaggtcaatctgattggccatagccagggaggcatgaccgtgcggtatgtggcgggagtagcgccggaactggtggcctcggcgacctccgtcagtacgccgcacaagggctcgccggtggcagatgcggttcaggtcatttctaatatcgtgggaccgaccggatcgaacatcatcgctggcgctgtgaatgccatcacctgggtgctcgacttcttgggtgacggctccgtcggcaagcaggattcgctgctcgccatgcgcgatctgaccgccgtcggtgctttgaccttcaaccagcgttttccgggcgggattccgaccagcacctgtggagagggggccgccgaggccaatggggtccgctactactcttggagtggtaccaagcacttgaccagtgcgattgacccttcggattggcagatgctctctctcgggttgttgatctcgggacccaatgacggtctggtgccgcaatgctccagccatctcggcatggtgatccgcgacgactacaagatgaatcaccttgacaccgtcaaccacatattgggcctggttgcgctcaatgaaaccaatcccaagaccgtttacctccaacaggctaatcgcctgaaactggcagggctttga

SEQ ID NO: 329169 - DNA, 1044 bp, Pseudomonas aeruginosa
atgaacaagaaggtgttcacgttcctcgggtgttgcaccttggcagtggcgggggcgggagtgggatggtggctgcagggcgagagtctggttacggcaaggcccgctacggtcgagaggatttctcgggcagagctggctccggcgaaagtccaggagtcttcagcccaagccttggctgtcgctgcgccgacgaccttgccgcgatcactggtcggtaccgaagtgaattgcccggtggaggctggcgatgacggtcatttgcgaataaccaacggacttcgccagtgcttcgattattttctggccgccatcggtgaggaaagcctggatgttctcgtcgcgcgtattcgcgcccaactgggcggccggctgcaagagccggcgcgtggagaggccgagcggatactggtggactacctcgcctatttacgaggtttggagagtatccaacaaggtagcgaagtacgcgaagtggggggggctgacctggacgcgatacgccagcggatgcagcagatgcgcgctctgcgcgagcaatatctgtcgaccgaggtcatcgtggcgtttttcggcgaagaagacgcctatgatcgctatacattggctcgactggagctgatgcgagacaagacgctttcggcgcaggcacgggcgcagcaactcgctgaactggagcggcaattgccggaaggcctccaagagtcgctcaaggccgtgaatcagtatctcaacctgaagacgctgaccgatgaatggaaacagcacgctgggtcggcagaggagttgtaccagatccgtatgagtctcgtaggggcggaggcgacggcgcggctcgaagcgctggatcaggagaatatcgcctgggaccggcgcatgagcgaatggttcgcgcagcgcgatgagttgctgaaaacgccgggattgagccgtgaggatcgcgaacgtcagttggaggagttgcgtaggggcagtttcagcagtgaggcggaacgtctgcgtgtggaggcgttggaacgcatcaacgatgccgggcagccttag

SEQ ID NO: 329170 - DNA, 852 bp, Pseudomonas aeruginosa
gtgccacactggaaggccaccctggagggggctccgttccgtagggcgaataacgccaccggcgttatccgccggcatcccgccgcaacggcggataaccgcaagcggttattcgccctaccaggcccacgtgccatgcagaaggccaccctggagggggctccgttccgtggggcgaataacgccaccggcgttatccgccggcatcccgccgcaacggcggataaccgcaagcggttattcgtcctaccaggcccacgtgccacgcagaaggccaccctggagggggctccgttccgtggggcgaataacgccaccggcgttatccgccggcatcccgccgcaacggcggataaccgcaagcggttattcgccctacgaggtccacgtgccaagcagaaaggccaccctggagggggctccgttccgtggggcgaatacgccaccggcgttatccgccggcatcccgccgcaacggcggataaccgcaagcggttattcgtcctaccaggtccacgtgccacgcagaaggccaccctggagggggctccgttccgtggggcgaatacgccaccggcgttatccgccgagatcccgccacaacggcggataaccgcaagcggttattcgccctacaggcccacgcgccatgcagaaaggccacccgagggtggcctttctgcatggcgaccaacgccacgggcgctatccgctgcctacctgcggtgcttcttcatcgccacccggcgcaggtcgataccgatcaccaccgggtcgtggtcggaggcccggtacggctcggcgttgtacaggctgtcctgctgccgaggggtcttgaactcgacgttgtag

SEQ ID NO: 329171 - DNA, 705 bp, Pseudomonas aeruginosa; identical to SEQ ID NO: 199452

SEQ ID NO: 329172 - DNA, 2451 bp, Pseudomonas aeruginosa; identical to SEQ ID NO: 199448

SEQ ID NO: 329173 - DNA, 270 bp, Pseudomonas aeruginosa; identical to SEQ ID NO: 117517

SEQ ID NO: 329174 - DNA, 531 bp, Pseudomonas aeruginosa; identical to SEQ ID NO: 199441

SEQ ID NO: 329175 - DNA, 588 bp, Pseudomonas aeruginosa
atgaccgccgtttccactgccggcaccgcgccgcgtcctcgctcgcgcctgcgcgctcgtatcgtgctgacgggtctgtccgcctgcggcctcgctgcgctggcctgggcgtccttcgtgcatccgctgccgcgcctgatctacaacccatccgacagcgtggcggtcggctggtatcgcgtcgatccgctgggcgacggcaccgactcgctgccgcgttctttctccgtcggcagcatcgtcctgaccacgctgccgccagacgccgccgcgctggccgcgcagcgcggctacctgccggcgcgcgtgccgctgctcaagcgcgtgggcgcagtcgcgccgcaggaggtgtgcatcactggccgcatcgtccgcatcgacggcgtgcctgcggccgccgtgctgcctgccgaccgctggggccggccgctgccatcctggcagcaatgccgtcgccttgaacccggcgaactgttcctgctcagtgtgaccaacccggcgtcgttcgatagcaggtacttcgggccgatcaatgcgggcgccgtgatcggcatcgcgcatccggtctggctggaatctcgcccatga

SEQ ID NO: 329176 - DNA, 546 bp, Pseudomonas aeruginosa
atgactgcatccgcttcgtctgctcccgcgcctgttgccttcgcggctacggctgagctcgcagtacctttcgaccagcctgccggcgcgccgctgacgcgcgtggcgctggcctacatcgaaccgcgcttcaagctctacctgcgcttcggtgaacctgcgcgcacgcaccagctcgaccgctggcgtcgctgcgcggtgttcctgccaggcgccatgttgtgccttatccgctggcaggccaacgactacggcaccgttcgctggcagctcatggtgatgcaggcttgtacgccgctcgatgcggcacagcgcatccccggcgtgcagcccggcgcacgcctgctgctgcacgccgagggcgagaaccaggtgcgcgccgtgctggagcgcatcgacgccatcgaggcgctggacatcgcccccgccgctgtctcgcccgcgtactggcgcacgctcgccaaccggctcgctgcccgcctgccgctgcccgaatacaccgccgagcggcacgccgcctggctgaccgcgagggcactgccatga

SEQ ID NO: 329177 - DNA, 285 bp, Pseudomonas aeruginosa
atgacagcgaagccgccaccgaacagcaaacgcacggccaagcgcgtcggcatcggcgcgcgtccgcccgcgaatccgcacgccgaggcgtggattcgccagggcgacgccgatgcgctgaacaagggcgacctctacacggcacgcctgaccctcgacatcacgcccgccatgcgggcgcgcatcaaggtttccgccttcacgcaaggcgtgaccgtagccgacctgctgcgcggcctgctggagcgggagtttccagaacaccgcagggagaacacgccatga

SEQ ID NO: 329178 - DNA, 639 bp, Pseudomonas aeruginosa
atgatcttcgcgtttctcaaccagaaaggcggcgtcggcaagaccacactcgctacccacatcgcgggcgagctggcgatgcgcgggctgcacgtcatcctgctggacgccgacccgcagggttcttcgctggactggacgcagcgcagaagccagcagggcttgccacggctgttcagcgccgtgggcctcgcccgcgaaacgctgcatcaggaagcgccggagctggcccgccgcgccgatcacatcatcatcgacggcccgccgcgcatcgccgccctggcgcgttccgcgctgctggcggccgagcgcgtgctgattcccgtgcagcccagcccgtatgacctttgggccagcgccgagatggtggcgctgatccgcgaggcgcaggtctttcggcctgcgctgcgcgcggccttcgtcatcaatcggcgcgtcagcaccaccgtgatcgggcgcgaagcgcgccaggcgcttgctgaccagccgcttcctgcgctgcgcgcggaagtgcatcagcgcatcgtgttcgccgacagcgtggccgctggccggcttgcacgcgagacggcaccggacagcgccgccacccgcgaaatcaccgcactggcggacgaactgctgcggtggccgacatga

SEQ ID NO: 329179 - DNA, 285 bp, Pseudomonas aeruginosa
atgcgacccgctcccttgcggcctgccgccgctgctgtcgctgcgcccgtgcagccccaacgctacctgaccaacgacgaagccgccgaatacctgcgtctgtcgccgcgcacgctggagaaacagcgcgtgatcggcggcggcccgaagttccgcaagttcggccgccgcgtcatgtacgcggtggccgacctcgatgcctgggccgaccagcgcagctacgaggccacgtccgacccggaatatgccgagcgtcacgcgggcgactaccgtgatggccgctga

SEQ ID NO: 329180 - DNA, 930 bp, Pseudomonas aeruginosa
atgcagtttgttattgatgatgtgggatttattttttcggaagaagctaactttgataacattgagcggcttgaggttttacttgatttacttgatgatatttggtcggatggttgggtggcttattattccgaagagctattctataaagaggttggttgggggcggactctttatgaactgtatgctgatgacgctccattaaaaattccccgaaatgttcaggaacgtttgggggcgctgttttctcgacttcctaaatgcgatgatacagatgatataccagagtcctttgagttacaggttgatgaggaatcagttgaggctgtagctgttgcatgggccgcttaccaaattagccttgggcgaccgaccgcatgcgtggttttgggcggtggtagattagaaggccccgtacgcgttgtgtctgattatggcgaaataaaaatatggtttatttcggatgatgagtgctaccgtggtttttttcgatggcaaatagcttgttgctcaagaaatacacatgaaatggaatgctatgcaagttctgcatttccaaacttgatatttttggagggcgttttcggtggaataaagtctatggctaaaggttatttagagcttcgcgggcctataaccagacatttgtcagtattttcggattatggatgtgagattttctctggtgatcgagcagaaatatcggcaaggtttggtgcactaggggtagatatctctaacgaaaatggaaatacgcgccaagatgctgatgcagtaacggcgcgaaagcggatttataatggtgaggagttagagtttttctggcatagcaagatagaacgccatcaaaatagaattcatatttgtcctgataaagtttttgagcttggtaagattgttgttggtgtgttctgtttgcatttgaagtga

SEQ ID NO: 329181 - DNA, 1089 bp, Pseudomonas aeruginosa
atgatagattttatccagttgagggggtttaaaaggttttctgatgataggttctctatttctccccttactgttttggcaggtatcaatggttctgggaaaacttctttaattcacgcattgttgttattgagaaacgcctcgatttctactgagtcaacaatccaactcaatggtccattctatctagaactgggtgtcttcggtgatgttcgcaattggaatacatcggactctgttgatattctgttaagggatgtttcttcgagggattttttgtggagatttgatggggaggagaattcactttatgcgaatgtggtttctcgtccacaggctgtgcctgctattttgggggcgggggataggaattttcagtatatatctgccgagaggtacgggcctagaataattcttggggcaaatgcgctaccttctagccagctagaggtgggagttcgcggggaatatagtgcccagttgctttatgccttggataatcttaaggtaaatccagaaagacgaagtcccgattctgcgctagatgatattttgctgctaaaggtggaaactgaacggtggctttcgagaattacacggcctgttcaagttaatgctgagtcgttttcaactgccgcaacctttgcacttcaatttcgggttccagatggagagtgggttcgggctccaaatatggggttcggggtgacctatgctcttcctatagttcttgctgggttgacagcaagtaaagaaagtgtgctggttgttgagaatcccgaggcgcacttgcatccagcagggcagtctcagatggggcgatttttggcaacaatggcagcctctggggttcaggtcattatagagacgcactcggatcatgtgcttaacggtattaggcgggcaatcgctgaggataaaaagctgtctgcctcgcaggctgtaattcatttttttgatgcggatagtgatacccattcggaactgtcgtttaccgagacaggtggtattgataattggccatcaggttttttcgatcaatatcaaattgatgtgagcgctttgacgaaaattaggcggtcaagataa

SEQ ID NO: 329182 - DNA, 1134 bp, Pseudomonas aeruginosa
atgattgatgatggtgttttggacgaagaggatgattcttcttctgatttggtttccaaaccttggaatccgaaggatattcgtatcaccacaaagacgtttagtattcgagaggtgtatacgcagattaaggagggcgagttagatcttgctcccgattttcagcgtgcctttgtatggaagaaccttcagcagataaagttagttgaatcaatattgctcggaattcctctgccagcattctattttaatcaggatgatgaagggaattttcaagtgattgatggagttcaacgcttaagtacgattaagcattttatgtctgatgaattagagctgactgcaggcggtgttgaatatcttaagtcgctagacggattgtatttttcaactttagatgcagccacgaggaggagatttggagctactcagatagtcgctcacgtaattgagccacttactccagatgaagtaaagtacgatatttttagtcgtgtaaatactggtggtagtcagttgacggcccaggaaatcagacattgtatgagtaaggagcgttctagagagtttctaagaagattggtggaattggaaagttttgatgaagccactgataatgccttctgggcgaaggactcgaatggcgattggtatcgagataataggcggatggcagatagagaaatggctttgcgtttctgtgctttttattcggaatcaatcgcgaattatgcactttcctctagtttgaactcgtttttattggagtttacgcgtcgtatcgatgagggatctaagtctaataaagtcttgaatttgaagaggctggagaaagtctttgatcgtgctatgagaaattgtgcagaaatactaggggagcttgctttcaggcgttatgcttatgatcgcagagggccgataaatcgtgcaatatttgaatcacaggctctagccttggcagactatgatctgagcgaattgattgggcatgaggaaaagatcaaaagagaatttttgaagctgttttcagattttaattatgatagtgcggttcgcgctggtacaggagactatcggaaagttgacattcgtctttctatgccgaagaaagtgctaaaggatattttgggatga

SEQ ID NO: 329183 - DNA, 552 bp, Pseudomonas aeruginosa
gtgcaagaccggctggaaggcatggcccccgactggccggaatcccccgccgccgtcgcgctgcgcgagttccaacaggtggcgggcgaagccttgccggaggacagcgccgaactgttcgccgcgctgctggcgaagtcccaagacgaactggtgcggctgctggcggtatgcgtggccgtcacggtggacgtggtgacaccccgcaccacacggcagcagccgggcgaagaactcgcgcaggccgtgaggctggacatggccgcatggtggaagcccaccaatgagggctatttccggcatgtgccgaaggctgcaattctggaagccgtggagcggttcgccccgtcgcacgtcacccggctggcgaagttgaagaaggccgacattgccagcgaagccgagcggctggcagacggcacgggctggatgcctgccatcttcaaggccgaagggccggacgccacgcaggcagaaccacaggagcaggacgacgccccggaggatgccgaggcaacagcagatgaaccctccgtggcgctagccgcttga

SEQ ID NO: 329184 - DNA, 207 bp, Pseudomonas aeruginosa
atgacctacaccaccagccgcccccgcatggtggcgatctatgcccccggcacgatacgcgcccgccgctggcacggcgaaggcgacgtgcgcggctaccggccgccctctggctggtcagcccgcgccgacctgaccgacattcaccccatcacgggtcgcgccttgccgcgtgccgtgtggtggctcatcgagacgaaggaatag

SEQ ID NO: 329185 - DNA, 708 bp, Pseudomonas aeruginosa
atggcgatgactctcgacgaaattaaggcctgcctacaggccggcaatcttcagattgcgaatgagacggcacttgcgaacggcactggcacacaacttcgtttgcaaaatggtgcaatcgtcaatagctaccacaccggtaatttcaatgttcagggcaagaaccaagaggcggtaaaggcttgcctcggcgtgcaacctgcacaggctgcggcaccagctccacagaatggcgctgctgctaagccaatgctcagcaaggtattcgtggtttatgggcacgataatgccgcccgaaccgagcttgaagcgatgctgcgccgctggaggcttgagccgttgatcttggatcaacttccttcggaagggcagaccatcatcgagaaattggaaaagtacacggcagaagtaaagtttgctgtggtgctggccacgcccgacgacgagggctaccgcgctggtcacgaagacgaaaaggcgttccgtgcgcgccaaaatgttgtgatggaattgggcatgatgcttacgctgctcggtcgtaagaacgttgccattctcatgaagcaacaagacaatatggagcgcccatccgacatccaagggttgctctatatcccattcaaggacaatctgcaaaaggatgcagggccacttctggcaaaggaaatggcggctcagggttatcccatttcgttggcgaatctgtag

SEQ ID NO: 329186 - DNA, 849 bp, Pseudomonas aeruginosa
atgattcacgtcatggcgaaggtcaacttttttgacaagcgggtcatcaagaaattccttgagatcaccgctgtcgtcagcggtacgctgtcattcatagttatttttgttgacgttcctgccgagtggaagctaaaggctggcttggctttcttggcaatactggcactcacctacgtggggatatggctctggtcgaacaacctgaacagtatcgacatcaatgttgaggggagcgatgtcgcgatcaagaccggcgacattttccaccagccgggattgaaggcaattgccttcaatgagtatttcgacactcaggtggacaacaagataattggcgagacttctctcaacggagttttcatccagaagcatctcggcgttccgatttccgaattagaccgctacatcgaggaatacgcttttgatgaaagtgaagtcctggaggagaacgaggcaaggaaacacggtaagaagaaaaggtatcagataggcacgatttgcctgtacaaagactatctcctgaccgcgttctccaagttcgatgagaacaacaaggcgctactaacgatgccggagtaccttgagttcctcattaatttctgggacaaggtaaacaacgtgtacgcccagcaaagcgtatcgacaacaatctttggatcaggaatcacgcgaatcaaaggacacaagaatatttccgacgaggatctactgaaaatcatgctgtggacattcagaatcagtgagatgcgattcaaatatcccgcgaagctgaccatcgtgatccacaaagacaagatcgaccagatcaatcttctcgatatcaaatccgccaggaacggcgtgtag

SEQ ID NO: 329187 - DNA, 564 bp, Pseudomonas aeruginosa
atggcatatcgaaatggaaactacaccgccttttacgttgcagagccattccatcccagctcgctaggtgccaatgcgacgaaggattttcagtattacaacaccctacggatgtggaaaggtgctgatgcgacgttccccttcgttgattcgcacgacaaaacttacagtgtccgcgatggcagcgattgggaatacacactgaaacccaggctcagggagcgccttcggagctcgaagaacattatcctcatcttgagttcgatcacgacgaattcccgcgcccttcgagaagaaatcgactacgggatcaacgatcaagggcttcctgtcattgtcatctatcccgaatatgccaccaaggaaagtctgcttgtcggcggatcattgaagcaggcggtcaagaacctgtggggaaatcttcccgtgttccgggattcgatgaacaaagtcccgacgcttcatgttccgatgaataaagagctcatcaaaaaatccttgcaggacggcgagtttatggttgggagcatgaaggccccaggcacctacagatacaacccataa

SEQ ID NO: 329188 - DNA, 291 bp, Pseudomonas aeruginosa
gtggcggcaaagtactcattggcgaaggcgttgaagacagtcaggaaggcgcgtggcttgagccaggaagcgttttccgacgtgtcgagccgcacctatatgagtacgctagaacgcgacctgaaaagtccgaccctgcacaagctgaccgagctgtgcgaggtcatggacgtgcatccgctcacgttgttgacgctggcctttgcgggcgacagcacgcacaaggctgacgagttgttggcgcaggtgcgccaggaacttgaggcggtactgaactctgatggagattga

SEQ ID NO: 329189 - DNA, 822 bp, Pseudomonas aeruginosa
ttgccgcagcgcgaacagctcgatctgttccgcgcgctgccgggcgacatggcaccgcgcgacagccaggacttgatggcctttccgttcttctcgctggcgaagtcgcggcgcgtcgcgccgatcgacttccgcgccggcggtatcaccatccgcgtggaaggcacggccgagcatggcatcgcaacgatatgggatgccgacgtgctgatatgggctgcttcgcagatcgtggaagcgcgcgacgcgggcattcgcccgtcacgctggatacgcgccacgccctacgaaatcctgcgcttcatcgggcgcggcacgtccttgaacgactatctgcgcctgaaagccgcgctcgaccggctgcaatcgaccacggtggccacgtccatccgagaaaccacgggaaggcgactgcatcgcttctcgtggatcaacgagtggaaggagctggccgatgccagcggcgtgccgcagggtatcgaactgatcctgccggactggttctatgcgggcgtgctcgacgctgccctggtgctgaccatcgacccggcctatttccgcttgaaaggcggcatcgaacgctggctgtaccgcttggtgcgcaagcacggcggcaagcaaccggacggctggcaattcgacttccggcacctgcaccgcaagtcgggcagcgcggcgcgcttctccgacttcgcctacgacctacgtgccttggtggcgcggcagtcgttgcccggctacgtcctgggcatcgagcgaatgccggacgacggaacggagctgctgaccttccggcccgtgctgcacacggcacggggataa

SEQ ID NO: 329190 - DNA, 639 bp, Pseudomonas aeruginosa
atgatcctcgctctactcaaccagaaaggcggagtcggcaagaccacgctcgccacgcacatcgcgggcgagctggcgatgcgcggccagcatgtcgtcctgctcgatgccgacccgcagggttcatcgctggactggacgcagcgcagaagccagcaaggcttgccacggctgttcagcgccgtgggcctggcacgcgaaacactgcatcaggaagcgccagaactcgccaggcgggccgatcacgtcatcatcgacgggccgccgcgcatcgccgccttggcgcgctccgcgctgctggcggccgagcgcgtgctgatcccggtgcagcccagcccctacgacctttgggccagttcggaaatggtttcgctgatccgtgaggcgcaggtgttccggcctgcgctgcgcgcggccttcgtcatcaaccggcgcgtcagcaccaccatcatcggccgcgaggcgcggcaatcgctcgccgaacagccgctgcccgcgctgcgctcggaagtgcatcagcgcatcgtattcgccgacagcgtggccgctggtcggctcgcacgcgagacggcacccgacagcgccgccgcccgcgaaatcaccgccttggtggacgaactgctgcggtggccgacatga

SEQ ID NO: 329191 - DNA, 285 bp, Pseudomonas aeruginosa
atgacagcgcagcagccacccaacagcaaacgcactggcaagcgcgtcggcatcggcgcacgtccgcctgcgaatccgcacgccgaggcgtggattcgccagggcgacgccgaggcgctgggcaagggcgacctctacacggctcgcctcaccctcgacatcacgcccgccatgcgggcgcgcatcaagatcgccgccttcggccaaggcgtgaccgtggccgatctgctgcgtggcctgctggagcgggagtttcccgagaaccgcagggagaacacaccatga

SEQ ID NO: 329192 - DNA, 546 bp, Pseudomonas aeruginosa
atgaccgcatccgctttgcctgccgcgaacgaggcaccggctgcgccgttgcctgcgcttgcgacactcgccgggcaggccggcaacgtgccactgacgcgcgtttcgctggcccacctcgaacatcgcttcaagctctacctgcgcttcggtgaaccggcgcgcacgctccagctcgaccgctggcgacgttgcgcggtgttcctgccgggtgcgatgctctgccgcatccgctggcaggccaacgattacggcaccgtgcgctggcagctcatggtgatgcagaccgccacgccgctcgatgccgtgcagcgcatccccggcgtgcagccgggcgcgcgcctgctgctgcacgccgaaggcaatgccaacgtgcgagccgtgctggaacgcatcgacgctatcgaggcgctgggcatcgcacccgctgccgcgtcgcccgcgtactggcgcacgttgggcaaccggctcgcggcgcgctcgccgctccccgaatacaccacagaacggcacgccgcctggctggccgggagggcattgccatga

SEQ ID NO: 329193 - DNA, 588 bp, Pseudomonas aeruginosa
atgaccatgattcccgcgaccggctccgcgccgcgtcctcgctcgcgcctgcgcgcccgcctcgtgctggcgggcctgtccattttcggctttgccgcactggcctgggcctctttcggcacaccaccgccgcgcgtgatctacaacccgtccgacagcgtggcggtcggctggtatcgcgtcgaaccgttcgacccgcgcaccgcctcgctgccacgtccgttgtccgtggacagcatcgtgctggtgccgcttccggctacggccgccgcgctcgctgcgcaacgcggctacctgccgatgcgcgtgccgctgctcaaacgtgtgggcgcggtcgcgccgcaggaggtgtgcatttcggggggcctcgtttacatcgacggcgtgccttcggccgccgtgctgcctgccgatcggatgggccgggcgctgccgtccttgcagctttgccgccgccttgaacccggcgaactgttcttgttgagcgtgacgaatccggcatcgttcgacagccgctatttcgggccggtcagcgcattcgccgtgatcggcgtcgcgcgcccgatctggctggagacacgcccatga

SEQ ID NO: 329194 - DNA, 1983 bp, Pseudomonas aeruginosa
atgaccggccgccgcgacgacgatttccgcgtgcgccccagcgcccccaagaaccggggtaagggccagggtcagagcttcgtttccaaggtgctcaagcaggccggcaaagccagcagcggcaagtcggcggtgcgcggccctggggcggccggcaccggccagcgccccggctcgcgcctggggcgcggccacacagcagcgcgcttcgccggggcgaagctgacgcccatgtcgcggcgcgtgaccatcaagacgctgctggtcaatcaccaacgggccagcccgcagtcgctcgccaagcacctgcgctatgtcgagcgagacggtgcgggccgcgatggcgaaccgggccgggcctacgggccgcaggccgacgaagccgacctagacgctttcaaggaacgctgcgcggatgaccggcaccatttccgcttcatcgtttccccggaagacggcgcggaactggatgacctgcgcacctacacccggcatctggtgaaccgcatggaagccgacctgggcacgcggctggattgggtggcggtcgatcactggaacaccgacaacccgcacacccacctgatcgtgcgcgggcgcgacgacaccggcaaagacctcatcatcgcgggcgactacatcgcccacggcttccgtcatcgggccgccgaactggcgaccgagtggctggggccgcgcactgaactggagatccagcagaacttggggcgcgaggtggaacaggagcggtggacgagtctggatcgaaccttgcaacgcgaggccggcgaggatggccgggtgcatgtcgaacggctcaacgaaccccgcttgcagcgccaacgcccgctgctgatcggccgcctgcaacgcttgcagcgcctgggcctggccgaccaggtacagcccggcacctgggccgtacatgcggacgcggagaagaccttgcgcgccctaggcgagcgtggcgacatcatccgcaccatgcagcgtgccatgagtggccagccgcgcgagctggcggtgttcgagccgggcgacgatggtcgcagcatccttggccgcgtggccgcgaaggggctggccgacgagctgcatgacaggggctgtctggtcatcgacggcactgacggcaaggcgcactacgtcgcactgaatgcccgcgacgagctggcgaattatccgacgggcgcggtggtggaagtgaagggttcagccgacgtgcgcgccgccgacaagaacatcgctgcgctggcgagcgatggcctgtaccgcgccgatcaccacctgaccatcgaacagggccgggccaagcccgaacgcgacccgcaggaagtcgtcaccgcccatgttcggcggctggaagccctgcgccgggctggcattgtggagcgcgtggccgaagggctatggaaggtgccggacgacctggccgagcgtggccgccagtacgacgcgcaacggctgggcgtcgtggccgtagagctgaaatcgcacctgcccatcgagcggcagacccgcgtcattggcgcgacctggctggaccagcaactgatcggcggtgggcgcgggctgggtgacctgggctttggcggcgaggtcaagcaggcgatgcagcagcgcgccgacttcctggccgaacagggactggccgagcggcgggggcagcgggtgatgctcgcccggaacctgctgagtacgctgcgcaatcgggaactagtgcaggccacacagaacattgccgccgaaaccggccttgagcatcggccagtggccgacgggcagcgtgtagctggcatctaccggcgttccgtcatgctctccagcgggcgctacgcgatgctggatgacggcatgggattcagcctggtgccctggcggccggtgatcgaacagcggctggggcagcagatcgccgccaccatgcacggcggtggggtggtgtgggatatgagccgcttcagaggacaggccgtaggctga

SEQ ID NO: 329195 - DNA, 678 bp, Pseudomonas aeruginosa
atgctgctgctcgaagctattgctgcggcaggaggcgaagcgcgtttggtcgatctctctgcgcagctcaacctgcacaagagcacgctgcatgggttactcaacaccctggccgcgatgggatacgtttcccgctacggcacgcgctacgcgctcgggttgcgcctgcgcgagattgctcagccgttggcagatgccgatgcaggcctgcgtatggcatttgcgcccgcgctgcgcgcgctggccgagcgcagtggcgagacctgctacctagctgtgccctgcggtacgcgggaatacctctatatcgatgccctggaaggtcaaggcagcctgcgtgtggccagcccacgtgggcggcgcgaaggcttgaccacatcggccatcggcaaagtcttcctcgcccacgaccctgcattggtacgcagcctgcgccgagctgaatcaatgccggcagcgctggagaaggaattggcagccatcaccgaacagggctacgccttggacttggaggaggccgaaccggggttgaactgtctggccctgcctctgcgccgtcaagggcgtgtcgttgcagcgcttggtgtggccgggccatcccagcgccttcgcaaaccaatcctatgccgtttggccacaacagccatgcgagaaatgttcgacattctcaaactttag

SEQ ID NO: 329196 - DNA, 405 bp, Pseudomonas aeruginosa
atgtctcacgctttgaatgaatcgaccatccagcacgtcatcgagcgtgcccagacgctcgcacgggaacaacacttcgccatcaacattgccgtcgtggacgaggccgggctgttgcgaggcttcttgcgcatggatgatgcggtgcctggtgcgattgacgtgtccatcaaaaaggcccgcacagcggcgctgttccgtaccgacagctcggagcttggcgcggcagcccagcccggcggcccgatctacacgctggaggcgaccaatggcggcctgatcagctttggtggcggtgtggtgctgcacgacgaacagggccaggcaattggcgccgtcggcgtcgccggcgccacggtcgaagcggaccaggtcatcgccttgcacgccgcaggccgcgcatga

SEQ ID NO: 329197 - DNA, 1206 bp, Pseudomonas aeruginosa
atgagccaagcgcatcgcacccatcccggcgtctgggcgctggcggtcacggcgtttgccatcggcgtggccgaattcatcgtggtgggcgtgttgccaaccattgctaacgatctgggtgtgccgttggcgcgcgccggcgggctggtcgggctctacgcactggcgctggcgttgggcacgcccatcgtcgtactggcactggcgcggctcccgcgcaagccgttactgctggcgctggtagcggtgttcctggctggcaacctgctgtcggcgctgtccgcaagctacgaactgctgctggccgggcgtatcctgaccgccgtggcgcatggcagcttcttcgccatcggagccaccgtcgcggcgcggctcgcgcccgagggccaggccagccgcaccatcgcggtgatgtttgctggcttgaccctggcgatggtgattggtgtgccgctaggtagcctgatcggcaacgcgctgggctggcgcctgccattcttcgcagtggcagtgctggcggcgctggcttggctggcgacagcgcgctgggtgccggcgctgccgacaccggcggccggcccagcgggcaagcagttggcgtcgctgaccagcccgaccatcctggcaatgatggccatcaccgtgctcggcttcggagcgagcttcgcagcctttaccttcatcactccgatcctgaccgagatcaccggcttctcgacgcatgcagccagcctcctgctggtggtgttcggcatcgccacgctggtcggcaatctcgccggagggcgctgggcggccagcctgggctggactttagcgctgcagcgcatgctggctggactactgctggtgctggtggccttagccgtggcactgccttggaagtgggcgatggtgccgctgttgttcgcctggggcgtcctcgcattcgggatgtcgccgggcttccaggccggtatgctggagacggcccagcgctggacgccgcgcgcggtggatttcgcctctgcgctgaacatctcggccttcaacctcggcatcaccctgggcgagacgctgggtagtggcctggttgcacaaggacagatggcgataacgccgtgggccggcgtggctctggtgttgctggcacaagcgccgctgtggtggttggcgcgaaggcatgcacgtcccgaagtcgatcccgttcgattacaagggggatga

SEQ ID NO: 329198 - DNA, 339 bp, Pseudomonas aeruginosa
atgcacgtcccgaagtcgatcccgttcgattacaagggggatgagatgcagactgtctatctcatcgtcgcgctgcaagcatcggaaggacgcattgaggaactgcacgacacgctgcggacattgcgtgaagcgagtctggaagagccagggtgcctggattaccggattgcccaaggaaaccattcggcgaaccgattcttcctgctcgaacactgggccgacgccgaggcactactccgacacgagcatacgcagcacttcctggatgggacggcgcgcgtgcgggcgtgctgcgagtctgtggatctccagccgattgtctggctgctggaatga

SEQ ID NO: 329199 - DNA, 945 bp, Pseudomonas aeruginosa
atggaactgcgccatcttcgctgcttcctggccgttgctgaagagctgcacttcgcccgcgccgccgagcgactgcacatcgaacagtcgccattatcccgcgccatcaaggagctggaggaagaactgggcgtggtgctgttcgcccgcaccacgcgcagcacgcgactgacccgtgctggcacgctgctcctcgatcacgtcccacgcgtcttcactgctttgcagcaagcgcgtgacagtgtgaaggcggctgccaacggcttccacggccagttgcgcatcgccttgtccgacggcatcacgccgtcgcggctacccgccttgctggcgctgtgtcggcaggaggaaccggaagtcgaaatacgcctgaccgaagtgccgctggcgcagcaaatcaagggcctgcacgacgacctgtacgacgtgggcttagcccgtgccgatgaagtcggcgatggcatcgtcgcaatgcccgtctggaacgatccgctgatggtggccgtgcccgagcggcatcccttgctggtccacaaacgcatcccgctcgaagaactgctgcgctacccgctggtgctgtgtgatcagcaggcatgcgaaggccatgcgcggcaggtcgagcgcgtgctgcgccgcgtggacatggaaccgctggtggccgagagggtggtttcctgcgacctgatgatggcgctggtttcggccggctttgcattgggcctaaccggcgccgcgcacatcgcggccagccgggaacagggcgtcgtcgcacggccgttggtcggccgctcggcgatgctcaccacctatctgctgcgcctggatgccgaaccatcggagacgctggcgcgcttcatcgagcgcgtgcaggccatcgactcaccggaggccgccaagccgacgcctggcgatgaacccgatgtcccggaggaatccgaaccatga

SEQ ID NO: 329200 - DNA, 267 bp, Pseudomonas aeruginosa
atgaaaaagaccattccgttccttctggctgctgtggtgctgacggcctgcggccccacagatacgccagagaagaaggacgtacccagcgttgaagaattggcatccgatcctgcacggctcaaggaactgcgccagcaatgcaagacggatcgccctaagctgggcaacgtgctgtgcaaccgagtcgccgaagccacgcgcaagcggttctatggcgacggtagtacgccctacacgccgccggagaatccaccgaagttctga

SEQ ID NO: 329201 - DNA, 207 bp, Pseudomonas aeruginosa
atgccggtcgggccgaccacggccatgtggcccacgtcgccgatgtgcgtgaccaagcgaaacggcgttgcgccgtcagtgcgcgtgacaatcaccggcgggccgtccaagtgcttgttgcgctccgggccggcccacaccgccgacagcggcatcatgtgcgccaggttcaacgtcgagacgatgggctggcgcacattggcatag

SEQ ID NO: 329202 - DNA, 981 bp, Pseudomonas aeruginosa
atggcgcagccacgcgccggcgaagccgggagcgccggcctgcgtcagcacgcgctctatgtcgcgttggtcttgcggtgtggatgcgcctgcgaaggcgagcacggccggccccaggtcgaggtcgaacaggcgattgccgaggcgcgattggtagtagtagtcctgcttgggttgcgcggtggcgacgatctcgatttgccggctgttgaggccgaagccctcgtagatcgtgcgaatctgcggttcggtcgcctgcgggttgggcaagaaaatccgaaccgcgcagctttcgatgatggccgccgcgatgctggagttctgaatatccgccaggctttgcgtagcgaagacgacactgacattgcgcttgcgcagcgtcttcaaccactggcggatgcgtgcggcaaataccgggtcatccaggaacagccaggattcatcgaggatcagcagcgtgggcgaaccgtcgaatcgttcatcgaagcgggcaaacaggtagcccagcaccgaccgcacggcggcggggctggccatcagttcctccatctcgaagcattgaatgtccgcgctgccgagccggtcgcggtctgcatccagcagcttgccgtgtgcgccgccgagcacatagggcgcgagtgcctggcgcagcgcgttcgattgcagcagcaccgaaagcccggtcatcgtgcgctgctccacgggcgcaccggccagactgccgagcgccgaccagatggcggccttctcgtccgggccgacggtgacgccttcgtgcagcagccggccttccacccattcggcggcccaggtgcggtagccctctgcgtcgatgtgcgcgagtggctgaaaggcaatgccgccatccgcgccgaggtcgtagtgctcgcctcccaggcccaggatggtggcgcgcatggagcggcccatgtcgaagacgaagatgcgcgagtgcagatagcgccggaattgcatcgctag

SEQ ID NO: 329203 - DNA, 918 bp, Pseudomonas aeruginosa
atgcgccgactcttgcgcccggtattctgcgccgcgctcttctgcctgtacccagcgctggtccaggctgccgccgaaagcgaaatcctcggcctgttccagcgctggcaggccgcccacgggcagcgcagcggcaaggccctggaaggggtctatgcgccgcgcctggactactatggccgcgcgcagacgcgcgagcgcaccctctccgccaagcaggccttcttcgcccgccatcccgacttcgagcagcgcatcgtcgctgcgccgcagatcgtgccgggcgaccaggaaggccgctacgaggtgcgcttcgtcaagcaggtacgcctcgacggacgcctgcgcaactatccggggctgctcctggccgagcgcgccgggccgggcgatacctggcgcttcgtcggcgagagcgacgagatcacccgctacgccgtcgactcgcggtacaccccgctggctcgcggccgcttcgccggtaccgaggcggatttcgcctgggtagtggcccacgcgccgaacagcgccgccttgtgcgacgaatacgaggattgccgctgcgacctctggagcgccgacgcgcgcgtcccgccgaagccgctgggcagttgcaccggcgcggtgctcagcgtcctcggcgacctcgacgacagcggccgcgagcgcctgcaactgctgcgtacctggtggaccagcacctggaccaagtcgtcgctgctggaaatccgcgacggccagtgggtgcggatgctgccggacatctccaccacctgggacgatgccgaggccgagctggtgctgtacaaggccgacccgcagcagccgggccgagtgctggtgaccgaaaccgtgatggacgacgagggcgactggagccaccgcacccgcagcgaggcgctgcgccccgtaccctga

SEQ ID NO: 329204 - DNA, 1536 bp, Pseudomonas aeruginosa
atgcgcatccacgtctccttcatcgaccgtgtcggcatcacccaggaggtgctggcgctgctgggtgggcgcaacctgaacctggatgcggtggaaatggtgccgccgaacgtctacatcgacgcgccgaccctcagtcccgaagtgctggaggaactgcgcgcagcgctgctgggcatccgtggcgtgcaggcgatgaccgtggtcgacatccttcctggccagcgccgccgcctgcagctcgatgcgttgctggcggcgatggccgatccggtgctggcggtggacggcaagggcctggtgctgctggccaacccggccttcagcgagcgctgcggacgcgacccggccggcgagcggctggccagcctgttcgacgatgaaaccctggaggatgcgctggtcgagcagggcttccgcctgccgctgcgcgaagtgacattcatgggccaggccctgctgctcgatgccacgccgatcaccgaaggaccgggcgagggcgagcggcacctggccggcggcctgctgaccctctacgaaccgaaccgcatcggcgagcgcctggcggccttgcaccatgaccatgccgaggggttcgagatgctcctcggcgattcccagccgatccgcaccctgaagacccgtgcgcagcgcgtggcggcgctcgacgcgccgctgctgatccacggcgagaccggtaccggcaaggaactggtggcgcgcggctgccatgccctgagtgcgcggcacaactcgccgttcctggcgctgaactgcgcggcgttgccggagaacctggccgaaagcgagctgttcggctacgcccccggcgccttcaccggcgcccagcgcggcggcaagccgggcctgctggagctggcccaccagggcacggtgttcctcgacgagatcggcgagatgtccccctatctgcaagccaagctgctgcgcttcctcagcgacggcagcttccgccgggtcggcggcgaccgcgaggtgagggtcgacgtgcggatcctcagcgccacccaccgcaacctggagaagatggtcgccgagggcagcttccgcgaggacctgttctaccgcctcaacgtgctcagcctggaagtcccgccgctgcgcgagcgcggccacgacatcctgctgctggcgcggcacttcatgcagcaggcctgtgcgcagatccagcgcccggtgtgccggctggcgccgggcacctacccggcgctgctgagcaaccgctggccgggcaacgtgcgccagttgcagaacgtgatcttccgtgccgctgcgatctgcgagagcagcctggtggatatcggcgacctggagatcgccggcaccgccgtggcgcggcagaacgacggcgaggtgggcagcctggaggaggcggtggagggcttcgagaaagccctgctggagaagctctacgtcagctatccatcgacccgccagttggctgcgcgcctgcaaacctcgcacaccgccatcgcccaccgcctgcgcaagtacggcatcggtccgcgcgcctga

SEQ ID NO: 329205 - DNA, 1743 bp, Pseudomonas aeruginosa
atgaagcaacggattcccaccctcctcgccggcgcctgcctggccatccccctgcacgccctcggcgccgccgacctgctggtggtcaacgccaggatcttcaccgccaatccgcagcaacccttcgccgaggccctggcggtggaggacgggcggatcctcgcggtcggcgacgaggccgggctgcgcgccctggccgatggcgacagccaggtcgtcgatctcggcggcaagcgcctgatgcccggcctgatcgacacccattcgcacgcggtgttcggcggcctggagctggccggcgcggacatgggcaacgaacaggtcggcctcgacgaactggaacggcgcctgcgcgcctggcgcgacaacggcaaggcgcgacatggcgacatgctcaatgtcagcggcatgcataccgcctactggagccaggtcaaggacttccgcgcgcgcttcgaccacggcgaatgggccgaccagccgctggccttcatcggcagcgaccaccacaccggctgggccaacgccgccatgctgaaacgcgccggcatcgacgccgcgcgggtccgcgccctgcccgaggaacagcgcaacaccatcggccacgacgccgacgccacccccaacggcttcctcgccgatgccggtctcgacgcggtgctcgcggtactgccggcgccgagcgcggaacagatgctagaagccggacgcagcgcggtgcgctacagcaactcgctgggcctgaccgcatggatggacccggccgccaatggctcgccgggcgacgccctgttcagcctcaggcccgacgagaacaccgtcggcgtgctaccggtctaccagcggctggccaagggcggcgaactcagcgcccacgtcgccgccctcctggtcgccaacccacgcagccggccggccgacctcgaggtgctggacaaggtgcgccagcgcttcctcggcagccccaacctgaccctgccgggaatcaaggtgttcgccgacggcgtaccggaatacccggcgcagaccgccgcgctcctcgagccctaccgcaacagcaggaagacgggcgaactgctgatcgacccggcgcacttcggcgaactggtcagcgccgccgacgcccgcggctggctggtccacgtccacgccatcggcgaccgcgcggtgcgcgaggcgctgaacggcatgcagcaggcgcggcgcgaccgcgacagcggcatcgcccattcgatcacccacctgcaactggtcaatcccaaggaattcgagcgcttcaggccgctcggcgtgatcgcctcgatgcagctgtactgggccgccgccgacgaaaccacggtggacctgatgaagccctacatcagcgccttcgcctaccgctaccagtacccggcgcactccctgctgagcaagggcgcgaccatcgccggggccagcgactggccggtgtccagcctgtcgccgtggaaggccatccagcaggcggtgacccgcaagggcccgcagggcgtgctcaacgccggcgaacgcctggaccgccagaccatgttctacgcctacacccgcaacgctgcgcggaccatcggcctggagcaccggatcggcagcctggagccgggcaagcaggcggacttcatcgtcctcgaccgcgacgtgttcgaggtgccggagacgcaactgggcgaaaccaaggtgctgaagacctggttcgccggcaagccggtgtattccagcgagggctga

SEQ ID NO: 329206 - DNA, 924 bp, Pseudomonas aeruginosa
atggacaaattgaatgccctggcgatgttcgtcgccactgccgaaaccggtagcttcagccgtggcgccgagcgcctgggcaagacgccctcggcgctgaccaaggccgtcgcccacctggaagcggaactcggtgcccgcctgttcgagcgcactacccgcagcctggcgctgaccgaggccgggcagatctacctggaggcggcccgccagtccctggaaacgctgcgcacggcggggcaggagatcgaactgctggagtcggagttgcgcggcgaactgcgcctcgccgcgccgccgtcgttcgccgcggcgttcctccagcaggcctgcgccagcttcctcgaggcgcatccgcggatcagcctgcgggtggacctcgacgaaaccttcctcgatctcagcgaaggcggctacgacctcggcctgcgcgacggccccatcgacctgccggggctggtggcgcggccgctggcgccgaaccagatcgtgctttgcgccagccccgcctacctggcgcggcaacccgcgccgcaaggcccgaaggacttcgagcggcacgcctggctggtcttccagcacccttcgctgaaccagaacttctggtggatggagcgcgacggcgcccgccagcgtatcgaccagccgcgcccgcgactggccagcgacaactacgacttcctgctcgcccacctgctggccgggctgggcctgcagttctgtccgcagtggagtgtcgcgccgctgctcggcgaagggcggctggtgcgcctgctcggcgactaccacttcgacccggggccgttcgggccctccatccatgtcctctatccggggcaccggcgcaacacgcggaaggtccgcgcgttcctcgagcacctgcgcgccagcttgcagcgacaggggctgtgccatcggctgtaa

SEQ ID NO: 329207 - DNA, 384 bp, Pseudomonas aeruginosa; identical to SEQ ID NO: 323114

SEQ ID NO: 329208 - DNA, 2880 bp, Pseudomonas aeruginosa
atgaccgataacctgaacctcggcgccatcgacctgggcaccgacgacgaattcatcgcccgccatatcggcccgcgtgccgccgacacccaggccatgctccagcgcctgggctacgactcgctggacgcgctgatcggcaacgtgatccccgacagcatcaagggcagcagcgtgctcgacctgccggccggcatgggcgaggccgaggcgctggccagcctgaaggcgatcgccgcgcgcaatcgcgcgttgcgttccttcattggccagggctactacaactgccacaccccggcaccgatcctgcgcaacctcctggagaacccggcctggtacaccgcctacacgccgtaccagccggaaatctcccagggccgcctggaggcgctgctgaacttccagaccctggtcagcgacctgtccggcctgccgatcgccaacgcctcgatgctcgacgaggcgaccgccgccgccgaggccatgaccttctgcaagcgtctgtcgaagaaccgcaccagccaggcattcttcgcctcccgccattgccacccgcagaccctcgacgtgctgcgcacccgtgccgagccgctgggcatcgaggtggtggtcggcgacgagagcaccatcgaagacttctccgcctacttcggcgcgttgctgcaataccccacctgcgacggcgagatcgtcgactaccgcgaactggtcagccgcttccatgcggtcgatgcgctggtcgcggtggccgccgacctgctggcgctgaccctgctgaccccgccgggcgagttcggcgccgacgtggccatcggcagcgcccagcgcttcggcgtgccgctcggcttcggcggcccgcacgcggcctatttcgccacccgcgacgccttcaagcgggacatgccgggacgcctggtcggcgtctccatcgaccgccacggcaagccggcctaccgcctggccatgcagacccgcgagcagcacatccgccgcgagaaggccaccagcaacatctgcaccgcccaggtgctgctggccaacatcgccagcatgttcgccgtctaccacggcccgcagggcctgctgcgcatcgcccggcgcacccaccggctgaccgcgatcctcgccgccggcctggagcgcctgggcgtggccgtcgagcagaagcatttcttcgacaccctgagcctggccaccggcgcgcgtaccgcggcgatccatgccaaggcccgcgccgccgggatcaacctgcgcgagatcgatgccggccgtctcggcctgtcgctcgacgagaccgtccgccaggccgacgtggaaaccctctggggcctgctggccgaagagggccaggcgctcccggacttcgccacccttgccgccagcagcggggaccgcctgccggtcgagctgctgcgccagtcggcgatcctcagccacccgatcttcaaccgccatcactcggaaaccgagctgatgcgctacctgcgcaagctggcggacaaggacctggcgctggaccgcacgatgatcccgctgggctcctgcaccatgaagctgaatgccgccagcgagatgatcccggtgacctgggccgaattcggcaacctgcacccgttcgccccggccgagcagagcgaaggctaccgccagctcaccgacgaactggaggcgatgctctgttccgccaccggctacgacgccgtgtcgttgcagcccaacgccggctcccagggcgagtacgccggcctgctggcgatccgtgcctaccaccagagccgcggcgacagccagcgcgacatctgtctgatcccgtcctccgcccacggtaccaacccggctaccgccagcatggtcggcatgcgcgtggtggtggtggcctgcgacgcgcgcggcaacgtcgacgtcgaggacctgcgcaacaaggccagcgagcacaaggaacgcctggccgcgctgatgatcacctatccgtccacccatggcgtgttcgaggaagcgatccgcgagatctgcgctatcgtccacgactgcggcggccaggtgtacatcgacggcgccaacatgaacgccatggtcggcctgtgcgccccgggcaagttcggtggcgacgtttcccacctgaacctgcacaagaccttctgcatcccccacggcggcggcggcccgggcgtcggcccgatcggcgtgcgcgcgcacctggcgccgttcctccccggccacgctcgcggcgagcgcaaggaaggcgcggtgagcgcggcgccgtacggcagcgcaagcatcctgccgatcacctggatgtacatccgcatgatgggcggcgaaggcctcaagcgcgcctcggaaatggccatcctcaatgccaactacatcgcccatcgcctggaggagcactacccggtgctctacgccggcggcaacggcctggtcgcccacgaatgcatcctcgacctgcgtccgctcaaggacagcagcgggatcagcgtcgacgacgtggccaagcgcctgatggacttcggcttccatgcgccgaccatgtccttcccggtggccggcacgctgatgatcgagcccaccgagagcgagtcgaaggctgagctggatcgtttctgcgacgcgatgatccgcatccgcgaggaaatccgcgcggtggaacgcggcgagctggacaaggaagacaacccgctgaagaacgcgccgcacaccgccgccgaactgctcggcgaatggaaccacgcctacagccgcgagcaggccgcctatccgctggccagcctggtggaggccaagtactggccgccggtgggccgcgtcgacaacgtctacggcgaccgcaacctgacctgctcctgcccgccgatcgaggcgtacagcgaggagtga

SEQ ID NO: 329209 - DNA, 1113 bp, Pseudomonas aeruginosa
atgagttcgcagttgatcggcgtgctggcggcttcgacgcagggcgatgcggacgccaagagcttgcagacgggagcctgggtggcggggaatgccacccaacacaactacctcagtcattggcaggaggagaagaagcggcaggaggtcgatggctgcaaggataaacagctctgcaaaaccggaatagaagccaaatgggcaattatttcggcccagcaggatgtcggtatcgtcgtaggtgttggaggaggcatcggtctttcgacggctgaaaccgcagtgggtgtttatgagctggtcaagaactggagggaaacctatgcagctctggagcagttggccacttcgccagagttccggcagcaatttggcgataactacctgaaggggctggaggagcgcgccgcattcttgacccaggcttacgaggatgccggctggcaaggttcggtcacagctggtgtcgagggcggtaggttcgctgcggaacttgttggcgttctgacggcagtgaaaggtggcgcgcagataaccgccaagctgccaacagcagccaagaacctggtcaacgcgattgcggagtcacctgtttccggtagtatgagttcgcagctcggggcagtgggggacttgggtcggctgggtgggggtgcaaaaggaactgctaatttcccggaagggatgagcttcaatcccaacatcaagaatcacctcagcaattttgatggcttgacgcagaagagcgggattagcggcacccataacctggatgctttcaatcaggctgcgactacgaatggtgtgaaggtactcagcgaaacgccaacttccgttgcggggattaccaccgtcagataccaaatacctgcatatgatcgggcagggaatattgttggatttaacgacaaaattttcccgaaaactgtttatgatccgaaaatatttactgatcagggaatccttgatctagggcagcaggccgcagctggcggctataaggacgcgctatctaaagggctgagtcaatatgactctgttgccgggggtatcacttttagggtgtatttagataagttcacaggaacggtgacaaatttccacccgaagtaa

SEQ ID NO: 329210 - DNA, 153 bp, Pseudomonas aeruginosa
atggtgctgacggcgcacaagaccgtggcgatgttcatgcgctatgtccacaccgaggacaagccggttcgggaagccgccgaactggtggcgagccggcgcaagacgatcaccggcaccaaacgccccccggcggcggaggcaacggcatga

SEQ ID NO: 329211 - DNA, 1068 bp, Pseudomonas aeruginosa
atgactaggcgcaagtcatccattgcgtcaccagcagcgccgacggcgctgctgggcgacattcgggcattgatcgaggcagcgaaccagcgcgctgccctggcggtcaatacggaactgactctgctgttctggcgcgtcggcctgcgcatccatacggaagtgctggccgggcagcgggccgggtacggcgaagaaatcctgccgtctctggccgcgcagcttgtccgcgactacggacgcagcttcgcggacaagaacttgcgccggatggtgcagttcgccgttgcctacccggacgagcgaattgtcgtttcactgtcacgacaattgagttggtcacatttcttggcgctgatcccgctgaaagacccgctccagcgggactactatgcgcagatggcgagcgccgaacgctggagcgtgaggacgctgcgcgagcgcatcgactcgatgctgtacgagcgcacggcgctgtcccaaaagccggaagaaaccatcgcgcaggaacttgcgaccctgcgcgatgcgcagcgcatgaccccggcgctggtgatgcgcgacccgtacatcctcgacttcctgggactgcgggatagctggcaggaaagcgacctagagacggccatcatccgtgaaatggaagccttcctgctggagctgggggtgggcttttccttcgtcgcccggcagaaacgcatccagatcgacgacgaggatttccaccttgacctgctgttttacaaccgcaagctacgccggctggtggccgtcgaattgaagatcggcgagttcaaggctgcgtacaaggggcagatggagctttacctgcgctggctcgacaagcacgaacgggaaccggaagaagcctcgccgttggggatcatcctttgcaccggcaagaagcgcgagcagatcgaactgcttgaactggacaagtcgggcatccacgttgccgagtacctgaccagcttgccgccgcgtgcggtgctgggcgagaagttgcagcaggcgaccgagcgggcgcggttgcagattgagcagcggcagcctggcgaaaaatcctga

SEQ ID NO: 329212 - DNA, 1227 bp, Pseudomonas aeruginosa
atgatttccgacgatttgattgaaaaaacaaaacaatcccttaattccgcattgaagactattcagccatgcagccaagatgaggcaatgaagtcaataagatcaaaaacccagatggcaacggggaaatcattgaaagtagcggacgtaaaatcatatttcctcctgctagatgccatttacaacagtgacaagaaaataagtcaaagattcagcagggaaaccgtatataaaattattgatgagtgcgttttctcaaggggatttctggaaaaagatttctccaatgaagatgccttgtcgctaataaagacattcacagacgctatgccagaaaacgtcaagatatttgcaccaatatcaggattgaggttggacaagaacaagacggcgatcatcgggccttttgaaatcggtttttcctcgaagctaaaaatgccaatctcaaatgaggatggatactatatatgctcagaaataaaaaatagctacgataattcaaagtctattgctctcgcccatgaggagtttcaggagttcatcaatctaatattcttcatggctggaaagaaagataattcaattttcataaaaacgggacttccttcctatcctagctacacgcaccaccaaatgtatgtcgagactagctcatatcaaatacaaagagaatcttttgaatttggcgacacatcaataagcaacaagattgccgagaaagtacctgtagatgacgatttttttgtgaaaaatccaaatttctccagactctgggatttttataaagaaaggaaaaacggaaaaaaaatatctgattttcactcaagaatattaaattgctcaatttcaattggtgaagcaataaaaagccagaaggaaaaggactccgttatccacacgtgcattgcccttgagatcctattgtcttacgatgaaggtagtcttttccaaaaaagcattggcgatcgcttggcggatacatttgtattcattattgcaaaggataaagaggctagattgcaggcgagtgcattattgaaaaaggtttaccgaatgaggtctgccttggttcatggtggaagcaaggagattgatcagagctatgtcggaataattcagctaactagagccgctattgccgagttattaacatccgaaaaatacaaagagataaataaaatagataaattatatgaaatggtaaaggatgctcagaattcttattag

SEQ ID NO: 329213 - DNA, 282 bp, Pseudomonas aeruginosa
atggggcaccacacggcgacaggctggggcttgtgccctgaacatcagaagctgtccgacgatggctttgtcgccttagtcgaatgcgacccgcagcgcagcggctcgccgtctgacgctgatcggatgaagcccgaacaggcgtaccggactgggcgcttggcgcacctgaagcgcgaggttttcgctcgcgtgttcaacgtgccgatcgcggacaagcagccgtgcgtgttcgtcgaacccagcgtgatcgagcagttgcagtcgatggtcgcgcactga

SEQ ID NO: 329214 - DNA, 882 bp, Pseudomonas aeruginosa
atgatcgaatttacggacaacgacattctcaagttggacgaacgctttgcacaggaagacgtcccattccatgcccgcccattccgtgcggcgatggaaattcttggcgatcggttttccatcggggtcggcggcaatccccaagtgcgcgagatcgagcaggcatatgagcggctgattcccgaagtcaaattcacctggccaggcatggggacaggctttgccgcatcggtggatcgtgtcaggaaagtaacgattggcgttgtctttggaaccgtcaacataaccgtcgataaggggctgggcttttcaggtcatcaggaatgggctgcctggtgtcgcggcgaccgcaagatcgcagaaagatcagcgttcgcttttgctgacatgcacgaccttgtgtacggcattaatcgcggggcacaacacaaaaatgcctcgacattctggggtcttgcagccgagcaactgaaactggtttccgaaagtctttcccagtccggttcgattggcagcgcagttctgcaacccatctgcctgactgccgaactggcaatgaaaggcacgctgttgcatcttggcgtgccggagaaggacttaagaaaccctaaattatttggccacaacttgaacaagctcggcgaaagaatgaccaaagatagcagccacagggatgatgcattgctcttgccggcactgaacaagtttcctgactatgtaggtgatcgctacaaggaaacacaactgacccggctggagattattgccttggccttggatgcccagtttgtcgccgcttcggccgtgaggcgcatttctggcgaggacatggcaagtcagatggaagccgcagcaggcccgcgtggaaatttctttccgtga

SEQ ID NO: 329215 - DNA, 831 bp, Pseudomonas aeruginosa
atgcaactcgcatcccaattcgcttcccgctccccctcgctgcgcagcgactacccgctgaccgatgaccagatttaccgcgtagcgccgtccatcttcgcggacgcgccgcacgaaagccgttcgcagcggtacgcctatatccccaccgccgccgtgctggccgagcttcgcaaagaaggtttccagcctttcatggtgacgcagacccgtgtgcgcgacgaaggcaagcgcgagcacaccaaacacatgctgcgcctgcgccacgccagccagatcaacggcgcggaagccaatgaaatcgtgttgctcaattcccatgacgggacgagcagctatcagatgctggcgggcatgttccggttcgtgtgcagcaatggcctcgtctgcggcgacaccgtggccgatgtgcgcgtgccccacaaaggtgacgtttccgggcatgtcatcgaaggcgcttatgaagtcttgcgcggtttcgaccgggtgaaggattcccgcgatgccatgcgcgctatcacgctggacgaaggcgaagccgaagtgttcgcccgttccgcgctggccttgaagtacgaccccaccgacaacaagtctgcgcccatcaccgaatcgcaaatcctgatgccgcgccggttcgatgaccgccgcccggacttgtggagcgtgttcaaccgcacccaagaaaacctgaccaaaggcggattgcatggccgcagcgccagcggacgccgccagcaaacccgcccggtgcagggcattgattccgatgtgcgcctcaatcgtgccctctggatgctggccgatggcctgcgccagttgaaagcctga

SEQ ID NO: 329216 - DNA, 405 bp, Pseudomonas aeruginosa
gtggtcgccgacgaggtgcgcaacctggcccaccgtgcccaggagtcggcccagcagatccagaagatgatcgaggaacttcagatcggcgcccgcgaggcggtggccaccatgaccgaaagccagcgttacagcctggagagcgtggagatcgccaaccgtgccggcgaacgcctgggtagcgtgaccagccggatcggcgagatcgacagcatgaaccagtcggtggccactgccaccgaggaacagaccgcggtggtcgactcgctgaacatggacatcaccgagatcaacaccctcaaccaggaaggcgtggagaacctccaggccaccctgcgcgcctgcggcgagctggaaacccaggccgggcgcctgcggcacctggtggacagcttcaagatctga

SEQ ID NO: 329217 - DNA, 1005 bp, Pseudomonas aeruginosa
atgaacctgtctttccgcttttacgctttgccgtcgatcctgctggcatcgactgtcctgttctcgggctgcgcctcgcagggcaagccgccaccgtccatttcgctcgatgagccggtgcaggcgcagccgctaccggagccgcccgcgccggtggaagtggtcgccgtgcctgaacccctggcgctgcctgcgcagttgaagcaactgcccgaggtggacacggccccggccgagccggagccggccgacgagaaggtgcgcgtgtcccgcgccaatgccgaggcgcgcattgcgccgacccgcgagggttacgtcaatgcgattcaggtgtggcccttcaccgatggcgcgctctatcaggtctatgccgcgccggggcgcgtgaccgtggtttcgctccagcccggcgaggaacttgtcactgtcgcggctggcgacacggtgcgctggatcgtgggcgacacgtccagcggcagcggcgacgcgctgcgcgtcaatgtgctggtcaagcctatccgctcgggcctcaaaaccaatctggtcatcaccaccagccgccggacgtacctgctggagctgacctcgacggaaaaggcgtggatggcttcggtgtcctgggactatccgaaagaccggatgctggccttgcagcgccagtcacaggcggccagcgccgccgcgccagtcgataccggcttgtcgctggagaagatccgcttccgctacgcggtcagcggcagcaatccgccgtggaagccgctgcgcgccttcgatgacggcgagaaggtctatatccagttcccgccgggcatcacccaaggcgagttgccgcccttgttcgtaatcggtgcgcagggcgacgggcaactggtgaactaccgtttccgctcgccgtactacatcgtagatcggctgttcggcgcggccgaactgcgcctgggtggcgacaagggcgacgtggtgcggatcgagcgcaccgatggcgttgcacggaggaactga

SEQ ID NO: 329218 - DNA, 705 bp, Pseudomonas aeruginosa
atgcgattcaaacgcccgcaggtgcgctatgccgatacgccgcaacccgccactccgtaccaatccgccgcgcaggtgtgggacgaccgcatcggctcggcccgcgtccaggccaagaactggcgattcatggctttcggctgcctcacgcttgcgctgctgatggctggcggcctggtgtggcgttcggcgcaatccatcgtcacgccctatgtcatcgaggtcgatcagtccgggcaggtgcgcgccgtcggcgaagccgccacgccgtaccggcccgccgatgcgcagatcgcgcaccatctggcgcgcttcgtgacgctggtgcgctcgctgtccatcgaccccatcgtggtgcggcagaactggctggatgcctacgactacaccaccgacaagggcgcggcggtgctcaacgattacgccagcaagaacgaccccttcgctcgcatcggcaaggagtcggtgacggttcagatcaccagcgttgtccgcgccagcgacacgtctttcaacgtgcgctggacagagcagcgcttcgtcaacggcgcacccgctggcaccgaacgctggaacgccgtgctttccactgtcctgcaaaccccgcgcaccgaacagcgcctgcgcaagaacccgctgggtatctatgtcaacggcctgtcgtggagccgcgaattggattcttccgaaggagccaagccatga

SEQ ID NO: 329219 - DNA, 1374 bp, Pseudomonas aeruginosa
atgaatgacgtgaccatcatcgacagattcctcgatacgttctcgcgctatatcgactccggtttcgggctattgcaaggcgaagtcgcgttcctgacggccacgcttatcgccatcgacatgaccatcgccggcctgtattgggccatgagccatgcgaccggccagagcgaagacgtgatcgccaagctgctgcgcaaggtgctctacgtcggtgccttcgcctacatcatcggcaacttcaactggctctcgggcatcgtgttccggtcgtttgctgggctaggtatcaccgccaccggctccgctatcacgatggagaacttcttgcagccgggccgcctggcgaagaccggcatcgacgcggccgcgccgatcctcgaccagatcggcgacatggccggcttccccgaagtgttcgtgaaccttgaccccatcgtggtgctgttcatcgcctggctggtggtgatcctctgcttcttcgtgctcgcggtacagcttttcatcacgctgatcgagttcaagctgaccacgcttgccgggttcgtcctgatcccgtttgcgctctggaacaagacctcgttcctcgcggaaaaggtgctcggcaacgtggtttcgtcgggcatcaaggtcttggtgctggccgtcatcgtcggcatcggctcgggcctgttcgcggagttccaggttcatcccgacgagccttccatcgaccacgcgctggtcgtgatgctggcctcgctcgcgctgctggcgctgggcatcttcggccccggcatcgccacgggcctcgtgtccggtgcgccgcagctcggcgcgggcgcgatggccggcgctgctgtcggtgctgtcggcacgggcgttgccatcggtgccgccgcgactggcgtaggcggtgccgttatggcgggcgcgcgcatggccccggccgccgccaagctggccggcagcggcgcacgcgccgcaacgtcggcggccagcagcgccaagtccgcattccaggccggttccgccgctgcgggcggcggggccaagggcgcggccgctggccccggcaacgtcgccaagaccggtgcgcaggccgcaggccgccgcgccgcatcgcgtgtgtccgctgccgggcagaagatggccggttccttccgtgctggctggaacggcgcggatgccggcgctgccggttccgaccaggcggccgcaggcgaaagcgcggacagcgccgccagcgcaccaaagcaggagcaacccgcctgggccaagcggatgcaccgccgccaacagatcacccacgccgcgaccaccgctgcccacacgctgcgcggtggcgatggtggcggctcggggcaaggcccgagcctgcgccccgatgagtga

SEQ ID NO: 329220 - DNA, 327 bp, Pseudomonas aeruginosa
atgcgatgcgttcctgtcctgcttgccgtgctgctgaccgcttgcggccagcagccggccgaagacctggccgccaccttggccgccgatcccgtgcggctcaaggcgctgcgcgcccaatgcacagccgaccggcaagccgctggcgaagacacctgccgcgccgccgccgaagccttccggcggcgcttcttcgctggccaaaccgggccggacgaataccggacgctggccgacctgccgccgattccgcccagcttcgacacacccgccgacgacgcgccggaaggcgatgcgccgctagccgctgcggaggacacgccatga

SEQ ID NO: 329221 - DNA, 738 bp, Pseudomonas aeruginosa
atgaagacccgtgtgctttccgtttcgctcgccgccgtgctgtcggtgtcgctgctggccgtgcagcccgcatcggcgctgacggtgttcgacccgtccaacttcgtgcagaacacgctgaccgccgttcgcacgctggagcagatcaacaaccagatcaatcagctccaaaacgaagcgcagatgctgatgaaccaggcgcgcaacctgacgaagctggacttcaacatcgtcaaccggctgcgctcgacgctcgccacgaccgaacgcctgatcgccgaggcgcaagggctggcctatgacgtgcagagcatggatgccacgttctcgcgcctgtacccggagcagtacgccgccaccatcagcggcgaccagatgctgcgcgatgcgcaggaacgctggaaaaacacgctgaacggcctgcacaccgcgatgcggatgcaggcgcaggtttcccagaacctggcgcaagacgaaagcgcgctggccgacctcgtgagccagagtcaatcggccaccggcgcgctgcaagccatgcaggccaccaatcaactgctggcgctccaggccaaacagtcgattcaggcccagcagctccagatcacgcaagaccgggcggcctcgctggaactggcgcggcaggcggcggccaccgagcgcgcccgcgaagtgcggcggcgcttcctgggcaccggcacgccgtacacgccgcagtccgtcaatttctacaacaactga

SEQ ID NO: 329222 - DNA, 489 bp, Pseudomonas aeruginosa
ttgccattccgcgacgagccgctccatcgacaggtgctgccagcccttctgcgcctggcgctggcgaccgccgagcttgcgcccgaccttgaggtacaggcagcgccgcacgagttccaggcgttccggcgcctgctgttcccgcaggtagcgttcgagatggcgatagaccaggacgtaggggtccagttcgtcgagatcgagctggccggcgaatacctgctccttgaagcgcagggcgacgcagcggacccgcgggtgctcgctggcgtaggcttcggtgagcagcagcttgagcagcgacttgtagggcgaatcgatggccttggacaactgccagaggccggcgccgatgaactcccgggcggggatgtgcgccaggtggccgaggtcgagcacctcttcggcgcggatgaagcgtttgccgagcagggtccggcagtattcgtcgtagcgccgttcatgggccggcggcaccagccaccatag

SEQ ID NO: 329223 - DNA, 663 bp, Pseudomonas aeruginosa
atgaccggagccaggcacggcgcctggccttgcctgtgcccggacgcccatgaaccgacatcccgcactcagcctcgatctcgacgatggcatcgaccgcaaggtcctcggccagttgcgccaacgcttcctggcggtcaatgccggtcgcctgcaacgcgcccggcaggcgttgtccagccgccaggagcgggtcctgcgcctgctaccgctgctgttccacatcaaccatccgctgctgccgggctacctgtcggccagcacgccagcgggcctgagcggtttcgaggcggacgacgaagtactcgccgaagcccagcgcctggcccgctcgtttgtctacaagccacgcaggcaggaacccgcacagcagccgatccacggcctgttcctgatgggcagcctggggagcctggcccaggaggaacagagcgatctcgacctctgggtctgccatgccccagaactggagcccggcgcgcgccaggagctgcgccgcaagtgcgcgttgatcgaggactgggcgcgcagccagggcagcgaggtgcactgtttcctgatcgacgtcgcccgtttcggccaggacgaacgcaaagactggaaagagtccggcggcgacggcaatacccagcacttcctgctgctcgacgagttctaccgtag

SEQ ID NO: 329224 - DNA, 642 bp, Pseudomonas aeruginosa
gtgcgttcgactctgccaccactcactggtttgctgatgcttggtctgggcgggtgtgtttcgttccatcccgccggtcccatcggcgcaccttcagaaacagcgcaaagcacctacccgcacgctgttcaggtggaagaggtacagatcaccgacaggaaaattaccaatgctgactggcgccgtaccgtcagcgcggccctgacccaacagatcgggcagcatgtcgagcgcggtgagtatttcgggcgcttgatcagctttccagcgaaggtcgaaggcaatgacgttgtgttgaagttcagcttctcctcgctagaaggcaagcgaaccccgcatcccggctatatcccaggtaccctgctgacactgactgcatggatctgggtgaacggcccaatctacgtggacaagtacgatctggtcggtgacctgttgatcgaaaacgctgagggcaaggcgctggccagcagccacaaagcactggacgtccagcagaacacaggcctctgggatcacgactatgccgccttctccctgggcagtgtgcaactcactcaactggtggagtcgctgctgaaggatgccactgcgcagttgccctgccctgagggggagccttgtgaaagcaagccggattga

SEQ ID NO: 329225 - DNA, 576 bp, Pseudomonas aeruginosa
atgaagaaataccacctcgcgctattaggcgctctctgcctgcaactcaccggctgcatttcctattcgcaccagcagcaggcagacgccagcgcttggccgattccactgaactcggccaagcccaccgtcagcctcaaggtcgataccgactatcagttcaacggtacccccagtcagcgcggattcaatctacctcgcctggagagactgctgatcaaagagtaccagagcagtcaagcgttcgagcaagtcgcgctcggactcaatactgcggacgtctacgccaaggtgaaggttagcaaccatgaaaccggcagcatgcttctggcgatcctctcaggcgctactttactggtgattccgggaacctttgacaatgagtggatcatggagactcgtttcttcgatgccaatggcaaggaacaaggacgcgtggtcaaacgggagataacgactacctggacgcagctactgctggtgttcgccctgcccttcaacgaatcgactgatgagatcttggccaagttggcacggagcactctggaagaagcaagtcagcgcaagttgctctga

SEQ ID NO: 329226 - DNA, 873 bp, Pseudomonas aeruginosa
atggtgcgctgcttctgtcgcaaccgggccgccgccatcgccgtgcgggtcgaagagctgttccgcgagacctacgggcaactgcttggcggccagccaagccgctacctgctgcagatccgccagcagtaccacctgctggaaatgtcgccggaagcggtcagccacgagagcctgcccgacctgccgagcctgctccagcacctgggccgcgagcgagatggctacagcgccctgaagctggatcgtcacgccctggagggcgaggacctcgggctgatcctgtccatggggcggccggactgcatccaggtgttctaccggcgcgacttcgacagcgccgagatcagcctgctcgacgaacgcaacgccctctggcgccagcgccaggcattgcgtgacgaacgcagcctgctcgcaccgctgcagcgcttcctgcaatcgctgctgtaccggcgcaacgccctgtcgctggcggaacaggtgccggccgcgctggatatccgctactacgagttgctctccaacgacggcagagtgcatgtcgagcctcgcgaggcgccggaggccctggccgggcccgcgctgtacgagctacaggcgctactcgagcgcggcgaacgcaagcgcgtgcaggtcaccctgtactgcgaccaccaggagttttccgaactggagtacggcgccggcctgttcaaggcggtcgcccggcatatcctggcgcatcgcgcggaaagcgaaccctacccctgctacctgaccgacctcgacctgtcgcggctgttcgccgacgaacagccgcaaacgctgcactatctgcgttataaaagcgtcctggaaacggcgctgaaccaggcgctgctggaacaatga

SEQ ID NO: 329227 - DNA, 447 bp, Pseudomonas aeruginosa
ttggcctacgacgtgcagagcatggatgccacgttcgcccgcctgtacccggaacagtacgccgccaccatcagcggcgaccgcatggcacaggacgcccgcgaacgctggcagaacaccttgaacggcttgcacaccgcgatgcggatgcaggcgcaggtgtcgcagaacctcgcccaagacgaaagcgcgctggccgatctcgtgagccagagccagtcggccaccggcgcgctgcaagcgatgcaggcgacgaaccagctcctggctttgcaggccaagcagtcgatccaggcgcagcagctccagatcacgcaagaccgggccgcttcactggaactggcgcggcaagcggcggctatggagcgcgcccgcgaagtgcggcggcgctttctgggcaccggcacgccgtacacgccgcagtccgtcaacttctataacaactga

SEQ ID NO: 329228 - DNA, 210 bp, Pseudomonas aeruginosa
atgagccgcaacaccacggaccgcccgcgcatggcggcgatctatgcccccggtacggtacgcgcccgccgctggcacggcgatggcgacgtgcgcggctaccgtccgccgcgtggctggacggcccgcgccgacctgaccgacctacatcccattaccggccacaccttgccgcgtgccgcgtggtggattgtcgaaaccaaggaataa

SEQ ID NO: 329229 - DNA, 243 bp, Pseudomonas aeruginosa
atgacgacgcgcaagctgcggctcgggccgctgccgaaaaccgaatccacgaagctgacctttgcctgcccggccagcttgaaagccgacctcgaccgctacgccgcgctgcatgcgcagacgtatggcgaggcggtcgatgtggcgacgctgatcccgcacatgctggaagccttcatggcgggggatcgtggattcaggaagggaactgcgggcaaggctgcgccgccgaagccaagctga

SEQ ID NO: 329230 - DNA, 396 bp, Pseudomonas aeruginosa
gtggtgtggaaccggatcatcctgccggatacgtcttcgctcacactcgacaacctggccggcaccgaccctgccggctatgccgggctggaagacgacgtggactaccactggggccgcatcttcgccggggcggcgttgacgacgctgctgggtgtcggtgccgagctggccgcgccggagaaccgacaggacggcaaccgcatcgtcatcgccgggcgcgacagcgcgcaggacagcatcaatcaggtcggtcaggagatgacccggcgcaacatgaacatccagccgacgctgaccgaacggccgggcctgccggttcgcatcatcgtcaaccgcgatctggcgctgcggccctaccagccgcttttcttcaacagggggacttcacgatga

SEQ ID NO: 329231 - DNA, 315 bp, Pseudomonas aeruginosa
atggctaacatcggcaccttcaccgcagagaaagacggcttcaccggccagctccgcaccctgaccctgaacgtcaaggtcaagctggttcccaacgacaagggcgacagcgagaacgcccccgacttccaccttcaggcggccggccacgagatcggcgcggcgtggaagaagaccagtgaggccgggcgcgagtacctgtccgtgagcatcgacgacccttcgttcccggcgacggtctatgcccgcctgatcgagaacgaggacggcacgcacgacctgatctggtcgcgcagcaagcccaaggcagcctga

SEQ ID NO: 329232 - DNA, 1239 bp, Pseudomonas aeruginosa
atggctttgatcgtacagaagtttggagggacctccgtcggcaccgtcgagcgtatcgagcaggtggccgagaaggtgaagaaattccgcgaagcgggcgatgacgtcgtcgtggtggtatccgccatgagcggcgagaccaaccgtctgatcggcctggccaaccagatcatggagcagccggttccgcgcgaactggacgttatggtctcgaccggagagcaggtgaccatcgccctgctcagcatggccctgatcaagcgcggcgtgccggcggtctcctataccggcaaccaggtgcgtatcctcaccgacagtgcgcacaccaaggcgcgcatcctgcacatcgacgacacccacatccgcgccgacctcaaggccggcagggtagtggtggtcgccggtttccagggcgtcgacggcaacggcaacatcaccacgctgggccgcggcggttccgataccaccggggtggccctggcggcggcgttgaaggccgacgaatgccagatctacaccgacgtcgacggcgtctacaccaccgatccgcgcgtagtgccgcaggcccgtcggctggacaagatcaccttcgaggaaatgctggaaatggccagcctcggttccaaggtgctgcagatccgggcggtcgagttcgccggcaagtacaacgttccgctgcgcgtgctgcacagcttccaggagggtccgggcaccctcattactatcgatgatgaagaggaatccatggaacagccgatcatctccggcatcgccttcaaccgcgacgaagccaagctgaccatccgtggcgtacccgatacccccggcgtggccttcaagatcctcgggccgatcagtgccgccaatgtggaagtcgacatgatcgtgcagaacgtggcgcacgataacaccaccgacttcaccttcacggtgcatcgcaacgattacctgaacgccctggaaatcctcaagcagaccgccgccaacatcggcgcgcgcgaagccatcggcgacaccaacatcgccaaggtttccatcgtcggcgtcggcatgcgttcgcacgccggcgtggccagccgcatgttcgaagcgctggccaaggaaagcatcaacatccagatgatctccacctcggaaatcaaggtttccgtggtgatcgaagagaagtacctggaactggcggtacgtgctctgcacacggcgttcgagctcgacgcgccggcgcgacagggtgagtga

SEQ ID NO: 329233 - DNA, 2709 bp, Pseudomonas aeruginosa
atgaacggcatcccacccctgtcttcccgcgacgcccatgccagcccgccgcaacgggtgctggaacgattgcacagctccgccgccggcctggacgcggacgaagccgcccgccgcctggcggcgcacggctacaaccgattgcccgcgccgaaacgccaggggccgctgctgcgcttgctgcggcagttccacaacgtcctgctgtacatgatgctgttcgcctcgctggtcaccgcgctgctcggcttctgggtggacagtgcggtaatcctcctggcggtggtggtcaacgcgctgatcggtttcgtccaggagggcaaggcggccaacgcgctggacgccatccgcgacatgctttcgctgcatgccctggtcctgcgcgacggccagcgccaggcgctggacgccgaacgcctggtaccgggcgacgtggtgctgctggcctccggcgaccgggtgccggccgacctgcggctgttcgaaacgaagaacttccatgtcgacgagtcggccctgaccggcgagtcggtgccggtggagaagggctgcgtcgcggtggccatcgacgcgctgctcggcgaccgccgttgcatggcctattccggcaccctggtgaccagcggccaggcgcgcggagtggtggtcgccaccgccggggataccgaactgggccggatcggtacgctgttgcgcgaagtccgcaccctggccactccgctgctgcgacagatcgccagcttcagtcgctggctggccctggcgatcctgctgctggccggcgccactttcgtcctcggcaccctctggcagggccagccgatggtggacatgttcatgctggtggtggcgctgaccgcctcggcgattcccgagggactgccggcgatcatgacggtgatcctcgccctcggcgtacagcgcatggcccggcgcaacgccatcgtcagccgcctgccggcggtggagacgctgggttcggtgacggtgatctgctcggacaagaccggcaccctgacccgcaacgagatgaccgtgcagcgtatcgtcaccgccgaccaggtaatcgaggtcagcggcgccggttacgccccgctgggtggtttcagccacaacggcgaaggcctcgatcccgccggacgcgacgatctgcaggagatcggtcgcgcggcgctgttgtgcaacgaggcgcgcctgcaccaggagggcgaggcatggcaactggagggcgaccccaccgaaggcgcgctgctcagcctcggcctcaagctgggcctcgatccgcaggcgctggcggcggaacggccacgcagcgatgcgattccgttcgagtccgagcatcgcttcatggccaccctgcaccacgaccacgcaggccaggcgatggtctacctgaagggcgcgccggagcgcatcctcgacatgtgcgaggctgaacgggtgggcgactcggtgcggccgctggacccggactactggcggcgcctggccaccgacaccgccgctcgcggcctgcgcctgctggccatcgcccgacgggcgatgccggcggagcagcgcacgctggatttcgccgacgtggaacatggcttcaccctgctggccctggtgggcatcatcgaccctccgcgcgaggaagccgtggccgcggtcgccgaatgtcaggcggcgggtatcgcggtgaagatgatcaccggcgaccacgtcgacaccgcgcgggcgatcggcgccatgctcgggatcggcatcgaccggccggcgctgaccggcgcggagatcgagttgctcgacgaccagcgcctgcgcgaagtgctgccgggcgtcgatgtgttcgcccgcgccagccccgagcacaagctgcgcctggtgcaggccctgcaggccagcggcgaggtggtggcgatgaccggcgacggggtcaacgatgcgccggcgctgaagcgcgccgacgtcggcgtagcgatgggcaacaagggcaccgaggcggccaaggaggcggccgaggtggtcctcgccgacgacaatttcgccaccatcgccaatgccgtgcgcgagggaagggcggtctacgacaacctgaagaaattcatcctcttcatgctgccgaccaacggtggcgaggcgctgatcgtgatcgccgcgatcctgttccagttgaccctgccgatgacgccggcgcagatcctctggatcaacatggtcacctccagcaccctgggcctggcgctggccttcgatccggccgagcgcggcctgatgcagcgtccgccgcgtccgccggcggagcccctgttgtcgctgttcttcgtctggcgggtgctgctggtctcgctgctgatgatggcgggcgccctgggcctgttcctctgggagctggagcatggcaccgggctggagagcgcgcggaccatggcggtgaacagcgtggtggtgtgcgagatgttctacctgctcaacagccggcatatctacgattcggtgctcagccgcgagggcctgttcggcaaccgccaggtcttgctggcgatcgccgcctgcgtggtgctgcaactgctctatacctacgcgccgccgttgcaggcgctgttcggctcggtcggcctggccccgggcgagtgggcgcgggtgctgctggccgggctcggcctgttctgcgtcgccgaactggaaaagtggctatgtcgccgggtccgtgcccggcaggcctga

SEQ ID NO: 329234 - DNA, 1458 bp, Pseudomonas aeruginosa
atgaaacggtccttcctttccctggcggtagccgctgtcgttctgtccggctgctcgctgatccccgactaccagcgccccgaggcgccggtagccgcggcctacccgcaagggcaggcctacgggcagaacaccggcgcggcggccgttccggccgccgacatcggctggcgcgagttcttccgcgacccgcagttgcagcaactgatcggcgtggcgctggaaaacaaccgcgacctgcgggtcgccgcgttgaacgtcgaggccttccgggcgcagtaccgcatccagcgggccgacctgttcccgcggatcggcgtggacggtagcggcacccgccagcgtttgccgggcgacctgtcgaccaccggcagtccggcgatttccagccagtacggggtgaccctgggcactaccgcctgggaactcgatctcttcggccgcctgcgcagcctgcgcgaccaggccctggagcagtacctggcgaccgaacaggcgcagcgcagcgcgcagaccaccctggtggccagcgtggcgaccgcctacctgacgctgaaggccgaccaggcgcagttgcaactgaccaaggacaccctgggcacctaccagaagagtttcgacctgacccagcgcagctacgacgtcggcgtcgcctccgcgctcgacctgcgccaggcgcagaccgccgtggaaggcgcccgcgcgaccctggcgcagtacacccgcctggtagcccaggaccagaatgcactggtcctgctgctgggttccgggatcccggcgaacctgccgcaaggcctgggcctggaccagaccctgctgaccgaagtgccggcgggcctgccgtcggacctgctgcaacggcgcccggacatcctcgaggccgagcaccagctcatggccgccaacgccagcatcggcgccgcgcgcgcggcgttcttcccgagcatcagcctgaccgccaacgctggcaccatgagccgccaactgtccggcctgttcgacgccggttcgggctcctggttgttccagccgtcgatcaacctgccgatcttcaccgccggcagcctgcgcgccagcctggactacgcgaagatccagaaggacatcaacgtcgcgcagtacgagaaggcgatccagaccgccttccaggaagtcgccgacggcctggccgcgcgcggtaccttcaccgagcagttgcaggcacagcgcgatctggtcaaggccagcgacgagtactaccagctcgccgacaagcgctaccgcacgggggtggacaactacctgaccctgctcgacgcgcaacgctcgctgttcaccgcgcagcagcaactgatcaccgaccgcctaaaccagctgaccagcgaggtcaacctgtacaaggccctcggcggcggctggaaccagcagaccgtgacccagcagcagaccgcgaagaaggaagatccgcaggcctga

SEQ ID NO: 329235 - DNA, 234 bp, Pseudomonas aeruginosa; identical to SEQ ID NO: 323737

SEQ ID NO: 329236 - DNA, 1407 bp, Pseudomonas aeruginosa
atgaacgacccccagggcttcgaggccatctcgcgccgcgaacagggcctgcaacggcggctctcggccgcgcagatgagcatgatcgccatcggcggcgccatcggcaccggcctgttcatgggcagcgccttcgccatcggtttcgccggccccagcgtcctgctcagctacgccatcggcgcgctgatcaccctgctgctgatgggctgcctggcggaaatgaccgtggcccatgccacccccggctcgttcggcgccttcgccgagcactacgtcggcccgctggccgggttcctggtgcgctacgcctattgggcggccatcgtcctggcggtgggcaccgaggtcacggcggtggccatgtacatgaagtactggttcgccggtatcccggaatgggtctggatcatctccttctcgaccctgctgatcggcctgaacgccagcagcgtgaaagctttcggcaacttcgaatactgcttctcgacactgaagatcgccgccatcgtcgccttcatcctgctcggcgcctacctggtgttcggctccgccaacccggcctacggcgtgcacaactacagcgcccacggcggcttcttcccgcacggcctgaaaggcatgtggatcgccgtggtggtgtcgatcttcagttatctcagcgtggagatgatcgcggtcgccgccgccgaggccgagcatccggaacaggcggtgaagtcggcgttccgctcgaccatcgtgcgcctggtggtgttctacctgctgaccctggcgctgatgctcgccatcgtcccctgggaccaggccgggcagagccagagcccgttcgtcacggtgatgcaggcgatcggcctgcccggcgccaccggagtgatgaacttcgtggtgctggtggccgcgctgtcggcgatgaacagccagctctacatcaccacccggatgatgttcagcctgtcgcgcgcggggcacgcgccgaagggcctcggcgaactgagccgccagggcgtgccgctgaacgcgctgctgctgtcgagcgtcggtatcgccctggcgaccctgctcaacctggtctaccccgagcagtccttcaccctgatgatggcggtgtcgatgttcggcgccctcttcacctggctgatgatcttcttcacccacctctgcttccgccgccaccgcgcccgccacggcggcgcgccgctggccttccgcatgcgcctggcgccctggtcgacattgctcggcctggcgctgatggcggcgatcctggtcaccaccttcttcaccgaggcgttccgcatgaccctggtcttcggcgtgccgttcctcgcgctgctcagcgcactctacctggtcttcgtccgcaagcccggcagggattgtccgatagaacgggcaacgccctag

SEQ ID NO: 329237 - DNA, 303 bp, Pseudomonas aeruginosa; identical to SEQ ID NO: 328636

SEQ ID NO: 329238 - DNA, 1929 bp, Pseudomonas aeruginosa; identical to SEQ ID NO: 328641

SEQ ID NO: 329239 - DNA, 1197 bp, Pseudomonas aeruginosa
atgacggacaaccatatcgatgtactgatcaacggctgcggcatcggcggggcgatgctcgcctacctgctcggccgccagggccaccgcgtggtggtagtggagcaggcacggcgcgaacgcgcgatcaacggcgccgacctgctcaagccggccggcatccgggtggtcgaggcggccgggttgttggccgaggtgacccgtcgcggtgggcgggtccgccatgagctggaggtctatcacgacggcgagctgcttcgctatttcaactattccagcgtcgacgcgcgcggctatttcatcctcatgccctgcgagtcgctgcgccgcctggtactggaaaagatcgacggcgaagcgaccgtcgagatgctgttcgagacccgcatcgaagcggtgcagcgcgacgagcgccacgcgatcgaccaggtgcgcctgaacgacggccgcgtgctgcgtccgcgggtggtggtgggagccgacggtatcgcctcctacgtgcgccgccggctgctcgatatcgatgtggaacgccgcccctacccgtcgccgatgctggtcggcaccttcgccctggcgccctgcgtggccgagcgcaaccgcctgtacgtggactcgcagggcgggctggcctacttctatccgatcggtttcgaccgcgcgcgactggtggtgagcttccccagggaggaggcgcgcgagctgatggccgacacccgcggcgagtcgctgcgccggcgcttgcaacgcttcgtcggcgacgagagcgccgaggcgatcgccgccgtcaccggcacttcgcgcttcaagggcatccccatcggctacctgaacctggaccgctactgggcggacaacgtggcgatgctcggcgacgccatccacaacgtgcatccgatcaccggccagggcatgaacctggccatcgaggacgccagcgccctggccgacgccctcgacctggccttgcgcgacgcctgcgcgctgggggatgccctggccggctaccaggccgagcgcttcccggtgaaccaggcgatcgtctcctatggccatgcgctggccaccagcctggaggatcgccagcgcttcgccggggtcttcgacaccgccctgcagggcagcagccgtacgccggaagccctgggcggcgagcgctcctaccagccggtgcggtcgccggcgccgctcggctga

SEQ ID NO: 329240 - DNA, 912 bp, Pseudomonas aeruginosa
atgaacgcctacgacatcgaaatcgtcaacgacgccgcgcacgccggcgaagccaaccacggctggtgcttcggcctgccgccgggcatccgtccggagcagtggccgctggatccggacaccggctatccgctgatgcacggcttcaccctgctgctgccggaggactaccgggtgcatggcccggagatcgtcgcgctgagcttcttctccctcgccccggaccagaacgacggtggaccgaccagcgtcgacggcattcgcgagatgctcatcgatccgcccgcgcaaccgccggccgaagcggagctgcggccgttctgggaggccgggcgcaatagccatccgcgtttgcatcggatggaggacatcctcggcggcgcctatgcgttgatcctgctcgacgccgctgaattcagcggcgcgccctgccagccgccggcgctgccggcgggcaacccgctgttggcgcagaccgagccgccgcagtggctggaggctggttcggcggccagcttcgtgccggactgggcggaggacgactactacctgctgcgcgccctcggtggccgcccggcggccggccaccagcagcgctaccccctgcgctggacggcgcgggcgcaagaccccaacgccggggtggtgcccagcgaatacggcgacggcggctaccagctgccgcactactggctggacggcaagatcgagcgcgacaactaccgcgagcatccctgggtggaagggcacctgccgaaccatatcggcggcaccatgcgtccggtgcagggcgtaccggagatgagtcccttctacgtagagttcgaggaatacctgggcggctacaacttcggcggcggcaacgcccagctcgatttccgcgacatgcgcttcgactgggcctgcggctga

SEQ ID NO: 329241 - DNA, 156 bp, Pseudomonas aeruginosa
atgaagaaggtgccgaagcagacgccgaggacgatcgccaggatcgagtacagcgcccccaggccgagggccggcccggtgaagccggtgaccatggtggtgagtacgaaattgccggtgaaccagaacggcgcctggtgccagaccttgccgtga

SEQ ID NO: 329242 - DNA, 2430 bp, Pseudomonas aeruginosa
atgttcgaattttcccgctcgtcgtccgccgaggccgagaggccggaacccttttcgcaggaaggccccgccctctggagcgcttcgctgaggagttgggacctgtgcttcgagatggacgaacaggaccgcgtgatccgggtcggcgggcggcaggcgtatcgtctgcagtgcgcccatgggcttggcgaacagccgcggcctttcgccgagtatctggagcggcgcgcccccggtgcgccgacgctggccggcctgcgccggggcgagcgtctcgacctgacgctgcgcagcgttgccgccgcgccattgacctgtcgtttccagccgatgcagccgctcgacggcctgggacgctcgctgctgctgggcatggacatctccgacctcaactggcagtccgacagccagcagcaccagttgcagagcctgagcctgggcaagctgatcctttcgcgtctgcgccatgtctcccacgggcacctggcggaggcggtccaggagattctcgaatcgctctccggtgcgttccagatgcaggctatcgccctgctgctgggcgacggcaagggcttctgcacggtcttcgccagtcatgtgcggcctggcagtgacagtttgctgcgaccgaccctgcaactcgccgacgacgatctgcgtgaaggggcgggcgcgcgcttgctacgccgtggcgaaggcgcctcgacgctgctccggcagattggcgaggacgcgctctacctggtgccggcgacgatgcgcggtggccgcctgggggcgttgctggtccggccgatgtcgctggagcagctcgcccaggggcccgcgccgcaggactggcaatacctcgcggaactgctggcgaaccaggtggcggaccgctgcgaactccacgagcagcacgacagttcgcgcaagctggggctgttgcaggagatgatcggcggcggctggtggcgttactgggcggagcaggaactcttcgaactggcgccggccttgcacgacagcctggggttgaccggcgagtatcgtcgggtgccgttggaacacctgcagggcctgctgcaaccggcggacgccgacgagctcggcctgcgcctgcgtgccagcctgcgcagcggccaggcgctggcccaggacctttgcctgcgtcagccggatagccgcggcgagcgccgctggctgcgcatcgagggccggccgctgggacgcggcagtgccctggggctgtccggcgtgctgctcgacatcagcgaaggccggcgccaggaggaacgggcacaggcggcccacgcgcggttgcgcagcctgatcgacagtgcgccggtggtgatctatgtccagcgggtcgagcaggggcacctggtgccggagttctacagcgaaagcgcgagcaacctgctcggcctcgacctgcagggacagagttggcaggcgctcgccgagcgggtgcatccggatgatctggaggcctttttcgcccgcggccgcgagctgcttcgcgagggccgggtgaagacccgctatcgcctcgccgatggccagggcaactggcactggctctacgacgaagccaagctgctgcgcgatgcccagggcctgcccagcgaagcggtgggcctgtggctggacgtgaccgagcagcacctggcggcacagcgtatcgccgagagcgaggaacgctaccgggtcctggtggaggattcgccggcgctgatctgtcgctataccgccgacctggtgctgacctacgtgaaccggaccttcgccgatagcctcgcgaccagcccggagcgcctggtcggtcgccggctcgacgagtggctggcggcggaagacgccagcgccttgcgcgcgcgtctgctgggctcgccgcgggagggcgccagcgaggtgccggagctgcgcttcaacctgccggggcaacgttttctctggctggtgtgggccgagcggccgttgttcgacgcccgtggcgaattgtgcgaggtacaggcggtggggcgcgacaacacgccggttcgtcgggcccagcagcaactggcgcaaggcgccaagatggccagcctgggggagatggtcagcggcctcgcccacgaggtgaagcagccgctgcacgtgctgcgcatgaccctcttcaacatgcgccagcggatgaacagcgtcggcctcgacggcgactacctgggcgagaaactggagcgcatggatgcccaggtcatgcgcgtcgaccgcctggtcagccacctcggcgtgttcagccgcaagtcggcgctggaggcgctgccgttcacccctataccgccttcgaaggcgccctggggctgctcggcgaggggctgcgtcagcacgccatcgaggtggagtgcccggcgccgacgcagcggatggtggtacgagggcaggcggaccagctggaacaggtga

SEQ ID NO: 329243 - DNA, 645 bp, Pseudomonas aeruginosa
atgagacagccaaccgcactgattgcctgcgagttctccggacgtgtccgcgatgctctggcccgggttggtttttacgccgtgagctgcgatctgctgccttcggaaaccgaaggggaacacgtccagggggatgtcctggaaattctggactgggggtgggatttgctgattgctcacccgccctgcactgacctggctacctcgggtgcccgctggtttcccgagaagattgctgacggtcgtcaggcacgtgccctggagttcgttcgtaccctgttgtcggcgcctattcgattcaaggcactggagaatcccaagtctgtgatctccagccatattcgcaagccggaccagatcatccagccctggatgttcggacatggcgagcgcaaggaaacgcacctctggttgcagaacctgccgcttctggagccgacccgtattgtcgatggacgttctccggtcgtgcattacatggcgccaggccctgaccgctggaaggaccgtagccggacctatatcggtatcgccgaggcgatggccgagcagtggggccgttatgtgatgcgggccttggcggaaccagaatctgtgagttttcacccccagcagcaggacctgctgcgtgtcctggagggctga

SEQ ID NO: 329244 - DNA, 864 bp, Pseudomonas aeruginosa
atgcccgaccgccgtaccctgctgctcactgtcctggcgatgctggccttcgccggcaattcgctgctctgccgcgcggcgctgaaggacaccgccatcgacgcggtcagtttcaccgccctgcgtctcttctccggcgccctcatgctcgccgtcctgctgcatctgcgccggcgcccggccacgcccgcgcgcggcggctggcgcggggcggcggcgctgttcgtctacgcggccgcgttctcctacgcctacgtgcagctggacgccggcaccggagcgctgctgctattcggcgcggtacaggtcaccctgctgctggccggcctgctgcgcggcgaacggctgggcggacaggcgctgctcggtttcctgctggccctgggcggcctgctgttcctgttgctccccggagccagcgcgccgccgctgggcggtgccctgctgatgctcctgtccggcctcgcctggggcctctataccctgctcggccgcggcggcggcgatccgctggcggtcagcgcgggcaacttcctgcgtgcccttgccttcgccgccctgctgctcctggcattccacgggcagttgcggctggacggcgccgggctggcctatgccctgctttccggcgccctcgcctccggcctcggctacgccgtctggtacagcgcactgccggggctgacggcgatccagggcgcctcggtgcagctcagcgtgccggtgctcgccgccctctgcggcgccctgctgctcggcgagccgctcgccccgcgattgccgccggcgaccctggcggtgctcggcgggatcgccctgatcctcgccccgcgcctgggccgcgcggcgcgcgaaggcgcctga

SEQ ID NO: 329245 - DNA, 303 bp, Pseudomonas aeruginosa
gtggcgcgccaggtgctggccggcctggtgactcagtttcaggccaccatggaggcgatccaggtggacagcgcgatcacgccagcggtcaaggtgcagatgctcgccagcctggccgacgcctacaacaagtcgatcagcgcatcgaagcgggtactaccggaaacctccagcctggccaccgcaatggaagtcatccagcgcctggcggccttcatacgtgaacagttcccgcagcacgtccaggccttcgccgagattctggagccgttcggggaagtagtcgctaaggggttgaaatga

SEQ ID NO: 329246 - DNA, 1776 bp, Pseudomonas aeruginosa; identical to SEQ ID NO: 328962

SEQ ID NO: 329247 - DNA, 330 bp, Pseudomonas aeruginosa
ttgctggccggtggtgggctggaggacgtggcgcgccaggtgctggccggcctggtgacccagttccaggccacgatggaagccatccaggtagacgcggacatcaagcccgccgtgaaggtgcagctgctcgccagcctggccgatgcctacaacaagacggtcagcgcgtccaagcgcgttctgcccgaaacatcagcgctggccaccgctatggaggtgctccagcgcctggccagcttcatccgtgagcggttcccgcagcacgcccaggcattcgccgaggtgctggagccgtttggagaggtgattgcgaaggagctgggctga

SEQ ID NO: 329248 - DNA, 1077 bp, Pseudomonas aeruginosa; identical to SEQ ID NO: 328685

SEQ ID NO: 329249 - DNA, 408 bp, Pseudomonas aeruginosa
atgagcctacgcgccgtcaacctcgcaaaaatccacatcgccaaggcccagctgggcatggacgatgacacctatcgcgcattgctcgctcgcgtcgcgggcgtgcgctcggccaaggacttagggccgcgccagattgaccaggtactggtcgaactccagcgtctgggctggaaaccgaagagcaaccggcaaggccgggcgacgccaaaagtgccgcaaaaccggcaaaccgtgctgcgcaaaatcaccgcgctcctggccagcgcccatcgcccctggagctacgccgaccatatggcccggcgcatgttccaggtcgagcgggtcgagtggctggacgacagccagctctaccggctgatgcaggcgcttatcatcgacaggagccgccatggccaggtctga

SEQ ID NO: 329250 - DNA, 855 bp, Pseudomonas aeruginosa
gtgcgcgcgcagaagctcaaggccggcgagtgccagatcaccctcaacccacgccccgccgatctcaaggccctgcaggaagcggcgaacctgaaggtgccctcgcagccaggcttcaacctcggctacatcgcctacaacgtcacccacaagccgttcgacaagctggaagtacgccaggcgctggacatggcggtgaacaagaaggccatcatcgacgccgtctaccagggcgccggccagttggcgagcaacggcatgccaccgacccagtggtcctacgacgagaccatcaaggacgcgccctacgatccggccaaggccagggagctgctgaagaaggccggcgtcgccgagggcaccgagatcaccctgtgggccatgccggtacaacgcccctacaaccccaacgccaagctgatggcggaaatgctgcagaacgattgggcgaagatcggtatcaaggcgaagatcgtcacctacgaatggggcgaatacatcaagcgcgccaagggcggcgagcatgacgccatgctgatcggctggagcggcgacaacggcgacccggacaactggctcggcaccctctacggctgcgacgcggtggacggcaacaacttctccaaatggtgcgacgccggctacgacaagctggtcaaggatgccaagcgcaccaccgaccagggcaagcgcaccgagctgtacaagcaggcccagcacatcctcaaggaacaggtgccgatcaccccgatcgcccactccaccgtgtaccagccgatgcgcaagacggtacacgacttcaggatcagtcccttcggcctgaactcgttctacgaggtcagcgtcggcaagtag

SEQ ID NO: 329251 - DNA, 657 bp, Pseudomonas aeruginosa
atgcttgggcgtggtagggatggcgcgggaatgccggcgacgcccccggtggcgtggcggacggcccccgcccagtcatgtagcgccgcccatccgcgttggttgatgtccagcagcagcggagtaagccctggctgcatcgcggatgccgaccggattacgacctcattgttggatagccaggccggtatgctgtcgctggtcggtgtgcctggtccctggacctggccgccacccgcgaagccgaaaatgctggtgatcgaagacaaccagccactcccgccaccagccactccagcagccccggcagctcccgcagcgccggtcaccccactgacaccattggcggcggccagcgaggcggcagcggcctggatagcggcggcgccgctcaggagcgtgccgccagcagtcgccagggcgccggccgaggcggatacagccgaggcgccgaccgtcagcccctgggcgccgccatcggtgccaccgcccaggccaaacccggaaagcagagacgcccctagctggcgggtcgccatcctggccaggtcgccaatcatggtgcggacgaagtcatccagcgaggccttgccagtcgtcacaaaggtaacgacggcatcctccagaccggagaaggcgttactaaacagttcgtag

SEQ ID NO: 329252 - DNA, 507 bp, Pseudomonas aeruginosa
atggttagcttccagcgccttgatcttgtcgttgtactcgtcgaggctcatgcctcgcgagccgtcaccgtactggctcgccaggtccaggcgctgctgcgcgaatcggtcgtcaaggctgccacgctgatcgaacaagcggcgctgttgcgcgcccatgcccacggcagcggcggcacgttgaccctggagggccagcgcatcctgttgttgctggagcgcgtcgctgtaggccttgactgcctgggcctgtttcttcaggcggccctgttcgttgagctggaggacttccaggtcggcgtcggccttcttctgcgccttgaccatgttgttcctggcctcggcgatcttctggtccaggctgatgcgctgggccgccgtggtggaacttttgtcgcgcagcgcctccagcgcctggatttccccctcataggctgcggtgacctggtccttgttctggctgatcagttcgccgcgctgcgcgacatagtccgcatagctcagtag

SEQ ID NO: 329253 - DNA, 162 bp, Pseudomonas aeruginosa
gtgaatgtccaggatgcgctgccgggcgtccatttcgttgatgatgccggcatcctgctggacgttaacggacgactcggcccgttgctggtcggccagcaaatcgtccatctgctgcttgacgtcatccaggcggaccttggcctcggcgacggggattag

SEQ ID NO: 329254 - DNA, 216 bp, Pseudomonas aeruginosa
atgttgtccgccgcctcgcggttcgccgccacggtcttgcgcagcccttcattcaggtcgcgcaacgacaggctgccctcgatgcctagcttgcggatttcctcggtgctcttgccggtggactctgccagggcgttcaccaggctgggcatggcggccatgatcgactgccaggcgtcagagctgaccttgccggtctggatcgatttcgagtag

SEQ ID NO: 329255 - DNA, 159 bp, Pseudomonas aeruginosa
atggcgctcgccgcacggtccgccgacgcggcgttggttaccagcaagaaggaaaacgaatcggtgatgtccagcgcttgttcggtggtgtaccgcaacgacttcaggctgtcggcggtgcggatgtacaactcttgggcttccgccagcggccgatag

SEQ ID NO: 329256 - DNA, 495 bp, Pseudomonas aeruginosa; identical to SEQ ID NO: 328947

SEQ ID NO: 329257 - DNA, 1149 bp, Pseudomonas aeruginosa
atggatgactctggttgtaagcttccagataaaaacgacctcgaaaatggaccgcctccaccagagggctgcgcaggaaatccggtcaatatcaccaatggcaacaaataccaagttgaacacgacttaagtattccgatcccgttgacccgttactacaacggcctggacggcttgtggcgacattcgtattctgcgcgtataacacgcaagggtgatggcttcctactctaccgcgaaaacggaaaagcctcggagttcacgggatcgggaaaagatctaacctccatcacagacctgggcaggcttagccggttaccaggaaagtttagctacacctccgaactcaacgaagtgatggagttcgaccagaatggaatactcactaaactcaccaccaaggaaggtcgcaaatatcgtgtagagcgaggcgctaatcttacgattggcgacgagcatggcaacaagctcgttctctcggagggagccaaccatcaactccttcgcgctcagatagggggtatatccattgagtacacatacgacaaggaacagcgactcacatcggtaacacggacagatgggcaatacagcacgaaaacacagtacctctatgacgacccgaggaacataaaactacttacaggcatccaggataacaataatcgccgcttcgccacctgggcctacgacaaccaaggccgcgccatctccagcgaacacgccaacggcgccgaaaaggtctccctcgcctacaacgatgacggctccaccaccgtcaccaacgaatacggcaagcaggccacctaccgcttccaggtgatccagggcatcaaacgcatcgtcgccatcgaaggcgaaccctctcccaactgccccagcagcaattccaccttcacctacgatgaccagggcctgctcaccagcaaacgcgacaacaacggcaacctgaccacctaccagtacaacgcccgtggcctggagacctcgcgcaccgaggccgccggcactgcgcaggcgcgcaccatcacaaccgactggcacccgaccctgttcctcccggtgcaggtcagcgagcccggccggatcacccgctaccagtacgacgccgagggacgcaagaccggcgagaccgtcaccacccgctga

SEQ ID NO: 329258 - DNA, 624 bp, Pseudomonas aeruginosa
gtggatacggataccgcgctcgatatcggcaacgataccgagcatctgctacaggacgtgcagggcaccctggccgacctcgccggcatggcccagcaactgagccagcagaagcaggaagcgctcaagcagcaggagtcgctggagtcgctccagacgcaactgcacgagaaggagcggcaattgcaggaaaaggaaaagcagctccggcagtggcacaagcgcctgcaggacgaccgccaggcgctggagcgggaaaccgagcagagcaaccgtctcctcgccgagcgcagcgcggccctgcaacaactcgcggaaagcgtcgaagcccgcgagcgcagcagcgcgcggcgagccgaagtactgcagatcgaacaggaacgcctcgaagagttgcgcagccagcagaacctgcgccaggccgaactggaaaagcgcgaagccagcgtccagcagcgcagcctggaactcggcgagcgcttcaagaagctggaaagcgcccgcgagaagctggcgcagatcgtcaagggtttcaacgagaccgtacagttcaataccgctctgcacgccatcagtcataccgggttgaagcgccaggaagagagcgcagccgaactggaataa

SEQ ID NO: 329259 - DNA, 813 bp, Pseudomonas aeruginosa
atggccaaggttaccgtcgcctgttgccagatcgctccgcggatcggcgcacaggagcacaacctgcgcctggccgagcgggcgatccgcgaggccgcacggcgcggcgccaacgtcgtggtgctgcccgagctggccgccagcggctacgttttcgccgatcgcggcgaagccctggccctggcggaaacccgcgacggaccgagcctggggttgtggaaagcgctggcaggcgaactcgacctggtcatcgtcggcggcttctgcgaacgcctcgacccgcagcgagtggcgaacagcgcggcgctggtggacgccgacggcgtgcgggcgatctatcgcaaggcccacttgtggaacgaggaaggcggcatcttcgaggccggcgagcagccaccgccggtggtcgctacccgcttcgggcgaatcgcggtgatggtctgctacgacctggagtttcccgaatgggtgcgcctgccggcgctgtccggcgcgcaactgctctgcgcgccggtgaactggccggcggcgccgcgtcccgagggcgagcggccggcggaagtggtcagggtgcaggccaatgcctcggtcaaccgcctgttcatcgccgcctgcgaccgctgcgggcaggaacgcggggtcgactgggtgggcggctcggtgatcgtcgacgccgacggctacccgctggacgggccgctgcagggcgaggcgggtatgctgctggcccgtctcgaccttgccgaggccgacgagaaacgcatcagtgcgcacaaccacgtgcaccgcgaccggcgacccgagctgtattga

SEQ ID NO: 329260 - DNA, 684 bp, Pseudomonas aeruginosa
gtgccgggcggcatcaccgacaacgggatcatctgttccggcgacccgcagtccgatcagttcatcatcaccgcgccggccgacctcgatgtcgcgctgctgtacaaggccaaatcgccgagtgatgccatcgatctggtcgtctacgacatgcactacggcgatgtcgaggcagcggtttcctgggtgggggagattggcgacgtggactggccgaccgtggacagcagtcgcataacgtgcgtgtccgaagacgagctgatggaccagccaggcttgatcgataccagttgccgcacctgcacggcgaccttgggcgaccaccgctgcaaggtaaacctcattccgtatcgagtgacgctgacaccgcagagcgtgtccgcgtgggtgatttccagcggagtggtcgccggctatgccgacggctggtttaccggtggctatgtggagtggcaggtggacggcgacaactacgaccgccgctacatcgagcggcacgccggggccgatctgcacatcctgggcggcaccgagggcgtcccggcgggggggcaactgcgggtctatccaggctgcgatctgctcgatgaaacctgcgccggaaagttcgacaacatcctgaatttccggggctttaacaagatgcaaggcaagtcgccattcgatggcgaccaggtctggtga

SEQ ID NO: 329261 - DNA, 924 bp, Pseudomonas aeruginosa
atggcttacttcacaggaacagcgaacaacccggccgacttgctcgccaagctgcgcgtccacgccgagtcgctcggctgggtcaccgaccgcgcctcggcatcggaatggctttgtcacaacgccgacggctactggtcgttcaacgccggttccaatcaatggcagctcgcgggcaatacggggttcgacgacgggcttgcgtggaatgcgcagcccggcaactcggtgcagaacaacccgtattcgtcgaaagaagcaaccatagcgcagctcagcgccgggccattcacgcgctatcacctgttcgccaccgctgcgtatctgcacctgcacgtcgaaatcgcggccggtcagtttcggccggtgatgattggctcgctcaacaaacggggcgtcggctatacgggcggccagtatgtttgcggctcgttcctctacagctctggccaggcgctcacaaacaactggtcatcgcatccattcgatggttaccacattcgatacagcggcggcggcagcatgctgcggctagacagcctcgacggtggcccatcgccggagtggttgccgttcgactacacaacgaacgtcgcccggcgcgtcgtcggccccggtcgcggaaactacagcagtcagtaccatcccgatgtggggctgatcgacgccagcgcaaacgagctgaacagctcgaccacccctgttccctgcgccatctatgcgttcggcgctcagcagcgctcgcgatacgtgggcgaggtgccggactttggcatatgcaacatggccttcctcgcgcctggcgatccgctggtgatcggcagcgacacttggcgcgtctatccgttgctccaacgcggaagcgctaccgatttcggcaacaccagcgcctgggtcggctactgcttccgggtgcttgagtaa

SEQ ID NO: 329262 - DNA, 291 bp, Pseudomonas aeruginosa; identical to SEQ ID NO: 328687

SEQ ID NO: 329263 - DNA, 1248 bp, Pseudomonas aeruginosa
atgcacggccggcctttccggccggaaatcaccaccatcattgacatccgtacccgccgcattccgggatggtccaccggcctggccgagtcggccctggtggtggtcgatgccctgcgcgacgcctgcaccaagggcggcgtcccggccatcttctacgtggacaacggctcgggctacgtcaaccacatgatgcgcgacgaggcggtcggccttatgggccgcctgggcatcgatatgaagaacagcctgccctacaacagtcaggcgcggggcgtgattgagcgcgtccaccagagcctgtggattcgggccgccaaggaactgcccggctacatcggcgccgacatggaccgccaggccaagctggccaccttcaagctgacgcgccgggccatcgccaagggcggcaccatgccgctgatgtcttgggaatcttttgtcgcgttctgcgaacagcagattgccgaatacaacgaccggccgcacagcagcttgccgcgcatcgttgacccgaacaccggccgccgccggcacatgacccccaacgaggcctgggcgctgcacgaagcggagggtttcagcccgatgcgcgtcaccgacgacgaggcccggccgctgttccggccccaggtgctgcgcaccgtccgccgctgcgaactggagttcatcggcaaccgctacttcgcccgcgagctggaggaattccacggcgaccaggtggccgtgggctacgacatccacgacgccagcagggtgtgggtctacgacggcgagggccgcttcctctgcaccgcagagctgaacggcaacagccgcgactacatgccggcttcgtatgtcgagcgtgcccgcgagaaacgcgcagaggcccgcgagaagcgcgccctggctcacctcgacgagattcgcgccgagcgtgacggcgggtatgccctggaaatggatgcgccgctgtccatccccggcctcggcacgatcacccctgagcaactccggtcgcgcagcgccgcgaccctcgaaatgcaggccgagcggatcgacgaaccgcgcccggccgcagccaccgcccaagccaccaccgcccaggtcttcaccctgccgaccgctcccgcccagcgctaccggcagtggtgcgagctggccgagcggcaacgctccgggctgcccatcgagccggacgccgcccagtggttcgaggtttaccccaaatccaaagaattcgccgcccagcagcggcaagcatga

SEQ ID NO: 329264 - DNA, 270 bp, Pseudomonas aeruginosa
atggccgtatacaccatcaccctcagcgacaccgaaggcggaatagatttctccatgcaaggcccgccgctgcacgactccgaagcatcgaagatcgcctacgcccttatgcaatcgaccatgtccctaggccaggcactcgcaaagcagaacggagttggtaacgccgtttcctgcgcctgcgacgagtgcctggcacggcgcgctcgcggcgaggaaccgcagcaggaaatccactacaccaaggcccagaaccgcaccgtccactga

SEQ ID NO: 329265 - DNA, 219 bp, Pseudomonas aeruginosa
atgatcgttacggctcagcacttacatacggtcccgacctggaccactcggcagggctactgccatcgccaggcgcgggagttcttcaagcgccatgacctcgactggatggcgttcctacgggacggcatcgaggccgacgtgctggtcgcgaccggcgacgcgctcgcgctcaagctggttgagcacgcacgccaggaggtggctgatgggcgctaa

SEQ ID NO: 329266 - DNA, 195 bp, Pseudomonas aeruginosa
atgcttggccggtacggtatcggcgcagccgcgcgcgagggtgaccgtgccgctggcgtagttgaccgcatcgacccggactatctcgtcgtccacgactgcggcctggccgacagtgacgtcctccagccggctggcgttcgtcaacgtgacgacgttcggaccggccgccagcggcagctcggcggcgagtag

SEQ ID NO: 329267 - DNA, 501 bp, Pseudomonas aeruginosa
atgggcatcaagccggctggcacgatcccggaaatggccgaccagatcgccgaggaactggccgccagcggccgcccgctgatcatcgacgaaatggaccacctggtcgccgctggccaggtcgagctgattcgtgatctgtacgagtccagccaagcctccatcttgctgatcggcgaggaaatgctgccgaccaagctgaagaagttcgaacgcttccatggccgcgtgctgagctgggttccggcccagccagtctccctggaggacgcccgcaacctggcgccggtctacagccccggagtggctatcgctgacgacctgctcgcgcacttggtgaagaagtcactgggctctgtccgtcgcgtcgcggtgaacctggagcagttggccgaggccgccaccgttcagggccggcgcgagctggaactggccgacctccagcgcctgaacctggagctgtataccggcgcggccccgaacccgaggacgtcgaaatga

SEQ ID NO: 329268 - DNA, 501 bp, Pseudomonas aeruginosa
atgggcatcaagccgggcgcgacactcccggaaatggccgaccagatcgccgaggaactggccgccagcggccgcccgctgatcatcgacgaaatggaccacctggtcgcctctggccaggtcgagctgattcgcgacctgtacgagtccagccaagcctccatcttgctgatcggcgaggaatggctgccgacaaagctcaagaaatacgagcgcttccatggccgcattctgagctggattccggctcagccagtgagcatggatgacgcccgcgagctggtgaaaatctatagctcaagcgtcgtcattgctgacgacctgctcacgcacctggtgaataaggcgatggggtcggtccgccgcgtcgcggtgaacctggagctactggccgaggccgctgctgtccatggacgaatcgagctggaactggccgacctccagcgcctgaacctggagctgtataccggcgcggccccgaacccgaggacttcgaaatga

SEQ ID NO: 329269 - DNA, 207 bp, Pseudomonas aeruginosa; identical to SEQ ID NO: 328648

SEQ ID NO: 329270 - DNA, 270 bp, Pseudomonas aeruginosa; identical to SEQ ID NO: 328649

SEQ ID NO: 329271 - DNA, 267 bp, Pseudomonas aeruginosa; identical to SEQ ID NO: 329007

SEQ ID NO: 329272 - DNA, 243 bp, Pseudomonas aeruginosa; identical to SEQ ID NO: 329015

SEQ ID NO: 329273 - DNA, 1143 bp, Pseudomonas aeruginosa
atggcagaccatcacacccgccacatcccgctggggcaagatgccctgttcaccacgcccgcctcgctcatgctcgatgctcgcctcacgccgctggagcgcaatggctggcaggtgctgcgcatgctgcgctctgcggaaggcatcagcccgctggcgaatctggggcagttgcgccgctatctcacctccaccccgctggggcagagggccgggtacgagacggcccggcgcgttctcgtggtgcttcggctgacggggtggatcagtctggtcggccagcaacgcgaccctctgacggggcatgtgctcagcgagctgtatcaggttcacgaaagcgccctgcacttccagcaggcctgcacgctcgatgccagtctgcccgcgcttctgcaatcttccatcggccacgaaaacaaccaggtggatcgggtggctgtccacattcgggcaacgctggcacaggcacctgaagctgcctccattgcgacccacgatcagcgtcacgatgacgatgatttgccccctacgccgccgtcgcaggcgagcgaagcagcagacccactgccattgtctggcgattccgctggcaacacgcttgttccgcaacagaccggacacgctcgccacatgacggctgagcagggcggtacgtataagacgtatatgtataaaaaagaacgtacgtaccgcgcgcgcgaaagcgacggcgattcggcatcgcaatcggtgagcttgccgccttgcctgagtaatgcccaggcagatcagcaaaaagacgtgcaggccgccttgcggcggctgccgccgcagcatcgccaggaagtactcgacgagttgcaggcacgcagccagagcggcaccgtgcgcaatgtcgtggcctacttcttcgccttggtgaagcgcgtttttgcgggcgagttccgtctgtgggcaggacgcaaggaggcgtctgccgcgaaccggcctacaactccgccgcgcaccgaagcccgcccggaaccgactgcgccaccggcatcgcgtgaaaccgccctggcgcacatcgccaacatccgcaagatgctgaacgtcccgacgaacgctggggacatcgcagcacaggtaatgcaggtcaggggatggcagccccatcctgcgtag

SEQ ID NO: 329274 - DNA, 1716 bp, Pseudomonas aeruginosa
atggccaaggccgaagcaagcgttgaagaactggtatcaatgatcgagcggggcgaactgcgtttgccagagatgcagcgccagtatgtgtggcgctccacgcgagtgcgcgatctgctggattcgctgtatcgcggctatccatcaggcgcaatcctgctttgggaaacggatgaaactgtgcctctgcaggatttcgcggtcagccagaacacgaatccctaccagagcacccggctcctgctggatggtcagcagcgtctgacatcgctctctgccgtcattcgcggcgagccagtatcggtgcgcggccgtcgtcggcctatcgacttgctgttcaacttggagcattccgaccagttggcggtcgtgaccgaagtagaagagaacggcgacgacgaggacgatgctgacgacgatagcgaactgattggcgatgagacggactcgaccgaggacgaactgctcaagcgcttcaacaagatgacgttcgtggtggccacgaggaagctggagcagttgccgcattgggtgaaagtgtcggaagtattcaagaccgacaacgatgcgccgttcctcaaacgtgccggtatcagtggttttgacgatccgcggtacgagaagtacagtcagcgcctggcccggctacgtggcatccgcaagtacgtttatcggatggacgtgctggaacgcacgctttcctacgatgaggtcacggaaatcttcgtccgggtcaattcactgggagccaagctgcgcagttccgacttggctctggctcagatcaccgccaagtggcggcactcgctgcagacgttccaggatttccagaaggcatgcgccaagacgggctttgaccttgatctcggtttgcacttgaagaatctgatggcgtttgccaccggtcaatcacgttttcagatcgtgggtagcctgaatgtggagaagctgcagaaggcatggaaagaagcttgcgatggcatggagttcgcgctcaacttcctgcgcagcaatcttggcatcgatagcccggcactgttgtcgtcgcctttcctgctggtggtgctggcgtatttcgggcatagccgcaactatgcgctgagcaacgatgaggcccgccaactgcgctactgggcgctgatggccaatgccaaaggccgcttctcccgaggctccagcgaaaccattctggatcaggatttggcaaatattcgtcagggcggagcggtgagcgagctgatcgaccggctgcgcctgcagttcggccgcctggacattaccgcggaggagctggaaggccgcaaccagcgcagcgcgctgttcaagaccatgttcctggctttccgcgctgccggtgcgaaagattggcgcagccatctggccattgctctagatcattcgggcgcccagcatcgcttgcagttccatcacatctttcccaaagccgtactgaagaccagcttcactgcccgcgaggcggatgacatcgccaatctggccttcatcggcggcaagacgaatcgcgcgatcagcgacaaggccccggcggtttacctgcccccactggtggaccggcttggcgagccagcattcgcagcacagtgcatcccggttgaggcatcgctgctggaagtggaaagctacaaggatttcttgcttgagcgacgcaagaggattgcaacggcgctgaatacgtttgttggtcctgcagattaa

SEQ ID NO: 329275 - DNA, 768 bp, Pseudomonas aeruginosa
atgaacccgctgcaacgcgccctcatcgaaaaaaccggccacgacaacggcttcgaacacgtgctgtcgtcggctggcgatgcggtgatactggcttcggcccgccatcgcagccaggcggtagtgacggcatcggccgatggcttcggcttgcgccttcaaccggctacgcccgcgctgctgccggaactgttgcgcagtttccaaccgcgggccggagctgatgacgtgttttgtgtgctgaccctgcccgatttggcggctctcctgcgccgcacggccagtctgtcgcaggccttgccgaatcaggcagtgagcgactaccacacggccgtggcgcaagctgtcgagacgatatctgccgaagccaggggcacggaagtcgaacgcctggtgcgtcagcgcgtggggcaggcgcgttaccgcgatgccttgctgacctactggggtggtgcctgcgcagtgaccggcgtcgctgtgactgaagcgctgcgtgccagccatgccaaaccctgggctgaatgtgccgacgatgccgagcggctggatgccttcaacggctttctgttggtggccaatctcgatgcgctgttcgatcgctttctgatcagcttcgacgataccgggcatctgctgaccagcacccgcctgtcccaaagcgatctgcctgggcttggcattcattcgggaatgacgttgcgctggctggccagcgagcaccggcattatttacagtggcaccgcgagcgcttcctgctcggtgcctga

SEQ ID NO: 329276 - DNA, 4989 bp, Pseudomonas aeruginosa
atgaaacgcatccgcaaggcccaggccacgctgaacctgcccaccctcaagctcgaagggggggtattcctgcccgatcaactggaaaaagccgctcagggccgcgccagcgcccagagcgaggccgactacggtacccccaagggcgtcaagctcaaggacgaatacagccgcgctttccagatcgcctgcgcccaatggcagcacttcgccgcgcagatggaacgcgccgacgtcgatgccgcgcagctcaccaccgccttcgtccacgaactgctgcgcgatacctttggctacgccacctcgcaagccgcggcagcacagcaagtgggtgaactgcgttacccggtcagcctcatggctggtaccttgcccgtcttggtggcaccacactctctgggcctggacgaggctgacgcgcggtttgccgtgcaaggcggcggcaaccgtaagaaagccccgttccaggccatgcaggaattgctcaacgccagcgaaccgctgcaatggggcatcgtcagcaacggcagacagctgcggctgctgcgcgacgcagcctcgctcacccgccccagctttctcgaagtcgatctggccgatctgctcggcggccagcgctatgccgaattcgccaacgtctggcgtctactgcacgccagccgcgcatcccgccccggccagggcgctacggcgtgcatctgggaacaatggcgcagcgaaggccagcaggaaggcactcgggtgcgcgatggcctgcgcaacggcgtcgagcaggccctgctgaccttcggcgcaggtttcctgcaacaccctgccaaccacgccctacgcgccgccctgaacgacggcacgctcagcaaggatgactatttccaacaactgctgcgcctgatctaccggctcatcttcgttttcaccgtggaagagcgcggcgtgctgcacccgcaggacgacagcgccgaagcacaggttgcccgccgcgcctatgccgaaggctacgccctggcccgcctgcgcgagctgtgcctcaagcgccgtgcccgcactcgccacgacgaccagtggcaagccatccgcatcgtcttccgtggtctggcacagggcgagccgcgcctggccctgcccgcgctgggcggcctgttcgcgcccgaacaatgccccgatctggatgtcgccagcctggacaacgcccacctgctcaccgccttgcaacacctgcgctgggcagtggtcgcgcaaggcaagggcagcagcctcatcccagtggactaccgcaatatgggcccggaggaactgggtagtgtctacgaaagcttgctggagctggtgcctgccatcgacctgcccgcgcgcacgttcggctttgtcggccgtaccgaggaaggcagcaccgctggcaacgcccgcaagctcaccggtagctactacacccccgacagtctggtgcaggagctgatcaaaagcgcgctcgatcccgtcatcgaacagcgcctggccgcgcagtcgaccaaccctacagaggcactgctggccatccgcgttatcgacccggcctgcggcagcggccacttcctgctcgccgccgcccgccgcttggcggaaaagctcgcccagttgcgcagcctagaaggcgggcaggaaggcgccatccagccgcaggactaccgccacgccctgcgcgaagtggtggcccgctgcatctacggcgtggaccgcaaccccatggccatcgaactggcgcgcatggccttgtggctggaaggctacgaagaaggccgcccactgggctttctcgaccaccacctgcaagtgggcgacgccctgttgggcctgaccgacatgaacgcgctggaacaaggcatcgccaaggatgccttcaaacccttgagcggcgatgacaaggacgtctgcaaggagctggccaaagccaacgcctccggcctcaagcagatcgccaaggatctgcaaggccgccagatgctgctgggcgtggacaaccgaagcggcctcgaagccttacgtgccatcgaaaccctgcccgccgatacccccgagcaggtggccgccaaggaacacgcctggcgccactttctggaggactccgctaacagctcgctggcccacacggccgatgcgttggtgggtgcctacctgctgcccaaggtgcaggacaccgccgacaccgtgcccaccagcatcaccttgcatgcgctgctgaccgacccgcaacgcgcccagaccgagcacgccgcccccatcgccgccgcgcgcgccgcctgcaagcaggcccgcgtgttccactggccgctggccttcccgcaggtgtttgcgcaaggcggcttcgattgcgtgctgggcaatccgccgtgggaggtgtcgcagatgggcgaagaggagttcttcgccacgcgtgcccagcgcatcgcggaactggcgggcgatgcgcgcaaacaagccattgctgcactgcctgaaaccgatccgcgtctgtgggatgagtttgtcaaggaaagccaacggattgcggccgccaacaacttctaccgggaatcgggacgctttccgctgacggctgttggcaagctcaacacctatcccttgtttgccgaaactattctacaaatccatgccgacagtggtcgcgccggcttcatcgtgcctaccggcattgctactgacgacagcaccaaggcgtacttcggccatatcacacagaaccggtggctggtcagcctgtacgacatcgagaaccgcgaaaagctgtttcctgctgtcgatagccggatgaagttctgcctgctcactctgggcgcagcggaacgggccgagttcgtctgcttcgccacccaggtcagccaactggccgacccgcgccgtcgcttcaccctcacgcccgaggaattcctcctcatcaaccccaacacgctcacctgcccggtattccgcagcgagcgcgattcggaactgaccaagaagctctaccgcgccgccccggtgctgatgcgcgatgccgtcaccgcagacgagggcaagcaagccaaggaggtggaacccacgcaaaacccgtggggtattactttcgcgcaaggtctcttcaacatgaccagcgcaagccacctgttcaaggacgagccagccgccgaccatctgccgctctacgaagccaagctcatccaccagttcgaccaccgctgggctacctacacggcggacggcaacagccgcgatgtcacgctagccgaaaaatccaacccggatttcaccgtcaccccgcgctactgggtacaagcccgcgaagtctggctgcgcgtcgcccgtttgcccgatggcttgctgaaggctctcaaggacggcaacgcacaggccaccgtgctcggcgtgacccagttgctgttcggtcggcacctagccgaacagcgccgcgcccatccgggcatgggcacataccccgcctggaaagcctttgtcgtccgccacccctatgcgcaaaccatcgcgcccacgtcgttgggtctcgtcggcaacagcccagaaagcctgcaacccctgaacgacgactacctgcccgccgaaggcgaagccaaggtgcagccctacacgcccggtgcccgcaacgccacggcctggtacgccactgaccctgaagccgagagcgccgtgctggcgctcgccgccgactacggccatctgcctgcatcggagacgcccttggcggacgaacccgccgtgctcgccctggccgaacgctggttgcaggtcgcctgcccgcagtggttgatggggtggcgggatattaccaatgcgaccaatgagcggacggtcattgcgtcggtggtgccgttggctggcgttggcaatcagatgccattgatgctgttccccgacggaggaaaccgtgcacgattcgctgcgctgctcgccaacctgtctgcgctggtatttgactttgtggcgcggcacaagacaggcggcacgcacatgaattacttcatctacaaacagcttcccgtattgccgccagaccgctacaccgaggccgacctcgctttcatcgtgccgcgcgtactggaactgacctacaccacccatgaccttgccgcttgggccagagatctgggctacgaaggcccgcccttcgccttcgaccccgaccgccgcgccaccctgcgcgccgaactcgacgcctactacgccaaactctacggcctcaccgaggaagaactgcgctatatcctcgaccccgccgacgtcatgggcgccgactaccccagcgaaaccttccgcgtgctccgaaacaatgagctgcgggatttcggggcgtacagggagacgtcagtcacgccccttcgattggccagtgtcgatggcgaaacccgtcgcgatcatgtgcagtaccgcacccagcatctggtgttggaagccttcaagcgaggtttccaggtagaagacgcattgcctgttcaggctgaagccacggctcggcaggtcgtcgatcgagcgtccctgcctgatggaatctgggcacgaccacaacagaatgaaggtgcggagacgggggtggccctggccgccttgctcaaggctgcgcaggccccatggccagtgcgccatgtacgtctcgccgccgtcttggcgcttgagcccaggctgatgacgcctttgctggatgcgcaggatgctctggattggcaacgcctggtaggcgaagaagccaggccgctgcccggggcggtgttgagcttcatcccgcgtgcaaatcaggcttggggcggggctgtgcgcttcctgcgaagcagtggctacctgattgaagatcttggagcggggacttgggccaaaggtgccgaactggatgtgcctgctgccgaatgggccgaaggacgcgcccagatgattcttgttttcctgcaagcgcgagggcaagacttcgatcgtgtcattcgcgaattgcctgacgagatagggggatggattgaagccgcagcctga

SEQ ID NO: 329277 - DNA, 1542 bp, Pseudomonas aeruginosa
atgcgaagaagcctcctccaatttaaaaattttcgaaaaaccctaaaaaaaaatataaagaaccgtctcgcgcttctttctcttgcgctcctatatgatacctcgctggccactgcgaagcctcaggaaaactgcaactttctctggggaacggcctcagcggcctatcaggtagagggcggttggaatctggacgggaaaggaccttcgaactgggacgacttcacccatagaggcattaccaagtatcttatcggagagagccacactggcgatgttgccacgaaccagatatccagagacgtctatctaaaagacatagatctgatgcgcaaactcggagtcaactcgtaccgtttctcgataagctgggcacgagtgctgcccgatggccagacgataaaccccaaagggctcgagtactacaagatactcatacaagatttgaaggatgccggaataactccaattgtaacactttaccactgggatatgcccttagctctttacaagaaaggtggatggtactcctctaaatcgcccgactggttcgctggctacgcaaagctcattttcagcaattttggcgaagaggtaccttacttcataactttcaatgagccggagggcaatatctttaccctgacgcccttggtagagaacttcctcaccgagaccccctcaccctatgagaaagtactatccgtagagtcacgcgcagctcaggcagaggccatgcacaacctcctgctggcgaactcgctagcggttacctcatacaaggaagcagggtacaagggacgaatcggtattgccctgaatctatccccctgtgtcgataatgagaacccgaacagcgcagccaagaggaactgtaactctgtgcacaatgcctgggttctggacgcgctttacaaaggaaactacccgaaagatataaaaactctctatcagaagtacgcacccgcgttccagccctctcaggatgatatgaaaaagatcatgcagggaagacctgacttcatcggcgtaaacttctactctcccaccctggtgaaagacgatccaagccaacccttcggaatagcaaatcgcccaaatccagaccagtatccttcctataacggccccgtctctccttctcatctggtcgaactactaatgcagatagacaaagaatacgaccatcctactctgatcataacggagaacggagccggtttcggagtggacgatgaaaaactcactggaaatagggtgctagatccactcagggcaaagtatctctctgaccacattgatgcagtgctctcagccaggcatgcaggagtgaaagtagaagggtatctattctggagtcttctggacaacttcgagtggctgttcggctacagaaatcgcttcggaatgattggggtcgactttgaaagcccacaactagcgaggacaccaaaatccagctattacaaataccaagagaaaatcagggattataaagagcgtaacaagtgcctgccccagcaaagccggcactcaggttaa

SEQ ID NO: 329278 - DNA, 690 bp, Pseudomonas aeruginosa
atgcgcatcctggtgatcgaagacgatacgaagaccggcgagtacctgaagaagggcctcggcgagtcgggctatgcggtcgactggtcgcagcacggcgccgacggtctctacctggcgctggagaaccgctacgacctggtggtcctcgacgtgatgctgcccggcctggacggttggcagatcatggaagtgctgcgcaagaagcacgatgtgccggtgctcttcctcaccgcccgcgaccagctgcaagaccgtatccgcggcctcgaactgggtgccgacgactacctggtgaaacccttctccttcaccgagttgctgctgcgtatccgtaccctgctgcgccgcggcgtggtccgcgaggcagagcaggtgcaactggccgatctgcagctggacgtgctgcggcgcaaggtcagccgccaggggcaggtgatcgccctgaccaacaaggagttcgccctcctgcacctgctgatgcgccgcgagggcgaggtgctgtcgcgcaccctgatcgcctcggaggtctgggacatgaacttcgacagcgacaccaacgtcgtcgacgtggcgatcaagcgcctgcgcgccaaggtcgacaatcccttcccgaacaagctgatccataccgtgcgcggcatcggttacgtctgcgaggagcgcccgtgcccgcccgccgctccctga

SEQ ID NO: 329279 - DNA, 1011 bp, Pseudomonas aeruginosa
gtgacattcccccattcccccactaaagttcgccgcatggcttacttcgaaaaacgcgggagcgcctggcgcgcacagatccgcagaaaaggacatccaactctttccgctaccttcgacacaaaggcggaggcccagcgctgggcagccgagatcgagggcgatatgtcgcgctctcgattcgtcgacaccagggcggccatgcgaaccacgctaggcaaggccttagagcaatacgaaagggagatttctgagcataagaagggggccagccaggaaaggggtcgaatcaggagatggctggcacatcccctggcagctaaagggcttggagaaatcactccgtctgatcttgctgagtatcgtgactctcgactgaaggatggcgcctcatcgtctaccgttcgtttagatctggcgatcatcagccacctctataccattgcggcaaaggagtggaggcttgaaggcctgacgaatccctgcaagaacctgcgtatgccaaaggggagcagggcgcgtgagcgcaggcccactaccatagaactacgcaagatttatgctgaagcagccaaacttcaccctgaactcccggtgattatcgaactggcagccgacacagccatgcgcagatctgagcttctgctgctgcgccgagaacagattcgcgacaaggttgcggttctggaggacacgaagaatggcgaacgccggtcggtccccctttcctcacgcgctcgagaacttctcaggtcgcttccggcgcggattgatggcaaggtgttcagccttgcaccgaacaccgttagcaactacttccccaaggcttgcgaggccgcgggcgtgactggccttaccttccacgacctccgacatgaggccacgtcgcgcctctttgagcggggtttctctatgatggaggtagcggcgatcacagggcacaagacactggccatgctcaaacgctacacccacctttcgcctcatgccctggccgacaagctgggctag

SEQ ID NO: 329280 - DNA, 246 bp, Pseudomonas aeruginosa
atggaacctgaaatcatccatgtcccagagcttgccaagctgctggggcgcacagagtcatcaatacgcagcgctatccaggcgcgccccgactggttacccccatacttcaagcagggcatacgggtatgctggcggctagagagcgtgcgcaagtttctgcgcgactacgaggctggagaacacaaggctccgaaggtgggaaggccgaggcgagaacctccgaggctggccaaggtcggctag

SEQ ID NO: 329281 - DNA, 336 bp, Pseudomonas aeruginosa
atgaacgaccgcacactactcgaactggcggcgcgggcggcgggtttacgctcgcactggttcttcggcgaaggagaaggccttcaggtcagtaggaagaatgaaggccgccgatttaactggaacccgcgcgatgacgatggcgacgcgctgaggctggcggtgaagcttcgctttgatatttcggttgaacgtgaaatacaggtttcttggtggcaaggcgaatccctagagactgtcacctggccgcttggagatgacccatacgcggctgcgcgttacgccatcgttcgcgccgccgccgagatcggcaagtctatgggaggtggggagtga

SEQ ID NO: 329282 - DNA, 657 bp, Pseudomonas aeruginosa
atgaccgaccacgcagagctgcggaggctggctgaggcatgcgacgtgtctcgctgcgccgacgaaggagaagagcgtagaaggctacacgatttctacgattgcattgagcctgagctgatcctatccatgctaaacgagatcgccgagaacgattcggtggttgcagtttggaggggacggacgcagcgtactgaggaagagcgggacaggctcaaggcggagaacgaaaggctgctcgacgaactatccgcatgcaccgagcatccaggcggatgtgggtattggcgcgaggccgccaagcgtagagcggaagagcgcgaccggctgagggacgagaacgaggtgctgcgcaggttcgctgccgaggcatatcaagtgctcggcgctctggacgccccagagaacgttctagacaacgcttccgatgcagccaatggacttccactgcgacacgaaacactactgccgttcttcgctgaagactatgaggcgctgcgcaatgacgccgcgcgctaccggtggctgcgagagcgagacctcgaaacgatcagacaaggcggcgtattcgccgggatgacacctgagaacatcgtactcaaccaggaagacctggacgctgcaatcgacgcagccctggaaggagcaacgcaatga

SEQ ID NO: 329283 - DNA, 444 bp, Pseudomonas aeruginosa
gtgcctgacattcaagcaacctacatcgaagtaagcgccgaagtgcgctactgggaagactccaagatcaatggagtggaagacgagaatggcacccttactccgttccgcagtggagacctctggtgcccggtgatccgcctggaagacggcacggtgatggattggccggccggcatggtcgctgactttcacttcaaggtctgcgacgccgggcagtactggctactggatgacagccgaaaacgcgtagcgcagtgggctggctattacgtcccggatgaattcctttgcccgaccgagaacggttatggggactacatcatcttcaaagtcggcgccgatggtttgattaccgggtggcgcaaaccagagatcgaatggggcggccgcgaagatgatcaggaaggatggaagcgccttaaggagaacgaccgtgcctga

SEQ ID NO: 329284 - DNA, 297 bp, Pseudomonas aeruginosa
atgtctgaactaaaaccgtgcccgttctgcggatgctcgatgcacctagagagcaaccgcgactggcataggatcgtaggcgatcacgctttagagtgcgccttcacggacagcgaaacagtggtggtgccggcaacaaaagagcagcgtgatattgctgtctccgactggaacaccagagccgtccccgcggaccatgtggtggttcagcgggagttgctggagcgcctgtacagcagcgataccgcaacggcactgatggcagcggcagaactaagatccctactcaatccctag

SEQ ID NO: 329285 - DNA, 444 bp, Pseudomonas aeruginosa
atgagtgaggtccaccgcttttccgtagtgaagatgctttccgaggcgggcaacaagattagctacgaacctcacggccctgaaattgtgatggcgaaggattacgacgccctcgccgccgaggcccaggcgctaagggaggaagtcgcagcactgcgcgcaagggtggtggttgtgccggagcgaaaactcctaaatgccggagtcccagggctgaatcgtaatagcggctggaacgcctgcctcgacgaactggcgcgcctcaacggtatgacggtcagcgtttccgcgcttgataccctgcgaaaggccgcgttaggagaggtccagcacctgaacaacggactgtgccctgatgcctttgaggggcacgaagcacgcgatccggactgcccggtatgccgggcgctgatcgagacgggaaaggagagcgacaatgtctga

SEQ ID NO: 329286 - DNA, 450 bp, Pseudomonas aeruginosa
atgatcctgtacggcgtaactattgatcttcaagtagtcccggttcggctaggcagccagcagatgatggagtgccgcgacgttttcaacagtgaaaaggaggcgaaggcgcgggccgaggaactgcgcgctctgtgcgccgccgcgcccggcaaggaagtgccgcaggcatggctcgacgtgcaggcagagcgccgccggcagatcaccgccgagggatggacgccggagcacgacgacctctattgcgccgccgaacttccgcgcgccgcagcagcgtacatcctcaacggagctaacgacgaggctccggctatctggtcgttctcggcgaagtggtggaagccgagagacgcgcgctccaactacgtgcgtgccggcgccttgatcctggccgagatcgagcgcctggaccgcgccgcgcccggcaaggaggtaggtcatgagtga

SEQ ID NO: 329287 - DNA, 462 bp, Pseudomonas aeruginosa
atgagccgtggagtgaacaaagtaatcctggtcggcaacgtcggtggtgacccggaaacccgctacatgcccaacggcaatgcggtgaccaacatcaccctcgccaccagcgagagctggaaggacaagcagaccggccagcaacaggaacgcgccgagttccaccgcgtggtgttcttcggtcgcctggcggagatcgccggcgagtacctgcgcaagggttcccaggtctacgtcgaaggcagcctgcgcacacgtaagtggcagggccaggacggtcaggatcgctacaccaccgaggtaatcgtcgacatgcacggacagatgcagatgcttggcggaaagcctgtaaatgaccaggcggctcagagcaggcaatctcctcagcagcagagcgcaccgcagcagcgcccgcaggttgcgcaggctaacgacagcttcgacgacgatatcccgttctaa

SEQ ID NO: 329288 - DNA, 831 bp, Pseudomonas aeruginosa
atgaacgacatcaacccgttcgccccgcgcggcatggcggagcacgtcaaccaaggcacggtgaacatcgagcagagccgtgccgtcaccgaagcgcagggcaagctgatccttgccaagaagtttccgcgggacgaggcgctggcgtacagcaagatcatgaactcttgcagcaggcctaccctagcggcatcgggcgagtacgcctatccccgcggcggccagacggtatcaggcccatccatccgtctggctgaagagctggcccgctgctggggcaacatcgaatacggcatccgcgagctgagccgccagcaaggcaacagcgagatggaagcctacgcctgggacttggagacgaacaccttctcatcccagaagttcacggtgcgccacatccgcgacaagaaaggcggcggccaagcgctcaccgaagagcgcgacatctacgagctgaccgcgaacatgggtggacggcgtctgcgatcacgacttctggcaatcctgccgcctgatctggttgaggcggcagtgaatcaatgccgcaagacgctggctggcgataccagccttccaatcgccgaccgcgtgcgcagcatggttgataagttctcgcaggttggcgttaccgagaagcacctgcgcgcctacctgaacaaaagcctggacgagatcattccagaagagatcgcaactcttgcaggggtgttcaacagcatcaagaacgggcaggccggcgtcggtgacttcttctcgatcaaggcaactgatggcgagtcagctgacctcaatcgcgcactgatcgcagcaacccaggaggcacaagcatga

SEQ ID NO: 329289 - DNA, 810 bp, Pseudomonas aeruginosa
atgacccccggttactaccgtgacctcagcaatgaggcgtaccacggcggcgaaggcgtttccaaaacccagctagacctgatcgccaaggctcctgcgctgttccagtggaacaagggcgctccggaagacccggacaaagccagggctctggatttcggcgacgctactcacgcctacctgcttgagcctgagcgcttctccaaggagtacgcagtcggacccctctgcgaccggcgcaccaatgccgggaaggcgacctgggcagagtttgaagagcagcttggagaacgcactgcactggagttcgagcaaggcagacaactcggcttgatcagagaaagcgtgatggcccatccgcacgcccgctggctgatcgaaactgccggtgacgtcgaggccagcatctattggaacgacgagcgcgaaggcgttctgtgccgctgccggccggacaaggcgattccagccctaggctggattctggatctcaagacgacggccgacatggcccgcttcgtccggtatttccacgaataccgctaccacgtccaggacagcttctacagcgacggctacgcgtcgcacttcggcgaaccgccttctgccttcgtgttccttgtggttagcacaagcatcgactgcgggaagtacccggttcgcctgttcacgatggacttggaagccaagtccgcgggacgcaccgaataccagcgcgacctgtccacctacgccgactgcctgcgccacaacgagtggccggccatcgaaaccctttccctgccctactgggcgaaggacaagctatga

SEQ ID NO: 329290 - DNA, 306 bp, Pseudomonas aeruginosa
atgagcaactacttaccaatcgcggtaagccgcgccgacgtagtatttggcggaaaggccatgcagatacttccgccctactccgacattcctgacgagttcaagcgcggcgggaatgagtggacaaagtggcaatctgactggttctacggtggcctcaagcagatgcctaccgcaaaagaaggaattgatctggatctggcaatgcagaaccttgcgtgcgcacaggtctctttcgagccgaagcatgagcacaaggaggcaggggtcgcctatctggcatcgctctggttcaagcacccataa

SEQ ID NO: 329291 - DNA, 138 bp, Pseudomonas aeruginosa
atgaacacccgccgcacagcaatctggctaggcagccttttcggcggcctgctgtacctcttcatcctggcagccggcccgatctggggaggcatcatcaccgcagaagctacgcacctgtccgcagcaggccggtaa

SEQ ID NO: 329292 - DNA, 1032 bp, Pseudomonas aeruginosa
atgaagctgacgacgaccgcctactacaacgaaatcgacccatatgccgctcagtggcttcgaaacctgatcgccgccggccacatagcgcctggcgacgtcgacgaacgatcgatcgaggatgttcacccagatgacctcaagcactacacacaatgccacttcttcgcgggaatcggcgtctggtcgctcgcccttcgccgcgccggctggccagatgatcgacctgtttggaccggttcctgtccttgccaacctttctcctcggcaggcgaaggagctgggcttgatgacccgcgtcatctctggccacattttgcctggctcatccgccagcgccgccctggagaagtccttggtgagcaggttgcaagcaaggacgcggagccttggctcgaccttgtacaagctgacctggaagccatggaatatgccttcggggctatcgcgtttccgtctgcgggcatcggtgccccgcacatccgtgaccgcacgtattgggtggccaacgccatgcgcccgagattatttcccggctcactctccggaatatatcgcggcgaagaaagcccagggtcacgggatggcgaacctgaacgacctggcgcaattggcgggatggccaagtccaacagcctgcgactcgaacaggaggccctcgcagggattcacaacaccgaacatcacgctgaaccatgcggcggtgctgagcggatggccaacaccatcatgccagaacgatcggacgggcaatccggaatcggctttgtcgatgacccgcaaggacggctcgaaggtgcagcaacgtctgcaggacttcgcagcgattgcagccccggcccggttaacggcctgtgggcagatgctgactggctcctctgccgggatggcaagtggcggccagttgaacccggcgcattcccgctggctcatggggctccctcccgagtgggacgactgcgcgcctacggaaacgccatcaatgctgaagcggcgacgcagttcatagccgcttacatggaggcagcatga

SEQ ID NO: 329293 - DNA, 1146 bp, Pseudomonas aeruginosa
atggctaaccgtgcgtacaaataccgtttctatccgacttctgagcaggcgcaattgctagctcagacgttcggctgtacgcgcttcgtctacaactatgtcctacgctggcgaaccgatgcgttcttccagcggcaggagaaggtcgggtatctggaggccaacgcggcactcaccaggctcaagcgctccggcgagtttccgtggctgaacgaggtctcctgcgtccccttgcagcagtgccttcgccaccagcagtccgccttcaaaaacttcttttcaggccgcacgaagtaccctgcgtacaaaagcaagaagcatcggcagtccgctgagttcacccggtcggcgttcagctaccgggacggcaagctgtacctggccaagtccaggactcctcttgatatacgctggagcagaccgcttccgagcgagccttccaccgtcaccgtttcgagggactccgcaggccgctactatgtgtcttgcctctgcgagttcgagttcgaggctctgcccgtcacgccgaagatgatcggtatcgacctgggcctgaaagacctgttcgtcaccagcgatggcgaacggatcggcaatccccgccataccgcgaaatacgcagctcgcctagctaaggcgcagcgtaggcttagcaagaagaagctcggctcgaagaaccgctccaaggcccggctgaaagtggcccgtattcacgcaaaaatctccgactgccgcatggaccgcttgcacaagctgtcccgcagactgattaacgagaaccaagtggtctgcgtcgaatccctagccgtaaagaacatgatccgcaatccgagactgagtaaatccattgccgatgtcggctggggagagtttgcgcgacaattggagtacaaaggtgaatgggctggccgacaggtcgtcgccatcgaccgctggtatcccagttcgaagcgctgttcctgctgcggccatacccttgtgcgcttacccttggatatccgtagctggacatgccaggaatgcggcaccgaacatgaccgcgacgtgaacgcagcgatcaacattagagccgccgggctggcggtgttagcccttggagagaatgtaagcggcatcggtcaagtaccgctgtccagttctctgtga

SEQ ID NO: 329294 - DNA, 366 bp, Pseudomonas aeruginosa
atgaacgccatccgcaagttgcaagaagcgtatgacgcgagactgcctgacgatgacgatgacggcgaccgcgagtatgtcactgagcaagtcggcaagcttctgaactgcgaggacggtgattgcgtgccgttccatgatcggaaagaaaggccctttatcggccctgagtttacggtctacggattcgccggattcgtcccggagtggcttgcagaggtcgacagcaaagagtgcccgatgactcagctactcctagccgtccgccgaggcgacctggaactggcccaacgcatctggttccgcgcattcgaagcaacgctgatcgagaacgctgaacgaatggttagggagagacgagtttga

SEQ ID NO: 329295 - DNA, 225 bp, Pseudomonas aeruginosa
atgaacgaaatgtacctgaacgacggggacgcaaccttcgtcggaagtttcacaaaagtctgctgggaccgtgataacggccagcgttactcgttcggattcaagccaaatcgcgggaaaaagttcgtcgtgatgctacttggcgaggcggacaagaccgccgacgactttgaccttgaggctgcactgaatcgcctcggcttctaccggagagagaagtcatga

SEQ ID NO: 329296 - DNA, 240 bp, Pseudomonas aeruginosa
atggcagctggtgactactactcgtgcgacgtctgcggggggaaatgcttctacgacgcgaacctgaactacgagtggccagataagaacggcaacgactcgtggggctaccacatccctgctgacgagatgatgctcggtacgaattgcaagctcgactactgcggcgacatcgctgctatctgtcgggactgccgggcgacacacgagattgttgtgcgagagaagagcagcgcctga

SEQ ID NO: 329297 - DNA, 141 bp, Pseudomonas aeruginosa
atgagcaagctatcaccccatgagctgggaatcttgtacttcaacttcatcgaataccgggataaggcatgcaatgggatggcgaaaatgagcatcgcaaagttcttcgctatctatggccttaatcggttcaaggagtga

SEQ ID NO: 329298 - DNA, 492 bp, Pseudomonas aeruginosa
atgagcaacgccatacccgattccattcactggattgacattccagaaatcggccagccccttgctgacggaaccttctttgcccgccactgggtcaatggcaaggaatacgcctacgtcgatctcggcaaaagcgccgagttcactggagaatggggcgagtatggccagagcgtggatggcgccgtcagctaccgagacggagcttcgaacacggtcgccatggcagaagctggcagcccaattgccaagcaagctctggagatcggagaaggtgtattcatcccctctgttctggaactagctcttctgctctcagcaaagcaagcaggcgagttgtcaggttttgcggatcgctggtactggtcgagttcgcagtactccacaagctgcgccttcatcacggccttcgacgtcggcagcacggacggcgtcgccaagccagacatattccgtgtccggcccgtccgcaagattctcattcttcagtaa

SEQ ID NO: 329299 - DNA, 189 bp, Pseudomonas aeruginosa
atgaacgcattccgcaacctgtatcaggtgtttgacgaaaacggaacgctcatggcgcacgtaaccgctgaagactctgagaaagccgctgaaaagttcgctagggcctccggactcacggaagtgatgcacatcgagcagatcagccgaggctaccaccgcgacgtttgcgagatattcaagaagtaa

SEQ ID NO: 329300 - DNA, 834 bp, Pseudomonas aeruginosa
atgaagaagaaatcacttaccgaagagcagaggcaggaatgcctagctctaaagaatctcttccttgccaagaagagagagctgaagctcacccaagagaaggctggcgaactgattggcatgacctctgcggcggtcaatcactacctgaatggcgtcaattcgttgaacgtccaggtagccgctaaatttgccaacctcttaggcgtaaaagtcgatgactttagtaccagattggctaaggaaatcgatcttatagcctctacgacggggttttctggagatcaatcaaaccaaagtattaaccacacatttgataatgactttttgacaaatcaatctttggcattaacctcttctgagggcgagagtacgcagaataagaaccgcccgcccagcgagagggatttcgtcttgattccggtcatctctatagagagcggtgagcctggcttgctccaggaacacgtcaaggttgaaggtgatcaggcccttcctagaaaactggtcatgtcgcttggggttgacgcctcaaaatgcgtcttcatcaagtcgccagatgcaggcatggagccatacatttttgatggggacttggttctggttgaccagtcccagcgcgagatcattgacaaaatggtctacgcattcataggcccggactcaagggtctcgcttcggcgcatcagcatccagctttcaggacaggttgttttgcgctctgataactcagacaagataagatttcctgacgagaatgtatctcattcagaaataggcagtttgcccatattcgggcgtgtacgatggcgcatggggggaggaggactttga

SEQ ID NO: 329301 - DNA, 198 bp, Pseudomonas aeruginosa
atggacgccatccccctcagcaagcttgtagccgaaaagggcctcaccgcagtggcaaggcttttccaggtgagtgcaccggctatcaaaaaagccatcgacaacgaccgagacattcgctgtgtggagctgcttaacggcgtttacagcgcgcatgagatcaggccgttccccttcaagccacataaagccgcataa

SEQ ID NO: 329302 - DNA, 201 bp, Pseudomonas aeruginosa
atgtacgcagatcagtcccacaagcgggacattccccgaaaggtccgttttaaccgtgtcctcgacaggattcttgagcgcgccgctaacaaggcacgtcgtcagcacgccacctacctctacgaggtcatcgaatgggctgttgagaatggcgtgatcgaatcactgagcaaggaaggcgaagagtctagcgcggcctga

SEQ ID NO: 329303 - DNA, 204 bp, Pseudomonas aeruginosa
atgggcgagttggattaccagcgattgccggaatgggtacgggtgcggatagaagggctctcgatagagcgcggctggagcatcgagcggtgcctggaagagatcgtgattgaagcgattgcaatgggcgggcttacgtctgccgggcgaccaaaagcatcggtcgttcaactgaggccgaaagagggcctcaagagtgactag

SEQ ID NO: 329304 - DNA, 417 bp, Pseudomonas aeruginosa
gtggctgaccgcactttccgcatccaaggcgctgccggcatccgcccagctttcgtcgctgcctggaacctcatccagtgcctgatgaaagaagcacagggtggctacgagctggttctacgccctctcaagtcgaagcgctctatcgaacagaacaagcgctactggtcccttctgcgcgagcttgccgccgtcgcctgggtcgacaaccgccaattcgacgatcaggtctggcatgagcagttcaagcgctggttcatcggctgcgaggatgtgaagttgccggacggctcgaccgagctgcgcggcatcagcaccacgaagctgaccgtcgacgagttcggaatctacatgacaacgatcgaagcatgggccgccgagcaagggtggccgctgatgatgcaggaggccgcatga

SEQ ID NO: 329305 - DNA, 264 bp, Pseudomonas aeruginosa
atgagcaagttcaaggcgggcgatctcgctcttaatctgcaagacatccccaactgcatcagtgcaggagtggtagtcgagttgatgtctcgacttgcccccggtgatctatttgtcgacgacggccagatctttcaggtgaatcggccagcttggtgggtgctccatgaaggagaccggctctacatacctgaacggtatctcatgcccctgcgcggcgacttccagcccgagcagcagaaggcgaagggggtggaggcatga

SEQ ID NO: 329306 - DNA, 366 bp, Pseudomonas aeruginosa
atgagctactgccgttggagcagcgatgatttccagtgcgatgtttacgtctacgaaagcgtagctggtggatttgtcactcacgttgccgccaatagggtggttttcaaggatgaactgcctgctctggttcctttcgagccggagtacgttgaccagttcttggcgcgccacaaccaggtaatggcaatcgttgatgcggctgatcgtgtgcggatcggtcttccacacgacggcgacagcttcgatgacgccgatcaagaggcctgtgcggaccgactggagtatctgaaagggctgggctacgtcgtcccgcagtacgccattgacgcactgcgcgaggaagcagaggagggcattgcatga

SEQ ID NO: 329307 - DNA, 597 bp, Pseudomonas aeruginosa
atgacgctttccgtccgcagttcgaagcccaggaagtgccagaacccagcctgcggcaaagagttcatcccgcagcgtttcgggcagcgcgtctgctcgccgtcctgcgccctggccatcaaggacaagcacgccaagccggcacggaaggccatcgcagaccgcgagcggagggaggtcagggttcggaaggagaagttgaagagtcggtcggatcacctgcgcgaggctcagcaggcgttcaacgagttcattcggtggcgcgaccgcatcgccggtcacgcctgcatctccagcggcctgcccctggattggtctggaaaccagacggatgccgggcactacaggtcgaccggagccgcgccgcatctccgctttaacgagaacaactgccacgcccagcggaagctggataaccgctatctctccggaaatgcggtggattaccgggtcggcctgatcgctcggatcggtctggccgctgtcgaggagttggaggcggacaactccgtccgcaagtacaccgtagaagacctgaaggccatcaaggcccactaccgcgccaaggtgcgcgagctgaagaagaggatcgcctaa

SEQ ID NO: 329308 - DNA, 318 bp, Pseudomonas aeruginosa
atgcaaaccgccatctcgatcattatcagcatgacgctgagcctttccctgctgtccggcgtagcgcagctgtcacaattcgccttctacgtctgcgtcatcatgaacgtgctggcctggataggcgtgctctgcggcatggtcaaggacgaaatcagccagcgaatccgccggaccttctggattcagctacttccctcaattttctacgtctacgcgctgatcttcagtgggcatcccatgctcggcgcatctgccttcggagtgcaattcctggtcgtcgccaccgccttccgaaaggaggcgaaacctgcatga

SEQ ID NO: 329309 - DNA, 348 bp, Pseudomonas aeruginosa
ttgtacaagctaggtgctttcggtgttgtggccgtactggctgccatcgttgttatgtgcatgacagtgccgaagaccatcaaggaattcgcctgtgcattaattgtgacgctgatgttttcgattggcggaggcggctggatcatcaaggccaaaggcctggaagagtgggtgaacgacgagttcggcctattcgctctgctagggctggttttcgtgtgcggtctgccaggttgggttatgacccgtggcttctttgcctatgccgagtaccgcaagagcggccgcagcttcatgaagatggtcaacgacatcaccagcgtgattaaggcggtagtctggaaatga

SEQ ID NO: 329310 - DNA, 435 bp, Pseudomonas aeruginosa
atgaacatctcgaaggccggtctcgatctcatcaaagagttcgagggtcttcgcctgagcgcctatcaggactcagttggcgtttggaccattggctacggccatacgcgcacagccaaacaagggatgagcattactggcgaccaggctgatgcgcttctcatcgctgatctggccgatgcagaggacgacgttgaacggtacgtccggcaagacatgcggcagaacgaattcgacgcactggtgagcctcgtcttcaacattggcggaagcaacttctcccgttccaccatgctccgcttgatcaatgagaaggccgaggcttggaagattggcgctgaattcctgaagtgggtatacgccaagggacgcaagctcccagggttggagcgtcgccgcctggccgagcggaacctgtacctaaaaggtgcgtga

SEQ ID NO: 329311 - DNA, 249 bp, Pseudomonas aeruginosa
atgcttggatttaccactaaggccgaggcgcaaaagattggcgcatcccaccacggcagctattacggcatccccatgtggatgggagatgtggacggcgcccagcgattgccccctggttttcaccaagtgtttgaatttgtcgttgacctcttctcctacattgagggcatcgtgaattccatgctcggccaagagccaacgttcatgttcaaggttggtcgtcgcatcgacgggaaagatgactaa

SEQ ID NO: 329312 - DNA, 273 bp, Pseudomonas aeruginosa
atgcagcgtgaccaggctcagaaggccgcaagcgacgctgtagcaaagctgatcctcaacgaccgcacagttactcagtacgtcgaccgcatccagtacgtggagcaggccgcaaagacaatcgtcaaagagattccggtctatgtcactcctgaagctgacgctagttgcgatgtgtctggctttgtacgcctgcacaacgacgccatcgaccgactctcctccggctctgctgatgaagcagccaagggagctacagaaggctccaagtga

SEQ ID NO: 329313 - DNA, 231 bp, Pseudomonas aeruginosa
atgagcaagtacgaagtaaagacttccgatggcatcgtccaccaagcggaagctgccacccacttcatcgatgctaacggcctgcatctgcactctgatgccgggcgagtggttggcgtgtttcgtgaattcctgtggatgcgcatcactcctgcggttgtgaacgctccggttgatccggtacagcccgcccccgaaaccaccaccagcccggaagctaccggggagtaa

SEQ ID NO: 329314 - DNA, 636 bp, Pseudomonas aeruginosa
atgaatgaagtgcagcctgtcgtgcaaaagaaagcggcagactgggagtccattgagcgtgcttatcgagctggtgcgctttctatacggactatcgcagatcgtcacggggtgagcgacaccgcgatccgtaagaaggccaaagcgttgggctgggagcgtgatctctccgaacaagtcagaaaggaagttcgcaacaagctggttcgcggtgaagttcgcgatccgcattatgcgaaccctgagcgtgatgcagagatcatcgaggaggctgctgaagagggcgcccgggttatacgcagccatcgtcgtgacattcggaaggccactaacctcaccgatttgttgatggacgaccttttgatgactatcagtcgtcgggaagaaatctacgaaactatcgaggatgaaacccgcgatgatggcaacggtatgcgcagggcaaacatgcaagctgcaattgctcttcctagcaacgcaaagactctctaccagttatcgtcagccatgaagaatttgcaggttcttgagcgtacagcctatgggctggatggtgattcaaagcagcctgcgccgcatgaagacctgacagatgatgaacttgaacgccgaatcgctcagcttgccggccagtag

SEQ ID NO: 329315 - DNA, 1464 bp, Pseudomonas aeruginosa
atgaacttgaacgccgaatcgctcagcttgccggccagtagagctaagcgtttagagctgttgggttatctggaagagaagaagcgcagggaatcccagcggcagttcaaactccagttcgagactctctacgattggcagcgtaagttcaacaaggccaccgcggataacacatcgtgcatgctgatggcggccaaccgggtcggcaagactcggacggggcttaccattgatgcggcgcatttgctgggcgattatcccggcgattgggaggggcacaagttcagccacgcccctttgtgctggttgcttggctactcaatggagaagaccagggatctgttgcaaggtccgcttttcggtcgcttccagggaggtacgtggactggcgggttaatccccgctgatcgaatcgttgactggcgctctgcaactggaaccagtggcgcgatgcgcgaggtcagggtccggcatgcgactggcggcatttctaccgtccagttctggtcgtatagccaaggccagcacgcgatcatgggcgatagcgtcgactggtatcacatcgacgaagagccagaagacaaagagatttacccgcaagtcatcacccgtactgctaccggtgatggaggtcgaggtggacgcggaatactgacgttcacccccgagaacgggcgaactgagcttgtcgtcaagttcatggacgacccaggcgaaggccagtacatccagcgcgcaacgtgggatgacgctcctcacctttccgagaagatcaagcgcgaacttttggcagcttacccggcttggcagagagatatgcgcacacgaggcgaaccattgctcggcactggcctgatattcgatttcggcgatgacgagatcaagtgcgcaccattcccatgccccgaccacttctgggtcattaatggcatggacttcggctgggatcacccgcaggcacatgtgcaactgtggatcgatctcgaagctgacattgtgtatgtcgcgcaggcctggaagaaatcaaaggtcacgcctagcactgcgtggggttctgtgaagcattgggcccagcacgtgccaacagcatggccgagcgacggcttgcagtctgagaagtcgtctggggtgcagcaacgcgccgcatatctagacgcaggctggcagatgctccctgaacatgcgacatggccgggtggcggtgttggcgttgaggctggtctcgtcgagatgtacgagcgcatgactaccggtcgctggaaagtgttcagtcacttgagcgacttcttcgacgagaagatgagctatcaccgcgacgaactggggaggatcgttaagttgaacgacgacatcctctcggcgtctcgatacgcctacatgatgcggcgctatgcacgtcagcgtttccagtgcaagccatctcaaggcggctcgcaccaatccacgtacgacccatttagctga

SEQ ID NO: 329316 - DNA, 255 bp, Pseudomonas aeruginosa
atgggcggagcagtcaagaaggtggccagcgttgcaacgctcggcttgagtgatgctgtgcttggcgccactgaagcgccgaagactcagaccactgagatgaaggacatcgagagcaacgaggctcagaacgtcgacagcttcaacgaggaccgtcgccgccgtgcgcggatggctggcatctccagcacgatcctgggcggtgcgctgggcactcccgcgaccactgcaaccaaaaccctgcttgggggctga

SEQ ID NO: 329317 - DNA, 1689 bp, Pseudomonas aeruginosa
atgtctgaagctctgcgccgaaacgcggaaaagcgcctggcgatgctcaagaacgagcggacgtcctgggagcagaactggcgcgagctttctgacttcatccagcccatgcggtcccgcctgctgtgcgatcagcaggtaaacaagggcgacaggcgcaataacaagatcatcaacaacgaggccaccgaggatgccggcgcgcttgctgcgggcatgatgagcggtcttacgtcgcggtccaggccgtggttcaaccttgtcgtccagtcaaaggaggcaatggagttcggcccggtcaagtcgtggctctttgaggcgaccgagcgtgttcgtgatgtgctgttgcgctcgaacttctacaactgccaacacgtgtcctaccttgagatgggcgtgtttggcactggcgcaatctggatcgacgaagacccgaagaacggcattcgttgcgaggtgttcaccgctggtgagtactacgtggccaacggcgcagacggtaggtgcaacgcgttctatcgcgagttcaagctaaccgcggcgcagatggccgagcggttcggcaaagagaatctcagcccccaggcgcagaacgcactcaaagaggcgcgccaagatcagtggttcgactgcgtgcagatggttgagccaaacgccgactatctgccaggcgcaaaggtaagccgtcttctgccgtatgtctcgctggtgtgggagaagagtgccacgcctgacaaggttctcgagcatcgcggcttccacgaattcccggtagcggtagtgcgctgggacactctgcccggcgattgctatggtaccggtccgggccgtcgctgcctgggcgatatcaaggcgctccaactctatgagcgcagttctgcccggatggccgagacgggctccaatcctgccgtccaagcgccgatgtcgctgcaaggcaagccgagttcaaccaacccggggagcatcacatacgtcgatcaggttggcgcgcagaactcgataatgccgatctacgagcccaatcctcaatggctcgcggtgatcgaaggaaagattgcgcgtcatgaggctcgcattcgccgctcgttctacaccgatctgttcctgatgatcagtgagatggacgacgtgcgcacggctactgagatcaacgcacgccgcgaagagaagatggcgatgcttgggcctgttgttgagcgcgtcgactacgaaggccttgacccgatcatcgagcgcgtgttcggcatcatgctgcgccagtccatgccgatttgggcgggcatcatcgatggcgagccgttgctgcctgagccaccggaagagttgggccagaacgtagtcgaggccgactacatctctatcctggcgcaggctcaaaaggccggcgcggtcaatggcctggagcgtatcgctgccaccatcggcaatctgtccggcgcgttccccgaagtgcgcgacaagttcgatgcggaccagtgggtcgacgagtacgcagaagcggctggtgttgtcccgactgtcatccgcggcgacgaagaggttgccgcaatccgcgaacagcgcgcccgtcagcagcaggcggcagaagcacagcaggcgctcgccagtggcatcgaaggcgccaagcttctatccgaaacccaggtcacgccagacaacgcgctaggccagctactcggagcataa

SEQ ID NO: 329318 - DNA, 312 bp, Pseudomonas aeruginosa
atgttcgaagacgacgagatcacgcagcagcgtgaggaagcctcgcgcctgaagcaaaggcagcgtgcagacgacgtgaagtctcagatggcgaccctaagcggtcgccgttttgtttgggatctcctgggctacacgcggtacgaaggccgctcaaccctcttcgatacccacggcggacggcagagctatctgctcggcgcctatgaggtaggccgaaaactttccgaagaaatccgaaccctctgtcctgagcagtacctgctcatggtcagggagaacagcaaacaacccgacgaggttacccaatga

SEQ ID NO: 329319 - DNA, 624 bp, Pseudomonas aeruginosa
atgaccgaagcagtcgataccgccaccactaccgtaagcgggaccgagagtgcgacgtcagaggcccaggctagccagcaacaagctgccgagcagggccaacagcagcaagcccaagcgcaacagcaggaacagaagcccgcagtacccgacgcgtacaagttcgaatccctcccggagggctacgacttcagcgccgaggctcaggccgaatggtctggcgtgttcaaggaacttggtctgacccaggaacaggccagcaagttggtcgagatggacgccaagcggcaggcatcgggtgctcaggcatctgagcaggccgcaatcgagtaccgcaaccagcaggtctccaagtgggagtccgaactgaagcaagacgcggcattcggtggcgccaatttcgaggccaacgttggcatcgcacagaaagccctggccgattacggcacccctgagcttaccgcgatgctgaaggaatccgggctgggatctcacccggaagtcgtccgcttcttctaccgagtcggccagcaattggccgagggcaagctgcatcgcaccaccaccgaagtcccaaccgaacgctcgcttgccgagcggatgtaccccaactattccgcttaa

SEQ ID NO: 329320 - DNA, 1005 bp, Pseudomonas aeruginosa
atggcgactattggcaataccgtcccgacgctgcttgacgtagcaaaacgactgaatccggatggcggcggcatcatgccgattgctgagctgctgtcccaagaaaacgagatgctgctggacatgccctggtatgagggcaatctgcccaccggctcgcgcatcgccacccgcaccggcctgccggatgtgatctaccgcaagctgaacagcggtgtgccgccgagcaaagcgaccaccgcgcaagtcgacgaggcatgcggcatcctcgaagctcgcggacaggttgacgtggacctggcgatgctgaatggcaacaccgcaggtttccgcctgtctgagtcgcgtgcattcatggaagcaatgaaccaggcaatgcagcgtggcgtgatgtacggcaacaccgacgtcacccccgagtcgttcaccggtatcgcgccgcggttcaacaccgtcagcaccgcaactgctgcaaccgctgcaaacgtcatcgacgccggcggcaccggctctaccaacacctcgatctggctgattggctggggcgagaacaccgtccacggcatctacccgaagggttcgcaagccggcctagtacacaaggatcttggtgaaggcgacgctttcgatgccagcggtaaccgcttccgcgccctgatggaccaataccagtggaaggccggcattgcggtcaaggattggcgttacatcgttcgcatcgcgaacatcgatgtcaccaccctgaccaagaacgccgcatccggcgctgacatcatcgacctgatgacccaggcattggagctcatccaagggttgaccggcgtcactcctgtgttctacgtgtcccggcgtatccgttccttcctgcgtcgtcagaccgtcaacaaggttgctgcaagcaccctggcctacgagaacgtggccggcaagcctgcgctcatgttcggcgaagtcccggttcgccgcgtcgacgccatcctcaacaccgaagcccgcgtggtttaa

SEQ ID NO: 329321 - DNA, 459 bp, Pseudomonas aeruginosa
atgtacgtcgataagcaagccgaattctcggacagccaggcggtaacggctaccgccatctccaccaacgtctacgacctgtacccgcgtggtaatgcggtcaacaccaacgtcactcgcgacatcggtgtgggtgaggacatctacctggtcgtccagtgcgacaccactgcaaccgcagccggcgccgcaactgtgactgtcagcctggaatcgtcctcgaccgcagacctggcaaccactccgaccgtgcacttcgtatcggcaaccctggctcttgccaaccttgttgggggcaccactctgctcgcaatcaagctgccggctggccagtacaaccgctacgttggcgtgcggtacaccgttgcaaccggccctctgactgccggtgcgttctctgcgttcctggccaaagacattcaggcgttccacgcctacgtcaaaggctacaacttctga

SEQ ID NO: 329322 - DNA, 174 bp, Pseudomonas aeruginosa
atggctaagaaagaagaagccaagagcggtactgctaagtggtgtgaagtgctcgaggtgagctacatcgctgatcgcatctgccagcccggtgaaaaggttctttatgacccgggcgaggatggcgtaattgggccgaatcttcgagagatcaaagaagacgaagccaagtaa

SEQ ID NO: 329323 - DNA, 630 bp, Pseudomonas aeruginosa
atgagttcgatagtagacatcgccaacatggcgctttcgcacatcggtaacagcgagcgtatcaacgctctggatgaggcgagtgcgcaggccgagcaatgcagcctgttcttcgagccttgcgttgatgaggtcttgcgtgccattccctggggtttcgcgacggcgttcgtggatctggcagaagtggcaatcaaccccgacccagagtatccctactgctatgcgatgcctgtcgactgcttgttggctcgccgcatcgtcaattcggtatggcctgttggctactacccgttcccctgcgactaccagttgcctcagatcccgccgattcagttccgcgtgatcaatggatctagcggtaggctgatctcgacaactgtctcccccgcgaagcttgaatacaccaccaagctctctacgcctgagatcttcgatccgatcttcgtatctgctctgtcttggaagctggcggcaaagatcgcacctgcgctcagtcgtgacgcgaacatcgcgcagacctgcgagcagcaatatcagtacgaaatccgaaatgctggggcagccagcttcaacgaagctcagcgtggcccgcagcctgaatcttccttcatctcggtgcgctcatga

SEQ ID NO: 329324 - DNA, 2340 bp, Pseudomonas aeruginosa
atgaccctgctcgttcagccgtctttcagcgcgggcgagatggcgcctgcaacctatggccgtgttgacctggcgcgctactacaccggtctgcgcacctgtcgaaattttcaggttcttcccgaggggggagtccagaaccggtctggtacgaagttcatcgccgaggtaaaggccagcgcgaacttcactcggctgatccccttccagtactcgaccgagcagacctatatcctagaattcggcaatctgtatatccgcttcgtgagcaatggcggacaggttgtcagtggttcggtcccgtatgaaatcgcaagcccatacacgactgccgatctgcgcgatctgaagttcactcagtctgccgacgttctgaccatcgttcacccgaactatgccccccgtgaactgaagcgtcttgctccgaccaactggactctgacaactatcgcgttccagcctggtatagctgcgccaactggtctttcgggctctccgcggactggtggttctggagacacaacgaactataggtatcgggttacggcagtcagttcgaaggacacaggctctatcgagtcctgggcgagcaataccgtcactgtggcgagttgggatggcaagccaggcgccaccctgtcctgggcagccgtaacaggtgcagaccattacaacatctacaaggacaagtcatcaggggttttcggctacatcggccaggctgacaccacttcgttcagcgacatcaacatcgcgcctgacaacgacaagactgtgccgattggatataacccattcactggtggcaacaatccatcggtcgtgggctacttccagcagcggcttgtgtttgcggcaagcaacagtcagcctcaaaccatctggatgagcagggtcggggacttccataacttcggctattcagatccatacaaggacgatgatggcatcgagttcacgattgccagccgcgaggtaaaccagattcgccacctcgtatcgctgcgtgaccttctggtgctgacctcaggcgcggagtggtcggtcagttcatcgaaagaaaccggcatcactcctgaatcgatctctgtcagtgctcaaagctactttgggtcgagcggcgttatcccagcggtctacgccaatactgcgctgtacatccaggccagaggcgggaagctttcgacgctcgcctataacgatattgatgccggcttcaggccgagcgacgtgagcgttctttcgtcgcacctactgcgcgggtacaccatcgaggaccaagctttcacgctgacgcccaatggcgttctgtggatggtccgtaacgatggtgtattgctcggtttcacgttcatgccagagcagcaggttttcgcctggcatcgtcacgacaccgatggtgaggtcgaatccgtagcgactgtcccagagggcgacgaagatatcctctacatgatcatcaagcgcacgatcaacgggtctaccaagcgttacatcgagcgcatgcagtcacgccagttgaacaagttcgaaagcggcgattacgtctatgaccgctcgttcttcgtcgactgcggcctgacctacgacgggcgcggcaccatgagcgctacgttaactggtgggactgactggaaatacccgaaccctttgacccttgaggcgctgtcggctccgttcaaccccgggcatgtcgggcgctacctaatcctttatggcggtggagacgaggacaatatcggcgatgtgctgaccgtcaagattctctcctatgactcccctggcgtcgtttccgtggaacctcagactatcgtccctgagtcattgcgcgggatatcggcaacgcgttggggcttcgccgcaaccaccatcagtgggcttggccatcttgagggaaagacggtttcgattctcgcagacggaaacgtcgcgcctcaggcggttgtctctggtggttccatcacgctggatggtccttcacttgttgtgcatatcggcctcccgatcactgcggagatagagacgctagatatcaccatgcagaaccagcaggctttcctcggcaacaagaagcgcatcaaccagcttgtagtgctgctcgagcaaagtcgcggcttttgggcaggcgctcggagtgatcgtttgagggccgcaagtggctgggaatacaagcagcgtgcgacagagaactacggcgagcctatcgaactgaagacaggcaaggcggagatcagtatcagcacagactggacggacgatggccgcatcttcatccgccaaagcgacccgctgcccattacgatcttgggagttcttccgaatgtccaggccgggggctga

SEQ ID NO: 329325 - DNA, 480 bp, Pseudomonas aeruginosa
atgtccaggccgggggctgagcttagggctgtagacgagcagattattgctcgcgtcgtggccaatgtccgcgaggcggatcgacttgaattcgaggctattcgtggcgccgatgtagagcaggaattgcgctacgccctggaacagagcgaagaggcatttgttctggttagccgcggagaacctgtcgtgatcttcggatgcattcggtacgacgaccgaatcggcgtcccatggatgatcagcacgcatgccgttaccaggcatcgcgcagctttcctccaagagtgcagagatcagattgagcgtatgcgtaaacgctacgcggcactcatcaactacaccgacgcacgatatgagcaggccctgcgctggatgcagtggctaggcttcgacatgctcgatgctgtcgagtacggcgtaaacggtgaacttttccacccattcactatgcgaggcgaactatgggcgcagcattag

SEQ ID NO: 329326 - DNA, 465 bp, Pseudomonas aeruginosa
atgggcgcagcattagcggcaggcgctgccggagctggcgggctgctgaatgcctattcgcagattcagcagggcaaggatgccgtacgcaccgcgaaccgacagcaggcctatctaaatcgccaggcacgtcaggtgctggatcaaggcgaattcgaagacgctcagttgtatgaacaggggcggcagatcgtgggcgcccaacgtgccgggttcgcggctaacggcgtagacgtgaacagcggaagcgcgtcccgtgttcaagagtcgacgatgaatcaggttgccatggatgcggagcaggtcaggcgcaacgcattcaaccaggcgtttggtctggtcacgcagggtaacgaagggattcgtcaggcccgcgccgactatcgcactcgtcgcctgaatgccttcagttctctactaagtggcggatctcaagccgttagcaactacaaggcgctttcctga

SEQ ID NO: 329327 - DNA, 2037 bp, Pseudomonas aeruginosa
atggcagcacagatcccgcaatatcggcgcagggtaggccctgacgtcgcacaggcgccccgcgcgcttggccagagcgttgatgcgtcaggcctggcccaaggtttgtcgagcgtatccaacgcgataactcagatatcgctgaaggagaaacaagaggccgatcagactgcgctcatcgatttcagcacgaaggttgatcagctccgaaatgatctgatgtacaacccagaaactggagcgatgacaaaaaagggcggcgctgccctgaatgtaaccgggaagaccgtcggcgcgtttgatgagcgaaccgctcagcttatcgacggcctggcaaatgaggatcagcggcgccaggcaaagcagtatgttgcaaagtcgaggactgattttgaggggactcttggccggtacgagttcaaacagcagcaggcgtataaggatcaggtcgatctggccgcaatcgccacggcgcagaacactgcggcactgaactacaacgaccctaaagccgtagaggaaagccgaagccgaatcgacgggatacttcagcttcaggctcagcgcaatggctggggcccagaggtcttggaggcgagacggcagaaggtcggcagcgaaatgtatgctgatgttctacagcgtcaggctgcggatgatccatatcgagcacagaaaactctgagagaggtccagggagctcttactgctgatgatttggttcgcgttggcggcatgattgaaagcaagatagaccggcttcagcaaaaggccgagatggccgctcttcgccgggagaacgcagctcagcagacgattaacaagatcaattctcagatagctagcggcgtacctgctagcgatgaaatgtggaaggagtggggtcggtccgtgcagggcacttctgcacagaaagagtttcaggagttggtttctcaagaggttgagactcagaaggtcctcaacggaatgcctattgatcagcaggccatctatgtgaaccagaaagctgctgaactccaaaagaatggaggaacagtcgctcaggccaacaatctggcccgccttggtcgcgctatagctgcaaacaacaagatgcttggagaggctcctctcgagtatttccagactcgccttggcggtgaagtccaaccaatagaccttagttctgatgatctgcctgacgtgctatcgcagcgcatcaccgccattcgtagcttgcaagacaagttcgggcaaacggtctcaatgaagcccctactgccgcaggaggcaaaacagctcagcgcgcagctcgaaggcatgagtccacaacagcaaagcgagctttttggcaagctacatactgctatgggtgatgatcgcgcctatgcaggggcaatgcagcagatcgctcctgactctccaatcagggctcttaccggtatgctggcagggaaacaaagaagccttgttacggagacaaaatggttcagtcctgatgttgaagttacgagcggcgacgtagcgcgcacaatggcgactggagagagcatcctgaacaagacgagggcgcagaagcaatcagatggtgcatcgacaaagtacccgattcctccagagaaggagtttgtggttgagcttgataaacaactaggaggggtatttgctggtcagccgcaatcttatggccttgctctccaggcagttaaagcttattacaccggagccgctgccgagcagggaatcgctagcgttgatgttgacagcgatctgatgaagaaagccataaaggcctctattggcagcgtcgtcgactttaacggacaaaagaccctagccccttggggtatgagtagttcggactttgagcctgctgcgagggcaagcatcgagcagttgctggaagaacaaggcgcatccgatcttgataaggccatgatcgataattacacgcttcgccaggctcgtgatggagtctactacgttatgcagggacagcagttcaaatatggcacggacggaaaaccattgattatcaaggttggtgaccaatga

SEQ ID NO: 329328 - DNA, 1923 bp, Pseudomonas aeruginosa
atgagtttcatcggcgatttggcgtttgaggatcagcgcgcactagaagatgaggcgttagccaacccagcagtaaatgacccatctccagatttctgggatggatcgtttgactctattggaactggcttcatacgtggagcatttgaggcagcatcgtcagtagaggcaggttttaacaatctttggatcagcgggctggatgccgccgcatctgcattcttgcctgagcctcgtggtggcggtacgccaagcgtaactgacgcggaaaacatgctgcgcgatgagcaggccaaggcgaatgctgaatacatcacaagccttcgcccagatcctgaaaccaccggcatggcagcccaggttactggcgagctagcagccgtaatccctcgcaccatcgcaggtttcgctgccggagggccagttggcggagcaattgccgcaggtgctccggctggatatgcaggcgctattgaggctgaagcgcagggaattgaccctgagacggctagaattaaaggcgctatcgacgctgccacatatgggattggcgcactgatgccggcaactaggttagtcggctctgctattcctgactttgctgtaacggttggggcaaacgtaggccttggtgttgcatctcgcggcgggactgctgcgctgctggaagctaatggttacacccaacaggcccagcagtataaggctcttgacgccactagcatggctgttgacgctgttcttggtgcggcattctggggggtagggaggatcggcgcgcgcgctcctcagcaagatatagacgcagcactggcagcaaacaacagcggccatgcgcaagatggatcggccccaggggctccggttgaccctgcctcttcagttgcccaccaaagcgctctggacttggcgatcaggcaattatccagaaacgagcctgtagacctttcgcctattgcgcccctggtagatagagccgagttccttcgtggcaatcgcgtcggaccagatgacgcagctatccgctcaaccgctgagcaggaagttatcccgctgattcgccaggaacttgaggcggaagctggcggacgttcaggcgtcattaacgacctaaaggcagagcgtgcatatctcagctcggaactgtcacgcatcgcagatacattcaagcgccgcgctaaggacttccaaggccagcgaatgtcgcgtaagcaggcagagtctgccgctcgccgcgcgatagccagtgagcgcgcttcacttcaaaccagaattaccgagatagatcgagttttttctgagaaccgtgcagcagagcgtgcggctggggaaataaaccagattgaccgaggtgaaatcccggctcggttcatgtaccgcattgcttcgcgcgaggcagaaattaagaatggttatcgcaagaccgctcttgtaagcagtgtcagccctgatcgaggcgctgcacttatgcgccttgccaacgatgagattcggaaaatccttccagagcaattccccgaccaggctactcctgatgcggccatagtgcgcacccctgagcgtgatgctgcatccactgttgatgacgcgctagcgaacccaggccgaggtatctctcgcgccacgcctcgtcccgatgaggcggccaggtctggtggccctgatagtcaagcaagaccgaagccttccgggcgagccgatgaaagtgaactggagccagtggtttcggatttggtccagtcaattatggcaggggagcgcgaaataacgctgcccactggagcggttgatgcggacgggaatctggttactgtctcggcccgcgagctacttgatcaggcagacgctcaggtggcgcgcgccgaaaacgattccaaaggaattattgctgctgcgctttgtgcgctgaggtttggaaactga

SEQ ID NO: 329329 - DNA, 2544 bp, Pseudomonas aeruginosa
atgagacggcaatgtattcaggctgtgcagcaggcgattgggcgcccgctcaaccagacagaaatcagggatatcgaagcgcgcatatctcgcaacatgagggaacttgctcgtatcgacccgaactggcagacgcttactcgtagtgaccggattacagccgctggccagcgcgccgcggatgaactaaccgcagaggccgcaaaggcgcgtcagcgcaccgcgctcaccatccttgcccatgatcgcgtgcagaacttcctggaggggtatgacggcaaccgtcttgaggccctagatagaatcctcgcattctcttctgactacccaggaatccaatcgatcgaatctgcatctcgcgcaatccgagacgaggcaatgggtcgtttgctagatgttatcgatcagacgcgcggtagatttcttgggcttatcgcgaaccgcgaaggcaccactgcgctggtgcgcgagcttcatggagaagattctggggtaccggcagcgcgtgaggcggcacgccaataccatgaggttgccgagagcctccgtcagcgcttcaaccgcgcgggcggtgatattggcaggttagatgactgggcgttgccccgtgggcattctcaataccgcatcgctcgtgacctcgccggctgggttgaccagcacatggggtgggttgatcgcagccgctatctgaacgaagacggaacccgcatgacggatgaccagcttcgtgatttcctgactcatgccgggacaacgctagcgactggcggggtgaacaagatcgagcccgggcgtgtcggcgggagcgggatgcgtgcgaatcgaggcagcgagtctcgccaaatccactaccgtgacgccgatgcatacatggccgcgcaggaggcatatggcgacaagaacattatggatctgatgtttggccacattgaccagatttctcgcgacatcgcgcttgttgaaaccctaggcccaaacccgaaccatgcgttcaagtatttttcagaatctgcattccagcatgagtctgtgtcatcgccgagagatataagtcggagccttaacaagcagcgtaagcggctagattacctttacaccgaggttgctggtacgcgcgagccgcccgtctctgcacgcattgcaaactggttcgatacatatcgcggggttaacgtagcatccaggctgggtagcgcggtaattacggggttttctgaccagggaacaatcgcacttactgcaaagatgaatggcatgccagtaatgagggtattctccaatgaggcgaagatgctcaacccactgaatgaccagcatcgccgcattgccagtcgcgcaggcctgggcatcgaccagctcatgggtagcatggcgcgctggggggctgacggtcttggtcatgacgctgaagttgcaggtcgagcatcgggttactcgcagacggcggcaacaacgcttctccgcgcgtcaggcatgaatgctattgatgcagccaaccggcgcgcttttggcgcaaccatgatggatgctgtcggatacctaacgcgcaaccaccaatccatgtcctctcttgaagcaggggatcgggcaaggctgcgtaagatgggtgtgacggatactgacttttctgtgtggcaacttgctgaaactgaagattggcgcggaataggagacaccatcctaactgcggggagcatctatagaattccagatgcggaccttgctgcgctttctgcacagacccgcaccagccctcaacgtttacgagatcaagctgctaccaagctacttgggtccgtcctcgacgaaaccaatatggctatccctgcgccaggggccagggagagagcattcatgcatgggggcaagacccgcggagaatggggcggcgagctagttcgttcgttctggcagttcaagtcgttctctgtctcaatgatcatgaagcactggaagagagctttcgctcagcaatccggctggggtaaggctggctatatggcggcgatcttcgcaagcacaacagtgcttggagctatttcccttcagcttaacgagatagccagcggtcgtgacccaaaaaacatgctagacgccgatgatacgactggtgttccaggtcttcgatttgctttggctgcaatgcttaaagggggcgccctgtctatctatggcgactttctattctcagatacgaccagctatggaacctctccgcttgcagcaatcggaggccccatagccggggatattgaggcgctattcaaaatcagagggacggcacaggacctaaaaggcgatcagcttggtgggaaccttgtgaaattcgcaaagagccacatccctggagcaaacctctggtacaccaaagctgccactgatcacatgatcttccaccagttgcaagagtacttctctcccggctaccttcgtcgcatggagcagcgagcccgtaaggaattcgggcaaagcttctggtgggaacctggagatgtatccccaaggagagcgccagatatcggcgcttccgttggagaatga

SEQ ID NO: 329330 - DNA, 411 bp, Pseudomonas aeruginosa
atgcacatcaaggcggttttcaccttagcggcaacggttatattggggggatgcgttagcgaccaggcaaccattgacgagctttctaggtatgagggcctacccctggatcagttcgtgatcgcaaatggggcaccaagcaacagttacaagctgtctgacggcagcaccgtctactactggtccagctcgaaaagcgtctacatgcctggatccgcgacaacaacgttcagcggaagccaagcgtacacacaacagatcagcggcgggaacataggtactgagtgccagcttgacttactgaccgactcgaatggcgtaatccgaaaagtgaccatgcggaaaaacactattgggtactggaccagctcggcctgtcatgagtacgtccgtcttcctgacgagatgtga

SEQ ID NO: 329331 - DNA, 2277 bp, Pseudomonas aeruginosa
ttgaccgtacctactaataccagcgttgttgagtacgaaggcaacggagttaccacagcattccctgtgccgttcaagttcccggccaatgacgaccttgtggttacgaaggtctataacgatgttgcaaatgttttggtgctaggaactgactacaccgtggttggtgctggtgcgcagagcggtggagcagttatcgccacaagcgctcctgaaattggcgcggtcatcaatattacccgagagcttgagactgtacaggaaacagaccttaggaaccaaggcagatatttcgcagaaacgcatgagagcgtttttgattatttgaccatgcttatccagcaaggatttgctgttcttgctagaactctgaagcgaccagtaggtaaagactattttgatgctgaaaatcgaagaatctcaagggtcgatgatcctgtagaggatggagatgctgctaacaaagtatggactcagcagtatgttggttcattgatttcgagcggtactggtccaattaaccttgcttctaacgtcatctacttttctccagaactggttccgcatgtccttcaggatctttctggaggttcttcctctgagggtgcggctctggtttctagggcaactgtcgctcttgattctgtttacaacctacaggcagcacggaagatttccaatcaactgatgcgcgttgctggatactaccccggtggatctgtatctggaaactcagcggccgctggtggcggcctgttccgatgggatggcgctagaccgaagtctcaacacaatggcggcaccatcatcagcccgaccgttccatggaacggactccaaagcacattaggtgcatacctattgggatctggagaaacttcacctggcgagaatggctgctgggttcgtgttgctgatgatgtcaagcttgttgactttggtggggttgtaagtgagtccgtcgattcatccgctgctttttatgcagcgctgaagtactgcttatcgactaataaggaactctaccttccagaaggcgtagttcgcgtaaactctgctgctgtaatagatggcgccacaactattttctcgtctgtgaaaattcgaggtactttcaagacaagtggagtggctgctggttatgtggttagcagagttggaagcctgatctacactaatggaaacagcgctctagacatttcgttcaacgactttaggaacgagaactttgatatccgtggagtggcatttgtagacacctcattctatcctccgggaactcctgcaagctcgaatcctgcgataattattagaaagggtaatcctgatggcagcagcaatcgatatataactggtaacgttcttgaggacgttgctttcgttagctatcaagacgctgtgaaaactattggggttgcaacagggttgccgacctataactacgttggtccaacctcgttgaatcgtgtgtacttctataagtgcggaaccgctatgcatcttcaggattgcacgtacaatcatctattcctgaatgaatgtcttctctttgatctgtcgtctcaagctatattcctgacaaagacggttagcgggactggcggcaacgtagatgtaacgttcagcaattgtgtgttcgaatcgatttgggggattatgaatacggccaatgggttgacgtcttccacgaaacgtaacacggcagttttcaattcttgcaatagagaattctgcgggctgtacggcccgacaggcggaggcggaaacttcgcagggagtccgcttgggtatataggtcacaccgatgtaatgatcaatggaaattgggagagaggtcaggcttttggggaaactgctttaccggcaatcgattctggtgctgttattttcgcgagcagatatgttgatgttcttatgaatggcggccaagttggatctccagaatacgtcaacgttgttgacgtaagcgggacaattccagcctctggcagcctgactaagactttcaatgtgagcggatcgtttgtgttgaatgctgacgtcgcatatgacgacgggttcggcgggcaccagaatgtagttgcgtacggcaaccctactggctcaaaggcgcgggacgtgacagggacgatcatttctgctggtctatctgcgacctacggggacggaccgtcgggtgcggctttcaccgttacgttcaataacgggactgcatcgccgatcaatgtgaagatccgggtcacgaacaaagcagggttgatcgttactgtgtcgtga

SEQ ID NO: 329332 - DNA, 801 bp, Pseudomonas aeruginosa
atgaccaaggacgccacaaccaaaggcaccagcagcaaagatgtcggcgcggtagtgaacgccattcagatacttcgccacctggcccacgccgacggaccgcaaggcgtggccgccatcgctcgcgccaccggcatcagcccgagcagcgccttcaatatcctgcgcaccctgagcaacgaacggctgacctccttcgacgatgcgggcaagacctaccaactgggccttggcctgtcggaactggccgtaggattcgtcggacgcagctatgccgacctgatccagccagagctggagcgactgagccttgcccaccacatcctcatcgccctgtggcaagtcaccgacgatgcgcacatccgcgttatcgcccttgccgcaccgcccgtcgcccacgtcaacgtcgccgtcggcacgcgcctgccggaactggtcggcgccgccgggcgttgcattgccggcctgcgcgaactgccggaggacgaactgcgccgccgactgacccgcgtgcgctgggaaaatccgccgagcttcgagcgctaccaggccgaagcgaccgaggccgtcgagcgcggctgggctatcgaccaggaacacctctaccgcggcgtgagcatggtcgccagcgccatcaccgaccgcgacggacaaccgcgcttcgccatctccgcgatcggcatcagcgcccagcaccagcccgacgacctggaacggatcggcaccagcctgcgggataccgcgcgcttcgtgagccgcgcgctatttccccagggcgaggcactgaaggataaatcctga

SEQ ID NO: 329333 - DNA, 312 bp, Pseudomonas aeruginosa
atgttgcagcgcagccgttccagcggtcgccatgtgttctacccgcgccagttggtgccgggtagcggcgagactgatctcgagtgggttcccgccagcggcctgggtacgctctacgcgatcactgtcaatcgctcccgcggcggcaatcacaatgtcgcgctggtcgacctggacgagggcgtgcgcatgatgtcgcggatcgacgggcaccagagcctgccgatcggcacccgtgtgcaggcgcgcatcgtcgagcaggacggtgccaatgtcgtggtgttcgttccccaccaggagggacgaccatga

SEQ ID NO: 329334 - DNA, 1152 bp, Pseudomonas aeruginosa
atgagcgcggccatccgaggcaagaccgccatcgtcggcatcggtagcgccggcgtcggcgaggcgccgggctacagcgccatcgaactgctcggccaggcgtcgctcaaggccattgccgatgccggcctgaagctttccgacatcgacgcgatcttcgccgccaccagctcccatgcctttcccaccttgtcggtcgccgaatacctcggcatccgcccgaaattcgtggatggcaccaatatcggcggctccagtttcgagctgcacctgctgcaggccactttggcactggaggccggtctctgcgacgctgcgctgatctgctacggctccaaccagcgaaccgccggcggccgcctggtatcgatgagcgagccacaatggcacgagacgccctacaagccgcgccacccgatcaccgcctatgccctggcggccagccggcacatgcaccagtacggcaccacacgcgagcagctcgccgaggtggcggtctctgcccggcaatgggccaacctgaatcccgaggcgttcgcccgcgggccgttgagcgtcgatgacgtccttgccgcgcggatggtcagcgacccgctgagtgccgccgactgctgcctggtcaccgacggcggtggcgcctgcgtggtagtgcgcgccgagcgcgcccgcgacttgcccaatgcgccggtgtacttccttggcgcggccggagcgcagtggcatcgctcgatcgtgtcgatgcccgacctcaccgtgacggcggcctcggaaagcggtccgcgagccatgcagatggccggtgtgcggcacgccgacatcgacctggtgatgctctacgacgcctttaccatcaacaccctgctgttcctcgaggacctgggtttctgcgccaagggcgagggcggcccattcgtccagggcggacgcatcgcgcccggcggcgagctggcggtgaacaccaacggtggcgggctgtcctgcgtgcatccggggatgtacgggatgttcctgatcatcgaggcggtgacccagctccgccgccaggccggcgagcggcagttggccaaggccgacgtggcgttgctgcacggcaacggcggcacgctgtccagccaggtaaccgcgttgctcggcaccggcgacacgctctag

SEQ ID NO: 329335 - DNA, 183 bp, Pseudomonas aeruginosa; identical to SEQ ID NO: 328046

SEQ ID NO: 329336 - DNA, 1506 bp, Pseudomonas aeruginosa
atgaagaacaccttaaccttgcgtgtgcatcggtcgctgtggctcctgagcacgagcattctattgtcggcatgtgcagccgttggccctgactataaggcacctgagcttttgtctccggccacttggtctttatggtcgagctcgagcaaagaattgcccaggaacgaggggatgcagggagcccccgagcataagtggtgggctgcatttcaggattccgtgctggaccagttggaaacccgcgtgcttgagtccagcccagacttgaagactgcaatgcttcactatgaacaggcacgctctcagaggagtgtcactgctagccagcaagtccccgaagtcaaactccagggtggcgcaattcgccagcggcagagcgaatacgcggcgggggaccgggtgctggacgtaatggcgccgaataatcgggatgcggttgccaaatcactatccgagccttacacctcctaccaaggcggattcgatgcgtcttgggaaattgacctgtggggacgtgtgcgccgagcggttgaggctgctgatgcagacatcgccaattcgttggcattacttgaccagaccagactcgtcatctccagcgacttggcgatggcctatatcgacctgcgcacaacgcaacgcctgttgaaattgacgcgggacgacatcacggccctgcgcgagcggacatctatgatggagtccaggagcaagcatggactcgccaacgatttggaccttgagcgccagcggctgcaactggctgaccttgaggaacagatgcccccgctacttgaacaggaggcacagtccaagaaccgtatttgcctgcttctcgggctgcgccccggtgatttggccaaagagctggccgccgagagtgctcctgccgcggcaatggtgttgcctcaatacaagctcggcgtgccatctgagttggccggtcgacgccctgacattcgtgcggccgaagcgcgcttacatcaggcaactgcggcgataggcgaagcccaggcccagctttatcctagtgttcgccttggtcttcgcttcggtttggattcctacgaagctggcaagtttggtgattggggtagccgcttctggtctatcggtccgagtttggatttgccgattttcgatggtggccgccgtcgtgccaccgtgacgcttcgagaactgcgccagcaggaagctgctatcgaatttcaacggacggtattgagggcttggcaggaagttgacgatgcattgacgtcctatgcagcagaacaggaacggcaacagcgccttcttgttaaggctcaaagcagtgctgatgtctatcagttggcacaagctcgggagcgtgccgggttggtcgattacctcaatgttatcgacgctcagcgtaccgacattcaagcaaggcgtgacgttgttgcaagccaggggcgcacgcagcttcgcttcattgcaatataccgagcactgggtggtggagtggctgaaactgctgactga

SEQ ID NO: 329337 - DNA, 1131 bp, Pseudomonas aeruginosa
atgatgactctgctcgaatccattacgggttctcttcgccgaatctccttcctgttccgcaaggaagtcttggcgattttgaaggaccccgccatccgggtaattctcatcgtcccgattgttatccagtcgctggtcttcggttacgcggccacctacgacctcaatcatgtgcgatacgccgttctaaatgagagtcgtggcgcagcctcgacaaatctgctggctcgtctggagggctcaaaggtctttgtacgggcggcgacgctgcgcaattcaagcgatattgctcgtgctatcgacaatggcgaggcgctgctggttctccacttcgcgcccgacttcgacgcgaaactagcatcaacgggtagcgcacctgttcagctcattctcgatgggcgtaactcgaccactgccaatatggcggctggccacctgagcaccctgattggccaattcaacgcttcactacccaacgcggtacgtccacccgtcaacattgaaatccgagcctggttcaatcccaacctggaatctcggtggaacatcgttcccgccctgattgcttccctgagcatgattcaaactttgctgttggccgcattgtcggtggcccgtgagcgtgaacagggcacgttcgaccaactgctcgtgacgccactgcgacccatggagattttgattggcaaggcgtcgccggccatcactatcggactggtgcaggcaagcctggttttctgcgtggcgctgttctggttccggattccgttccaggggtccttggttgtgctctatgtggggcttgtcgcctttacaacggcctgcgttggtattggtctctccatctcggcgctgtccctgaatatgcaccaggcaatggtttacgccttcgtactcatcatgccgctcatcctgttgtccgggctcgtcacgcccgttggcaacatgcctaccgcactacagattctgacttacgccgacccgttgcgattcgccatcgacctggttcgccgggtctatctggagggtgctggttggcaggacgtaggaatggattttgtcccgatgctggtgatagccgcgataacgcttcccgttgccgcatggcttttccgaaatcggctgacctaa

SEQ ID NO: 329338 - DNA, 1161 bp, Pseudomonas aeruginosa
atgatgcaaacccaatcgacttggctcccacgaaacttgagtcatttttggcgacggctcagggcgctcaccatcaaggagtttcgccagctgatacgcgacaagagcaacctggcgataggtatcttcctgcccatcgcactgatactgctcttcgggtacggactctcgctcgatattcggaatgcgccagtcgccatcgtcctagaagatggcgcgcccatggcgcgcgatgttgtggcgggattgcgtggctcggactacatcgcccctcgttacgtcacgacgatggccgaggcggaagccctgatgcgtggccgccaggtcgacggcattgtccgcatcccctccgacttttctcggcaactggctcagggccgaggaacggtacagcttgtcgtccatggaacggatgcagcgacggccgccagtcttcgtggttatgtgtccgcagccattgatggatggaacaagcgccgcgccgatagcgccggcagggtcagtgctgctccaggcgtggagcttgttgaccgtctctggttcaactcggccaattcgagcacctggtatctggttcctgggctgatagtcctcatcatgaccctggttggcggattcctaacctcgatggtcatcgcccgggaatgggagcgcggaacgatggaggcccttttcgtcaccccggtgcgttccctcgaaatactgctcgccaaaatcatcccgtacttcgcggtgggtatgggagggctgacgctctgcctggtcgccgcccgggggttgttccatgtgccgcttcacggttcgctctgggtgctgatggtcagttcaatgctttatctgatggtcgcactgagtctggggttgttgatttcagcggccgcccgcaatcagtttcttgcaagccaggtcgccgtcatcattaccttcctgccggccctgatgctctccggcttcctgtttgacctgcacaacgtaccgaccggcatccagaaggtcgcgtccatcctgcctgcaacctactacgttgaactggcgcgcatgagcttcctggccggcgacaacctcaacctaatagtgcgcgactggacaatccttatcgtgcagtttgccgtgctcatcacgggcgcgcgtctacgcaccaagaagacattggaccgatga

SEQ ID NO: 329339 - DNA, 1770 bp, Pseudomonas aeruginosa
atgaccacaactgctctcaccgttgatgcaaaggatgtcgtcaaacgcttcaaaggagcggttggcgggccggcattgaacggcatcaccctctcgattcccaaagggcagctcaccgccctcgtggggcctgatggcgcgggcaagaccacactcatacggttaatcgctggtctgatgaagccggattcagggagcctctacacactgggcattgatgtggccgccaagccccaggaggtacaagacctcatcagctacatgcctcaacgctttggcctctatgaagacctgagcgtcatggagaaccttaatctctatgccgacctgcacggcgtaccaatggatgagcgtcgagaacgctttgaccgcatgctgtccatgacagacatggccgcattcaccaatcgcctggcaggaaatctatcgggcggcatgaagcaaaagcttgggttggcctgcacgctggtacgttccccccggctacttcttctcgacgaaccgaccgtcggcgttgacccgctctcccgccgtgagttgtggcgcatcgtgcagcagctagtcgaggaagaaggtcttccggtgattgtgagcacggcttacatggacgaagcagagcgttgtaagcacgtcatcgtaatgactgaagggcaagtgctagctcagggcacaccggatgaactgtgccggccggccaagggccgttgctttgttgcctatccgcgggaaggtgagttggctaggacgctacaggcgagacttatcgacgataagaggcatgttctcgatgctgtgccggaaagcggcgcggtgcgctttatccaggctgggggcacggagcctcgtgaccttgaaggaatacttctgggagctcgatgcgaggccactccctcccgcctcgaagatggagtgatgaccctcctgcgcgagcgtgcgacccaggacggccgcgaggatgcggttgagaccaagaattcgtctgtacagctcgacacgaaggacccaatcgagttaatcaaggtccgcgacctggttcgccaatttggcagctttacagcggttgccagtacctcgttcagcgttcgccgaggcgaaatcttcggtctactcgggcccaatggcgcggggaagacgaccacattccgcatgctttgcggcctgctcccggcgaccagtggcttcctcgaggtggcgggtttcaacctgagaaccgcccgagcacctgctcgcgctcgcatcggctatgtctcccagaagtttgccctgtatggaaatctgtccgtcaccgaaaacctcacgttcttcggaggcgcctatggcttgggcagacaggagctgtatgcccaggtagagcgagcgctagacgaatttcagctgcgggaaaagaaagacgaacgaagcggtgagcttcccggcggtttcaaacagcggctggccatggccacggccctgatacatcgccccgagattctctttctcgacgagcctacaagtggcatcgacccactcgctcgtcgcgctttctggcggcgcatcacgacgcttgctgccgaaggcaccaccatcatcgtgacgacgcacttcatggaggaagctgagtattgcgaccgcatcgtcatccaggatgccgggcgcttgctggcgattggaacacctcacgaagttcgcagccaggcttctggtgcggcgaacatgaatgaggcgttcctggagattatcaagaaggcgcgcgaaagcaggcagaccggcttcaatgcggtggaggcctga

SEQ ID NO: 329340 - DNA, 993 bp, Pseudomonas aeruginosa
atgaaccggaaaattctcgccggagttgcgatagcagttgttggagtcgttggtgtcagcgcttggctgtggagcggaaactcctcgcagaagaacgacatcacgctgcttggcaacgtcgacatccgtcaggtttcactggccttccaggacagcgagcgcattgttgaaatgcgggttgaggaaggggcgaaggtcacagctggccaagttctggcggtgctcgacactcgcacgctcgagcttcaggcggctcagaccgaggctcaaatcgaggtaaacaagaaggctttgctgcgcttacgcaacggttcgcgcccggaagaaataggtcaggcgcaggcccgggtggatgctgctactaccgatgcaaagttggccgagctggatttccagcggatgcaatccatcgcagaggaaactcatggtcgaggcgttagccgccaggaattggaccgggccgcagcgacattaaaggcggctcgtgcaaaagttgaagaccaatcaatggccctacgcctcgccaaattaggtccgcgctctgaagacatcgagcaggcggcagcccagctcaaggcatcggaagagtcgttggctttactccggcatcgcatttcactggctgaattgaaagctccgaccaatgccgtcgtgcgttccagattagccgagccgggcgacatggcgtcgccacaaaaaccggtctacgccttggccatcgtgcaacccaaatggatacgcgcttacgtgaatgaggcgcagcttgcccgtgtccggccagggatgtcggctgaggtcaaaatagacggacttcctgacgcatccatcgccggggaggttggatatatctcctcggtagcggaattcacgcccaaacccgtccaaacggaagagctacgaacgagccttgtctatgaggtccgcgtactggtcaaggaccctgacgaccagctacggctgggcatgccagccactgtccgcttggtgccctaa

SEQ ID NO: 329341 - DNA, 255 bp, Pseudomonas aeruginosa
atgccgcgcttcaagctcatgagcgacatcctttcggaagttactggattcagcgcacaggacccggcgttgttgcggtgcgttctgagcgtcatcgcaccgatgctgatgatgctggtagtggaccgcgatacgcctactccatttcgcgcattgatgacgcggcccgcagatgaactcaaaagccatctcaagcattttgctttggcaggattactcgccaccaaggagcaagccagccgccgaggtagctaa

SEQ ID NO: 329342 - DNA, 624 bp, Pseudomonas aeruginosa
atgttgatcggctatatgcgggtgtcgaaagcggacggatcccaatccaccaatttgcagcgcgatgcgctcatcggcgccggcgtgagtcctgcccatctctacgaggatctggcatcaggccgacgcgatgatcgcccagggttggctgcttgcctgaaggcgcttcgtgaaggggatacgctgatcgtatggaagctcgatcggctcggccgcgatctgcgccacctgatcaataccgtgcacgacctgactgcgcgtagcgtgggactgaaggtcctgaccggtcacggtgcagcggtcgacacgacgactgccgccggcaagcttgtgttcggcatttttgctgcgctggcagagttcgagcgggagttgatttccgagcgaacggtcgccgggcttgtctcggcgcgcgctcgcggcaggaaaggggggcgccccttcaagatgaccgccgccaagctacgcctggcgatggccagcatggggcaaccggaaaccaaggtgggcgatctctgcgaagaactggggattacccggcagacgctctaccggcatgtgtcacccaagggagagctgcgaccagacggcgtaaagctgctctcccgaggttcagccgcatag

SEQ ID NO: 329343 - DNA, 1125 bp, Pseudomonas aeruginosa
atggacttgcacgatctgctggaacacgatctcggtcacggccaagttgatgatctggatatcgcaccgccactgtcgctgctgacggttctctcccagcgcagtagcgtcgaactggaccgactgcggtgcatgagctttgccggctgggtgccatggctgctggatagcctgaatgatcggattccagatgccttggaaacctatgcgttccagttctcggtactgctgccgaaattccgccgtaagacgagatcgatcaccagctggtgtgcctgggtgcccagccggccgatccaccgcgcctgcccactttgcctgaacgatcaaacgaatcaagccatattgcttgcatggaaactgccgttgatgctgagctgcccacaacatggttgctggctcggattctattggggtgtaccggggcggctcctcggctgggagaacaccgacacttcgccgcgcgcggtcaacgaagcgattgcggcgatggatcgacgtacctggcaagcgctgacaacaggatacgtcgagttgccgcgcaggcgcatccatgctggcctgtggttccggctactacgcaccttgctcgacgagttgaacaccccactctctctgtgcggaacgttcgcgcacagtatccgctatgtctgggaacgttgcggacatccgctgcgcgcggggcaaagtctgtggcgtccctacgaaattttgcccctagaggtccagttgcaaatgctggaagcagcggccactgccatcgacctgatcgaatcgaaggtgttgagccccggcggaaaacaggcggcattgttcttgccggaaccgcagaccgcgttcaccgacggcatgccggtggttgagcgaaaggaggagccggtcaattattggcaggaagcgatcaaagcaattgaagaggccatcgtcgaggcgcggcacaaccccgtgacggcccgctccctgtttgcgctgacctcctatggtcagcgcgaccccgagtctttggagcgcttgcgcatcacgtttgccaatgagggcatccccccggaatttctgtcatattatgagcctgacggcccctttacatgtcgtagactaaatgacgggttaagtgacagtttttga

SEQ ID NO: 329344 - DNA, 909 bp, Pseudomonas aeruginosa
gtggacgaatatcccatcatcgacctgtcccacctcctgccggcagcgcagggcctggctcgcctgccggcggacgagcgcatccagcgtcttcgcgccgaccgctggattggctatccatgcgcagtcgaggcattgaaccggctggaaaccctgtatgcatggccgaacaagcagcgcatgcccaacctgctgctgattggcccgaccaacaacggcaagtcgatgatcgtcgagaagttccgacgcacgcatccggccagcgcggatgccgaccaagagcacatccctgtgctggtcgtgcagatgccatccgagccttcggtgattcgcttctacgtcgcactgctcgccgcaatgggcgcgccattgcgcccacgcccacggctgccggaaatggagcaactggcgctggccttgttgcgcaaggtcggtgtgcgcatgctggtgatcgacgagttgcacaacgtcctggctggcaacagcatcaaccgccgggaattcctcaacctgctacgctttctcggcaacgagctacgcatcccgctggtcggcgtcggcacgcgcgacgcctacctggccatccgctcggatgaccagttggaaaatcggtttgaaccgatgatgctgccggtgtgggaggccaacgacgattgctgctcactgctcgccagcttctcagcttcgttaccgctgcgacggccgtccacgattgcaacgctggacatggcccgctatctgctcacccgcagcgagggcactatcggcgagctggcgcacctgctgatggcagcggccatcgccgccgtggagagcggcgaggaagcaatcaaccaccgcacgctcagcatggccgattactccggccccagcgagcggcgacgccagttcgaacgggaactgatgtga

SEQ ID NO: 329345 - DNA, 1680 bp, Pseudomonas aeruginosa
atggcgtcagacacttcattgattgccgaccaaggcgtggccaccctgcccgatgcggcatgggtgcaggcccggcaacgggcggaattcatcgggccgctggcagcccttgatgtggtcgggcatgaagccgccgatgccgctgctcacgcgcttggtctgtccaggcggcaggtgtatgtcctgatccgccgtgcccggcaaggttcgggacttgtgacggacttggctcgcagccgatctggcggaggcaaaggcaagggacgcttgccggaatcggtcgagcgcatcatccgtgagttgctgcaaaagcgctacctgaccaagcagaagcgtagcctggcggcgttccaccgcgaagtagcacgagcttgcaaagcgcaaaagctgcgggtgccggcgcgcaacaccattgccttacggatcgccaacctcgacccgctcaaaaccgctctccaccgggaagggcaagatgccgcccgctgcctgcaaggtgtcggcggtgagcctcctgccgtgaccgcgccactcgaacaagtgcagatcgaccatacagtcattgacctgatcgtggtcgatgagcgcgaccggcaaccgattggccgtccgtacctgaccatcgccatcgacgtgtttacgcgctgcgtgctcggcatggtgatcacgctggaagcgccgtcagccgtctcggtcggtctgtgcctcacgcatattgcctgcgacaagcgtccctggctggaagggctgaatgtagaaatggactggtcgatgagcggcaaacccaagcagctctacctggacaacgcagccgagttcaaaagcgaagcactgcgccgaggctgcgagcagcatggcattcggttggactatcgcccacctgggcagccgcactacggcggcatcgtagaacggatcatcggcactgcgatgcagatgatccacgatgaattgccggggactaccttctccaatcccgaccagcgcggggattacgattccgaaaacaaggccgccctgacgctgcgtgagttggagcgctggctcacattggcagtgggtacctatcacggctctgtgcacaacggcttgctccagccgccagcggcgcgctggtccgaggccgtggcgcgtgttggtgtaccggccgtcgtcacccgcgccacgacattcctggtcgatttcctccccatcatccgccgcaccctgacccgcaccggcttcgtcatcgaccacatccactattacgccgatgcgctcaagccgtggatcgcgcgacgtaaccgctggccggccttccttatccgccgcgacccgcgcgacatcagtcgcatctgggtattggaaccggaaggtcagcactatctggaaatcccctaccgtaccttgtcgcaccctgctgccaccctctgggaacaacggcaggcgctggcaaaattgcgacagcaagggcgcgaacaggtggatgaatcggcgctgttccgcatgatcgggcagatgcgcgagatcgtgagcggcgcacagaaggcgacgcgcaaggcgcggcgcgatgcggatcgacgccagcacctcaaggtgtcggttccaccagccaagccaactccgccggaaacggacgttgctaacccgcaggcggacaacctgccaccggccaaaccgttcgaccagatcgaggagtggtag

SEQ ID NO: 329346 - DNA, 363 bp, Pseudomonas aeruginosa
atgagcaccaacacgcacaacgggcgctggagccaccggctgggccggggggctggccgtgcctggcgtggatacctccgccgcgagcagcgtgtcgccggctggctggtgacgcgcggggtacccgcgggcgcggcgacggcggtgctctggatcgtcaagctggccgtacttggcatgctgctatacaccgtatcctggctcgtcctgctgctggcctttgcggtggtcgccgcatggctcgcgcggaacgccgacgaggacgacgagaagcagccggaacttagagacggacactcgggcgtcggcctgtacgacaaagatgactggcggatcgacatgggcgatcccgacgagccgtag

SEQ ID NO: 329347 - DNA, 519 bp, Pseudomonas aeruginosa
atgaccgagcgcctgcgggacgggatgcgcattgcgctgaagaactccccgtggaagcagatcatggtgctgcctggcacggaatcgcgatccaaaagcaacgtgatgctgccagacggacgtaccgacatcccgctggcgttcgtcgaaattttcttgcgcacgcaggagcatgatccgcacgcgatcatcgaatgcaaacgaatcgccgggtcggacactcacttgtgtcgagagtacgtcgtcgagggcatggatcgattcatccaggagaagtacggcgagaaccatgctatcggcttcatggtggggtacgttcttgccggcgctccttcggaatccgcggatggcgtcaacgcttacttgagaagagtttcgcgctcggtagatcgcctcgccccgagcgacatcagtgacgggacttggcagagcctacatgcacgctccaagccgtcgatgccgattcgcttacagcatgcgtttcttgggttcgcgggcacctcagcgtcccgcacctga

SEQ ID NO: 329348 - DNA, 2964 bp, Pseudomonas aeruginosa
gtgaacactgccacgctggaacaggtgctcgccgcaaccggctacctgccggacgggcaacccgcgcccggtcttcggttgggggccgaggcgcagtcctcgcgccacggtcgcgtttttgttccggacgcattgtggcgcagcgcgtcgtcgttgaccgtctacttcaagtttgagcaaagcgcgcctgcagacgatctggtcagccagtggcgacgagaggtctggaacgaggggttcgcgccgttgctgtgggtgatctcgccgcagcgtatcgacctgtacaacggtttcggcacacccgcgaaagaaggcgatgcccagagacatttgattcggcgtttcgagaacatcgaaggttcgcttcatgaactggacgagttggccggccgactggcgatcgagacgggccaattctgggcccaggtgccggccatcgatcgcaagaccagcgtcgatcagaagctcctgtctgaccttggatgtctcgaacgcgatttggtcgcaggcaatctcgcgcgcgatgcggcgcaggccttgattgggcgcgtgatcttcacccagtacctgattgaccgcgagatcgtcagtgcggcgcggttgaagcgggtatgcggccgcacggcgttgccggcgatcctgcacgaccggccagcgaccagcaagctgttcgcatggctggcccagaccttcaacggcgatatgtttccgccctcgtcggtgaaaacgacaccagcagctcaccatttgacgcgggttgcggagttcctggaggctgtcgatcctgaaagcgggcaactcagcttcttcccgtaccagttcgacgtgattccggtcgagctcatcagctcgatctacgagcagtttgcacatgctgagccgcagactggaggaaagcgcacagaagcgttgcgaaacggcgtgcactacacgcgactgtccgtcgtctcgctggtcctcgatgaggtcatggatggtctatctggacgggagtcggtgctggatttgacgtgcggctccggtgtcttcctggtcgaagcgctgcggcgcttggttcatcttcgctcgcaaggtcagccgcccacgagggagctgatccgctcgacgctctacgggcaggtgtatggcgtagacattagcgaagccgcgattcgcgtcgctgcgttcagcctgtacctggctgcgcttgagctggaccctgacccgcaaccaccgcagtccctgaagttccagccattgatcggcaggacattgctcgtcggtgacgctcgtactgtcgaacgtgatggagatggcaaggccgtgctggcgacgccgacagggctgaagcagttcgaccttatcgtgggcaatcccccttggagctttagggggcagacaggaaccgaagcgcggcgcaagaccagggttgcgggcgtacctgcgcaaccgcgcggtgaaggcttggatttcgtgttgcgagcggcggagttctcacatgagaagacccgtttcggcatcattcttagcgcgatgccgttcttcagccgcagcggcaccggcatggcagcagctcagcatgtgatgcgagccgtggctccgatcaccttggtaaatctgtccaatttgtgcagttggctcttcgcgacagcggccatgcccgcagtggttctctttgcccgtcatcgaccgaagcagcgaacggatcaggtcacggtcgttcagatcccgtggacgcccagcggtgcaaggactcattcgttcgaggtggcgccgagtgacgtcatcactttgacactcgacgaaatccaagaacagccgttgaagctcaaggcagcagccgttggccggcgccgtgacctcctattgctggatgacttgacttcggcccacagaaatctgggcgagcaactctcattactcgacactaccttccaggttggattgattcgcggggccccagagaatcagacgcgcgatgctcgcccgctaaaaggattggatgtactgcaagtcaaagacatgcagcacttcaacattcccgatgatttgccgactttcagccaatcgaaggcacaatggccacgatcgcgggagatatatcaagccccgcttctcatcgtgaaggaaatgcttctggggagtccacgcgtcttggcggccgtctccgagcgggatctcgtcttcacgaactcatacttcgcagtgtctcttccgagagggcacacgcggacggcacatttgcttgccaccgtgttgagttctgcttttgcgacatggttcttctatctgaccgctgcagagtttggaatctacaagaggaagctgctggctcgcgacctcagcttcctaccggtgcctaatttcacgagcgcagtgaaatctgaggctggccagcgcctgctgcagattgagaagaatctgcgcgccaacggcaccgacgagaggggatgggctgaactggacgaagctgtcttcgatctgtacgaactgaacgatgccgaccgaactgtcattcgagacggcctccttcgcgccgggtggcaatgggaaaccggccgcgaatcatccgtggagccatcggacagtcgtactgaggtcacggcgtatgccaagacgttcctgtccgttatcgaggattggctttccgttcgcaataagcggcacatgcgcgccgaagtgctcgacttgccaagcagttcggccttgcgcgtcgtgcgctttgtcttggaagaagggccgggtaatgcgagcgtgagcgtcgtggcaccacaaggcgaattgggtgaagtactggcacgtatcggcaggcgcctgaaagtcaagattgcgaccgcgctcagtgcagagcgggaattgcgagtacacggacgcaacgaagtcgtgatcatcaagccagcagcgcggcgctactggatgggcatagcggcactggaagatgccgatgcagtggtcgcggagagcttttcagggggcaaagtttga

SEQ ID NO: 329349 - DNA, 477 bp, Pseudomonas aeruginosa
atgtctgccgtcaccgccatccagtacactcaggaccagatgcgcacgctaaccggcgtgtccgtcgaaacggtgcggcattggcgcaagaccgtgccctacttggcgtccaagaccgggaaggctgcccgattcaccttcgcggatctcctaggcttggccgttaccaatgagttggtcagctcgttgggagtgcacatcgccaccgtcagcgtcggcgttgacgcgctctttcggttgctgggcacgagtagcgcattggcgctgaatgggtccgtggcgttcgtgacggccacttcggcgaccctgtgcgatatcggccccgaggggattggaccggcgccgacgcaaccgactctcgtcatcccgctcgatccgttgatcatgcggcttcagcagcacatgctgccgatcgtcccgacgccgagccaggcagcgttgccgtttccacccgaagctatccggagtagggcgtga

SEQ ID NO: 329350 - DNA, 1767 bp, Pseudomonas aeruginosa
atggcaacagttatcgctcgccccctcgaactcgatctgctgtgccaaaaacttgatgcggactacgcgaaccgaatcgccggaacgggaaacactccagagtctcggcggagcaactacctgtccaaggcaatcgcggcattcgtcctgcacgaagacgctggcgccaatctggatgaggccgtggccgccagcatcgatggtggccaggatcatggtatcgattcggtgttcgtttcaacggatcaaacgatctggctggtccagtccaagtacaaggagtcgggcaccggcgagcccgaactcggtgatgtatccaaatttcgggatggcgtaaccgaccttctgcaaggacgctggaatcgcttcaacaacgccctgcaaaaccgccaagcggcaatcaccaatgccttgaacagcggtgtctgcaggatcaaagtcgtgctggcctattccggcacggcggtgtccgatgatcggcgcgacatctttgccgacttggagcgcgcgttcaatggcgcaaatccgggctttcttcgatgccatgcctacggcctcacgaccctgcacgacctgcatctggacggagtttcggcccagcccatagaagccgaagtcgaattgaaggacttcggccacacgcaggaaccctatcgggcgttctacgggcgcatggacggcaaacggctcgccgagctttgggcggcacacgaagagcatctggttgaccggaacattcgccggttcaagggcacgaccaccgtcaatgcagggctgaccgagacactccgacaagaagcacagcacttcttctacttcaataacggcgtcaccttcctctgcgactccataacggaacagcatccccgcgacccgcatcggcagactgggacgtttcggattcgcgggttgtccatcatcaacggcgcgcagacggtgggggcgatcgcccgcgagccactggcccactacgatgctcatcccaccgtagtcatggcgactttcgtttgtcttgagaacgcgcctgatggttttggcgatcgagtcacccaatcgcgcaaccgccagaatgccgttgagctggaagactttgccgcgctcgatgaacgccagaccatgtggcagcagaccttgcagatggccggcgtcacctatctggtcaagcagggggaggacgatccgccgctatcaccaacctgcttcagcgcacgtgaactcgcgccgttcctggcttgcaccgtaaccacgaacgactggcaggactacgtgaccgcggccaaggccgacaagaagaagctgtttgggcgggaggggttggtatcagccaccgaccccctacgccaatcctacgaacggctcttcgccgactcgctcacggcaaggcaaatgtggcggatagtccaaatcggccgagtggtcgtagagaaagtccgcgcccgtgccaccgccgagggtgatcccgccggcttgccagcggggacactccctgcacgggagattctcaatcacggcgcctggctggttctacacgtcatcttcatccgccttcagttgcagaacgggccggcgttggcattgactcaggatgaactgacagcgatttcacgcgaggtcgatcttgtttgcgagcgtcttgtgagttctgtccagggcgagcaatggaacaagcaggcgcgcagcgtctttgagaacaaaacggactgtcgaaccgtgaaaggccgtttgatggcggccttggcgcagcagggccagggaggaaatcaatag

SEQ ID NO: 329351 - DNA, 2001 bp, Pseudomonas aeruginosa
gtgcaagcgaacatcaaaggcctggtggatcggctggagctttcccagggcaaggcaatgatgcctctttacgaggctatctcgaatgccgtcgatgcaatcgaggagcatcgggacggcttcagcaatcattcgattcgcatccggctggtggcctccaacgatcttgcccatcaagctggggatggaactctggtcgtggacggcttcgatgtcattgatgatggtgttggcttcaacgacaagaatctggcttcatttcaagaggcgcacacgctttcaaaggtcaaggtcggcggccgaggtgtcgggcgcttcactttcctgaaagtcttttcatccgtacacatccgcagtgtcttcaaacgcgacggcaaggctttgctgcgcgagttcgacttcagcatccaagatgaactgaaaggtgcggacaccacgtctgaagtcaaagaggcctgcggcacgcatacctctttgcggggcatggatgacaagtttcgggctgggtggcctacccagcccgaaaccatcgctgaacgcatcattgcgcacttcctgatccggtttgcggcccgctcctgccctccgatgactctggagtctcccggacacgctccgattgacttgcacgccctgtttcagtcaacagtgctggcgcacattcaagagctgttcttcgaggtttccgggcatacatttgccttgcaggcatatcgtcaccgagacggacgctcgcgccacgaactcaacttgtgcgcgaacgggcgcgaagtcaccacgagcaagctgcgggacctgcttccagagcttcccgagaagctgattgacgaagaccaagcgccgtacaccttgatcgtgctggtcaccggggaatatctggacgaccatgccaaccaagagcgcacgcgcatcgccttccaaagcgatgaggagcccgaacttgagcagaccctcgtctcccgacgcgccctgaaccagggtgtcgcaggggcgttgcggccgctgctcctggacgacttgaagtcaacgaacgaagaaaagcgtgcccagatcgagaagtttgttgagcaagcccccgagtacagggcgctcacgcaccctcgctacaaagagatgatcgagcaaaagattcagccaggcctgtcagaagacaagctggacgaggctcttctgcatgtgaagcgcgccatcgaggacgacatccgtaaagaggccaagcatgtcgcagcgctcttcgaaaccgaaaccttcgaacagtaccaagagaaattcaaggaaatcgcggaaaaggccaacgaaatcggcaaggcccagcttgctgcctatattgcgcaccgccgaacgattcttgacttggtgaacaacagcctcaagaaaaagcgcacggatgacaaatacccgctcgaaagggtcttgcacaaaatgatcttcccgatggggatgacctcgaaagacatcttcttcgagcagcagaacctctgggtgattgacgagcggctgtgctatcacaccctgctcacatcagacaaaaaactaaaaagcgtcgctgggctggacgacacttctggccgggagccggacatctttgcgttcttttatgacacgcccatcggtgtcgctgaggcagacagcctgcctggcggtggtgttgtcatcatcgagttcaagcggcctggaagggacaattacgacaaagacccagctgatcagatcatccaacgattccgagaaatctccgaagggggcgtcacggacgttgatgggaggcagatcaatcccgccagcctgcggtacaccggctatctcatcgctgatttaacgccgtctttgcatcgacaagtattcggacgttaccaccgcaccgccgacaacgaggggtatttctcccctttggcgactggcaacgggtatatcgaaattctctcctacgacaagctcatcaaggatgcagaacgccgcaaccgcatcctgtttgacaagcttggactgcacaagaattaa

SEQ ID NO: 329352 - DNA, 1707 bp, Pseudomonas aeruginosa
atgagcaaacaaaaactagaacttacctggatcgggaaggagaagcggcccaagctggagccgcgcatcctgctcgaagaccccgagaagtcctatcacgccaagcatcgcgtctccgacaacgacatcttcgacaatcggctgatttttggcgacaacctattagcgctcaaggcgctggaggccgagtttgcgggcaaggtgaagtgcgtgttcattgatcctccgtacaacactggaagtgcgtttgagcactacgacgatggacttgaacactcaatttggctgggattgatgcgagaccgtcttgagatcatcaaacgcctactttccgctgatggctccttatggatagcaattgacgacaatgaagggcactacttgaaggtgctctgcgacgaggtttttgggcgtcaggcgtttgtctcgtcgatggtgtgggagaacttttacgggcgcagcaatgcagcggctgtctcgccagcacacaactacgtcctgctgtactcgccaatggggcaggactggaagaaggttcgaaacctcctcccgcgaggcgaagaagctgcgagcaagtacaagaaccctgacaacgacccacgtggtgcgtggcgactgggtccgatctttgcagccggcgagaggcacgaggggctcatgtacacgataacaacgccttctgggcggtcggtaagcccccccaagggaagtcactggcgcatgctggaagatgacttctggaagatggtcaaggaaggcaggatcgtgtttggtgaaaagggagacaacaatccagccgtcaaactgtttttgcgtgaagttcaggaaggcttggtacctcggacttggtggtctcattcagaagtcggtcactcgcaggaagcgaagcgagagattcaggcgctcttcccagaagatgtgcctttcgatacaccgaagccggaacgtctgctcaggcaggtgataacgattgccaccaatcccggcgacatcgtattggactccttcgccggctccggcaccacaggagcggtggcgcacaaaatggggcgccgctggatcatggtcgaactaggcgagcactgccacacatgtgtcatcccgcgactccgcaaggtgattgacggtacagatgagggaggggtcaccgagagcgttggttggcagggtggcggcgggttccgctattaccgccttgcccccagcctgatcgtcaacgaccgctggggcaaccctgttgttaacccggagtacaacgccgcgatgctggccgaggccctggcgaagctggaaggcttcacctacgcaccctcggagacgcgctggtggcagcacggccactccagcgagcgcgatttcatctgtgtcaccactcaaaacctgtccgccgagcagttgcaggctttgtccgatgaagttggccccgagcagagcctgctggtgtgctgttcggccttccgcggcgtaacggccgccagggcatccgagcgttggccgaacctgacactgaagaagattcccaggatggtgctggcccgctgtgagtggggccaggacgactacagcctgaacgtggccaatctgccgatggcgcagcttgcgaaggccgagcctgcggccacggtcgataacagcaagaagatcaagaacaagaatgcggccctcgccaacgcgggacagggcggcctgtttggggggaacgaataa

SEQ ID NO: 329353 - DNA, 2739 bp, Pseudomonas aeruginosa
atgagcacccgcgtcctgcacgccgttaccggtcgtctgtctcttcgtccgccgcaagccgagtcccttatcaagctcgctcgcgcgcttgatgctgcgcccgagctattgggtcacgagcgtgatgtctcggccattctgtccacgttgaaggccgagttcagcacgctggaggacttcgagcgcgagttcccgtcgctgtgtttcgcgctggccacgggcgtgggcaagacgcgcctaatgggagcctttatcgcctacttgcatctagcgcacggcatcaacaacttcttcgtgctcgcacccaacctgacgatctacaacaagctcatcacggactttacgcgcaacacgccgaagtacgtgttcaaggggatcgccgaattcgcgcagcaaccgccgctgatcatcaccggcgacaactacgaccagaccggtgcagcggtagacgatcaatcgatgggcttcgcccacgacgtgcgcatcaacatcttcaacatttccaagatcaactccgaggtacgcggcggcaaggagccgcgcatcaagcggatgaaggaagtgctgggcgacagctacttcaaccatctggccaacctgtctgacctggtgctgctgatggacgagtcgcaccgctaccgggccagcgccggcgtgcgcgccatcaacgaactcaagccgctgttcggtctggaagtgacagcgacgcccttcgtcgagtccaaccgagggcctgtgccgttcaagaacgtggtgatcgactacccgctggcgcgggcgatggaggatggcttcgtcaaggagccggccgtggtcacccagcgcaacttcgacgccaaggctcacacgcccgaggagatcgagaagaccaagctggaagacggcgtgcgcctgcacgagacgaccaaagtcgagctgctcacctacgcccgcgagaacggcgtcaagccggtcaagcccttcatgctcgtcatcgctcgcgacaccacgcacgcggcgcaactcttggcgcttctggagtcggaagccttctatgaggggcgctaccagggcaaggtgattcaggtcgattccagccgcaccggcgcggaggaagaagagatgatcacgcgcctgctagccgtggagagcgtggacgagccgaccgagatcgtgattcacgtcaacatgctcaaggagggctgggacgtaaccaacctctataccatcgtgccgctgcgcgccgccaatgcccgcacgttgatcgaacagtccatcgggcgtggcctgcgattgccctacggcaaacgcacgggcgtcgcgtcggtggatcgcttgaacatcgtcgcgcacgacaagttccagcagatcatcgacgaggccaaccgcggcgactcgccgattcgcctgaagcaggtcatcctcgatgcgccgagcgccgacgacaagaaggtcagcgtgcaggtcgagtccggggcagcggcgcgtctcggtttgacggaagcaccggtcgtgatcacaggggtttcagccactgacagtggagcggaagtccccgcgcccaaaccggtgttcaccacggaggcggagaagcaggccgcgcgcgtggtcatggacgtcatcggcaagtacgaggtcaagcgcgatctggtgcccaccagcagcgcgctgctgaaaccagaagtgcagaaggaaatcctcgcggaagtggcagagcggctgaagccgctgcaaggcgaattgctggcggacgtggatgaatcagtccccgcacttgacttgtccgccgtggtggcgaagaccaccgagatcgtggtgcagcagaccatcgacatcccacgcattgcggtggtgccgactggcgagatcacaacgggcttccacgccttcaagctggatgtgagccagctccatctccagcctggccagcgcgagatcgtcggtcagatgctgcgcacgaacgagcagttcaccctggccgccgaagtcgggctcaaggagcagcgcccggaggattacatcgtccacgccctggtggacttcgacgacatcgactacttcacccacgccgagctgctctacgacctcgcgggccagatggtgcagcacctgcgcggctatctgtccgaggacgaggccatcagcgtcctcgatcgtgaccgccgcctgatcgcacgggaaatccacgcgcagatgatgacccacttctgggaagaggcgacggagtacgaggtgcaggtcagtcgcggcttcaccgaactcaagccgtgcaactacaccgccacggcaggccagacggcccaccacttccgggagaccgtgaccgagaccagtcgcatcaagcaaatgctcttcggtggcttcgcgcgttgtctgtacccgctgcagaagttcgactcggataccgagcggcgcttcgccatcattctggagcgcgacgccttgaagtggttcaagcccgcgaaggggcagttccagatctactacaagctcggcaccgagcagccggagtacatccccgacttcgtggccgacacggacgcgaccatcttcatggtggagaccaaggcacgcgccgacatcaacacccaggaggttcaggccaaggccgctgccgccatgcggtggtgcaagcacgcatccgatcatgcggcgaacgtaggcaccaagccctggaagtacctgctggtgccccatgacgaagtcagcgagtcgaaacggctcgcggattacctgcgctttgaggtcaaggctaattaa

SEQ ID NO: 329354 - DNA, 882 bp, Pseudomonas aeruginosa
atggagacaatagtgccatgggccgctctgtgccaggtgatagagccgcactaccccaaagcaggcaacggccgcccgcccattggccttgagcgcatgctgcgcatccattttcttcagcactggttcaacctggccgatctggcgtgcgaggaggctctgtatgacagtgccagtctgcgccgctttgtggggattgacctgggccgcgaacgcgtgcccgacgccaccacgctgctgaagtttcgcaaactgctcaatgagcaaaaactgggtgaagccctgtttgccaaggtaggccagcaattgcaggagcgcggcttcaaggtcaacaccggcaccatcgtggatgccaccatcatcgccgcgcccagttctaccaagaacgccgacaaggcgcgcgatcccgatatgcaccagacccgcaaaggccagcagtggtatttcggcatgaagctgcacattggcgtggacagccaaagcgggctggcgcacagcgccgtggtgacggcggccaacgtgcatgacaaacacccgctgcccgatctgctgcatggcaacgagcagcgcgtgtacggcgactcggcctacgccagccagaaggctctgatccggggcaaggcgccccaagccaaagacttcaccaaccagcgcacccgccgtgcaggcgaggtggacgaagttcagcgggccaagaaccgcaacaagtcacgcatccgcgctcgggtagagcatgtgttcggggtggtcaagcgcctgtggggattcaccaaggtgcgctaccgcgggctgcagaagaacgccacacgcgcattcacggccttggcgctggccaacattttccttgcccgagggcgactgcagggacaggtgcgcccgtaa

SEQ ID NO: 329355 - DNA, 1218 bp, Pseudomonas aeruginosa
atgcaggatgggaaagccgttcagttgctgttgaacggggaagagcacgggcacggccacgtagtcgagaagctgctgaagcgggcggaacgcctggaatgcttggtggccttcgcgaagatctcggccatcggcgacttgttgaagcccttgcgcaaggcgctggaagggggattgaaggccaggtttgcgataggtctggacttctacctgaccgaacccgaagcactccgacagctctttgcgctcgccgagaagcacgcgctcgtcctgtacctcagcaacgccagcgacaccttccacccgaagatctacgccttccagaatggcaagcaatgctcggtgatcgtcggctcggccaacctcacccacggaggcttctacggaaactacgaggcatcggccctcatcgacgacgcgagcggcgcgctgatggcatctgtcacgcgacacctcgatgcgctggtcgcggacaggattctcgtgccagcgaccaagccccggattgatgcctacgagcgggagtacatcatccacgacacttgccggaaggtggccaagaagcgtgcgcagaaggcgagccgaaccgaggggccggacttcacgatcctggccgacctcctggagctgatgaaaagcgacgattcagcgcatggattcaccgcgcagaagaccggccgcaagggaaacctgcgccaggcaaggcgcaggctggcagagctggcggccctgagcagcaatgccaggcgggactttccgagtaagtacgacgcgctgatcggcctgttccattccggcgggctgcaccgcggcaagagccggatcgccaaccacccagggcagttcgtggccgcagtggcggacatccttgaccggcgcaacctctcgcctgccgaagcgtttaccgttctacatcgacatttcggcgccatcaccggagcaggcatcaacctgctgactgagattctgcacgcgctggacaacaagcggttcgccgtgatgaaccagaacgcggtgtcgggactggcgctcgccggcatccgggactacccactgcatccaaccaagcagaacgtcagtgcggaaagctacgcaaggtactgcgggcatgccgatacggtcagacgatcgttgggcctggacgacttcacggagctggatgcactgttcaactacgcctattggcgggaaacggaagaagacgaagccgcgacctga

SEQ ID NO: 329356 - DNA, 756 bp, Pseudomonas aeruginosa
atggagaaatcgagttgccttgcctttggcgccaggatctactaccgcccgatcgaggcggccgtccgttgggcgggactgttgcgctttgagccgcggattctggaaacgctcgggccacgtgccatgcctgagccgaacgactttccgcgctggcccttgctgcgccttttctccgagcgcatcttcgacgcattggcacacgatgagctttcttacggcaaggcaggcatggcgcaggaacctcagcgccccgcactcgacgatcctgcgttgatcgtgcgccacgtcgacctgaaggcgtggatgtcgcattactaccccggtgagcggcctccattcctgttcgacggcatcgagcgcgaactgcatccttcggtgagcgtcgccatgctgaacgtgttgctggccgatcgcgaggccgccaagctgcagcttgccgaactcgcacaactacatgcggcgctgaaggcacagcacgaagcgttggcgaaggagcatgccagtagcattcgtgagggcgatgcgagtgaaccgggcctgcgcagcgaatcgacttacctgaacatcattggcggcctgctgacattgctgttgggcaagtcccccgcgggctctgcctactcgtccttccgcaacatggatgcggtgatcagtgcgctactggcccaccatgaagggcggcccggcatcagcgagcgaacgctgtggagcaagctggcacaggcgcgtcgccacctggatgcatcgcgctga

SEQ ID NO: 329357 - DNA, 912 bp, Pseudomonas aeruginosa
atgaacttacgtcatcttcgctgtttcattgctgtagccgaggaactgcacttcggtcgagccgctaggcggctgcatatagaacaatctcccctatcacgcacgatccgcaagttggagacaactctaggcgtgacgttgctcagtcgcacgccgcggggcgcaaccctgacttgggcagggcgagtcttcctcgacgacgcccgccgcatcatgttgagcgttgagcaggcagtggccagcgcgaaggctgctgcctccggttctcagggcattttgcgaatcgcgctgtcgagagacataggacgggcgaggctatcagcactgcttgcactgtgccgcgaagagtcgccgcaggtaaacatccggctctccgaagtaccgctgaccgaactcgtgcaggggctgaacgcaaatctgttcgacgccggctttgcaatggtcaatgaagtggaggacgggatcattgctgagccgctgtgggccgaccccttggtagtgatcctgcccgcacggcacccgcttgtagccttcaaggaagtgccgttgcaggaagtggtgagctatccgctggtactttgtgatccacgggcatgccaaggttgcggtcggcagagcgaacgactgttccgctctgtcgatgtccaaccgatcgtggctgagtatgccgcttctcacgggctgatgctgacgttggtggccgcagggtacgggctaagtttttccactgccgcgcacttggcaacttgccagccggcggatgttgttgtccgcccgttggccggtcagagcgcatcgataaccacctatctgttacgaaccgagggtggcatgacggagccgttgcagcggttcatcgaacgcgccgaacgtgtatgtcatcaggacgcaagcacatcacgcgcgatctga

SEQ ID NO: 329358 - DNA, 2886 bp, Pseudomonas aeruginosa; identical to SEQ ID NO: 25667

SEQ ID NO: 329359 - DNA, 615 bp, Pseudomonas aeruginosa; identical to SEQ ID NO: 100706

SEQ ID NO: 329360 - DNA, 804 bp, Pseudomonas aeruginosa; identical to SEQ ID NO: 19906

SEQ ID NO: 329361 - DNA, 837 bp, Pseudomonas aeruginosa; identical to SEQ ID NO: 22759

SEQ ID NO: 329362 - DNA, 312 bp, Pseudomonas aeruginosa
ttgctggcgttaagctggcaggaggagcccgacgtcgagttgcgcctgttcgaggtgtcactgtcgcagcaaatcaaggggctgcatggcgatctgtatgacctagggcccagtctggtgaagtgggtgacgacatcgtggctaaggcgctttggagcgccccccctcatggtcgcggcgccggcatggcatccgctgctcaagcacaaacgtatctcactggacgaggtgctgcgttatccgctggtgctggtgacccacatgcatacgggagtcatgaacgtcagatccaacgagtgctgccgcgggtga

SEQ ID NO: 329363 - DNA, 462 bp, Pseudomonas aeruginosa
gtgaaccagcccttgaaacccagatcgtttttcaccgtcccgctgtccgtgctcttggcaaccttcgccacggcactcggtgcgcagtccgtagaggcggcaaagccaatggcgcttcgtaccataatggaaagactcggtcgcgacatgcaagccgtcacgggcgcgatctccaaagaagactggccgctggtcgccgagctagcaccacgaatcgccaagcatgccgagccgcccatgtcggaaaagatgcgcatccttgcttggcttggggcagacgctggaaagtttcggggtcttgatggacaggtccatgacgccgcgaccgccatgggcgaggctgcacagcggaatgacggccaagcagtcatcgcggctttctccaagacccagcaaagctgcctagcctgccaccagagttaccgtcgctcgttcgtggaaaagttctatggaagccgctag

SEQ ID NO: 329364 - DNA, 1200 bp, Pseudomonas aeruginosa
atgattggcatcgacgggtatcactggagcctgcgcggcaacaaggtgcagcagccgatgcagtgcgccgccttgttgattgcgggtgcattgttcagcccgatttctgctttcggttccgacttctcgctctctgcagatcctccctcctgctcgccagggcaatccctgcgctggcggggtggcaccctgcgcctggagaacgatctattcaccggctccgaccgcaactacaccaacggtgtcgcgctaacagcagtctcacgtgatctgcaaggcgagctccgtcccgagtgcctgccacagccgattggtttgtacgcccgcttcatcggctgggccgatcccggcttctggcgcgataccggcgaccaaccggcatcgcagaacctcgtcgttcgctttggccagtctatgtacacacccgaggacaagacgcgcaccgatctgattcccgacgatcggccgtacgctggcctgctctacctgagcctggcgtggaatcgccgaatccacccacaggctgccagctatgaaatgctggacgtacgcgaactaaccctgggcttgatcggcccctggtcgctggcagagaagtcgcaggatctggtgcatcgggtgcgtggcatcgagcgatttcgcggctgggacaaccagttgcgcaacgagccggcatttcagatggccatggaacgcaagttcaagccgtacacggagggtgcggtccgccctggatggggcagcgacgtgatcggcagctatgccctgcgggtcggaaacatcgaaaccgccgccagtaccggcgtggagtttcgcgcgggctggaatataccgaacgacttcggcagctatccgatccgccctggcgcagagaaccgcccgccctctggtgttgccgatctgcgcacgacaacgccgcagtcggtcctggcgcccaaacctggggcacatgtcttcctgaatctggagggtaaagccgtcgcctgggacttctcactcgacggaaacatgttccggcatagccatcacgtcagccggcggccttggatcgcgcaagcagctctcggcatcagtagccaatggatcgttgctggacgtggcgtacggctcgccgtgatgcgcgtttggagaacccgcgagttcgaccagcaggcgggccatcacgcattcggatcgatcgcgctgagtctggaattttga

SEQ ID NO: 329365 - DNA, 867 bp, Pseudomonas aeruginosa
atgaagcccgccgaagatctcgatgaacgcctgcgcgccatccgcgagtcgccaacgtaccgtcttgcgtacgaagacatcgagctgcttggccaggaagaactgcggccgctgcgactgcagctcgaactgctcaagcctgaccgcatcctgcacgagcaaggcattcgctcgacggtagtggtcttcggcagcgcacgcgtgagcgatgccgagacggcagaagcccgtcttggcgcgctggagcgtcaggcgcgcgtcactccggaggatgtcgggctgaggcaagagcttgcccgagccaatcgccgggtcgaacaggcacgtcactacgagcaagcgaggcgtttctcgggccttatttcggcgcgtttccagcagcaaaaccgccgtgatttcgtcgtcgtcaccgggggtgggcccggcatcatggaggccgccaaccgcggtgctttcgaggtcggcgcacgttcgattggcctcaacatcacgctgccccacgaacaggcacccaacccctacatgtgcccaaatttggcgttccgattccactatttcgcgctgcgcaagatgcacttcttgttgcacgccaagggcttggtggccttccccggtggctatggaacgctcgatgagctgttcgaggtgctcaccttgatccagaccggaaagatgcagcgtattccggtggtgctggtcggccgtgcattctggcgtcgcgtagttgatttcgatcttctgctcgacgaaggctatgtctctccatccgatctcgacttgttcacctgcgtagacgaagccgaggaaatcgttagtgccctcgaacgcttctacgtcaacagggcggcaggcgatagggcaacatga

SEQ ID NO: 329366 - DNA, 1410 bp, Pseudomonas aeruginosa
atgaaactgcattttctgggcgctgcgcgcgaagttaccgggtcgtgtttcttggtggaagcgctcaacgtacgcttcctggtggattgcggcatggttcagggcggacgcacggcggcggcacgtaaccatgagccattcccgttcgacccggcatcgattgatttcgtgctcctgacccatgcccacatcgaccacagcgggctattgccaaaactcacgcgcgcaggattcacggggcctatttacgccacgccagccacggttgatctgctcggggtgatgctgcccgatagcgctcacatccaggaaagcgatgcgaagcgggatgccaagcggttcaaagagaagaccgcgctgtcacccctgtataccctgcaggatgccagcgactgcttgcagcaggtgcgaggcatcgaatacgaccgggagttcgcgccccgcgtgggggtgcgcacccgtttccgcgatgccgggcacattcttgggtcggccatcatcgaagtctgggtgaccgagtatggctatccgacaaagctcgttttcagtggtgacctcggccagccggggcgcccgatccttcgcgacccgacacccatcgaggacgccgacatcctcatcatcgagtccacctacggcaaccgccaacacaaggatttctcggcaaccgaagaggagatgatcagcatcgtcgagaaaaccctcttcgagagcggcggcaacgtcatcgtgccggccttcgcggttggccgaacccaggaagtcctttaccacctgcatcgactcacctgcgaggggcggctgcggcaaccgaaggtattcgtcgattcgccgatggccacgcaggccacgcgcatcacgcgcgagcatctcgaattgttcgacgaacaggcgaagcggttggccggctggcacgcgcgcggcgagaacctcccatacctgaatttcacagcgagcgctgaggagtccatggcgctgaaccggatccgctccggggccatcatcatttctgccagcggcatgtgcgatgcgggacgcatccggcaccacctgcggcacaacttgccacgccgcgaatgcagcatcttgtttcccggtttccaggcgcaggggacgcttggccggcgcctgatcgagggggccgaacgcgtgcgcatcttcggtgaggacattccggtacgtgctgcgatccacagcgtggatggcctctcggcgcatgccaaccaaaaggcgttgctggattgggctcggggttttattcaccccccggcgcaaaccttcgtggtgcatggggaactgtccgccgcccagaccttcgccgaactcttgcaacagcaactcggctggcaggtcacggtgcccgagtatggtcatgcgctgcgccggccggactttctggcgcacgagtga

SEQ ID NO: 329367 - DNA, 210 bp, Pseudomonas aeruginosa
atgcaaatcaacgttggaaatctcgaccgcattgtgcgcatcgtcatcggactgattttgctcagtctcccattgtggctggactcatcttggcgttggctgggactcattggaatcatgccactcctcaccggcctggcaggccgctgtccgggctactgtctgcttggcctgggcacttgcccgatacaaaagaaaaatccggagtga

SEQ ID NO: 329368 - DNA, 345 bp, Pseudomonas aeruginosa
gtgctgacggcgctgggcgacgccgagcgcgcgctgggcgactaccacggcgggctggacacactggaacgccgcggcatggcactggatgccgcgcgcacaacctacggccacaccaggacgcgctacgcggcgggcgacatcgcgctggtcgaactgctggctgcccagcgcagcctgcatgaggccgaaaccgcagccgcgcgggcacataccaacgccgccgtgcaattggtggcgctgtacaaggcccttggcggtggctgggaagtatccacgacggcatcgaccgcaacccatccgctgcgggacgctgccgcccccgtcgcgttttcaagccgctga

SEQ ID NO: 329369 - DNA, 540 bp, Pseudomonas aeruginosa
atgaaccctccccttcctctcttccgctaccatcccgaaccgctcgccagcggcagcatcgaggcttccgccaccacctgccagtgctgtggcaaggctcgtggctacgtctacaccggttcgccctattcccgccacgagttgccgcccggcagcctttgcccctggtgcatagccgacggcagcggggccgcgcgctacgaagcgagcttttccgacgactatccgctgctcgacgccggcgtcgccgcggatatcgtcaccgaagtctgcgagcgcacgcccggctacacctcctggcagcaggagcgctggctggtttgctgcgaagatgcctgcgcctttcgcggcgacgcggggcgtgaggaaatcgggcaactgggagccgagggcctggcgcagcgcttcgccgatttcgcctggccggctatcacctggcaacgcctcgtcgacgcctatacgcccggcggcaatccggccatctaccgcttcgactgcctgcactgtggccaggcgcattacgacctggacttcacctga

SEQ ID NO: 329370 - DNA, 1989 bp, Pseudomonas aeruginosa
gtgcgcctgtactccaagatcggccaggccctgctggaggccaaggaaagcggcagcgatccctacgccgccatcgaggcggtgattccctgggacgagttcaccgagagcgtcagcgaggccgaactgctggcccggccggagggcttcgaccacctgtacctggtcggtgagaacttcgccaccctgcgccgctacacgccggccctgctggaggtgctggaattgcgcgccgccccggccgcgcaaggcgtgctggcagccgtgcagaccctgcgcgagatgaacgccgacaacctgcgcaaggtgccggccgatgcccccaccgccttcatcaagccgcgctggaagccgctggtgatcaccccggaagggcttgaccggcgtttctacgaaatctgcgcgctgtccgagctgaagaacgccctgcgttccggtgacatctgggtcaagggctcgcggcagttccgcgacttcgacgactatctgctgccggcagagaagttcgccgcgctcaagcgcgcacagaccctgcctctggcgatcaacccgaacagcgaccagtacctggaagagcgtttgcagttgctggacgagcagttggccaccgtcacccgcctggccaaggacaacgaactgcccgatgccatcctcaccgagtcggggctgaagatcaccccgctggatgcggcggtgccggatcgggcgcaggcgctgatcgaccagaccagccagttgctgccgcgcatcaagatcactgaactgctgatggacgtggacgactggacgggcttcagtcgccacttcacccacctgaaggacggtgccgaggccaaagaccggacgttgctgctatccgcgatcctgggcgatgcgatcaacctcgggctgaccaagatggccgagtccagccccggcttgacctatgccaagctgtcctggctgcaagcctggcacatccgcgacgaaacctattcggcggccctggccgagttggtcaatcatcagtaccgccatgcttttgccgctcactggggggacggcactacctcatcctccgatggtcagcgcttccgggctggcggccggggcgagagcaccgggcacgtcaacccgaagtacggcagcgagccggggcggctgttttacacccatatctccgaccagtacgcgccgttcagcacccgcgtggtgaatgtcggcgtgcgcgattccacctatgtgctcgacggtctgctgtaccacgagtccgacctgcggatcgaggaacactacaccgacacggccggcttcaccgatcacgtcttcgccctgatgcacctgctgggcttccgcttcgcaccgcgcatccgtgacctcggcgaaaccaagctctatgtgccgcagggcgtacaggcctacccgacgctgcgcccgcttatcggcggcaccctgaacatcaagcacgtgcgcgcccaatgggacgacatcctgcgcctggccagctcgatcaagcagggcaccgtcaccgcctcgctaatgctgcgcaagctcggcagctacccgcgccagaacggcctggccgtggccctgcgtgagctgggccggatcgagcgcacgctgttcatcctcgactggctgcagagcattgagctgcgccgccgcgtgcatgcaggactgaacaagggggaggcgcgcaactccctggccagggcggtgttcttcaaccgccttggcgaaatcagggatcggagcttcgagcagcagcgctaccgggccagcggcctcaatctggtgactgccgccatcgtgttgtggaacacggtgtacctggagcgcgccacccaggcgatgggcgacacgggcaagccggtggacgacgagctgttgcaatacctgtcgccgctgggatgggagcacatcaacctgaccggcgattacgtctggcggcagagccgcaggctggaggacggaaagtttcggccgctacgaatgcccggaaaaccttag

SEQ ID NO: 329371 - DNA, 1029 bp, Pseudomonas aeruginosa
atgagcccgtccgaaaacatccagtacgatttcgagtggcgaccactcaacaactacctcgccgtgcaacgcatcacgcctccggacatgcgccagggttcggctgccgagccgcgcctacccagcgaagcgctctacgagtggatcgtgctgaacgggcgctcccccctggaaggcctgagcctgggggagcactaccgcctttccgactatggcgtcgccgggctggcgctgcagagtgccggcaccgtgggcgaagccttgcaactgatcaagaccaacatgctgctgttccgcaaggacatccgcaggatcgcggtgagacgttccagttgcgacaccgtggatgtggatatcgacctgcaggacaagccggactggccgcagtcggcccggttgtaccacgccaacgtcctggcgtcggccgcctacgcggtgttccgcgacctgctgctgggcgatctggaactggtccgcctgcgcctcccggaaaggaacggcgacgtgcgggcatacgaggagtatttccgggtgccggtgtatttcgccggcgaaggcatcaccttcaccctccccgaggaattgctcgaggccgagatcgccactgccaactccgccgtgttccaggcctcgctggcgctcggcagcaaggctttcaacacccgcgtcacccgcgagatgggcggctaccgccaacgcatcgtggcactgctggaggtgctgcaggaccgctacccgagcatcgcctgggtcgcccggcagttgaaggtcaccgagcggacgctgcgccgacggctcgccgacgagggcaccaactaccgggaagtgctcgacctggtccgccacgacagggcgcgccaactgctgcgggacgagcgactgcgcatcgcggaagtcgccgagaggctgggctacatggatacctccagttttcgccacgccttccgccgctggacgggacagtgcgccaacgactatcgccaggcccgcatcggcggcaagaccgcgcggcgccagggcgaacgctag

SEQ ID NO: 329372 - DNA, 1284 bp, Pseudomonas aeruginosa; identical to SEQ ID NO: 327842

SEQ ID NO: 329373 - DNA, 228 bp, Pseudomonas aeruginosa; identical to SEQ ID NO: 327971

SEQ ID NO: 329374 - DNA, 828 bp, Pseudomonas aeruginosa
atgtctggaacattcaaggggctgacccaggcccagatcgatagaaggctcaaggacgggcgtggccaaggccagggatcagactacaagccgttcatctacactagggacgtgtcctcgctggggcgctcccaccgcctgcctggcagcaagacccggcgtttacaccatcttctatccgatcttgaattggccatcttcctgaccttggatcggtctccccatgtcaccgatatccgtgaacagtttccgatgcgggtcgaagatacggtgcgcatcgccgaggagcttggcttgccccacgggcgttacaagggcaccccgcaggtactgaccagcgactttctggtggatttcgaagatcctcagcgcccgagcatcgcgattcaggccaagtacagtaccgacctgcagaagcctgaagttaccgagaggcttgagcttgaaaggcgctactggcaggaaaaaggtattccctgggccatcgtcacggagcgcgaggtatccaaggtggcatttgccaatatccaatggctctatcctgcccatgctgaagacgacatcgctcaggacgatctcgcccattaccagcagctgtttctgctcgagtttcagcgtcacccagaccggaaggtgaccgctattgcccaaggactggatacctccggccagctggaggccggtcaggcgctctattggctacgccagttgttggcccggcactgtttcttgttcgatcttgacactccttaccgggagctgaagccgaaagacctggttgccaacgctcatcaaatgcatcaggagctgagcagtgtttcccgttaa

SEQ ID NO: 329375 - DNA, 2088 bp, Pseudomonas aeruginosa
gtgtttcccgttaatcaggtgttccggataggggaactgcgaaagcgcctgctgtggtccggcaccgagcaggccatctggatcgatatcgattcggacacggcgttgcccgaaccgatatcggttgcagagctggagcgtctgctcatggagcgggagctggagagcattgccgatcccttcgaggagatagtcctacgggaggttgaggaaggttctcttgatcagcagaagcgtgatgaagcgtgggcaatgctggcggattttgtgcacgatccccagcttttcgtgcggcgccccagagggctcattgtcagaggcatcatggagcgccatggtgtcactaatcagacggtgtataggttactgaggcgctactggcagcgaggcatgtgcaggaacgcccttttgccggactatgtcaactcgggcgcccgtggcaagcgcagaaagccgagccaggccaagctgggcaggcccagagtggtgatggaggggaaagggagcaatgtcacgccggacatcgagcgcatttttcgccgggtcatcgaggaacgcttgctcaaggaaaaacatccgtccattccggatgcctactcctccgggctgaacctgctccgtgctgttctgccggagctgccgacctccgaactgcctacattggggcagttccgttacttctatgggcgcgaatatcacttcaccgacaccttgccatgcagggtgtccgcagtggattttgccaaggactttcgaccgctcagcagtacatcgacgaccgaggcactggggcccggataccgctaccagatcgatgccaccatcgccgatatctatctggtttcagaacatgatcgcagccttatcgtcggcaggcctgtcgtttacatggtaatcgacgtgttcagccgcatggtcgttggtatgtacgtcggattcgaggggccttcctgggtcagtgccatggtggcattggccaacacggtcgccgacaaggttgagtattgccgccagtatggcgtggagatcgatgccagcgactggccggtcaaaggcttgccggatgtggtgctggccgataagggcgaactgaatggcaccaaggtggaagcattttcccaagccttcggcgttcgcatcgagaatgcaccggccaggcgaggagatgccaaggggatagtcgagcgttatttccggacggtgcaggagcgtttcaagccctatgccagcggtgtggtcgaggacaccaccagccggaagcggggtggccacgactacagacttgatgccagtctgaccttgcccgagttcacccagatcatcattgccggcatcctctaccacaacaactttcataccttgagcaaatacgacaggacctctggtatgccgggcgatctgccagccatcccggtcatgctgtggaactggggcttggccaacctgaccggccggttacgtactgcgcccgaggagctggtgcggatcaatcttttgccccatgagtcggccacggtttcggagctgggaatcaggctgttcggctgcttctacacctgccaggaagcaatcagggagggttggtttcaccgaggccaggggcgccggccaacaggggtaacggtcgcatacgatccacgtagcgccgaccacatctatctgcggccgtccaatagtctcaaggactactgggtttgcgatcttgccgaccgcagtcgacgcttcagggggatgaccttctgggatgtctggctgctgtccagagaggaacggcgtagcgataccaacgcggcggcggaagctttggtagagagaggcaatcttctgaagcagatcgagtccatcgttgctcaggcagaggatgccagtccggtcaatacgggtatgaccacgaaggatctgggaacccagatccgcgagaacaagcagcaggaaaagcgccaggaacgccagaaaacagcattcaaaccggagaaagtacagcaggaaaagccagccgaggtgatcccactgcggggcgagaagcaggaagattatgcctttccagatctcagtgacctgatattcaaggaggaagaggatgactga

SEQ ID NO: 329376 - DNA, 1611 bp, Pseudomonas aeruginosa
atgactgaagaattccagcgcggagtcattcccctggcgcgttaccaggagcagcagcttcccgagtatcaggacaatccgctcatcagcgcattacctccgattcctgatctgcaggaggtggtcggtctattgcagcagcttcccggtttcgagccgcaggaggcgcttctggatggtcggctcagggcacatgcgattgcccgcctgttgcacggcttcttccagccgctgagccatcatttggagctggagagcaagatcagcctgatgatccgtcaagggtacatcggtcggaatccggccagcggtgcctggtatgcgcacctgcagaatggctatcgccgtgtcgaggaggaggatctggatgcggcggtgtaccagagtgtctcctctacggccaacagcctgtcgctgttcggctgctccggttgcggcaagacgcgcacgctggagcgaattctgggcatgtacccccaagctctctatcaccctgattacaacatcacccaattggtctacctgaagatcgactgcccaattgacggtgacttggatgagctgtgcctgagcttcttcaacgaagtagacaagatcctgggtacccactacagccgtagccacgggcgcaagaagctgggtaccaaacgtctgctggcatccatgtgccaggtggccaatctgcacgcgctcggagcgctgatcatcgacgaggttcagaacctcaacgaggcacgctccggtggtgccgagaaaatgcacaatttcttcgtgtcgctggtgaacaccatcggtgttccgatcattcaggtcggcacccaccgggctagcaagttcttccagcgcacgttccgggctgctcggcgggtctccgggttgggcagcatccgctgggataggttgcctcgggacgagcattggaagcgcctgttgaagcggctctggaagtaccagtggctgcgaaatgcagcaccgctggatgacgagctagaatcgaccatgtacgacctcacccaaggggtcatggacatcatcatcaagctgttcgcgctggcgcagatccgggcgatagtgacaggcgtcgagtgcatcaagccgctgttgctgcgcaaggttttcgaggacgagttcaaaccggtccatccgatgctggcggccttgcggagcggtaggcccgaactgatcgccaaatatgacgacctgctgatgccagagatcgagggacggttgctgaccctgacgcgcgctctggataacgtcccccaaccgaaaccgccggcccctccggctgatgacaaggcaaagcggctggccgccctgctcgaaggtatggaaatcccgagggacatcgccattcccatggccgatgaattgttggcggagaatccggacatcccgctggcggccctgattcacaaggccacggcctacctcgcgcaggacgctcccaagaggcccggcatttccagagttaagaggacggagtgggggtgcctatccgaggaggatctgcgccgacattatgccgatgggcctgaaagcgaggcctatgacagattcaagcaggctggcttgatcctcgatctgcggcctctgctgagagcgagctga

SEQ ID NO: 329377 - DNA, 1500 bp, Pseudomonas aeruginosa
atgtacttccccaggctctacacggacgaactgctttacagcggtattgcccggtgccgggtacatctggggataggcaaccacaagaccttgctgcacatgctgttcggtgacagcaaggtcgccgcgatcaccgatctgcccacacacctgactgcgttggcgaacaacacgggcttggatgcggaaggcatgatcctgaatcacacgctgttcccgctctatgcccctttcattccgccggagcgtcgtaccgaactttttcaggccatgctcgcttccgaccggccgacgattggcctgtctggggcatcgacggccttggtcaaatggcccgagtggctgcgttactgcccggtctgcttcgaggacatggcggatcgtttcggtgagccctactggcagcgtagctggcagatccaagggatagatgcctgcccagagcatggctgccagctcttggactcacccatcccgtttcgtcgagcgcagcggcatgagtttcatccagcctccccactgtttttgcctcgtgatcttcgtgcgagtcctgcgagcgaagaggctatcaggatcgccacggccgctacgcaactgctggcgctcgaagaggtgcaatcgcctggctacgggcgctggaccaacctgtatcggtacctggcaacagagtgcggtgcccggcgcggtcggcaggtcagggctgaagtcatctgggagaagatcctggcatcccatcgcagggactggcttgctgcgaacggtctgctgacatcaggggagcctccgccctggctgttggcgatgttcaggaaacatcgcaagggattcagtgcgctgcagcatcttatcgtctggaccagcctgcgccccggccagcatgctggtgagctgatcggtgaggtgaatactcgccaggtcgaccttgcctccgaccggtcagcgcagctgctccccgctgagtttgagcaaaagcagcaataccgagccgtttggctgcaagcactggataatcacggtggagccaaggcagccaggaaaaacggaggggaggcatgttacggctggctctatcgtcatgaccgacactggctgatggctgcgaaccaggccaggcagcgccgacagggcaacaacagccacatcgactggggagcgcgtgacagaaggttggtgcgcctgctgatccggattggtagaggtagcgaagaagacctaggccttccgcgcaggagtcgcaactggttcctgcagcaactaccccatcgggcatcagtcgagcaccatctcgatcaactgcctctgtgccgcaccttcctggatcgctatgccgagtcagtcggcgagtatcagatccgtcgcctgactgcagcgatgctggaggatgtacagacaggcataacgtccaggcgctgggagctggaaaggcgttgtggattgggaaaaagcagggtggcaccgctgaccactgcgttcattcgattgataggaatgatggattga

SEQ ID NO: 329378 - DNA, 1623 bp, Pseudomonas aeruginosa
ttgaataggacagtatttcgtcagatcccgaacggatccaggttgctggccgttggaaattttttcagggccccgactccggcagctgagtggcgcttggcggctctctttgagcgtaacggtcagttgcagttgcagcggttcgcacaggagatgtcgtgtgtcttggccgttggtcgcgagtttcttggcgaagaaggggctccttatcgtcccagtggtttcaagaagacggtggtgcttcctgcaatagatacctggtgggaacggcagttgggtgagtgcccacgtctggccagaaggcttgctgcaaatcctgagatatctggacagcgatgctttgtgttcgagatcgatggtctgaccgtttggttaccgaaattcgagctagcgcggaaaatgttcttccacgctgccttcatcgtccgtgcaggcttcgcaccgaatggcttggatatggcattcacgctctacagagtgggcgatgctgttcatatccatacgcccccgaagacaggtgcgccaagtcagcttctcaaaatcaagggatatagagaccatttcagttggcttctgctgaatcaggatgtgaagcgatccttcgagtcaatctggcaaagcctcaatcaaaggcaagagcaggtaccgcaagagtcggcgtatgccaggtggcagttcgactttcaagtacccccttccctcgaaggtaccaccatggatgtgcgaggcccctttgatccggaaagcaacgaattgctggtctgggagatcgaaaagcttcaggggctccggtttagccatcgcggagaaatttttttccaccatcctgctctcaagttacccgtcaggggagatagcacaggctgtgtatccgtgctgtcgggagccaaggagttggaggtggatgctgacgaagagccgactgctgccaaggatcagaggttgattcacctgcccgttgagggcgtcacgtttgatgctcagctgcgcaccaagatcgcctacaacggggagcgtgccaacggtcacggcaagaaggtcgacgacgagcaatgcccgagcagagaaagccaactcttcggcgtggctgatcctgtgagcgagggcagcatagcgtcaggagagttccaacaattaggtgagggagagggtaatggggacgagcatgaacggcttgcagatcgcttctcgctgctccgagagattcttgaacaaatcacccaagagtctggagttgcgttggtatcactggaggtgagaccgctgccgcccgttccacgttgcagctaccacatgatcgaccacgaaaaatcacgctgctatctgctggcaaggttcaaattgcaaaacggcgatcaacgctaccttctagaaatagatacctcagacaaccggaagaccatgtcaacgcggatcatgggcttcaaagcaggtgttgaagccgagaaatgcatcgacaagatcctgaggcagacagtgaaaggttcgttgcgctggccgcgcactatgacgggcttctgtgagcctttgcactctgtaaatcaccccaaagaaggtttatctggcaccaaccatgctgggttttatggctggaagcagcgtatacatgatgccctaggctga

SEQ ID NO: 329379 - DNA, 945 bp, Pseudomonas aeruginosa
gtgaaggtattggttactggtgcttcagggtttatggcccgttcgttactggcccgtcttctggcaacgcaggggcttcaggtcgtaacgctttcaaggaaaaaggaactccctgacgtcctcgactccagcaccctcaatcagtgcttctctactgcgaacttcctggaccttctcagcggcgttgatgttgttgtccataccgcagcacgagcccacgtcttgaatgagaccgcagccgatccgctcgccgaataccggaaggtcaatgtagatttcacgctcaacctcgcccggcaatgcgtacagagtcaggtgaaacgcttcatctacatcagctcaatcggcgttcatggtgttaccagcgaccggccattcactgtatgcgacgtgcccgcaccggaggagccatacgccatttctaagatcgaagcggagcgtgggctggtgaatctatgccaagctcatgatatggagctagtcgtcattcgcccaccactgatctacggtcgggaggctccgggcaacttcgccagaatggtaggctgggtttccagcggtatacctctccccctaggggctgtcgataaccggcgatcactgatcagcgtcgccaacctcgtcgaccttatcttggtctgtctcgatcacccccgtgcagcaggcaaggtactactggcctcagatggggaggatgtttccacccccgatttgctgcgccgcgtcgcacgagcgatgggcaaacccgcccgcctgatccccgtccccacaacggttcttcgtgctgtcgctagtcttgtaggtaaaaaaagcatggccagacggcttaccggctcgctgcaagttgacatgagcagcacgaccgcattgctcggatggactccacccttcagccttgatgaaagcctagctcaatgcttcgggagccccgatgtgcgccagtaa

SEQ ID NO: 329380 - DNA, 690 bp, Pseudomonas aeruginosa
atgggcgcctatgacccttcggtgccctccggtaaacgcctgctcaaacagcccatcaccgtaagcaccctgttcatccgcaaccccgcgaaagtacccctgctgttccacttatctgacctggttcagttcggaacacgcccagacatgcttgggttctgggatcagcgccttaggctccagcatgaggtgttcgccaatgccccgtacaaaaatccaatcgggaactttgtgggctatagcgccatgcggatgaccccagagcaatgcttgatgctcgggtttatggccaagaggggctacgacatcagcctgaaaacgccgggggaaatttctcctgagcttgttgcgctgtcggacaccctcttggcccagaacttcaccgtgctcgactgggagacctgtgagattgattttcctgagcgtttccgcaaaaccggctactcgctgaaaacggtctacacggccagtgagctgaaggctgctggagaacttgatccatatggccgtaaagcgcggtaccgaaagatttggctgaacaagtacgtcttcaactatggccgcctggcttggtggattgcgctggcgtcgatcctgctcacagcagtgtctcctgacatcgcaaaaaccgccagggccttcatgcgcaaaatcagggggcttgagcaccccaataacgacaggatttga

SEQ ID NO: 329381 - DNA, 1506 bp, Pseudomonas aeruginosa
atgtttatcgacacgctgattatcggaaacggttttgctggcaggacagtcgccagcggcctgcagggcgagtgtctcatcgttgagcgcggagagaagttcaatattttcgagcgccgtcagcgcttcatgcagatggacaagacaaaccgccacgatgcccttattcgccggtcctacgagtcaaagcactcgttcaacgtgcccgagcagatgcccaaggactgcggctctgagtacatcttggtcgatggtgggtgctccaatcactggggtggcctcagcttcaggctgagcgagaatgtgtttgaaaaccgagcggggaatttcccctggccttttagctacaaggatctggcgccttactatagccgggcagaaaccttgcttcgcatcagcgccgacccgcgtgaccctgatgggcgcaacccccgggctcatatcaaaggatctgacctctggtatcaggcgctcggtcagtatttcccaggcgcatacatcggcgctcaggcgcacaacctgtcaggaaaaaaccctgacggtcaaggtcagtgtctcggtgctggcgactgcgaactttgtccgatggatgccaaaacgcgctcgcttcatgttagcgccggtgcccaagtactgaatggcgtcatggttgaccgcctgcgtttcgagggtggcaaggccgtcgaagccctgtgcatgactgaagacggcccactcgctatcggttttaaccgggtgatcatcgctgcccacggtgtcgaatcgctgaaggtgctctggaagagcaatcttcctgagaccaccccggcgcacctgcttggccatcactaccaggaccatgcggtagccgaactggcgtgctcaatctccggggcgaaagtgccgttcttgcaggtaaacactgctgcacaggtggtgatccctgaactgtctggtgagcatgacggaattgagtacacgacccttgcgctgatgacgcctcccagcgaagcagccgccaccgccgctctcgatatcggcaaggtcaatgcatggagcctgcagggtgcaattgctgatatggggtcgatcctgagcctgtatgtgctgcttgaaataccgccggagtgggacgtttccctctcgtatgccgatggaaaggtttccatggatacgaccggctatcacaagaacaaggttcgctataacgcggtcatcgacaccatcaaccgcaagatgacagccctcggggccaatcccatccgcgccgcagaacagaagcactacatgaatgccttcggtacccaccacctggtagggatgctttcaatgggcgaaggcccacgcgcagtcgtaggctcagacttcaagctcaagggcactgagaacgtctcgattgcagggtcagcgcttttcccgcgctgtggctcaaggaacccaaccgtcaccgttgtggcgaccagcttgatgctggcagagaagctcaatgccgagcgcggcgaatcactcataacacgggccggctga

SEQ ID NO: 329382 - DNA, 186 bp, Pseudomonas aeruginosa
atgtccggtgttcgacttcagtatgtcagccaggagctgcttctgaagctctatacccaaaccgtggctgaccaggatcgtcaacagattgtccgcgaggtggtgaaccacaatcgcaatttgttcgtggccaacgcatacgagcggcaccatggccagcccggcttctatcgagtgactgagtaa

SEQ ID NO: 329383 - DNA, 618 bp, Pseudomonas aeruginosa
gtgaaaattttcgtcgcttccaacggctttgatgaaacgccaggccagcttgtcgcacagcttgcacgcatcgatgtgaagccgggcaaggccacgcccgttgtggttgttgatgagcgctacacgatcaagcaggcgctgactgacggtgcagagcccgcgtgtgccgcatttcaccttgacgacttccttcatgagaagggcagcatcgctgatggcgtcatggtcgtagacaccaaccagatagccaccaagctgaagggtttgaattctgaatgggtggtatttgagttcggtcaaaatgaccagcagacctgtttggatttcgttcgcaaggtcagccgttacaactacatgaacgcggctatgcgcggccgcaacgtagtgttctctgtacccagcatttacctggctttctttgctcgcatgctcaatgaagcgttcaacaatctgcctatcgggccaatcgcggtcgcccagtctgggcaggttgggatgctgatgatgtccactaagatcgaacgtgtctttgtgagccttccgcttctttcagcgccactcatccgcctgaatcggctggtgatgttcgtctatcggcgctttgtaaaagcggtttag

SEQ ID NO: 329384 - DNA, 1776 bp, Pseudomonas aeruginosa
atgaagacgaccctgctcaaacaccacagatccctcggttaccttaaaactcggaagctcgtggatctgccggccgatctggatctgccggccagtacctccaacctgatcaccttcagggccagcacgaagttgaaagctgcggaggtcatcaaaaatctccacgcggccatgcggccgacgagcatgtttggggcagggtcttacgctttctacggggtacagagcgattctccgctcgccccgctgcttttgtgggacgctgcgcacttccttcttgttggccagcgcctgaccgttatcgaagattcgcctatggcgtcttacctcgacagggaatatttccgctcgggcctggtagcagtggagcgcacgcccaccaaaatcgtttatgagaaagtagccaagctaccggccgagagtgacgacgatctcgatagctggaccttcggcatcccagtaggccctgaggacgccactgtccttaatgctgtggttaagcggattttggagatcgatatccccaacaaggaaatcatcctctgcggtacccctggccagaacttcgcctacttcgaccaggtgcggatcgtaggtgaagacatcacagccccgccggttcaaatctgcaagaaaaagaaccgtctggctcaggaggccagctacaacaacctggtgatcctgcacgaccgtgtgtttctgccaaaacactttggtgagatggtccgccgcttcgggccgcgctatccgctgatgacgctgcagagcatgttcttcgacaaccgggtgtcgctgcatccacgtcgatactccgactacggcctggccatgggtgaaattgcccagggcctgcagggccttcaccgcacttctggcaaggcggtcagtattgcaccttcggtcttcacggagatcgagcgtaccggcttttgctttgcgagccccatgcggttctcgaaagatatgagctacccgaccggcagcctctacatctgccgaaaagaggtctggaacgcatacccgttggacgaatccctgttctgggttgaatacgaagatatcgagcaaggtttgcgcgctggcgaagccggtatcccaaaccgcgtcaatccattcggcatcacccaatccattacatcccgagcgcttctcggcggccgctcaccggttgagatggcatctggcaagcttggctacacaagcccccatttcttctcgattttaagcaagaagcccctgttaaagctatcaacgccggcggcgctcgcaaggctgcgggttttcgccaacaagtatgtagcaaaccacgaagggttcagcataccgaccggcgccaaaaagatgtcagctcgggaatgggttgaactgatcaacctcgtcgtacagcaatcgacattcggcaacgacattgaatctgtccgccaattcattgctgattacgagaaatttgttctcctggatcagctgcccgacatgcagcaggaggccattgctcatcagttcctgctcgatcctgcagctgccaagcagtcgctgattaccagcagcagcgagatccgcaacatgctttatcagcgcccctatcagagctggttctatcagggcctgggcgattacttccaccgcaacctgttgtcacttcccggcatcctgatctctgccgttcgggcatacgccagcaacggcaaggttttctacttcgagagcctgcctgctgccgtaaaggcgatctacaactcaacgcccttcagctcgtacacggagaagtcaaagtga

SEQ ID NO: 329385 - DNA, 327 bp, Pseudomonas aeruginosa
atgaacgctgccaagctgggcgacatggtgaagggctggtttgtcggtggctttgagccaacggcattcagcacccaggcctgtgaggtcggtgtaaaggcatatgcggccggtgatagcgaggtggcccattaccacaagatcgccactgaggtgaccctagtgctcagcggctcggtctccatgtgcggtaagacctggggcgccggcgacattatcgttctggcgcccggtgacatcactgcattcgaggccctcaccgacgccacaaccgtggtggttaaggtgcctggcgcgctcaatgacaaatacattgttggcgaataa

SEQ ID NO: 329386 - DNA, 738 bp, Pseudomonas aeruginosa
gtgaacaagatgcccaacatcatcatcctggctgggacgaagactgaagaagtccgcccggacggcgattttccttactacctctgtgaggctgacggcgtaccactcatccagtcactcattgaaaactgcgccaccctcaatgccagcaaaattatttgcatgctgcccaatgcagaagtgagcaagtatcacctacgcaacatggtcggccagatgcacccggcggcggtggcccaccccgttcacgaaaccaccatgggcgcggcatgcacggcactgctggcaagcgaatttatcgacaacgatgctgaactggtgatcatcagcgccaacgaaatcctcgacgaaccatttgaaaaaatcgtagccgatttccgcagccagggccgtgatgccggtgttgtcatcttcaaatctctgcacccgcgctacgcatttgtgcgcctgactgacgctggcgatgtcgttgaggctgctgaaaagaacccgatcagcccgcacgccgttgccggcctgtactggttcaagagcggagagatgttcgtcgaagcggtgaagaacatgatccgcaaagacgcgagggtgaatgactctttctacattgcccctgctctgaatgagctggtcttgcagcacaagaagatcggcgcctatcgcgttgatccgagccaataccgccccctcaaaagtgcagcgcaaatgcatgcctatgaagctcaagggagccgggcatga

SEQ ID NO: 329387 - DNA, 648 bp, Pseudomonas aeruginosa
atgattttaggtgttattttcgatatggatggcgtccttatcgaagcaaaagactggcactacgatgccctgaacaaggccctaaacctcttcggttacaacatcagccgccatgaccatttgacgagctatgacggactgcccactgctcacaagctgaagatgctgaccgttgagcatggcctacccaaagccctgcaccccttcatcaatgagatgaagcaagtctatacgatggaaatcgtctacgcccagtgcaagcccacgttcgttcatcagtatgccctctcctccctgaagaacctgggctacaagctggcagttgcctcaaactcgatccgtaatacggtcgaggtgatgatggagaaatcgtgcctggatcagtacctggacctgaagctttccaaccaggatgtggacaaaggtaagccggctccggacatctacatcaaggccatccaggatctgggcctgcgccccgagcagtgcctgatcgtcgaggacaacgagaacggcatccgcgctgctcgcgcttccggtgctcacgtcttggaagtggcagaaaccacggatgtgaacctggaaaacatcctcaacaagatcgctgaaattaacgcccagtgcggcagcaaggagaaagcccagtga

SEQ ID NO: 329388 - DNA, 624 bp, Pseudomonas aeruginosa
atggaaatcattagccatcgtggctactggctggagtcgcatgagcgaaaccagccggtggcattccatcggtcattcgacctgggttatggcactgaaaccgatgtgcgcgactgcgccggtcgactgctcatttcccatgacatgcccacgggcgaagagatgaccctggacgaccttctggacatcatgggggatcggaatttgccgcttgcgatcaacatcaaggcagacggcctggccaaggcactggctgccaagtttgaggaacggggccacactaattggtttgtcttcgacatggctgtgccagacatgcgcagctacctcagtgaaggggtctgcacctacacccgcctcagcgatgtagagccatctccggcatggcttgagcagtccgcagggatctggctggatcatttctctccggggtattaccccaatcgagagatcgtgaagcacctgaaccagggcaagaaaatttgcgtggtttcgcccgagcttcatggtcgtgatgtgaccacggcttgggattccctgcaccggctgaatacgttgcctggactcatgctttgcacggacaagcccgagcaagcagataagtttttcaacaaggctcgctga

SEQ ID NO: 329389 - DNA, 762 bp, Pseudomonas aeruginosa
atgctccaaattatcgtacctatggctggcgccggcagccgtttcgcagtagcaggctacaaagatcccaagccgctcatccctgtgcatggcgtgccgatgatcaaggttgtgatcgacaacctcaccccccaacgtgaccacaaattcatctttatctgccaggccgcgcatgttgcaacttatggtttgcgcgaaaaactcagcacttgggcgccgggttgcgagatcgtagaactcaacggcgtgaccgatggcgcagcctgcaccgttcatgcagccaaggccctgatcgacaacgagcacccggtaatgatcgccaacagcgaccagttcgtggacctggatatcgacgactacctggccgccatggataacgctgctgcagacggcatcatcatgaccatgaaggctgatgaccctaagtggtccttcgttggcttcaatgaaatgggcacgatcaaccgcgtagtcgagaaagaagttatctccgacgaggcaaccgttggcatttacaacttccgcagcggtcatcagctgatcgaggccatcgagcagatgttccagaagggtctgcgcgtcaacggcgaattctatgtcgctccagcctataacgaaatcatcgagaaaggcgccaggatcatccactacaccgtaggctccgaaggccagggcatgtacgggctgggcatccccgccgaccttgattacttcctcggtctgccaatcagcaagcgggctaccgctgggaaggactgctga

SEQ ID NO: 329390 - DNA, 705 bp, Pseudomonas aeruginosa
atgagcaaggtcatcctcaaggtcgaaagcctagtcaaagacttcaccatccgtcacaaccgcggcggcatgaaacacaagcttgccgggctatttaatccgcgcttccaggagcgcatcgaaacactccgcgccgtaaacgatgtctccttcaccctatgcaagggcgaatctctttcgcttatcggccacaacggctcagggaaaagcacgctactccagctggtcagcggaattctcctgccgagcagcggttcggttcagtctttcggtcgagtggcacctttgatcgagcttggggtcggcttccacccggagctgaccggagaggaaaatatctacttgaatgccagcctctatgggctgagaaacaaagaaacccgcgctcgtttcaacgacatcgctgatttctccgggcttggagacttcattgatacgcccgtcaaaaactactcgtcaggcatgtacatgcgcctgggcttctctgtggccgtacatgttgagccgcagatactgctggctgatgaggttctggcggtaggtgaccaagatttccaagacaagtgctatcagcgcattcgccatatgcaggaagacggtatggctttgattctggtgacccattcaaaagagcagggtcagcggttctgccagcggttcctgcatcttgaaaaggggcgcgctatcgatgagggctgcttctag

SEQ ID NO: 329391 - DNA, 777 bp, Pseudomonas aeruginosa
atgctgatccgaagatttattgatttatgcaagtggcgagacctagtgttcaatcttgtcgcgaaggaaatcaagatccgctatatgggggccgcactaggctttgcatggtcactgggtaacccactcgtcgtcaccctcacctactacatggtgttcacctacatactgcctagtaatcaggacagattcgccttgcatcttgtgactggggtagtccactggatgctcttcagtcagataatcctgcaaagtagcgattggcttatcggcaataatagcctgattcgcaagcttagtttccctaggatattgctaccactgtcaggtgccctgactgtcggcgcgttctggctggtagctattgcggtctatgcagctctctacaagctcctcggcggttatccaggtagtgcgttgcagtggtaccccctggtgctaatgccctatgtcctgatgattatgggccttgccttggccatcagtgttttgcaaatcacttggcgcgacataaagcatgtcaccgaggtgtttgtacctcttctgttctggctcacccccatagtttgggttgcctcggcactgccgcacgatatcgctaagatcgtttcattcaacccgcttgcaccattcttcaacagcttcacggcgattttgcacgagagcgtgcagccatccttgcgagacctcgccctgtgctgggggatagggttaacctcaatcatcaccgggctactggtgtttaagcgtgcagacaaggtggtcgaacttttatga

SEQ ID NO: 329392 - DNA, 897 bp, Pseudomonas aeruginosa
ttggatttcagattgctgcgctacttcatcgcagtcgcggaagaactgcatctggcccgggcagccgagcgtctgggcatcgagcaatcgcctgtgtcacgtgcgatgcgcgacctagaaagccagcttggcgtgcagttgttcgaccgcagcacacgcctgacgcggctgacctgggccggccaggtgttcctcggcgaatgccggcgcgtgcaggccaccgtggagcaggcagtcaagagcgccaaggcggcggcacagggctaccagggccatctgcgcatcgcgatctgcgacggcctggcgcagccccgcatcgccaccttgctggcacgcagccgcgaggaggagcccgagatggagattcgcgtcttcgagctgccgttcgcgcagcagctcaagacgctgcacgacgatctgctggacatcggctttgcgttgtcaaacgcggtacatgatggcctcgtcgccgagccggtgtggaccgatccgctgtcggtgatcgtgcccgcacgccaccccttgctggcacacgtgcaggtgccgctggccgaagccctgaagttcccgctggttctgtgccatcccgaatcgggatcgggctgccgccatcagattcaagcgctgctgcaggacgcaggcacgccgctcaagctggtcgatgaagtgaccagcctgggcgtgatgctgaccctggtcggtgccggctacggcatcggcttcgccatcgcctcgcaggtgcagacgctacagcgcccggacatctccattcgtcccttggccggcagcccaccggtgctctctacctacctgctgcgccgccggggcgaaccctcggagcccatgaagcggttcatcgagcgggcgaaaggcgggcgggaccgggcctgtcgatga

SEQ ID NO: 329393 - DNA, 609 bp, Pseudomonas aeruginosa
atgagcgaacactccaggcatctaccggctgatgagaggcgcgcggccaccgtcgaggcagtggtcgacttggctgccgaacagaaccccagcgacatcacgaccacggccatcgcgcagcgcatggggttgacccagggagcactgttccgtcacttcccgactaaggacgcaatcctgcaggcggtgatgtcctgggttacggaacgcctgctcgctcgagtagacaaggccgcagaaggtgctacgtcccccctcgcagctcttgaagcgatcttcaagacgcacatcgacttcgtggccgagcacccgggggtgccgaggatgctcttcggcgaattacagcggccgggggagaccctgcccaagcaaatggtgcagaccttgacccgtcaatatggtgagcggttgcgtcgactgctcgaagccggtaaggcgcgaagcgagctgcattcagaactggatgtggacgcggccgtcgtcttgttcatcggcacaattcaagggctggtgatgcagtcgttgctggcgggcgatgtagcacgcatccgccgcgacgcgccagccgtgtttgccatctatctccgtggcatcacgcacacccgatga

SEQ ID NO: 329394 - DNA, 420 bp, Pseudomonas aeruginosa
atgaccactcatccacaacgcagcatctggcactggctgatctccctgcttgcgatcggcttcggtctgctcactcttcgggagggcggcgccgttctgtttgtcgacggcgcggcgcgccaagccgccggccactatgtgcccttcgtgctctggttcaactttctagccgggttcgcctacatcgtcgccggcgtcggcttgtggatgcgccggcgctgggccgcgtggttagcgattgtcatcacggtggcgaccgcactcgtgttcctggctttcggagtgcatgtggctctgggtggcgcctgggagcgacgcacggtggtcgccatgacgctgcgcacgttggtgtgggctggcatagcggccatcgcctggcgccggtcagcggcgaatgcgccggtcgcacgcgagcactga

SEQ ID NO: 329395 - DNA, 1041 bp, Pseudomonas aeruginosa
atgaaaactccaaacctcctcttcaagaaaacccgttgggtcgtgatcgccgtcgtcgtgctcgctcttggcggcgcactggcgttctggttgtcgcgcgaccatggacaacaagatgcattgcgcctctacggcaacgtcgacatccgcgaggtgcaactggccttccgtcagcccgggcgcgtgatgcaaatggctttcgatgagggcgatgccgtcagcgcgggcgcgcgcctggcggcgcttgacgcgcaaccctatcgggaagcacttgcggcagcacaggcccaggtgcaggtggcgcaggcggaactggccaagctgcgccgcggcctgcgaccgcaggaaatcacccaggcgcgcgaagccctcaggcaggcccaggcgctcgccaccgagaccgagcgcaatttccagcgccagagtggcctgctggcatcgggcgcgagcagccagcgcacggtcgatgcggcccgcacggcgcgagaccaggcagccgctggcgtcgaagcagcgaaggcggccctgtcgcaagcatccgaaggcttccgcaaggaagacatcgccgcggcagaagctcgccttgcggccgctcaggctgccgcagcgcaagccacgacagccttggcggacaccgagttgatggcgcccagtagcggaaccgtcatcgcacgggtgcgcgagcccggcagcatggttgcaagccagagcgcggtctacagcctgagcctggacaagccggtttacgtgcgcgcctacgtgggcgagtcggacttggggcgcatcgcgcccggtactgtggtacgcgtcaaaagcgattcatcagagaaggtctatcgcggccagatcggcttcatctcgccgcgcgccgaattcacgcccaagacggtggagacgacggatttgcgcaccgatctggtctatcggctgcgcatcgtcatcgacgaagccgacagcgacaccgccctgcgccagggcatgccggtgacgatcgcggtcgatgcgaaagccggcacccgtatcccggcgggggagcgttga

SEQ ID NO: 329396 - DNA, 1773 bp, Pseudomonas aeruginosa
atgcaggcaagccctgctatcgccgccgtgcctgcgggtgcgggcgaagacgctgccatcgtcatcgaagacgtggacaagcatttcggcgacgtaaaggcgctgcggggcttgagcgcgcgcatccactatgggcggctgaccggtctggtcggcccggacggcgccggcaagacgacgctgatgcggattctgaccggcctcctggtgccgaacgccggccacgtcaccttggcaggctatgacgtggtcaaggacaacgacgccattcacgtcgccagcggctacatgccgcaacgctttggactgtacgaagacctgtcggtgatggagaacatgcgcctgtatgcgcagttgcgcggcatggatgcggaccgcaacgccgatctgtttgccgagctgctggacttcacgcggctcggacccttcaccaaacgcctggccggcaagctctccggcggcatgaagcagaagctgggcctggcctgtgcgctcatggcgcggccgaaggtgctgctgctggacgagccgggcgtgggtgtcgacccggtcagccgccaggacttgtggcgcatggtgcaggcgctgaccgatgaaggcatggccgtggtctggtccaccgcctatctcgacgaagccgagcgctgtgagagcgtgctgctgctgaaccaagggcagctcctgttcgagggcccgccgcaggagctgaccgcgcagctcgaaggccgcagtttccgtctggaagacgtcggtgccgagcgccgagcggtcctgacccaggcactcgacctgcccagcgtgagcgatggcgtgatccagggcgccggcgtgcgcgtggtgttgcgcgagggcgctcaagcggagcagctccaggccctgtccgatcaggcgcaggtgcgactggcgcaggtgcccgcgcgcttcgaagacgccttcatcgatctgctcggtggcggccccggcggcacttcgacgctggccgagcgtctgccgccggttgagctgggttccgatattgccgtgtcgtgccgaaacctcaccaagcgcttcggcgagttcaccgccaccgacaacgtcagcttcgaggtgcaaaagggcgaaatcttcggcctgctcggccccaacggcgccggcaagtccaccaccttcaagatgttgtgcggcctgttgaaacccactgctggcgaagcgcatgtggtgggccatgatctgcgccgcgccaccggcgcagccaagagccggctcggctacatggcgcagaagttttcgctctacggcctgctctcggtgcagcagaacctggaattctcggccggcgtctacggactggaaggcaacacccggcgcgagcgcattgccgagatgatcgaaaccttcgatctgggcgactggttgtccgccacgcccgattccctgccgctgggacataagcagcgcctggccttggcctgttcgctgatgcaccggccacccgtgctgttcctggatgagcccacttcgggcgtggacccgatcacccggcgcgaattctggacccacataaacggactggcccgcaagggcgtgaccatcatggtcaccacccacttcatggacgaggccgaatactgcgaccgcgtggccatgctctcgcgtgcgcaactgatcgcgctggatacgcccgacgcgctcaaacgttcggcggtcagccccgaacggcccgacccgacgatggaggacgccttcatccacctggtggagtcgtcagaccgcgagctggaggccgccacatga

SEQ ID NO: 329397 - DNA, 1170 bp, Pseudomonas aeruginosa
atgaacggcgccacaatgcacaaagacggaagtgactccctgcagaccgacttgcgccgttttgatctacggcgcttgatcgccctggtgaccaaggaaagctaccaggcgctgcgcgacccctcgacgctgctgatcgcgttcgtgctgccggtggtgttgctgctgctgttcgcctatgcggtgtcgctggatgcgaaggatgtccgtgtcggcgtggtcctggagtcgcccggcgcatcagcacagtcgctggccgcagcgttttcgggcactcgcttcctgaatacgcacttcgcccatgaccggcgcgaagtagccgatcaactggtctcaggcgacctgcgcggctacgtggtgatcccgcaggatttcgagcagcgtctggccctccgtggcagcgagccgctggtgcagatcgtcaccgatggctcctaccccaataccgccaactacgtcgagaactacgcccgtggcgtggtccagtcctggcgtgccggactggacgtcggagcaccagcgcagtccatcatgctggagccgcgctactggttcaaccccgaactggaaagccgacgcgcactaattcccggcgccatcgccatcgtcatgaccatcatcggcaccatgctgactgcactggtggtggcgcgtgaatgggagcgcggcaccatggaggcagtgctgtccacgccggcctcggtggccgaaatcctgatcggcaagctgctgccgtacttcgcgctcggcatgctgtgcacgctgggcgcatcggcgctggcggtgttcgtgttcggcgtcccgatgcgcggctccttgctgtccctgttgctcttgtcggcggtgttcatggtgccggcgctgggtcagggtctgctgatctcgtcgctggcacgcaaccagttcctggccgcgcagatcgcgctgttcacgggcttcctcccggccttcatgctgtcgggctttctgtatgagatcgacgcgatgcccgcgccaatccaggccatcacccgagtggttccggcgcgctatttcgtcgattcgctcaagaccgtgttcctggccggcgacatctgggccgtgttcctgcccaacctggcggccatggcggcgatcggggtgctgttcttcgtgatcgccaagcgcgccacgcgcaagaacctggagtga

SEQ ID NO: 329398 - DNA, 1119 bp, Pseudomonas aeruginosa
atgttgacttccgcattctcgttcacccgcctgcgcgcccagttcatcaaggaagtgctcagcgtcctgcgcgacccgcgcagccgcatggtggtgttcgtgccgccgatcctgcagttgctggtgtttgcctttgccgcgacgctggaagtgcgcaacgtcgatatcgccgtctacgaccaggatgcggggcgctggtcgcacgagttggtacagcgtctggacagcgcccgcttcatcacccacgtccggcatgtcgacagccagcagcagctacacgagctgatcgaccgtggcgaggtgatcgccgcgcttgccattccggtggatttttcgcgctccatcgccgccggcgaaagtggccgcgcgcaggtactggtcgatggccggcgcagcaactccgggcagatcaccgtagcctatctgtccaccatcgccgccgatgtcggcgccgaggtcgtgcccgacgcccaggcaccaacgcccgtggtcgtgcgccactggttcaacccgaatctggtctaccgctggttcatcgtgcccggcctcacgggcatcctggcgctgttcagctcgctcttgatcacctcgttgtcgatcgcgcgcgagcgcgagctgggcaccttcgaccagttgctggtatcgcccacctcgacgccggagatcattgtttccaagtcgctgcctgcgctggcgatcggcacgctcttgggcctgttcatgatcagcgccggcgtgttcctgttcggcatcccgttcaccggctcgttcgcgctgctgctcgccagcctggtgctgttcatcgcctcggtggtcggcatcggcctgatgatttccgcggtcagcatgacgcagcagcaggccatcctgggagcgttcgccatcggcgtgccggcggtgctgatgtccggctttgcgacgcctgtggaaaacatgcctgtcgtcctgcaatggctggctcaggccatcccactgacccatttcctcatcatcgtcgaaggcagctttctcaaggccatgccgcccggtgacattctcgccagcctgtggccgctggcggtcatcgccctcgccacgctgacgatggccaccgtattcgtccgaggacgcctgcaatga

SEQ ID NO: 329399 - DNA, 1875 bp, Pseudomonas aeruginosa
atgattttggctaagggtgttagctattatcaacaagaagcactgagaaaggctcgtgaaggtcacacgcacctgcctatagcagtcaccgctacacggctaggggacgggacatacaaagtcttaagttacctcgcggatgacgtttggcgattcccaaacgcgatttttccacctgggactgctgaccacgataaatgcattcggttcggtaagattccagagcgttggcgctcagttctgaaaatagttatgcttgaatactatttaaacggcatagagggccgggtgcgaccagtcggatcttcgttaatttcttttttcaaaaacgtatcattatttttgaagtttgctggtgcttatgtcgagtgcttgtctgaaatttcagaatttctgtgtatgcagtatgttaattatttaaaaaatagtagcagtagatctggtaataagttttctaagtcctatctttgtacgcgattgagctcggtgcacacactgcatctgctcagtaaagttactactactcccatggtgcacccttggcctgaaagtagcgcgactgagttgtcaggcgcaaatcgtgctcactgggcccaatcaaagaccttgccaattccagataacaagctcgcggaaatttttcgtgcggctgtatcacgtctagagcgcgcagacgagacattagcgcttgcggaaatggtttccgaatggcaagcccaatattcctattctggcactgtaaacgcaaaacttgcggctacgggataccggggtggcattttagggttgagacttgagaaaaatctcctgctagatgcctgcagtatcgtcattcttctaacgagcggtataagagtttcagagctcatgagcttaaaagtaggcgctcactacgtacgtgatggggaagatggtactaagttttactggatgtctggagtatccacaaagaccaaagagggtaaggtagattggctagtcacaaagcttacccatgaagcgctagacgttgcggggaaggtcaccgcagagattcgtgccgagctaaatgatagatacagtttggctaagtcggcaagtaatctgatagagatgcatgattatgaagcgcatctcgattctttgttccttgggtggggagggcatgcacataaactccaagtttttgctgcacaaaccattagggcaagattaaagcggtttatgctggctcataatattgactgggaggtcgcaccacaccaatttagaaggacgttcgctcgatatgtggctcgcagtcaactcggtgatgttcgttatcttcgtgatcatttcaaacattggacgctggatatgactgcgatatatgcagaggatcaagttagagataaagagctgtttgatgaaatctatgttgcaatgcgtcacgaaaagatgctggtgcttgaaagtgtttttgaagaagatgcattggtttctggtggtttggcagagaccattcgtatttttcgatcctctgatgaggcgattcggacgtacaaaagccgccgtgaaatggttcagtttgtatcggaggttgtgcatctgagaagtactggtattgcatggtgtactgcagatagtacgggctgctccggtggcagtgtattggataaaactcgatgcggtgattgctcgaaaagtcttatcgatgaatcgcggctgccacattgggtaggcatatatgctcaaatgttggagcttaaagctatcgctaatgactgtggtccaggtgcgggtgcacgaattgacagcgatattcgacggtgtgaagtcgtccttcaagagcttggagctgatattgaggagcttaagctcggtgttttacttgaaggggggcttcgtcatgcataa

SEQ ID NO: 329400 - DNA, 2994 bp, Pseudomonas aeruginosa; identical to SEQ ID NO: 328328

SEQ ID NO: 329401 - DNA, 1497 bp, Pseudomonas aeruginosa; identical to SEQ ID NO: 328182

SEQ ID NO: 329402 - DNA, 270 bp, Pseudomonas aeruginosa; identical to SEQ ID NO: 327977

SEQ ID NO: 329403 - DNA, 345 bp, Pseudomonas aeruginosa
gtggtcgacaacccggacgggcaactgacgccggggctgttcgccaaggtcaggctggagaccggcaagcctcgcgagcaggtgctggtcgccgaccattccatcggcaccgaccagggccggcgctatgtgctggtcgtcgacgaaggcaacaagacccagtaccggccggtggaactcgggccgatggtcgacggcctgcgggtcgtccgccagggcctgcagccgggcgagcgcatcgtcgtcaagggcctggtgcggccggacatgcagatcacgccgctccttgcggaaatcgatggcacgcccgtcgacctgtcgaagaccgtgggggccgcacaatga

SEQ ID NO: 329404 - DNA, 495 bp, Pseudomonas aeruginosa
atgattgacccaaccgacaagcaaacccaacccctccccctggagcagccgaagcgcgggcgcggtcggccagccaccggcaaagccctgtccgacgcagagcgggcgcggcgctaccgggcgaacaagaaaaaacgtgacgatcaaccgtcacgaaaagacaacgaggacgggaaagaggcgctgtaccggagaacagttatcgagcaagcggagcaaatccgcgagctaactgccaagtgcgagcgcctggagaaagaattagcgtcacgcgtcacggaaaacagcgataccgtgacggatcgcgaaaaatgggtggttgaattcaagctgaagaactcaaggacctggaagccgacaggatccgagccaatggcaaaaaaggacgccatttacgtcgcccaagggagcgcagagacaacaaagggacaggcagtcttcagggctaggcctttgaccgaaaagcctattgtcttcggaacaacccgcaaataa

SEQ ID NO: 329405 - DNA, 207 bp, Pseudomonas aeruginosa
atgagagaccacatgccaacaaacatccgactgacccaggccgaacaagaagcgctgagaaagaaggccgtggaggtcaacaaagagctagtgaagcgcgggctccagccactgaaagactcagaaatcgtgcacgccttcctcgaacacgccatcagcagcctggaggtatccgcctctgggaaactggtaattcacatagagtga

SEQ ID NO: 329406 - DNA, 1125 bp, Pseudomonas aeruginosa
atgttctacgactggatatccggctatcaggatttcccgttcgacattccccaggtgggcaaggtcattcgactgaacgtcgactcagagaccaatgaggtgctgagccagtcgtgcccgcccttccatgctgagggtagctacagcacgaagtttcgcattcaggtggcagggcgccgggtgtacgtcgacggcaatgcgagccgcgttaaccgcctggacaacctctacggcctgaccacgctcgcggacaacatggccgtcatcaactcgatcttgaccgcaccggaaatcggtcttccgccgctcactcgatgcacccggcttgatcgtctgcaggacggttcggcggtggtggacgggttcactttcactcggatcgatgcgacccggaatctcttcgtagggaagggcaacgagtcggcatatctgcgggctctgtcgagccagcgtttccggaattccatcggctacttgtacccggacggcggcaccgttgtgtggacgcccagcgggggagagaaggccggtcgcctggtgtacccgggttactacgacaaggggctggaactgacccggcatttgctgccgaaggttctacgacgttacggcgctgagtctgaggagtatcgctacgtcagccaggtgcgcgactggtgcgtagaagtcggagttgtccgcgctgaaatcaagctcaagagcgagctgctgaagagggattgcctctgccattggggcctgttcgacgaacagcgcatctgggatcacctgggcgaatttttgaaggtgggcgacaaaatgaccctgaccgcacatgacattgccagcatttccgaagaactgatgcgtgtaggcgtctgcgactccatgcaggcggctgggcgtactgcgacttacgcgatggagtggatgaacggcaagacgttcgatttcaacaagtctgccgtgaagacgcatcgcgcccgtcttcgggctatcggcttcgatatcaagctgccttttgacgcgtcgcggcacatgttcttcatccacaacgtgcgcgaagtcttccgcaccttcgacgtgcccgcgccgagcttctaccggcgtccggacgtgccgcgccatctgcggttggtggcctga

SEQ ID NO: 329407 - DNA, 249 bp, Pseudomonas aeruginosa
atgggcgcgctcatgagaacggtcagtttccagggcgacggcctgtcggccagtcagtaccggtcgatccagcttcgccagcaggttagggcggcggtgaatcaatccgtgctgcaacagcaggttgaggccactttgcaggccctcgaaaagcacaaagagcagggcggcaagcccgagcgcgtctggaccactgtcaccaccgaaaagggcacgccgtgggtcggcgatgtgttcgggtggccgtga

SEQ ID NO: 329408 - DNA, 264 bp, Pseudomonas aeruginosa
atggctatcgagatcaaccgccagtcgtacatggctctgcgctcggccctggagctggaactgctcgatgccggtatcgactcgcctgagctgctgagccggcttatgcgccacgtgcttgcaaccgaatccgcgacccgtaccgagtcgcaaaccgttcgccgggccttcgttacggcccgtagaaacccgctgctgggcgcaatccctcagcacagtccagggcgcacaaatcgcccgtatatccgcaagaggaaaccctaa

SEQ ID NO: 329409 - DNA, 309 bp, Pseudomonas aeruginosa
atgcccttcgtctatctcggcctgactcgtgacgccggaacctcgaaaaagactggcaacgcctacgacatttcggtcgttcacttcgctgtcgatgccacgcaatcgactcgccccgatcgcaagttttccctcggcctggagcctcaaaacctgccgatcgcgccggaagccgtgagccaattccagcgcgttgagccgctgtcgtcggtgaacttcgagttcgagccggaccctcggaacatgcagcgcaaccgtatttgcggcgtgaaaccgctgccgaaagctgccactcaggcggcttcgtga

SEQ ID NO: 329410 - DNA, 207 bp, Pseudomonas aeruginosa
atgcaaaagatgaaacaactgatggttcgtggcggtgtcgttcttggctcgctgggtctgctggctggtcaggcgatggcggaagttccggctgatgctactgcggcgctggccgatgctaaggccgatggtgttgccattggcggcgtcgtcctgggcgtgatcatcgcgattgcggcgttcaagtacattcgccgcgcactctaa

SEQ ID NO: 329411 - DNA, 1455 bp, Pseudomonas aeruginosa
atgcgtagtttattgcttgtcgctcttttgcttttgtccggcaatgtgagcgccgaagatttttattggagaattgcttatccggacgggcaggccaagcataagagcgctgaggctgcgtgtcaggcgaataatgattattacaagagtgactatggctctggttattctcgtattgaggttaggaataagccgatagatgaaactcactggagctgttatgtctatgcgtacaagctcaactctaaaggcgtggaatatcttgcgggtcagcgtggaaataacgctactcgttacggcacggaatgcccggctggtactgaatatgattcctctataggtggttgcaaacagaatgaggatgaaaagtgcaaggaaactttcggtaaggaaataactacagattttcaggttggcgctgtaaaggatggtcattttactaatcctaagtcccctccggcctctctttgccaggattcttgcctatatacgtctccggcaactacgggctctggaaatggctatcgcttgggtcagaacttcgaagtttttgttaagtactcataccttggcaatggttcgtcttgtgagcagggcgaaacgcctaatcctccatctgatcgctcgcccagtggttcaactgatgagaactgcaagccggtggaggatgctgagggtcgtaagaaaatgagctgtcttaagacggatagttatcagaatcctggcaatttgaactgtggtatggctaacggtcagcttgtttgcgtgcctgggaagccttcgccgaataagaacgacacaactacaaagactgatattacggagacgacaaatcctgatggctccaaggacactacgacaaccactgaaactacggtcacgacgtgttctggcatgaactcttgcaatacgaccactaccaccagtacgaccaacaataagacgaactctgatggtacggacggcggaagctcgacggagtgtaaggggccaggctgtaagccatcaggggagggcgctggtggcgactctgagggcgaagagaaagaggaggagaaagagtcaaaggtttcgggcgatgaatcgtgcgatgcggtgattgcgtgcgagggcgatgcgattcagtgcgcgatgcttaagcaagaaaagaaacagacgtgcgcctgggactatgaaaaggccaaggggataatcgagtctgagattgccaagcctgagtatcagttaactgagacaaccattaatacaggtgagctattcaatgccggtattagtgcaagccgctggttgccgtccgcttgccctgcgccgaaagttatctcgctgagttccggtcctagccagacgtttagctgggagcctgagtgtcaaatggcctcgtcgttagcgccgattattgttggtctggcgtcgttgttcttcgcggtttatgtcggacgttctataggaggttga

SEQ ID NO: 329412 - DNA, 315 bp, Pseudomonas aeruginosa
atgccactgttcgtagcgctgttttcgtttctgagttctgtcgcgggtccgctggtggccaaggtgcttatatcgctcggcgtcggtgctgtgacgtatgcggggattaatctgctgattagccaggtgaagacatatgccatatctcagttcggtgcggtcggtgctgatgtggctgcgattttgggcttggccaagttcgatgttgcgatgaatattatttttgctgcggtggtggccaaggctgttatctcgggcatggataaggccagtggcagcattaccaagattggcagtgtcgggaaaggtagttaa

SEQ ID NO: 329413 - DNA, 1188 bp, Pseudomonas aeruginosa
atgtttgttctccgcaccggtttgcagggtaatagtaagactctcaatacaattaaagaggtcgacaataaagccgcgaaagaggggaggacggtctactatcacaatattcgtgagttcaaggcggatcatccggcgatcaaggcggtatgggtcgagttcgacaatccgcaagagtggttcaagcttccgcccaacgccattatcgtgatcgatgaagcgcagtcgttctttcgtgtgcgcccgcagggttccaaggttcctgagtatgccagcgccatggagacgatgcggaattctgggcatgaggtgcatgcgattacgcaaagcccgatgttgatcgatgcgcatatgcgcgaactctgtaactgccatatccattatcaccggggtaacggtggaaaaatcgttaagcggtgggagtttcagaaagttcagacggacgtgaataagaagtatgacttcgcggatggtgaatcgacccggatcaccatcgataagacgtacttcggctgttataagtccgttgcggatggggctgagcatcacttcaagttcaagccgcctcgggcgttgttcgtgcttgtcggtgcagccctggttatcggttatcttggctatggcgtctatgagcgtcgtatggcgacgcatgagcctgcccaatccgttcctgcggtttcttcgtcgagcgttgcgcctgcggcctctgcgggcgttcctgatgtcgatcaggtgcgtcacgtgactgccggtgagtatctggcgatgcgcaagcctcgggtgcctgatgtgcccagctcggcgccgatctatgacgaactgacgcggccggtggcgtatccgaagccgttctgtctgtcgtcacgtgatgagttcctggtgcagaagaatcgcaagcgcatggtgaccgggtatcgtgatggccggttgtatggatgccgttgcaacagccagcaaggcacgcgcctggatatctcgttcgaggcctgtatggcgtacgtcgagcacggtgcgttcgatccggcaattcctgaccgcgtacctgcggctgtcggcgtggccgggccgggcgaggcacgagccggtacggcggcgccgatggctgcgaactcgtcgacggttgcgccggagagtgctggcacccgcgtgactgtggtgaattctggcaagcctgggctgctgtggtga

SEQ ID NO: 329414 - DNA, 495 bp, Pseudomonas aeruginosa; identical to SEQ ID NO: 329404

SEQ ID NO: 329415 - DNA, 207 bp, Pseudomonas aeruginosa; identical to SEQ ID NO: 329405

SEQ ID NO: 329416 - DNA, 1125 bp, Pseudomonas aeruginosa; identical to SEQ ID NO: 329406

SEQ ID NO: 329417 - DNA, 249 bp, Pseudomonas aeruginosa; identical to SEQ ID NO: 329407

SEQ ID NO: 329418 - DNA, 264 bp, Pseudomonas aeruginosa; identical to SEQ ID NO: 329408

SEQ ID NO: 329419 - DNA, 309 bp, Pseudomonas aeruginosa; identical to SEQ ID NO: 329409

SEQ ID NO: 329420 - DNA, 207 bp, Pseudomonas aeruginosa; identical to SEQ ID NO: 329410

SEQ ID NO: 329421 - DNA, 1455 bp, Pseudomonas aeruginosa; identical to SEQ ID NO: 329411

SEQ ID NO: 329422 - DNA, 315 bp, Pseudomonas aeruginosa; identical to SEQ ID NO: 329412

SEQ ID NO: 329423 - DNA, 1188 bp, Pseudomonas aeruginosa
atgtttgttctccgcaccggtttgcagggtaatagtaagactctcaatacaattaaagaggtcgacaataaagccgcgaaagaggggaggacggtctactatcacaatattcgtgagttcaaggcggatcatccggcgatcaaggcggtatgggtcgagttcgacaatccgcaagagtggttcaagcttccgcccaacgccattatcgtgatcgatgaagcgcagtcgttctttcgtgtgcgcccgcagggttccaaggttcctgagtatgccagcgccctggagacgatgcggcattctgggcatgaggtgcatgcgattacgcaaagcccgatgttgatcgatgcgcatatgcgcgaactctgtaactgccatatccattatcaccggggtaacggtggaaaaatcgttaagcggtgggagtttcagaaagttcagacggacgtgaataagaagtatgacttcgcggatggtgaatcgacccggatcaccatcgataagacgtacttcggctgttataagtccgttgcggatggggctgagcatcacttcaagttcaagccgcctcgggcgttgttcgtgcttgtcggtgcagccctggttatcggttatcttggctatggcgtctatgagcgtcgtatggcgacgcatgagcctgcccaatccgttcctgcggtttcttcgtcgagcgttgcgcctgcggcctctgcgggcgttcctgatgtcgatcaggtgcgtcacgtgactgccggtgagtatctggcgatgcgcaagcctcgggtgcctgatgtgcccagctcggcgccgatctatgacgaactgacgcggccggtggcgtatccgaagccgttctgtctgtcgtcacgtgatgagttcctggtgcagaagaatcgcaagcgcatggtgaccgggtatcgtgatggccggttgtatggatgccgttgcaacagccagcaaggcacgcgcctggatatctcgttcgaggcctgtatggcgtacgtcgagcacggtgcgttcgatccggcaattcctgaccgcgtacctgcggctgtcggcgtggccgggccgggcgaggcacgagccggtacggcggcgccgatggctgcgaactcgtcgacggttgcgccggagagtgctggcacccgcgtgactgtggtgaattctggcaagcctgggctgctgtggtga

SEQ ID NO: 329424 - DNA, 1050 bp, Pseudomonas aeruginosa
atggacaaggcaggcctgcacatcggtgccatcgccttcattcaccgattcggctccagcctcaatgaacacgtccacttccacgtttgtgtggtggacggggtgtttgaggaagtggagggcgagggcgatgctgatgcgacccctcgaatctcatcgccgggtgtcatctttcacgcggccaccggcatcgatgcggctaccgtggccccagtgcagaccacactgcaaaaacgcatcctgcgcgccttcgttgctcggggcctgctggagaactgtgacgccaaagacatgctgggctacaaacacagcggcttctcggtggacgccggtgtctgcatcgaagcccacgaccgcgctgcgctggagcggctgctgcgctattgcgcgcgtccaccgttttccatggagcgcctacgcaaagagggaagcaaactggtgtaccgctgtgccaaacagcgcagcgagcccacccgtgacaagcgtggtgccaaggcagatgagctgcacctcacaccgctggaactgatcgaccgcatcgccgcgctggtgccaccgccacgcacccaccggcaccgctattttggcgtgttggcacccaactcaccgctcagggctgcggtgacggcgctggcgacaccggcgcaagccgctcccgtgctgggcgcgtcgatcagcacgggggagtgcgcgcctggtgtggtaccgatgagcagcgcgctgccatcccagagcgagccggtgctgcccaagcgtgcagcgcactacctgtgggcggtgctgatcgcccgcatctacgaggtgttccccctcttgtgtccgctgtgtggcgggcagatgcgcatcattgccttcatcacccacagcgccgaaatccgccacatcctgaaccacatcggggtggagtctgcccccccgcacatcaccccggcacgcgggccaccgctgtgggagggctgcgacgcgccggtggatgatggtgcgcaaggcgagccggattgggatctggcagctcaacccgacgaggtagaccagcgcgtcaattggtga

SEQ ID NO: 329425 - DNA, 738 bp, Pseudomonas aeruginosa
atggggccctttgctgatcgctactttcggggcctgttgcacgcgcaggtgaccgtgctgcacaagccgggcgtacaccctgcagacaccacgccagcggccgattgccccgcgcgctttgtgcaggccgaccacctttctgcatgggcccaccacgcgcgcgccgcgctgaaacagctcaccacgacgcaaggtcacagccataccgacgtgccatggctgctggtgggtatttcggaaggggtggaactgctgccttccctggcagccagcacaggtcctgggctggcgggcctggtgatgatggcgggcagtgggctggacccgcgtgatgccggccagatgcaggccgagcgcctcgggcatgcagcagactgggctgcgctgggccgtgcccaggccgggcctggtgcggacacgcaggtggtgcaggggcgcagcctgcgctactggcgcgacctgtggcagtggcctgtgcaacaacccttgctgcagggcccatggcccgtgctgcacgcctggggcgatgcagatgacatggtgccccccgccgcctacgaacaatttgcccagcatgcccaacaccgcagtgcaccctactgcgcgctgcgcctggccggtgccaaccacggcctgcaggcgggtgaagtggatggcttgcagcaggtgtgggccgccttggagggatggggacgaacaccccagcgcgggctttgcgctagcgtgacctttcgttga

SEQ ID NO: 329426 - DNA, 318 bp, Pseudomonas aeruginosa
atgatcgccttttcccgcccgcttctggttgccgccggcctggcgctgctgcccgctgccgccttcgccgccgatccggcaaccgccacgctgacgctgacggccgacggcgtggtcagcgccgcgccggacaccgccatcgtgtcgctgggcgtcgtgcaggaagcggacaccgccgacaaggcgctcaccgccaacaacgccgccatgcagaagacgctcgccgccctgaaagaggccggcgtcgccgacaaggacatcgccacctcctcgtttgccatcgacccggtgatggtctacccgccgcagaaggattaa

SEQ ID NO: 329427 - DNA, 423 bp, Pseudomonas aeruginosa
atggtccggtcatgtccgccgttcgccacggcgccgatgatggagaccgccttgctgaccaccgacgccatctggtcgagccgcctcgccgcctatcccgaccgcctcgacggaccggaccttgccggccgcacggcggacgtgcccacccacgtcgaactgttcggccgggccggcgtgctgatcggcggcatcgactgcaccgtcaccctggagcacgacggcgacgactgggagatcgcggccgtcgcctaccggtcggagttcggcggcgccggccacgacttcgacgcggcgtgcctcagagcccgtgcccccgacggcacgctggccgacctcgtcgagcgggaaatcctccgcctcgtcgatgccgagtacaacgccctcgccgacgccgcgacggccgaggcgcgcgccggctga

SEQ ID NO: 329428 - DNA, 801 bp, Pseudomonas aeruginosa
atgcacaccgaggcgacactcgccgccgatctccgccggctgggcatccggccgggcgacctcgtcatggtccatgcctcgctgaaggcgatcggtccggtggatgggggcgccagagcggtggtggatgcgctgcgcgccgccgttgggccggagggcacgctgatgggctatgcctcgtgggaccgatcgccctatgaggagacgctgaacggcgccgtcctcgacgacgaactgcggcggacctggccgctcttcgatccggccaccgccggcacctatcgcggtttcggcctgctcaatcggttcctcgtggaaacgcccggcgcccggcgcagcgcccatcccgacgcttccatggtggcggtggggccgctggccgcgaggctaaccgagccgcatcggctcggcgaggcgctggggaaaggctcgccgctcgaacgcttcgtggaggagggcggccgggtgctgcttctcggggcgccgctcgattcggtcaccgtgctgcattacgccgaggcgatcgccgacattcctggcaagcgccgcgtcacctacgagatgccgatgtcaggccccgacgggcaggtcgtctggcagcgggctgaggatttcgattccaacggcattctcgaccgcttcgccatcgaggggcagcccgacgccgtcgagacgatcgccaccgcctatgtggcgctggggcggcaccgcgaggggccggtggggtcggcgcaatgtcgcctcatcgaggcacgggacatcgtcgctttcggcgtcgcctatctggaggcgctggattga

SEQ ID NO: 329429 - DNA, 351 bp, Pseudomonas aeruginosa
atgccgactttgcatcaggctcccgagatcgtgcttggcttcgacgtctccaaggacacgctgaccgtcgtcgaggctcgctcctcatcgtcttcttcgaagccctgcgtcatcgacaataccgccgtcgccatccgccgctttctcaaaagtatcgggcggatcgaccttgccgtctgcgagccgaccggtggtcatgagcatgtcctgctggtcgaactgatggccgccggcattgcctgccatcgagtggatgccttgaaggtaaaggcttttatccgttccttcgggaccctggccaagaccgatgcccgcgatgccaaggcgctggcccaatatggaaacggatag

SEQ ID NO: 329430 - DNA, 1050 bp, Pseudomonas aeruginosa; identical to SEQ ID NO: 329424

SEQ ID NO: 329431 - DNA, 738 bp, Pseudomonas aeruginosa; identical to SEQ ID NO: 329425

SEQ ID NO: 329432 - DNA, 807 bp, Pseudomonas aeruginosa
atgacggtcggtaccgtctggtttgtgggcgcgggcccgggcgatccggagctcatcaccgtcaagggccgctccctgattgagcaggcgggagccatcctgtttgcaggttcgctggtcaatgaggccgtgacccgctgggcaccgcccggctgcaccattgccgacagcaaggacatgacgctggagcagatggccgcatggctcatcgcccaggcgcagcagcacgccgtggtcatccgcctgcagacgggtgaccctgcgctgtatggcgcgctgattgaagtggtgcagccgctcgatgccgccggggtgcccgtgcgggtggtgcctggcgtgtcctcggccatggcctcggccgctgcggcggtggagagcttcacactgcccgaagtcacgcagagcgtgatcttcacccgcgtggaaggccgcacgtccatgcccgaaggcgagtcgctggccgagctggcgcgccaccactgcacgctgtgcatcttcctgtccatcaccctgctgcacaaggtgcaggagcaactgcgcgccgcgggctgggctgatgacgcccccatgctggtggtgcacaaggccagctggccgggtgaggaactcatcatccgcggcacgctggccgacatccgccagcgctgccgcgacgccaaggtggtcagccaggccatggtgattgccagccccaacctgggtgcgcgccactggcccacgctggccaagtccaagctgtacgacgccagcttcacccaccgctttcgcaaggccagtgtgcctgccacgcccacggagacttcctga

SEQ ID NO: 329433 - DNA, 921 bp, Pseudomonas aeruginosa
atgcaaaccccagccacgcccttcggtacacaccacggcgcacgccacgaagacaccattctgctcatcggccacggctcgcgcgagcccgagggcaacgacgaaatccaccgctttgtagcccagtggcgtgcgcgccagcccggctggaatatcgaggtgtgcttcatcgagtttgcgccccccagcctgcacgacggcttgctgcacgccgcgcgcaatgcccgccgcgtgctggtgctgccgctcatcttgaacgcggcaggccacgtgaagatggagattcccgaggccattgagcatgcccgcgaacactgccccgccaccgaatttctgtatggcccgcacctcaccgcatgcgaccccatcctggatgtgctgcgccgcaacctgcgcaagtgcatgagcgagctggacatgcccgaccccaccaccaccggcgtggtgttgctggggcgtggctcgtcagaccgccaggccaatggcgatgtcgccaagatggcccgctggctgatggaggagacggaccacgaactggtggacctggccttcaccggcatcacctggccgcgcctggagcgtgccgtgcagcggcaggtgatgctgggcatgaagcaggtggtggtgttgccgtactacctgttcaccggcacgctcatgcagcgcattgcccgccaggtggaccacctgcgccagcagtacccgcaggtgcggtttgcccagtcctcgtacttcggttttgaaaaagaaatctttgccctgctggagcagcgcgtggccgacctgcgcgcgggcgtgcccgacgccgtaccgcgagattgcccacgacctgggccacgggcacagccacgaacatacccatgtccacgcaccggccacagaggcggtggtgcatatgcacggccatgggcctgcgcatga

SEQ ID NO: 329434 - DNA, 642 bp, Pseudomonas aeruginosa
atgagcaccattaacaccgtcaccgaacagctcacgcgtgcgggccaggccatcgagcacgacagctttgccatcattgacgcagaggtccaggcacacagctacaccgcagagcagtggcccatcgtgcgccgcatgatccacgcgaatgcggacttcgacttcaacggtctcacggactttcacccgcaggccgtgcacgctggcatcaccgccatgctgcgcggcggcactccggtggtggccgatgtggagatgatctgctcaggcctgtccattccacgcctggcgcactttggcatgcacactcaccaattcatctcggaggcggatgtgattgagcaagccaagcaggaagacaccacgcgtgccgtgcaggccatgcgcaaggcccaccgcctgggcttgctgcaaggggccattgtgggcattggcaacgcacccacggcactcattgagctggcccgcttgattgctgaggagggtgtgcgtccagcactggtcgtgggcatgccagtgggctttgtgtctgccggacgaagtcaatggacgccgggtcgaacgcgaacggctcgtggttgcgtgctgctgctatacgcccaccttgaaccatgccgcaatcgaccaggaagcggacattag

SEQ ID NO: 329435 - DNA, 204 bp, Pseudomonas aeruginosa
atgcaaatcaacgttggaagtgtcgaccgcattgtccgcatcgtcctcgggctgattctgctcagcctgccgttgtggctggactcaccctggcgctggctggggctcatcggaatcatgcccctcgtcaccggcctggccggtcgctgtcctggctatcgcctgctcggcctcagcacttgcccgatgcgaaaacccgagtga

SEQ ID NO: 329436 - DNA, 345 bp, Pseudomonas aeruginosa
gtgctgacggcgctgggcgacgccgagcgcgccctgggcgactaccacggcggactggacacgcttgagcgccgtggcatgtcactggatgccgcacgcaccagctacggccacgccaaagctcgctacgccgcgggcgacatcgccctggtcgagctgctggccgcccagcgcagcctgcacgaggccgaaaccgcagccgcacgcgcgcataccaacgccgccgtgcaattggtggcgctctacaaggcccttggcggtggctgggacacatccaccgcgccatcaaccgcaatccatccgccgcggggcgctgccgcccccgtcgcgttttcaagccgctga

SEQ ID NO: 329437 - DNA, 1680 bp, Pseudomonas aeruginosa; identical to SEQ ID NO: 10332

SEQ ID NO: 329438 - DNA, 993 bp, Pseudomonas aeruginosa; identical to SEQ ID NO: 96021

SEQ ID NO: 329439 - DNA, 501 bp, Pseudomonas aeruginosa; identical to SEQ ID NO: 83644

SEQ ID NO: 329440 - DNA, 840 bp, Pseudomonas aeruginosa; identical to SEQ ID NO: 6027

SEQ ID NO: 329441 - DNA, 204 bp, Pseudomonas aeruginosa
atgcacgacgatggtaacttccaaggcgcggagagcttcactttggccaggggaggcagaaatttccaagagatctacgaccagggcttgtcggacagtctcatcgagccgtgcagccacagtaaccagcaaatcaatatcactgtatggcttcaggccaccgtccagtgcagagccgtacaaatgcacggccagcaacgttga

SEQ ID NO: 329442 - DNA, 1014 bp, Pseudomonas aeruginosa; identical to SEQ ID NO: 29928

SEQ ID NO: 329443 - DNA, 402 bp, Pseudomonas aeruginosa
gtgctggggctgcgttggcgcctgtttgacttcggccgcatcgatgcccagatcgacctggccaaagggcaggaagccgagcaactggcggcttaccgcctcgccgtgctgcgcgccaccgaggacgtggaaaacgccttctcggcactggtcaagcgtgagcagcaggccaacgtgcttgagcagggcgtggattcgctcagccgcgcgcggcaggcatcgttcgaggcctaccagcagggcgtcgtcagcttgatcgaagtgctgcaggccgacgacaacctgctgcgcgccgccgatgcccgagcccaggcgcaaaccgagtcggcccgcactggcgttgcggcattcaaagcgttgggcggtggctggaaggtgcccgaggcgcttgcggccaagtga

SEQ ID NO: 329444 - DNA, 777 bp, Pseudomonas aeruginosa
atgcaggctaccattggcggcgatacgccccttggaactgttcgcctcatcggctaccagcttcaggccgcgttcagcgatcagtgtgccagcgtcgttttccaggcgggtcacaccgatatcgatggcgcccttgctgccgatggagccactacggttgtccaggacgaatgcctggatatccagacctccggcaccggagacaatccccgcgaggctgttgtccagggcctgcgcgatacgcaaggtcagggctccaccgctgagcaggcgtccaccctggttgttcaacgcggaggtggcaagagtgaacgcgcggtcgctggagatttccccaccgctgttgtccaccacgccgagttggcgcaggagcaaggtgccaggcgtggcgatcaggccttgagcgcgattgaccaggcttcccgtgttcagatcgagcgtgatgccggtatcgctgaccaggttgcccctgtcatgctggtccagcccttggagatccgcatcgatcgcacccttcgcggcgatccggcccgcctggctgttgtctacccgagcggcgaccagggtgagtcccgcatcgctgccgatactggctttccggctgttgttcaggttgccggtacgaatctccacggcccccttgccactgatcgcaccggcctggctgttgtcgaggctggcgctgctcaagctaagtccggcgtcgctcgccagtctgccgccctgattgttcagggcgccctggctggtcactgccaatgcccctgcgctggatag

SEQ ID NO: 329445 - DNA, 1404 bp, Pseudomonas aeruginosa; identical to SEQ ID NO: 328177

SEQ ID NO: 329446 - DNA, 810 bp, Pseudomonas aeruginosa
atggtcatcgtttgctgcgtttttacacggtctggcccgaacccggaccgtgccggtcccgcggtcggcggcattggcgaggaaatcgaggcgactgcttcgtccataggactcgtcggtgagcaacgccaccttgaccctgggggcctgctcgccttccctgccgcgggtcggcgccagggcctgcaggtaggtgcgctcgtcgacatcgaagtacacgtacagcggatcgaccgagacgatgctggtcagcgcggtgacgccattggtgacgtagttgccctcggtgacctggatatgcccgacacgcccgccgatcggtgccgtcacccgcgtgaagccgagatccagttgcgccgcgtcgagggcggccctggccgcatcgacctgggccttgctggcattgcgcgaggcgatggcgctgtcgagccgctcccgggcgacgaccttccgcgcatacagcagctcggctcgctcgtgttcggtgcgcgccagcaacgccgcggcctcggcctcgcgcaggcgcgccctggcggcatcctgcgccgccttgaacacgcgcgggtcgatgaggaacagttgctggcccttctctaccaggcggccttccggcaccgtaacgtcctggatgtagccagcgacgcgcggccgcagttctacctgctcgacagcggtcagcgagccggtgaactcggcgtagggtgtcaccgggcgaaccaccacctcggctacgggaacgcttggcggggcgctcgccgctcccggcggcgccgattccccgcagccagcgataagggccgcgacacctag

SEQ ID NO: 329447 - DNA, 867 bp, Pseudomonas aeruginosa
atgtcagcctctcgcgataccttcagcctgcccgtcgtaacccgctcgactccagcgcaagagattgcactgctgagcgaccaggcaggtgcggtgatcatccgcaacttcatgacccccgaacaagtcgcacggatcaacaacgaactggacgctcccctggccgcgctcgaggctggctccaagcaccagcacgagctgatcgccgagttccatggccgccagaccaaacggctcaccaacctcgtcacccacagcaagacctttcgcgaggagatcctcgatgacgacctctttcacgacctggggaacgtgctctacgccgcggagtgcggtgactggtggctgaccacggcccagttgatcgagatcggcccaggcaacaaagcgcaaatgctgcaccgcgacatggcgcagtaccaaccgttcgtggccatgaataaacatgcgccgcgcaccatcaccaacctgatgctggcgctgaccgatttcaccgaggaaaacggtgccacgcgcttgatccccgggagccaggactgggatgacttcgacgatgtaggaaccccagaaatgacgatccctgccctgttgaaagcaggagatgccgtgctgttcggcgggaaagtcgttcatggcggcggggccaacgtgaccgctgacttctaccgtcgcgggctgaccatcccgatgcaggcttcgatcatcacgcctgaagaggcctacccgttgatcgtgccgctcgaactggtcagaacgcttgctccgcgcgttcagaagatcctcggcttccgctcccagtaccccaatggcagcccaggcctgtggcaacataactacgcagacctggccgactatctccagctctag

SEQ ID NO: 329448 - DNA, 561 bp, Pseudomonas aeruginosa; identical to SEQ ID NO: 328154

SEQ ID NO: 329449 - DNA, 1431 bp, Pseudomonas aeruginosa
atgaagcgctttatccagggagagcaccgagggcaaagcacactgcttcccgagagcttggatgactacgtggcggacaccaacccggtgcgggtggtcgatgttttcgtcgatgaactcgaccttggcctactgggtttcgagggtgtcgtcccggcggaaaccggcagacccgcctaccatcctgctgacctgctgaagatctacatctacggttacctcaaccgtatccagtccagtcgacgtctcgaacgcgagagtcagcgcaacgttgagttgatgtggctgaccggacgtttgatgccggacttcaagaccatcgccaacttccgcaaggataacggcaaggcaatccgcggcgtctgtcggcagttcgtggtgctgtgccagcaacttggcctgttctctgaagcgctggtagccattgatggcagcaagttcaaggcggtcaacaaccgtgaccgcaatttcaccagcgccaagcttcagcggcgaatggaggagatcgagtccagcatcaaccgttacctgaccgcactggataccgctgatcgccaggaaccggccgtggcgcaggtcaaagccgaacgcctccacgacaagattgcgaccttgaaaactaagctgcgggagctcaaggaagtcgaggtacagctcaacgaaacaccggataaacagatctccctgaccgatcccgatgcccgctcaatgaagacccggggcagcggaatagtcggctacaacgtgcaggcggcggtcgacgcgaagcaccacctgatcgtgacccacgaggtcacgaacgacggggtcgatcgagaccaactgagctccatggccaagcaagcgcgagaggccatgggtgtcgaggaactctcggcggtcgcagacagagggtatttcaaaggcgaagaaatcctggcgtgccatgaggctggaatcaccgttttcgtgcccaagacgctgacctcgggagcgacagcggctggtcgcttcggcaaaggtgatttcatctatgacgcagccaagaacgagtatcgatgcccggctgggcaaagcctgatctggcggttctcaagcgtcgaaaaagggctgaaactgcaccgctactggagttcgcattgccagggttgtgcgttgaaagagcactgtacgcctagctcagagcgccgagtgagccgatgggagcatgaggcagtgctcgaagcgatgcagagtcgcctggatcaagcgcctgaaatgatgcgaatccgccgtcagacggtcgagcacccgttcggcacgctgaagagctggatgggcgccacccacttcctcaccaagactctcgaccgagtgagtaccgagatgagcctgcatgtgctcgcctacaatctcaaacgcgtgttgaacgtgctgggcagcggtgccctgatggcagcgatgaaggcctga

SEQ ID NO: 329450 - DNA, 255 bp, Pseudomonas aeruginosa
gtggtcgccgccagcacgcagttcttcctgcaggccggctcgttccgcaagcagtccgacgccgaccgcgtgcgcgcgcagatcatcctgctcgggcagtcggtgaacgtcgaggccggcaacgtccgcgacgagacctggtaccgggtgatggtcggccccttcaacagccgcgaccagttgtcccaggcgcagaagacactgtcctccaacggcttcagcaacctgctgttacagcaacgcaaggcccgctga

SEQ ID NO: 329451 - DNA, 246 bp, Pseudomonas aeruginosa; identical to SEQ ID NO: 199455

SEQ ID NO: 329452 - DNA, 1281 bp, Pseudomonas aeruginosa; identical to SEQ ID NO: 247974

SEQ ID NO: 329453 - DNA, 993 bp, Pseudomonas aeruginosa; identical to SEQ ID NO: 247975

SEQ ID NO: 329454 - DNA, 705 bp, Pseudomonas aeruginosa; identical to SEQ ID NO: 199452

SEQ ID NO: 329455 - DNA, 558 bp, Pseudomonas aeruginosa; identical to SEQ ID NO: 199428

SEQ ID NO: 329456 - DNA, 264 bp, Pseudomonas aeruginosa; identical to SEQ ID NO: 248004

SEQ ID NO: 329457 - DNA, 639 bp, Pseudomonas aeruginosa; identical to SEQ ID NO: 248005

SEQ ID NO: 329458 - DNA, 285 bp, Pseudomonas aeruginosa; identical to SEQ ID NO: 117491

SEQ ID NO: 329459 - DNA, 771 bp, Pseudomonas aeruginosa; identical to SEQ ID NO: 117490

SEQ ID NO: 329460 - DNA, 318 bp, Pseudomonas aeruginosa; identical to SEQ ID NO: 117489

SEQ ID NO: 329461 - DNA, 237 bp, Pseudomonas aeruginosa
ttgagccaggaagcgttctccaacgtgtccagtcgcacctacatgagcacgctggagcgcgacctgaaaagcccaaccatccagaagctggccgatctgtgcgaggtcatggaagtgcatccgctcacgctgctcacattggcttatgccggtgacagcacccgcgaagctgatgaattgctggcacaggtgcgccaggaactcagggcgatattggaagagcccgacacgccttag

SEQ ID NO: 329462 - DNA, 315 bp, Pseudomonas aeruginosa; identical to SEQ ID NO: 117487

SEQ ID NO: 329463 - DNA, 210 bp, Pseudomonas aeruginosa; identical to SEQ ID NO: 199648

SEQ ID NO: 329464 - DNA, 2070 bp, Pseudomonas aeruginosa; identical to SEQ ID NO: 248013

SEQ ID NO: 329465 - DNA, 828 bp, Pseudomonas aeruginosa; identical to SEQ ID NO: 117483

SEQ ID NO: 329466 - DNA, 2304 bp, Pseudomonas aeruginosa; identical to SEQ ID NO: 117482

SEQ ID NO: 329467 - DNA, 510 bp, Pseudomonas aeruginosa; identical to SEQ ID NO: 117481

SEQ ID NO: 329468 - DNA, 1200 bp, Pseudomonas aeruginosa; identical to SEQ ID NO: 117479

SEQ ID NO: 329469 - DNA, 204 bp, Pseudomonas aeruginosa
gtggacgacgactactacagccagccggctgcgctgttccatctgttcaccgacgagcagaagcagcggttgttcgccaacatcgccgaagacattcgcgatgtcccggaacagatccagcggcgccagatcggcctgttccttaaggtcgattcagagtacgggaaaggtgttgccgatgcgcttagtgttaaaaggaagtag

SEQ ID NO: 329470 - DNA, 1560 bp, Pseudomonas aeruginosa
atgcgtatcaaagtgcactgccagaaccgtgtaggcatcctccgcgacatcctcaacctgctggtcgactatggcatcaacgtcaatcgcggcgaagtcggcggcgaccagggcaacgccatctacctgctctgtccgaacatgatcaacctccagttgcagtcgctgcggcccaagctggaggcggtgccgggggtcttcggggtcaagcgcgtcggcctgatgcccagcgagcgccggcacctggaactcaacgcgctgctcgccgccctggacttcccggtgctctcggtggacatgggcgggcagatcgtcgccgccaaccgtgccgccgcgcagttgctcggcgtgcgcgtcgacgaggtgccggggattccgctgtcgcgctatgtcgaggacctcgacctgcccgaactggtgcgcgccaacaaggcgcggatcaacgggctgcgggtcaaggtgaagggcgacgtgttcctcgccgacatcgcgccgctgcaatccgagcacgacgagagcgaggcactggctggagcggtgctgaccctgcatcgcgcggatcgcgtcggcgagcgcatctaccatgtgcgcaagcaggagctgcgtggcttcgacagtatcttccagagttcgcgggtaatggccgcggtggtccgcgaggcgcggcgcatggcgccgctggacgcgccgctgctgatcgagggcgagaccggcaccggcaaggagctgctggcgcgcgcctgccacctggccagcccgcgcgggcagtcgccgttcatggcgttgaactgcgccggcctgccggaatccatggccgagaccgagctgttcggctatggtccgggagccttcgagggcgcccgtccggaaggcaagctcggcctgctggagcttaccgccggcggcacgctgttcctcgacggcgtcggcgagatgagcccgcgcctgcaggccaagctgttgcgcttcctgcaggacggctgtttccgccgggtcggcagcgacgaggaggtgtacctggacgtgcgggtgatctgcgccacccaggtagacctgtccgaactctgcgccaagggcgaattccgccaggacctctatcaccgtctcaatgtgctctcgctgcacatcccgccgctgcgcgagtgcctggatggcctggcgccgctcgccgagcatttcctcgaccaggccagccggcagatcggctgcggcctgccgaagctttccgcgcaggcgctggaacgtctcgaacgctaccactggccgggcaacgtgcggcaattggaaaacgtgctgttccaggcggtttcgctgtgcgaagggggaacggtcaaggccgagcacatccgcctgccggactacggcgcaccgcagccgctgggggatttttccctggaaggagacctcgacgccatcgtcgggcgcttcgagaaggcggtgctggagcgcctgttccgcgagcatccgagcagccgccagttgggcaagcgcctcggcgtttcgcataccacggcggcgaacaagctgcgccagcatggcgtggggcaaggcgagggctga

SEQ ID NO: 329471 - DNA, 1206 bp, Pseudomonas aeruginosa
atgggaaagctgacgagcaagacggtggagtccctggtcaaggccgcggcaccagggaaaaccaatgatggcgatggactgtatttccaggtttccaagaccggtgggacaagctggatcttccgctacaagctggaggggcgcagccgcgaaatgggtctcggcccctatccaaccgtaacgctcagcgaagctcgtcaactggcagcagaccaacgaaagactctcgcatctggcgccgacccactggcgacacgcgacgccgccagggaagcgaaacgcgaagccgaacgccaggcgacgggacgccgcacgacgttcgaggatctcgctcgtgattaccagcaggcgcatggaagcaactggtccgataggtggcgtaaaggctggctgcgcaagcttgagctctatgccttccccatcatgggaaaactgtcggccgagatcatccaaaccgaacacgtgctgaacgtgctgcgcccgatctgggcaaccaagactcgtactgcagatgaggtccgcggccagatcgagcagatattggacgcggccaaggctcgccgcttacgtgaaggcgacaatcccgctcgctggcgcggtcacctggataatctcctcagcaaagctgagaagaggaaggcccggcggcgccaacactttcctgccatgcgctggcaggagctaccggagttgatggccaagctggctcagcatcattcgagggatgcaaccgctgcccgactgctcattctgaccggcgcccgatcccacatgatccagttcgcacaatgggccgagttcgatcttgcagcgggattatgggcgcttccagccgagcgcatgaagatgcggaaacccttcatcattccccttccccttcaggtagtggagatgctggaaaccgtgcctcgcgccaactcaccccacctgttccctgggcaaggcaaaagcggcgtgatgcacaccaacgcgatacgcaacctactacataagcttggacacaccgacattacccggcacggcttccgctcgacgttccgcgactgggccaacgagtgcacccactatccgcgggaggtatgcgaactcgcactggcccacgacgagcgcgaccagaccgaggcggcctactcgcgttcggacttcctagagaagcgcagagcactgatggaggaatgggctgcgttctgcacgagtcagcaataa

SEQ ID NO: 329472 - DNA, 480 bp, Pseudomonas aeruginosa
atgcaggtgtttgatgcatcctccatgatctacgcatgggacaactaccccatcgagcagtttccggggctctggcgatggatggcggatcgtgtggcgcaaggtgtgatacggatgtccgaggtcgccgttgaggaagttggacacaaggtgcccgagtgcgtgacttggctgagggatgcgggcctgcaaaaggtgcccgtgaccgaggcgatcctgctggaagcctttcgcattaaaggtttgcttgagatcgaagaagacaaatacggcgccggggtcgatgaaaatgatctgtatatcatcgccaccgcaaagctgcatggctgcgagttggtcaccgatgaggcttttcaaccatctttgagcaagctgaaacgcaactggaagattcctgctgtttgcaatatggaaggcgtccaaacaccttggatcgacttcctcgactacatcaagcgttcgcaagcggtttttggctga

SEQ ID NO: 329473 - DNA, 1149 bp, Pseudomonas aeruginosa
atggaacgcatccaatcgatcaaccttgagcgcattgactggtgttgtgccgatcagggcatgacacgggatgcgcttgcccgtgagatcggcattgcgcctgctagtttcgccaaggtaatggccggcgaggtggggctgaccttcaatcagttgcgcaagctggcggcctttttcggtcgcggcactctgttttttatggagccagggccggtcaacgaggcaaaggtacactcgccacaattccgcaccctgagtaatcaaaagccggagctttcgcatcgtttgaagctgcttatcgagcgcgtggagcaccagcgcgcagtgtttcttgcactacgcgaggagctagatcagacggaggtcgtgcgcttcttgccgcccgatctggcgggcctgagtatccccgaggcggccagtcgtgttcgtgagtggttagggttagggccgcgcaacgatttcgacagttatcgtcaagctatcgaatctcgcggcttgctggtctttcgcagcaatggctacaacggaaaatggcagattgcgaaggaaagcccgattctgggtttttcgctctatgaccccgagtgcccggtaattgttgtcaagaagcaagatgcagatacgcgccagagtttcacgttgatgcatgaactggggcacttgctcgtacatcgcgcgagcgcaattgacgacgaaggtgatctgtactcggcggacggtgaagagcgggaggcgaatgcctttgccggccacctgttggtccccgaccgcttcctgttgagtatccgcgacaacgagcgtcccgttgatgtagccgaatttgatgactggctggagccgcaacgcagagcgtggggtgtgagtggtgagatgatcctgcgacgtctgatggatgccggccgcttgccaaatgcagcctatgccgcatatcggcagtggagtcagcagcgggttatacctgaaaaagagggcggcagccgcgagtaccgcaaccgcgagccccgacacattttcggggatggttacgtgcgcacggtgctcgacgccatgaacgctcgccgtatcacgctcgccaaagccagtagctatctcgacaacctgaagatatcggacctgcacaagctggagcgcttctatgcaggtgtttga

SEQ ID NO: 329474 - DNA, 330 bp, Pseudomonas aeruginosa
atgtcattgcagtgccctcgctgtcactcccccaaagtcgcttccttccatcacgccatgaaggtcggcgccgccatcggcaccgtgggcggtgttgcgcgcggcgtcagcgctgccctcgccggtggtcaggctggcgcagctatcggcgcgttcgccggccctgtcggcatcaccctcggctccgtatcgggcgccatcctcggcggactggccggcggcgtcagcggctgcgcactcggcgctcaactcggcgagtcgctcgaccgccacgtcctggcccacaacctctgtctgctctgcggtcatcgcttcaacctgccggcctga

SEQ ID NO: 329475 - DNA, 969 bp, Pseudomonas aeruginosa
atggcacatctcgtcgaaaccatggcctacgctggcgccactccgtggcacggcctgggcaatcagctcactcagaaacagcccatcgaagtctggcaacgcgcagccggcatggactggcagatcctcgaaagccccgtgcatttcaaatcggatgccgtcggccacctgggcgccatccattccttcccggaacagaaggtgctctaccgctcggacagcaaggcaccgctgtcggtggtctcgcagcgctaccacaccgtgcagccaagggaagtgctggagttttatcgcgacctcactgaggtctccggctacgagctggaaacggccggtgtgctcaagggcggccgcaagttctgggcgctggcgcgtaccgggcaaagcgcggcgctcaagggtaacgaccaggtcaacggttacctgctgctcgccacctcctgtgacggcaccctggccaccacggcaacgcctaccaccgtgcgcgtggtctgcaacaacaccctgaccatcgccctggacggtaccagccgggcgatcaaggtgccgcacaacacccgcttcgatccgaaggcggtgaagaagcaactcggcatcgccgtctcgcaatgggacgagtttatgtaccgcatgcgcgcgctggccgagcgcaaggtgcagtggcatgaggcactgggcttcttcatgaacgtgatgtgtgaaaccagcccgaccggcgcgctgccggagcaactgcccaacgagcgcgccctgcgcaaagtccaggagctgtacgaaggccgtggtcgcggtagccagctggactcggcacgcggcaccgcctggggcctgctcaacgccgtgaccgagtatgtcgaccacgagcgccgtgcgcgcagcaacgagtaccgcatggactcggcctggttcggccagggggcgcagatcaagcaacgcgccctggatgccgcgctgcagctcgccgcttaa

SEQ ID NO: 329476 - DNA, 1005 bp, Pseudomonas aeruginosa
atgaaagcaacgtcattgaacggcagcaccagcaagaaacgccctgccctgcgcctggtcagcaccaaggagttgccacgcgaggactggctgcagatccgcaagcagggcatcggcagttcggacgctgcagctgcagtgggactgaatccgtacaagtcgcagctggaactgtggttggagaagaccggtcgcgatacagggatgccgaaggccgatcctcacgatgaggaaagcccgatgtactggggcaatgtcctggagcctatcgtggcctggcattacagcaagcgcaccaagcacaaggtccggcgcatcaacgccgtgctgcagcatccggatcccgagctgccctggatgctggccaacatcgaccgcgaggtgatcggtgccgacgatgtgcagatcctcgaatgcaagaccgcgggcataaatggggcacgcctgtggaaagaaggcgtgccggagtatgtgcagttgcaagtgatgcaccagctcgccgtcaccggcaagcaggcagcggatgtcgccgtgctgctcggtggccagacgctggagatccaccgcatcgagcgggacgagcagatgatcgcgcgcctgatcgagctggaacgcaagttctggcagtacgtggagaccgatacgccaccaccagccgatggcaccgcttccgccgaagcggccctgcgctgcctctacccggaggacaacggccaggtcgtcgacttcagcagccatgccggactggccgctgccttcatcgagctcaaggccgttcgccagtcgattgccgataaggaaaagcgcgaggccgagctcaagcagatgctgcagcaggccatgggcgatgccagccgggcggagttctccagcggctacgtcagctggcgcaaggccaaggacagcatcggtctcgatgtcgctcagctgctccaggacaaaccctacctgcaggccaagtacccgctgctgaaacccggtgcgcggcgtttcctggtcggctga

SEQ ID NO: 329477 - DNA, 951 bp, Pseudomonas aeruginosa
atgctcaaagggctcgcaatcacccccccggtgctcggacgcatctccatcggcaaggtcgtcgagaagaacggcaagcgtctgccggagaaggatgatcagttcaccatcacctcccaggtacagggcaaggacggctggctgctgcacccgctcaacgacgagctgcgccagggtaaggacgacaagctgcgcagcattccggtacgtctgctgttcaacgaaccggagctgaatttccgcgccgactacaccttgttcgaccgccagtccggacgcccgttgtgcgtcggcaatggcgagacctgcaagcgcgttacccaggacggcatgcagtcgctgccctgcccttcgccggatgcctgctcgttggccaaaggcaatgcctgcaggccctacggccggctgaacgtggtcattggcgatgacgacccgctgggcagctttgtgtttcgtaccaccggcttcaacagcatccgcaccctcgccgcccggctgcactacttccaggccatctcgggcaaccgcctggcctgcctgccgctggagctgcgcctgcgcggaaagtccacccggcaaagccatggcacgccgatcttctacgtcgacctgacggtacgcggcggtatggacatggccaaggcgctactggccgccaatgagctcgatgcgcagcggcaagcagctggcttcgatcaggccgccttggatgaagcggcgcagcgtggcttcggcaatggcgccttcgaggacagcgaggaagacgctggcgccgtcgccgaggagttctaccccaccgaggaaagcccatctccagccaccagcactccccagcgctcggcgaaagccagcctggccgagaagctggacgcgcaagcccagcgccttaccccaccgacaaatcaccatcaaggagcccagcatgcgcctgcacaagctgaaggccagtga

SEQ ID NO: 329478 - DNA, 498 bp, Pseudomonas aeruginosa
atgcgcctgcacaagctgaaggccagtgaatcgaccggcacctacctggtcgagtcgccggtcaccgaaaccgacatcctgctgatggcccggcagttggcgaatctgcgtctgcgccgggggcgagcactgacttcaccaaaggaagtgttcggccacctgcaggcactgctgggcgattacgagcatgaggtattcgccctgcttctgctcgacagccggcaccgggtgatcgtctttcacgaactgttccggggcaccctggacagcgccagcgtctatccccgggaagtcgtcaaggctgccctggagcacaacgccgcggcaaccgtgctggtccacaaccacccttccggtaatccggaacccagccaatcagatctcaccctgtctcacaaactgcgggaggccctgaacctggtcggtgtacgcaccctggaccatatcgtggtgggccacgagggctgcgtgtcgctggcggaacagggctacctgtga

SEQ ID NO: 329479 - DNA, 210 bp, Pseudomonas aeruginosa
atgaagctactgcggatctttgctgccgtgttcatgttcgccggcatcctcgcgggctgcctggcccttctgctgctggtgttcctgatggtgcgctttccgccactgctgatcgccttgttgctggcgtgctggattttctgtcgcctcgtgaaggcgtttacccccggaacagcaacggcagcgtccaccactacaccgccgaaataa

SEQ ID NO: 329480 - DNA, 306 bp, Pseudomonas aeruginosa
atgaacagacagtgtttgatctgcgactccagcgccgtgctgacacgggacgcagccaaagggctgaccctgctggtggggctgataaatggcgcaatcaatggagctcagcgcccacgtgaggggagcggtcacaccgctctgctcagcggactggcggcaatcgctcccgcttctccggcggcgcagaaggcagcagaggatgttgtgcggtttcacttcgcccgcttcgactgcctgtgcctacgctgcggtgctctgttcgacgagacagcagaaagcagggagggccttagccccggctga

SEQ ID NO: 329481 - DNA, 348 bp, Pseudomonas aeruginosa
atgtcgaaaaacgattcgaagcagttggcggaagttgtgggccaagcgattgctcgccaacgagtgcgctgcaagctgagtcaggagcaggtcgcggagcgactggggattggtagtgaggccgtttcacgcattgagcgtggcgtcgtgatacccaacgtcgaacgtctggttgagctggcaagtatcttcggttgtgaggccgccgacttgctgaccgagggcagctcgcgcccggaagaccaggcgcgtcgactgcaggggctgctgtccacgttgaacttggatgatcgtgcgctggtgctggagtttgtggagcgtctggtggagcgcctcagccggggctaa

SEQ ID NO: 329482 - DNA, 354 bp, Pseudomonas aeruginosa
atgaacgttataaccggactgaacgaagcgcagatcgacagccttgtgcgaaaaaaagcgtccttcgagatcaatggcctcaggggcaatttcatggcgggcatcaaattggtcgaaagcaagattgaaagcgcaggaatgaaatgccgtgtcatcagcgacttgaaaggtgcagcaatgcgcggcggaatttttggggctgcagccactgtgatgtcagcgccagcaacgctcaccctggcggcactcggcgttgctgcaggtgtcggccatgctctcgtcacctacaaccccgattacgaaatcatcaaggactacgtgaacaagcggctcagggtcatctacaagaagtag

SEQ ID NO: 329483 - DNA, 807 bp, Pseudomonas aeruginosa
atgaaacggatactcggcactctactgcttactctttgcactgctgtccaggccaagagccttgtggaccattatgcctggggcaatatcgctttcccggacgagacgtcgaccaacggtctccccgaagccatcccctgcatcaacaagaaagctttcaacggtcagcccatgatcaagtgcacctggctggagacttcccgcgaggtgctcatctgggacgcccagcgccagcaggatgtgcgttatgtcaaccaggtaagcggtacatgcctgcgcggcaagtgccggacaaacaccaccatcgtgggtgaatggaatcaggatgtcttcttcgcactgtcgatctggttccgcattggcaccagcaccgacggcaagccggttgcctaccgtgtagatacttcgcgtcaggtgtcgtatgccgaggcgggttctctcctgtaccagttctacctggatattggcgtccctgatgaccggcttgttgatacgttcgatggacgctatgagggcggttacgcagcgtggcaagcccagaaaggagaagtacgcgcaacgaatcagcagtcgacgtcagcccccagtcgctttcaatggccagaagttaagagtgcttggtgcaacccccgcatggacgatgactgctacatcaatgaggagcccgtggcgatcgaagatctcggcaagtggcttcctgcaattcatcctgaagaagttgcggaagttgaacaggaaggcgggtactgcgaaaccatcctctgcttcagtagcgccgacaaaccactgggcttcaagccgcaataa

SEQ ID NO: 329484 - DNA, 303 bp, Pseudomonas aeruginosa
atgaaactactcaacacctacgacgaccgagatgaagccgaagctgctgccgaaaagctcagcggggaaaagcgtcttgccagcgagcgcgacgccaccgtggtcatctacaacctgtttggcttacccagctggggaaactttcatcgactgggaatgtataacctgggcgagctgaaaggcctactggatcgccgtgagacctggaagctagccgatcaggcacgacacgctgagatcctcgccacactgaaaaccgtcgccaagaactacggcatcgaaattccaggacactggcagtag

SEQ ID NO: 329485 - DNA, 2859 bp, Pseudomonas aeruginosa
atgtcgttgaaaccctggcgccttatcgccgaaccccatgaagacgtgcgcagcggcacttttgttcaggcggaattcgctgccgatatcactcgtgtccacaccggtacggcggcagctgagtaccaagatccgaagctgtttttccagcgcacctttattaccgagggtatgcgccttttgctggattcggtggttaagcgcttgtctggtaaaggcggcgaccctgtcattcagctgcagacggccttcggtggcggtaagacccacaccatgctggcggtctatcaccttgctcagggcaaggtgccggcgagtgagatgcctggcgtcggcacgattctaaacaaagcaggtgttaacgagctggcacctgcgcgtgtagcggtgctggatggcatcaagtcgtctcccaaccagccggtgcagcatggcgcctgttcagtgcgcacgctgtggggtgagctggcttggcagctgggcggtgaagagggctatgcactggtggctgacgctgacttgtcaggcacctcgccgggtaaggatgtgctggtcacgctgctgagccgttatgcgccgtgcgtgatcctggtcgacgagttggtggcctatatccgtcaattcgaggagggcgtttcgctggccgggggaaccttcgactccaacctgacctttatccaggcgctaaccgaggcgctcaaggctgtaccgacggccgtgatgttggcctcgttgccagagtccgaaaaagaggctggcagtcagcgcggcgtgcgtgccctggaggcgctgtctcactacttcgggcgtgtacaggcgctatggaagccagtggccaccgaggaagcgttcgagatcgttcgccgtcgcctgtttagccgaatcaatgaccagttggctgccgaagaggtgtgtcggcagtttgctgacttctacattgccaatagtggcaagtttccctcggaaactcaggaaagccattactacgagcgcctgaagcaggcttacccaattcatcctgaggtgtttgaccggctgtatgacgattggtcgagtctcgacaacttccagcgcacccgtggcgtgctgaaaatgatggccaagatcatctacagcctgtggaaagacggaaataacgatccgttgatcatggcaggcagcctgccgttttcggataccgacacccgcaacgagttcacctattacctgccggcaggttgggatcctgtcgtggatcgggatatcgatgggccgcgtgccgaaactgttgccattgagaatcacgatgcacgccttggggctgtgcacgcctgtcgtcggactgcacgtacgattttcctgggtagtgcgccgacaacctccagtcagctggttcgcggtatcgagcttgagcgcgtgctgttgggcagcgctcagccggagcagcaactcggcctatacgaagatgcactgcgtcgcttgggtgacaagttgcattacctgaacagcgccaacagccgctactggtttgacacgcgtccaaacctgcgtcgcgagatggaggagcgtaagaagcgcttcaaagatcgagaagatgtgttcccgaccttgcgtcagcgcctcaacaatctgggcggctgttttggtggcgtgcacgtttttactggcagtgccgatgtgccggatgactggacgctgcgcctggtggtgctggcgcctgattcgccttacagcaaaaccgggccgaatgcggcgctgaacaaggcgttggagatccttaaaagtcgaggcgagcagccgcgtcaaaagcagaaccgcctgattttcctggccgcggatgccgacaacgtcagtcgcttgaaggatcacgcacgttcggtactggcctgggagtccatcgtcagtgattacaaggacaatcgcctcaccctcgacaacctgatggcgaaaaatgcctctgccagcctggagcaggcgcgcgagacgctgaaccgcactctgcgcgaaacctggaaatggttgctggcacctgttcagcacgccagcaacctgaccgagatcgtctgggagccctatgccgtcaatccgggggcttcgagcttgtcccaggagatcgaaaaggtactgcgcgaaaatgagctgttgatcaccgagtgggcgccgatccatttgtccaatatgctcaagcgctggttctggaaggacggcgtggctgaggcaggggcgctggatgtgtggcagaaaacctgctgctatctgttcctgccgcgtttgcgtgacgatcaggtgtttgctcgcacgctgaatcaaggggtgcagagcaaggatttcttcgcagtagcacagggcaaggacggcgagcgctatccgggctttgtgtatggcaaaccgacctcggtcatcctcgatggctcttgcctacttattgagccaagcgcggcatcggactatgccgaggcgctcagagccaaggaggcagccgccaatgtatcgtcaacggtgcaacctgctggcgagctgatccatgacattcctaccggaagctccggcggtacagtcggtggtactggtactggtactggtgctggtgctggtgctggtgcggtgggcggttcgtcaggctcggtcgatgtgccggttgccaagacgttgccgacacagttctatgccagcgccgagctagatccggtcaaagccaagatgcagtttgcaacgctggtcgatgaggtgattcagcagttcacggccaagcacggcgtgaatgtgaccatttccatcgatatccaggccagcagcgcaggggggtttgacgattcggtgcagcgttcggtgaaggagaactgcagcgtgctgaaggtgaatacctacgagtttgagtag

SEQ ID NO: 329486 - DNA, 1362 bp, Pseudomonas aeruginosa
atgataaataccaatacacagtcgatcctgctgctgacttcttatttctcgaagtcagctggcgacgccaaaccgctctctccgacggagtgggggcgtttcgcactgtggctcaacgagcaaggcaagacgcctgcagacctggtgacggctgagccgcgtgcagtattgcagggctggcaagacgacaagatctcgtttgatcgcatcgagcaactgcttgggcgagggcatgcgctggcattggccctggagaaatggagtcgcgctgggatatgggtgttgactcgctcggatgcagactaccccaagctgctcaagcagcgactgcgtaacagcgctcccccagttctattcggttgtggcaatgcgcgcttgctgaatcagcggggtgtctgtgtggttggtgcacgcaaggcggatgaggtggatcttggcttcgccacggccttgggtgagcgtattgcggtggcaggtttgtcggtggtctcaggtggtgcgcgtggcgtcgatgaggctgcaatgttgggtggtttgaaacaggatggaaccgtcatcggcatcatggctgatagcctgctgtcggcagcgatggccagcaagtggcgcaagggattgatggacaacaatctcgtactggtttcgccgttttatcctgaagcaggtttcaacgccggaaacgcaatggcgcgtaacaagtacatctactgcctgagccaagcagcagtggttgttcgctctgatacaaaaggcgggacctggagcggagcgattgaaaacctgaaaaaggcttgggtacctctgtgggtcaagcgagttcaggatgttcagtccgggaaccaggcactgatatctgaaggtgggtactggctggagggggctgtcgagcatctggatatacagagcttgtgtgcgccagccacttccaatctggctacagccgatctgctttctactgaaaaaggagttgctgttgttacggatacgggaaaagcaggcccggatgtcgcggaaggagagccttcacaagcatcgtcctcagtgagtggccttgttgatcaggcggctcaaacgagtcccgagccaaatgccgtcgcaatagaaatgagtttttatcagttctttctccgcaaaatggcgtgcctcaaggcagccgtcaccgctgacgaattggctgagcggtgggatgtgccaaagaagcagatcaacgattggctcaagcagtcggtcgacgaagggcgtgtgcgcaagctttcaaaacctgtgcgctatgagctcatgaaagactctgggcttggaaacgtagctgctgaacaaacagccggtgaatctgtcgggcagctggggcttggcctcgattaa

SEQ ID NO: 329487 - DNA, 2097 bp, Pseudomonas aeruginosa
atgcaacgggatgatgctgagaggctgctgaaggtcgcgattggcaatgcggcagccgttttcagggatggacagtgggaggctattgatgcgctggtcaaccagcgcaagaagatgctggttgtccagcgcacaggctggggcaagagctcggtgtactttatcagtacgcggattctgcgagaccgagggctggggccaaccattatcatctcgcctttgctggcgctgatgcgtaatcagatcgaggccgccggccggctgggcattaaggcggtcaccatcaactccaccaacactcacgagtgggagcaggcccgacaggccgtgcttgccgatcaggtcgattgcttgttgatttctccggagcggctctcaaacgaagggtttatggaaaccattctgcagccaatcgcggatcgaattggcttgatggtgattgacgaggcgcactgtatttccgactgggggcatgatttcaggccggattaccggcgcatcgtcaacatcctgcgtttcctcccagccaatacccctgttctggggactaccgctacagccaatgaccgagtggttcgggatatccaggcgcagtttggcgatatccagattgtgcgtggcacgcttactcgagagagccttgctctgcagaatttgcgcatgccagatcaagcgagcagattggcatggctggctcaaaccatcccgaccctgccgggtactggcattctgtatacgctcacccagcgcgatagcgagcaggtcgctcgctggcttcgcgccaatgggattagtgctgcgtcgtatcacagtgacgtagtccatccaggattcgatagcagtgaccaataccgtcagcacctggaagatgagttactggcgaataacatcaaggtcttggtggcgaccactgcgctgggtatgggctatgacaagccggatcttggctttgtcattcactatcaagcgcctggctctatcgttgcgtactaccagcaggtcggccgagcagggcgggccatcgattattcacttggtctgctggtctctggtgaggaagacgagaagattcatgctttcttcaggcgctcggctttcccgcctgcaggccaggttaggcacttgctgggtgtgctagcgagtcatgatggtctgacgctgcgtgatttggaggagcacagcaatctcgcccatgggcagattgagaagatcctaaagctgctcagcgttgaaaaccccgcaccactgatcaagatcgctagcaagtggtaccgcacgcctgttccttacgagcttgatgaagagcgaattgctcagctcactctgttgcgtgagcaggagtggcagcaagtgcaggcttatttgaatgagcctggttgtctgatggcatttttacgctctgcgcttgatgaccccgagcacgaaccgtgcggtaagtgcgcaaactgcctgggtaaggcgctggtttccggtgctgtggacagcaagctggtgcatgaggccgcgacctttattcggcatgccgagtttcctatcaaacccaagaagcaggtcgccaagggtggctttcaatattacggcttcccgacgaatctaccccctcagcttcaggcggaagaggggcgtgttctgtcgcaatggcgtgatggtggctggggagagttggcggctgacggcaaagaacaaggccattttgatgatgcgttggttgctgctatggcagagatgatccaagcgcgatggcagcctgtgcccaagcccacctggctgtgctgtgtgccttctctgggacatccaacgctggttcctgatttcgctcggcggctggcggccgctctagggattccttttgtcgagtgcgtaagcaaggtcaggcagaatgagccacagaagtggcaatacaatcgtttccaccagtgccggaatttagatggtgtgttcgctgtaggcgaaggcatcccatcgggaccggtactgctggttgatgacatgatcgattcaggctggacgatgaccgttattgctgcactgcttaggcatgcgggtagcgggcctgtctatccgctggcaatttcatctacggcaagcaaggcatga

SEQ ID NO: 329488 - DNA, 651 bp, Pseudomonas aeruginosa
atgacccgtggcggcattaactcgccggtagcgccggttgacctgtcccaggcgattatcggccctggcatggaggtcttcagcaaatacagcgccgtgctagaggccgacggctcgccgatgactgtgcgcagcgccctgcaattgatcaatcgctttatcggcgaagacgacttcgaccacgacacccagttctgcctcgcctggttcgagcagcacggctgggccgagggtaagtacggcgatgccgacgtgttggcccgtgccaagggcactagcgtcggcggcctgagcgatgccggtgtggtggagagcgccagcggcaacctgcgcctgctcaagtgggccgaaatgccccgagattggtcgccagaagatgataatcgtgtgccggtgtgggaagccctgcaccagctgattcgtgcactgaaccaggacgatgaaaccgctgccggtcaactgcttgcacgcatgcctgacaaaaccgccggcatcaccgcgctgacttatcgcctctacaccctttgcgaacgccagggctgggctgaggaagcgcgtgcctacaacgaactgcaaggagcttggctcggtatcgaacaggccagccaagaagcgggccatattggtagccaaagcgcactggatatctga

SEQ ID NO: 329489 - DNA, 1311 bp, Pseudomonas aeruginosa
gtgattcttgaaagtctgagcttgcataattaccggcgcttcgagcggttcgagattgatttccacccggagctgacggtgattgccgcccgcaatggccagggcaaaaccaccattctagaagccatagcagcagcgctggggccctttgttggcgcctttgatctgggccgctccgaacatatacgccgtactgatgcacgctatagcgtgctcgatggcggctatgagaacgagcaaagctttccggtgatcattgatgccaagctgagcgagcctgccatccaatggcagcgagccttgcaaagcgccaaaggccgcacgaccaccagagaggccgctccgttggcgaactggggtaaagaactgcaaaaggaactgcgtgaaaacccggaagtagccttgccagtggtgcgctactacagctcgaaacggctatgggtgagccacaaaaaccttagctccaaggccatcctcacgcaaagtcgtacagctggttatgaggattgcctgtcagccatgtccagctttgtgcaattgcaggagtggttcaaaaaggcaacccaagccgtgcagcagcagcgtgaaatgcccggctatgaaaaatccaatttggctccccgcttgaagggtattcaacaggccgtggctacggttatggcggaagagggctggagcaattttcactacagctacgtctttgatgagctggccatgacccacccagaccacggcgctctgcccatcagtctgctcagcgacggtgtgcgcgccatgatttccttagcggctgacctggccctgcgctgtgtgcgtctcaacggttatctgggcgagcgtgcgccgcaacagagcaccggcattgtcctgattgatgaggtggatttgcatctgcatccggcctggcagcaaaaggtgctgactgcactgcgcgaggcttttcccaagatacagttcattgtcagcagccacagcccgcaggttctgaccacggtcagtcgtgagcaaatccgtgttgttcggcgtgacgatcagtgtgcctggatctcggaaaaacctgccctcagccctttggctcaggagtccagcgatgcgctggcatacgtgatggatgtcagcccaaaacccccgctggatacagtaaccaaggctcatgaatacgagcagttggtacgcagtggcaagggcgatcaggaagaggcgcagcgtctgaaaagcgagctggatgccgaaggctatgacattccccaggcacaggcagcgctctgggcgtttttggccgagcaggcacggaagcagaagcatgattga

SEQ ID NO: 329490 - DNA, 3534 bp, Pseudomonas aeruginosa
atggtcaagctggaagacatcgccaaagacgcccagattcgtggcctgcatggcgacgaggtggtcaaggtcatcagcgtcgatagggtcggtgactcggcaatcagcgtcgtctaccagaaaagtgcgggcggttacggcgatcagatgctgtttcgtagcgatgagtcccgtcttgagcttgcccagggtggcaaagcctgggctttcgatgcaccaggcagcgactttaagctggctctggaggcctggcgcatccagttggctcacctgttcgatccgatgatggcggttcatacctccaacgtcgatccgctcccgcaccagatatccgccgtctacgagtccatgttgccgcgccagccgctgcgctttgtgctggctgatgaccccggggcaggcaagaccatcatggctggcctgctgatccgcgagttgctgatgcgtgcggatgctcgacgcatcctcgtggtatctcccggctcactgactgagcagtggcaggatgagctgctggagaaattcggcatcaagttcgaagtgttcagccgtgagaagcaggagcagtgcgcaaccggcaattacttcgaagagcaaaacctgctgatctgccgtctcgaccagctgtcgcgcaacgaggactatcagctcaagctcaagaataccgactgggatctgatcatcgtcgacgaagcccacaagctatcggccaactacttcggcaacaaggtcaacaagacaaaacgcttcgagctgggcgagctgcttggctcgatcacccgtcacttcctgctgatgacggcgaccccgcataacggcaaggaagaagatttccagatctggctgtcgctgctcgatggcgaccgcttctatggcaagttccgcgagggtgcgcacaaggtcgacgtatccgatctgatgcggcgcatggtcaaggaagaactgctcaagttcgacggcaccaagctgttccctgagcggcgcgcctacacggctaattactcgctgtctgacctggaggccgcgctctatcacgatgtgaccgactacgtacgcaaccagatgaacctggcggatcgtctcgatggtcagcgcaagaacaacgtcggctttgcgcttactcaactgcagcgccgtctggcctcaagtcctgaggcgatctatcagtccctgcgcaatcgtcgcaagcgtctggaaaatcgagttgaggaagagaaactgcacctgcgcggtggcggtgtcgccagcgtgcttggcgagtaccttgtaaaaaaacgtatcgaggtgccagacaacctcgacgacatggaagacgagctcagcgcagatgagtacgagctgtacgccgaccagttggtagaccaagccagtgctgccgaaaccatcgccgagatggaaactgaaatttgcttgctccagggcctggaacagcaggcgcagcgcctagtggcctcgggcagtgaccgtaagtgggaagagctgtcctgcctgctgcaggactcaccgcagatgtacaacggcgaaagtcgccgcaagctgatcatctttaccgagcatcgcgccaccctggattacttggttaggcgcattgccgacatgctgggtgatccgcaggccatcgtcaccattcatggcggtaccaaccgtgatgagcgacgcaaggtgcaggaagagtttcgccacaacccacgcgtgctggtgctgatcgccaccgatgccgcgggagagggcgttaacctgcagaacgccaacctcatggtgaactatgacctgccctggaaccccaaccgtctagagcagcgattcggccgtattcaccgtattggccaggatcaggtttgccacctgtggaacatcgtcgctaatgagacccgtgaaggtgaagtgttccagaagttgttcgagaagctggaaatcgaaaagcaggccttgggcggcaaggtgttcgatatcctcggcgaggcgttcgacaacgtatcgctcaaggatctgctgatcgaagctattcgttacggcgactcgcccgaagtgcgtgcacggcaaaaccaggtcatcgaaggtgcactggacaccgagcacttgcgtgaaatcctccgtcgcaatgcactggtcgagcaacacatgagtctcgatcagctgtatgccgtcaaagaggaaatggagaaggccgaagcccgcaagctgcagccctatttcatccgcgctttcttcaatgaagccttcaccagtgttggcggcgagctgcgtaatcgcgaacctgcgcgctacgagattcgtcatgtaccggcttcattgcgcgagcgtgaccgggtgattggtgaaactcgtacgcctgtactcaagcagtacgagcgtatctgcttcgagaaacagcaggtgagggtgccgggcaaacccatggctgacctgatccatcccggtcatccactgatgcaggcgctgactgatgtcaccctcagcgcccatcgaggcaagctcaagcagggttcggtgctggtcgatcccaatgacgacagcctgatccctaaagtgctgttcatgctcgatcacagcgttcgagaaagtgcgagtcatggtgttgaccagccccaaattgtctcccgtcgcctgcagtttgttgaaatcgacccgcaggggcaaagcagtaacgcgggctgggcgccgcacctggatctgttgccgatcaaaccggaagaactcgctctggtgcaggacgtgctcaacgcctcctggctgcaacaaaacctggaaaatctcgcgctgcaacatgcctcgcaacaactggtgcccgagcacttcagcgaagtgaaaacccgcgttgagcgtcaggccgagcgcgtgctggccgctgtacatgagcgcttggtcaaggaaatcaactactggtcagatcgctacctcaaactcagtgatgacgtggccgcaggtaagcagccgcgcatgcagccggaaaatgcacgtcgccgctatgaggagcttactgcccgattagagcagcgcacccgtgagctgcaagccatgcaacaggtcagctctgccacccctgtggtgatcgggggagccctagtgattcctgctggattgctggcccagcgccaaggcgatacagcattctgtgcagatgccgaggcgcgctcgcgtatcgagtgggctgctatgcacgcagtcatcgcaactgaacaagctttagggcataccgtgaaggatgtttccgccgagaagtgcggctgggacatcacggcgcgtccgccagttaccgccgatggcagtatcaaggatgaccgtcatatcgaggttaaaggccgcgtaaagggctcaaccactgtcaccgtgaccaagaacgaaatcttctctagctacaaccagggcgagaaatacatcctcgccatcgtgctggtggatggcgatcagacagacggcccgtattacatcaagcacccattcaagagcgagccggagttcggtattgccagcgttaactatgacctgggtgagctgctatcccgagctatcaagccggaggagagcctgtga

SEQ ID NO: 329491 - DNA, 666 bp, Pseudomonas aeruginosa
atggcattgatcaactgtgacgaatgcgagcgcatggccagcgaccaggcagcagcctgcccgcactgtggcgcgcctatcgctaagcagccggcaccttttcaagcccagcccagggttcaggttatccgcagcgttggcttctggctcggcgtgggcattctcctgtttccaatcgtcttcgtctggttcctgctgcgtcagggccacagcaccacgagccgggtaattggctttgcctggctggcgctgatgctggttggcatggccaccagcgagcgcagccccagccggtccgtcagcagcaatcagagccagcaaacaaaggtggtggcgccagctgagccgctacgcgaaatcagcgcccagcaattggcccaagcctacgagcgcaacacggtagcggcggatcagcagttcaagggcaagcgcttcaaggtcgccggcgtggtggattccatcaacaccgatctgttcggtaacccctacgtcactctgcgtggtggggtgaaccagttcatggagcctcagttcgagctggatgacgcccatgccagttatgcagccggtctgcagagtggcatgcgcatcagtttgatctgcacaggtcgcggcgacgtggcgaaaacgccaatgtccaaggattgcgtaccagatattcaataa

SEQ ID NO: 329492 - DNA, 876 bp, Pseudomonas aeruginosa
atgaaacgcaagcagtcaatcgagtccgtgcgctgggatctggccctgcgctatcgcctgatcgagacagtggcctggtgggagggccgcctgaccaccaatcacctgatgcagagcttcggcatcagccgccagcaggcgtcgaaggacatcaacacctacatcagcgaacacgcgccgaagaacctcgaatatgacaagcatttgaaggggtacgtcccgagccgacgcttccaaccgctgttcatcgacgacagcgccagcgcctatctgcacctgctcaaccagaaccatgagcgcgccccgcatatcgagggcctggcactggcctatgcacacacagaggtactggcagtgccggatcgctcggtaaggccggaagtgctgcgcccgctgctcaaagcctgccgggaggggctgcgcctggaatgcgagtatgtgtccttcaccacgcccgatggcgaaacccgcctgatcgccccgcacaccctgatttacaccggcatgcgctggcatgtgcgggcctactgcgagaagaatcgggattatcgtgacttcgttcttagccgcttccggggcatgccggagctgatggatgatccgaccgatcacggtcgcgagagtgatccgggctggaccaccttactgccggtgatcattgagcccgactcacgcctaaagccggaacaacgcgccatcatcgaggccgactacggcatgcaggatggccgactggtgatcgaaacccgcggcgccctggtgcagtacgtgctgcagcgctatcagatcgacccgaccaaggtgcatgccaaggcgacggcgcagcagattgtcgtcgccaacctggatgaactgcagccatggctgtatcactga

SEQ ID NO: 329493 - DNA, 579 bp, Pseudomonas aeruginosa
atggccactcaacctctgctctacaccctgcacatccagctggagcccctgcagctcgatccgccgatctggcggcgcatccgcgtcagcggcgattgcaccctgcgtaaactgcaccatttcattcaggcgtccatgggctggcacagcagtcatctgcatgagttcagtttggggatgaaccgctacatgcccctggatgcggaattcatggacgacgacgaggcgctggatgaccgcaagttcaagctgcgccgcatgctgaaggaaggcgaccgcctgcgttacctctacgactttggcgatagctggcagcatgtgattgccgtggagacaatcgagccctgcgacttcacgggcacctggtgcgaggtgctggatggcgcccacgcctgcccgcccgaggatgtaggcggtgtgccgggttatctggactttctggcactgatccagcaaccagccagcgaggaaggccaaagtgcactggaatgggccggtggctgtttcaaccccgaaggatttgatcgccgagcggccaacgcggctgtgcagcgaatctgcaacaacctgtggggctga

SEQ ID NO: 329494 - DNA, 2151 bp, Pseudomonas aeruginosa
atgacggaaaatggagagcgctgccgacggcattaccagtcggtatacgaacggaatcagtcagagctcagtaaggggcgtgcccttgatgagtccctgcatcatttcctcgatcaacgcccatcgggtaagaacctttcagcacttgagcgtgcccaaggactagcgtcggcatcgttttggcttgatgcggatgtggttgctcagtccgaactcgccagcttagcccttggcagggtgctgcactttgatgatgcagtcagtatcgaactgctgttgcacctggctagccataacccggaaaccctcagatgggcgattcgttactcgaagctgtttgaacgtacccagtcgccgctttggcttgcgctgcgtgcggcgctcaaagggggtgactggcaggtgttcttcggtgtctgtgatcggttgcttgatcagctcaagccctttgatgagctgattgccagtgctgaaaaacagcttgagcatttaacgctgctggagctgttttcctacctcagtgttctggcctaccagtcatttaccgaagacggttccgatgatccttccggtcagcagtggaaggtctacaaccgcattatcttgaacaagcttcgcgcctgctcggaagaggatttccgccttagcgagtcacggctcgggcaatcgctgaaacggcacctgtcaccgattatctttcccggatccagcaactctgacgtggtgagatgtcgtcaaaatctcgaatctctagcccttctgattggggccactcaagagcggatcgactacgaaggctccattgactggttctgctttgatcctgagtgccgttaccagctaaaacccggtgagccggttatctacaaccagtcggaggcgggaacagaatggtggcaacgcaccgggcgtaagagtgatttgctctggcactactggatgaatcgtgccgtgcatacctttgccatctccggcattgctgaacaagtcatcggctcacctgagaatcatgagctgaatcaactggcctttatcaaggccgttcgcagccagctgcatttacaacagatctacggcttggctgatcgcgtcttgctcaatgatggttcccaggtgcagttacatcacgtgctgctggcgagcgagctgacctctgtgttctttcagaaagagtttatccagcctttccaggctcacttgcgcgaatcgggtgtgcttgctcgggcactcgggcggctagccatgaatggcatgctttccggtgagaatcggttcccgatgacctggtccgaagagccagaaaagatccgcaggatcactggctggactgtctgtgacgaacacccgaaaggctgcgccggctcggccaaagcaatcctcacgttctggaccagcgacttcaaggcactatctcagcaattgaaactgcagccagggatgccagcgccgaggctgtatgagcagcccttctacaagatcggtcgatacagctttcagtttccttgggttggtgcgcagcaaaacaacctgacggcagccatcaataacctgcggcgggtgaatgcccgcagagccgatgtgcaagcagaaactcaacgagtggagctggcactggccgagagccttcggcaacggggttttgctgttgaggtgggatatcggccgcctgtgacagaagaggatgacgccggcgaggtggatttgatctgccagcgtgatggcgtactgctgcttatggaggttaagtcggggtatattcgctcgaccacccatgaagtccggctgcatcgcaccaacaccttgcgtaaggctgcctggcagctgcggcgtaagcggattgcggtggccaaggcgttggtggctgatcaagatctgcgctccaggttgggctaccacggtcagcatcctgaggcgcacctgcaggcctggatcgtcgacacctccattgagctcgatgggcagtcagtcgatgggttcagagtggtatcccgtgaggcactggaggtcattctacgtgatgagaagcagctcctcaggccaatggggcagcttgacgagggaggtcagcattcgttgtttcccgacgggtttactgcgggacgatttatcgctgttgtcgagtccgatgagctgtggcgaggcatctgctag

SEQ ID NO: 329495 - DNA, 726 bp, Pseudomonas aeruginosa
atgttcagcgataccaataccacccagcgctttccactccgtcaccctgacaatcccaacctccacctgcactacggggataccttcgagggctttcccattcagagcgaagtaggcccctttattcgggagtacctgtctgatctccagcgcactatcgacctggcattggctgagtatccgagggtcttggcctacagggtggatctgcgtttgcctcagggtgtcgagctacccgacttcgcctatacgaatcaggtcatcagccggttcttcgaatcgtttacgaagaagatccagtaccaccaggagcgagtggctgagcgtggctactcgcgtggttgcaaagtacggtacgtctggtcgagagagatcggtcagggaggccgccagcattatcacctgctgatcctgcttaaccgtgatgcctattacaccctagggctgctgagctcagagagggtcaacatgatcagccgcatagaagagtcatgggccagtgcgctggggttgttgatgtctgaagtcgatgggctggtacatatccccgaaaatccaacgtatcggatagatcggcatccccgtatgcggaaggttgcatggtcagaacacaaggttcttgttgatgagctaccggatctgttctaccgggccagctacctgtgtaagaaagcgaccaagtcctacggggatcgtcagcggggattcggaaccagccgagggtag

SEQ ID NO: 329496 - DNA, 1362 bp, Pseudomonas aeruginosa
atgcttgctagacttcttgatacgaagctaagggcaggtgatccagatgctaaatttttgctcattgcattctggaatcactatggcgccgtgacgcctaagcctcgttcccagaagcaattggctgaagacctgcggcttccggtgcaagccgtttcaaaagcggttgcccaactggttgatgtgggggtactgcgagtcgttactcagcccgaagggaaggggcggccaaggtgtacctacgagatgagcaaagctatccagtcggctctgcgggatgtcgaggaaaggacgctgaaccaccccggtttggtcaagcatgtcttgggtggcgagcgcatcagggccatctggtctggctggaaggacgatgcgccgactgcgaaggagctcaacacacgctcgcgagacgagaagcgagttgctccagtgcggcaggggaagctcagcttggcgaatcgtttgctgctcatgatcttgctaagccatgcagatccgtttggggttgccagggggctgagtagcaaggagctctgcttgctgacgggaatggatgcggcctctctcaagcagcgcttgcgcaggcttacggagctgggattcattcggagacacatacctgggctggcgagtccgattttcgctgagaagctcaggagcgtttattggcttaatctgaaccaccttcagctttcacctgctggcgatgtggtttctgtcgtgctgcataagaaggcagccgacctggacatcgactacaagtttttggctggcgtcagactcgatcgcaactccttcctaaagggcggggaatacttggcgcctcgcagcgtggttcgtctcttcaggcgagcgccagatcatgcgtttgatcagcttgagctttttatttgtgactgcgtattgggttttctgtcgcgccactgggttcaggctgattctgctgcatggagaaaggtgcgcggtgtggactcgacggtgaaggagcaagtggcggcttattttcgactgccgatgcgtgatcccatgggcaaggtggtcttggaccacgacgaggttttcgacttcctccagcatcaagtctttgagctggccgaagaggttgtccagcgtttttcgcagctatccgccgttaattttgccggggttagctacatcttggtgccggcgcatgtgtcgattggccaccgttgcatcgctctcttgactgaaagagcttcgggccaaggactggccaagcattggatggtcaccaaggggggcgatgaaccagtagtggcaagcgttgcgagggaggtggaaattccgctggagctgcgtgagcagtcagggttgctcacgccagtacgagcagttgggtaa

SEQ ID NO: 329497 - DNA, 669 bp, Pseudomonas aeruginosa
atgtcagaaaacgagaaaccactgacgtggttgcgcaagcaggatggtgagtgggaatgggcagccgattacctcaggcaccggctcgatgccgagtacatgaggaggctcaagggcgatgcgtttacccggtttgcgacctacgagaacgtcgttgctgctatcaggcagatccaagaggacaggctggacctggtcataagactgcagggagctatacgacagcgtcgctaccgctctgacagcaatggccgaaaacctcgaacattcaccctcagcaaacaaaccctttccaagctggactcaatcgcaaagcgaaataacgctgacgagacagctgtaatcacagcgctcatagaaagagaaggactggccgccgaggcagaaagggattatgaaaagctgctcaaagaatcaatttcaagggagcgcaaagctgctcagcaggtagctgcatgcttgaaggagcaacgggacgaagcgttgaagcacgcagagcggtatctgcagctacttgcgcgctgggaattgatgtttccagaggagaaaccagccgccgctagcgacgaagaaatttccaagcttgtcgaacccagaattcaggatctcaaaaacgctcttgactacattgccttcatgggcgacctgaccaccgaacgccacaagtaa

SEQ ID NO: 329498 - DNA, 1551 bp, Pseudomonas aeruginosa; identical to SEQ ID NO: 328195

SEQ ID NO: 329499 - DNA, 1479 bp, Pseudomonas aeruginosa
atgccgttccctcttctccatccctggccgcagcgattggcgctggcctcggcgatagtgctggccgccggctgcgtcacttccgaaggcctggaaccgaacgcccgactgcaaccggcaggcgccctccaggcgggcaggagcctggacggcgtagccctttcgccagcggcctggccgcgccaggactggtggaccgggctcggcgaccggcagctcgaccaactgatcggcgaagccctgcaaggcacccccgacctgcagatcgccgaggcgcgtgcgcgccaggcggcggcaacggcccaggcgcaagatgccgcgcgccagccgacgctggacgccaaggccagctactccggcatccgcgcgccgaccagcgtggccccggcaccgctcggcggccgctattcggcgatcaagtacctgtcgctcggcttcaactacgacttcgacctctggggcggcgagcgcgccgcctgggaagccgccctcggccaggccaatgccgcccggatcgacagccaggccgcgcgcatcggcctctcggcgagcatcgcccgcgcctacagcgacctcgcccacgcctttaccgtgcgcgatctcgccgaggaagaactgaaacgctcgcagcgcatgaccgagctgagccagaagcgcatgagcgccggactcgacagcaaggtccagctgcaacagacgcagacccagctggccaccgcccgccagcagctcagcgccgccgagcaggacatcgccagcgcccgcatcgccctcgccgtgctgctgggcaaggggcccgatcgcggtctcgaactgcagcgcccgcaaccgctgaacccggccagcctgagcttgccctcggtgctcccggcggagctgctcggccgccgcgccgacatcgttgccgcgcgctggcgggtcgaggcggcgcgccgcaacatcgactcggcaaagaccgagttctatcccaacctcaatctcggcgcgatggccggcctcgccgccctgcacaccagcgacgtgttgcaggcgccgagccgcttcttccaggtggcgccggcgatctccctgccgatcttcgacggtggccgccgccgcgccaacctggccgaacgcgacgccgactacgacctggccgtcggccagtacaacaagacgctggtccaggccctcggcgaggtcagcgataacctcggcaagttgcgctccctggagcagcaggtgatcgaccagcgccaggcccgcgatatcgccaggtccaacttcgacctggccatgcgtcgctacggcgaaggcgtcggcagctacctcgacgccctcagcgtgcaacagcaactgctggtcgccgaacgccagctggccagcctggagagccagcagatcgatctttccgtccagttggtccaggccctgggcggcggtttccaacccgattcccgctccgctgcgctcgctaccgcgaaagcgccggcagaatga

SEQ ID NO: 329500 - DNA, 1185 bp, Pseudomonas aeruginosa
atgactaccgccaacagcgaaacccccgccggcaacccgaagcgcaagcgctggttgctgatcctgctcgccgtgatcgtcctcgccaccctggccagcgtggcctgggagttcttctacggccgctggcacgaggacaccgacgacgcctacatcaacggcaacgtggtacagatcaccccgcagatcgtcggcaccgtggtcagcatcggcgccgacgacggcgacctggtgcgcaagggccaggaactggtcaggttcgatcccagcgacgccgacatcgccctccaacgcgccgaggccaacctggcccacaccgtgcgccaggtgcgcgggctgttcagcaacgtcgacggctatcgcgccgaggtcgccacccgcaaggtcgcgctggccaaggccgaggccgactacaagcggcgcaagaacctcgcagacgacggcgccatttcccaagaggaactggcccacgcccgcgacgccctggacagcgcgaaagcctcgctgaccagctcggaacagcagttgaacaccaatcgcgcgctggtcgacgacacccagatcacctcccatccggacatcaaggccgccgccgcgcaactgcgccaggcctacctggacgacgcccgctcgaccatcgtcgcgccggtcaccggctacgtcgccaagcgcagcgtacaggtcggccagcgcgtgcaaccgggcactgcgctgatggccgtggtcccgctggaccagatctggatcgacgccaacttcaaggaaacccagctcaagcacatgcgtatcggccagccggtggagatccgctccgacctctacggcagcgacgtgcgctacagcggcaccgtcgacagcctcggcgtgggaaccggcagcgcgttctccctgctgccggcgcagaacgccaccggcaactggatcaagatcgtccagcgggtgccggtgcgcatccatatcgatccgcaagaattgcagaagcatccgctgcgcatcggcctgtcgatggacgtcaaggtcgacctgcacgaccagagcggcccggccctggcccagcagccaccgcgcgaagcgctgttctccaccgatgtctaccagcagcaactggcctcggccgacaagctgatcgaacgcctgatcgaagccaacctcgccgaagaccacggcaagaccgcccagcgttga

SEQ ID NO: 329501 - DNA, 762 bp, Pseudomonas aeruginosa
atgtctacacctatcgttccatggatgggcggcaagcgccgcatggccaagcacattctgccggagttccctgagcatgagtgctacgttgagcccttctgcggcggggctgccatcttcttcatgaaggagccaagcaaggtcgaggtaatcaacgatttcgacggtgaggtggtgaacctctaccgggtcgttgcgcatcatctcgaggagcttgtccggcacttcaagtggtcactggtcagccgcaagatgttcgaatgggcgaacatgcagattccccagaccctgacggatatccagcgggcagctaggtttttctacttgcagcagctctgctttggcgcaaagccgacgggaagaacgtttggcgttcgcgcaacaacaccccctaccctgaatttgctgaggctcgaggaaaagctaagcgaggctcacctgcggctggcaaggacgacgatcgagcatctggactggcaggcttgcattcggcgctatgaccgggagcagacgctcttctatctcgacccgccctactggcagaccagtgggtatgcgcctggggtgttcccgctggagcagtaccacgctatggcagacctggcccggacggtgaaagggcgtatggtgatttccatcaacgatcacccagacattcgcaaggcgttcgctggcctgcgcctgaaggctgtccctttccggcatacggttggaggggcgcaaggcaaggaggtaggggaactaatctatttcaactggtag

SEQ ID NO: 329502 - DNA, 1056 bp, Pseudomonas aeruginosa
atgagcaaacgtcgcagccaccgccgccagcagccggttacagtccagtccgcacaggaaggcgagttcatcccgcgccagggcggccgtgccgaggcattcaccttcggtgacccgatgccggtgctcgacggccggggcatcctcgactatctcgagtgctggtcgaacgggcggtggtacgagccgccgctgtccatggaggggctggccaaggcggtggggtcgagcgtttacctgcagtcgggccttaagttcaagcgaaacatgttggccaagaccttcatcccgcaccgcctgctcagccgggcgacgttcgagcagttctccctggactggctgacattcggctcggcctacctcgagcagcctcgttctcgcctgggtacgcggatgccgctgcaggcgccgctggccaagtacatgcgccgcggcaccgatctggagacgttctaccaggtgcgcagctggaaggatgagcacgaattcgagaagggcagcgtgatccagctgcgcgaggctgacatcaatcaggaaatctacggagtgccggagtggttctgcgccctgcagagcgccctgctgaacgagtcggccacgctgttccggcgtaagtactacaacaacgggagccacgccggcttcatcctctacatgaccgacgccgcacagaacgaggaagacatcgacgcgctgcgcacggcgctgaaaaccgcgaaggggccgggcaatttccgcaacctgttcgtctacgcgccgaacgggaagaaggaggggatccaactgattccggtcagcgaggtggcggccaaggacgagttcggctcgatcaagaacatcagccgcgacgaccagctcgccggcctgcgggtctatccgcagttgatgggggtagtgccgcagaacgctggtgggttcgggtccatcagcgacgcggcagcggtctgggccagcctggagctggagccaatgcaggcgcgcctgcagcaggtcaatgagctgatcggggaagagatcgtgaggttcgcgccattcgacgcgccgggggagaagtaa

SEQ ID NO: 329503 - DNA, 918 bp, Pseudomonas aeruginosa
atgacaacgaacttcgtcgccatcgacctcagccagttgccaccaccacacgcggtggagcagttggactacgagcagatactcgccgagcgcaaggcctacgccatcagcctctggccagaagaccagcaggcggaaatcaccgcccgcctcgccctggagtccgagccgctgaccaagctgctcgaggaaaacgcgtaccgcgaaatgctctggcgccagcgggtcaacgaggcggctctcgccaacatgctggccagcgcccagggcgccgacctcgaccagctcgccgccaactacaacgtcaagcgcttggtcatccagcccggagatccatcgaaggtgccgcccgtgccggaactgctggagtccgacgacagcctacgcgagcgggcgcagatggcctgggaaggcctcagcaccgcgggaccgcgtaacagctacatcttccacgcccgcgccgctgacggccgcgtcggcgatgcctcggccgtcagcccctcgcccgcagttgcagtgatcaccgtgcagtcggccatcggtaacggcaccgcgccagcagagctactggccgtcgtagagcgctatctctcagacgaagatcgccgcccagtcgccgaccgactgatcgtccagagcgccgaagtcatcgagtacagcatcagcgcatcgctgtttcttacgaccatcggccccgaagccgagccgatccaggccgccgcccgcgcgcagctcgaggcctatgtctttcaacgacggcggttggggatggaagtatcagagtcggcgatccatgccgcgctgcacgtcgaaggggttcgtaaagtcgaactcgccggctgggcagacatcgccgccactgcaagccaggcgccgtactgcacgaacatcacgctcactatcggtaccgagccatga

SEQ ID NO: 329504 - DNA, 618 bp, Pseudomonas aeruginosa
atgaccgcgcttccactgctgcctcgcaacgcctccgagctcgaacgcctggcagcccaggcgctggcggatatacagcgggtaccgatcccgctgcgcacgctctgcaaccctgatacctgccctgcgaatctgctgccgtacctcgcgtgggcgttttccgttgaccgctggagcagcgcgtggcctgaatcggcacgccgcggcgccatccgctcggcattcttcatccattcgcgcaagggcacgatcggcgccttgcgccgcgtagttgaaccactggggtatctgatcgaggtccgtgagtggtggcagcaggcgccggccggcactcccggaaccttcgaactgctggtcggcgtactcgaaaccggtatcaccgaagagatgtacgaggaactgacctggctgatcgacgatgccaagccgttgacccgacacctcgtcggcctcgccatcagccttgagagcaccggcagcgtgcgcctgggcgccgccgtctacgacggcgacgaaatcgacgtttatcccccgagcccccgcgacatcgaagtcaccggcaccatcggccggggcggtcgcgatcacaccatcgataccctggatgtgtacccatga

SEQ ID NO: 329505 - DNA, 1818 bp, Pseudomonas aeruginosa
atgatcgatcagaattcacagttcttcgccatcctgaccaacatcggcgcggccaagcaggccaacgccgatgcgctgggcatcccatggaagattacccagatgggcgtgggtgacgcgggcggcaccgacccgattccctcccccacccagaccgcgctggtcaacgagcgacgccgggcgccgctcaaccagttaaaggtggatccgcagaatgcggcggtgatcatcgccgaacagatcatcccggagaacgtaggcggatggtggatccgtgaaatcgggctctacgatgccgacaacgaccttgtcgcggtcgcaaactgcgcgcccagcttcaaaccattgctgaatcaggggtcgggacgcacacaggttgtgcgcatgaacctgatcgtcagcaactccgccaacgtcgatttgaagatcgatcctgcagtggtgcttgccacgcgcgcctatgtactcgaccagttgaagagctacgccccgctcttctcaccggcattcagcggagcaccaacagcccccaccccaccactgttcgcacacgaccagaagcttgcgacgaccgagtacgtcagaatggccctgggtagcgccgcgcgcgcaatctcatacaccggcaatacggtgctggatgaaccggtaatcggttcgatcctcgtcgcgggctcgcatgaccgcgatttcacatggaccacgccgaacctgtctgttcttccaactggcgcgtcgttccacatcgtcaacatcagcggttcgacactgacgctggtccagcgtaccgctgcagatcactacatcagcgcggacgacccgtccggcgtcgcaatctcgtacacgataccgaacaacgtcaccgcaactatctcgaagtaccagccaggcctgtggctaatcagccatgtgtcacgcccgaccgctgcgctgaagagcctcgtggatgggctgatcgacggaacgaagcccgcagggaaagccgtgcaactcgcgaactctcgcaagctcacgctgaatggccaggccagcggcagtgttcagttcgatggctcgagcgacgtaacgatcgacgtccggctcgccgataacctcgtcctgacgggctcccccagcgcaccgacgccggcggcgttcgatagggattcgtcgatcgccacgaccgaatatgtgcgtgccgctctcggtagcatggccggcgcagcggtgctgacgggcgatgctatcctcgacgcccccctcgtcggcctgactgtggtggccggcgcacataaccgagaatcgacgtggacgacgccgcagctttcggcgctcccacaaggcgcctcgctgcgcttggtcaacctgagcggcttcaccgtaacgctggtgcaacgctcgacaaccgaccgcttcatcagcgcaaccgacccatccgggactgctaccacctacatcatccccaacggcacgtcgatttccctcacgaaataccaggcgtcgatgtggcttatcgaagccaccccggcattccccgcgctgcgctcgtcgccgggctatcagaagctgccgagcggcctgattctgcagttcggcagcgtcagcattccgcccggcaccggcgaaagcaccggatgggccacgctacccatcgcgttcccgaatggtccattgaccgtcgtgccgtcgctgcaatacggcgggaccagttcgagctggtacgggttcagcgtctggtcaggaagcattacgcccacggcgatcgcctgctcactgaacagcggttcgacgccgcgcgaggtggccggcgccgtgaactacgttgcaatcggatattga

SEQ ID NO: 329506 - DNA, 435 bp, Pseudomonas aeruginosa
atggcgcacttcttcggcgcagatcccgtcgctttctacgacacagcgatcaacaccgacatccccgacgatgccgtagagatcaccgcagacgagcacgccgctctgctcgcggcccaggcgcgcggcaagcgcatcgccgccggcaaagacggtcggccgatcctgctggacccacctgcacccacgcgggacgaactggagagcttcgagcgcatctggcgcgacgcacggttacgcgaaacagacccactggttgcccggcaccgcgacgagagcgaggccggggacgtgcccacgctcgacgccgagaaatacagcgcactacagacctaccggcgcgcactccgggactggccggaagctggagagtttccgctcgcagaacaccggccgagagcgccggaatggctggcagacgaactggcgtcctga

SEQ ID NO: 329507 - DNA, 351 bp, Pseudomonas aeruginosa
atgaactggctcaagggaatgaccgctgcggtcggactgatggtctcgtgtgttgcgatggctgactcggccgcccaggtcgaactgatggacaacctgcaccagaggatgctggacgcgttgcaggcctcgagtgttgaccaggtgactgaggtttttggcgatctggaccggtaccgccctggtatccgcagcaccgccagtgaaacctgtttcaaggcctatgaggcactgggatgggtgttgtccgacatagtggtgcaggccgatatggatggtcctcttcctgagctgaaaaaacaccagcaggactacgagcggaagcgcttggcctgtgctgcagggacttaa

SEQ ID NO: 329508 - DNA, 306 bp, Pseudomonas aeruginosa
atggtcataaaagttggacctcaagcgttgacattacctgttttcagggacatcatcgccttgcattcacacgaaatcacacgaaacgagactatgcacaacgcctaccccaccgagcaagcgtgcgagaaagcgcgccagcatctggcgagccaagggctttcggccaggcaatgggcggtgaagaacaacctcaccccctcgaccgtgtacgccgtcctcaaccggcagaagaagtgcctgcgcggcgaagcccatcgcgcggctgtactactcggcatcaaagacggcgtgatcgcacagtaa

SEQ ID NO: 329509 - DNA, 504 bp, Pseudomonas aeruginosa
atgaccactgcactggggggacaccagaagatgaaacgcccgctcctagaaacgcggcgccaggtggtcagcgcgatcatcggcgcctaccccggcggtcgcgaatgcgccgctgcccgcctgggcctcgacctgaagaagtttgacaaccacgcctacgagaacgccggcagcaagccgctcagcgacgaccagttgcgcttgctcgagcaggaggccggaaccaccttctttcccgaatacattgcgcagttgtatagcggcatgttcgtagcgctgagccaaccggagacactggacaacctcacgctgtacagccgctcggtgcgtgcatcaatcaagcggggggcagtggacctgatcatcgccaaggcattggaagacggggtgatcgaagacgccgaggccaaagccatccttgcagcccatgccagctacatggccgagcgccatggcgaggtgctggcagtggtcgctcttcacagtgaaggaagtctccggtga

SEQ ID NO: 329510 - DNA, 192 bp, Pseudomonas aeruginosa
atggcaaacctcaacgaccaagctagagaagaactgctcagcgtactggactgtgctcagcagcggctagacacgctaagggaaacagtccgtaccgccaaggggacgctggcagacagcgatatccgcatcgcaataggtgacgctcttacgccattgaacatcgccttcgagctcatggaggccctgtag

SEQ ID NO: 329511 - DNA, 294 bp, Pseudomonas aeruginosa
atgagcgtctacaagcttgtctgcccctgctgccacagccggatgcggatccgctcctccgagggccaaaccccgtgcttccgctcgatgtacgcgcaatgcacaaacgcgctctgcggcgccaccttcaccggctccctgagctgggactaccagctcagcccctcgggcctcgagcggccactgctggtgctccccatggcgccttcgaaaacccgtcaactggcacgccgcgacctcgcggccgcaaccaaccagttggacctgctggaccacatggagtgcatgcaatga

SEQ ID NO: 329512 - DNA, 351 bp, Pseudomonas aeruginosa
atgaactgcaccaacgactaccgcagcaccatgcagcaagccgccgcagcgtacctgcaggccaacgccaaccagtatctgtcctccggctccgaccggttgttcgatgcctgtgtcaaccatttggccaaaggcctcgaggttccccagttcatggccgagcaactcgcccagcgcgcgtggaatgaagtcttcgcggggccagatcctatctggctgggtatcgactggggccagggagacgacgaggtggtttacctgatcgacacccgcaatcactgccgcttcccgatcccggcccgctatctgcccgcgcacctgctcaaacagcgcccccagcacacccagtaa

SEQ ID NO: 329513 - DNA, 234 bp, Pseudomonas aeruginosa
atgagcggccacatttcaatcaccgtcgaagtcgaccagaaccaggctgagaagtacctgctctggctggtcagccagtacgaagccgccatggccgagtgctggtacgacgatcgctaccgctatacgccgcaggggctgcgcggcaagcgcatcctcgaggaccgcccacacattgctggcatctgccggacgatccgcgaactgcgcaagcaggttcgggggcgcgcatga

SEQ ID NO: 329514 - DNA, 2721 bp, Pseudomonas aeruginosa
atgaaggaaatggaccgcgagctcaaggccgacgtgctgcgccgcctgcaggatcagtacggcctgacgccgatcaagggcacgaagtacatgcgcaaaggcgagtgcccgacgtgcggcaaaaaggagctctacaccctggtcgacagcccctggttcatccgctgcgggcgcggcaagtgcggcgacacctggcacatcaaggaaatctacccggagctcttcgacgactggagcaagcgagcgccggccaccgacaaggaacctgcagcctcggcccgggcgtatctggcgcacgcccgcggcttcgacctggcgctgatcgatggctggtacagccaggaaaactactgggaccgcgaccttgagatcggtagcgcgacagtacgcttcccgctgaagaaaggcggctactgggaacgcctgatcgatcgcccgagccgcttcggcaagaagaaggcccgattcaagccgggcgacagcccgcgcggcgtctggtggtgcccacccaacgtcgacctgcaggaggtgaaggagctgtggatcgtcgaaggtatcttcgacgccatcgcgctgctgcaccacggcatcgacgccgtgtcggccatgagttccaacgccttccccgagcagtctttgcgcgaactcgcgacagcccgtggcggcaagctgccgaaactgatctgggcgctggacaacgaacccggtgcccacaggtacacccggcggtgggtgaccgaggcgcgcgccctgggctacgtctgcgaagcggcccaactaccgcaacgcaacaaccgcaaattcgactggaacgacctgcaccagcgctggatgttcatcgatgacgcggccgagcgcgtcgcgcagatcgagaaagacctcaagaccgcgcgtcatgagggcgcgctgctgatcgccgagagtgccgccgagaaggccctgctgatgtacgactggggcaagcgcggtgaattccacttccgcttcgccaaccgcctctactggttcaagctggatatcgagaagttcaacaaggccatgcagagcctcgaggacagcgacaaccacgacgaccaattgctgaaccagaaacagatgcgcgacaaggccctgcagcaagccggcggcgtcgtggaaatcgccaactgcttcccccaggccctgtacttccagcgcaacgaggtcactgacgagagctggtactacttccgcatcgatcgccccgacgacgagagcgtgaagaacaccttcaccagtgcccaggtcgcggcggccagcgagttcaagaagcgcctgctcggcgtggccgccggtgcgatcttcaccggcagcggcgcgcagcttgaccagatcatgaagctgcagctcaccggcttgaagacggtggccaccatcgattacctgggctacagccgggagcatgcctgctacgttctgggcgacgtggcggtgcgcggcggcgtgatcgagaaggccaacgccgaagacttcttcgagttccagaagctgcgcctgaagaccctgcagcgctcgatcaagctgcagatcgccaccgacgccaaggactaccgccccgagtggctggactggctgtggacctgcttcggcgccaagggcctggtggcgctggcattctggttcggctcgctgttcgcggagcagatccgcgccgagttccagtcctttccgttcctcgaggccaccggcgaggccggtgccggcaagtccacgctgatcacctttctgtggaagctgctcggccgggcggacgaggaaggccaggacccgtcgaagatgaccaaggcgggcctgcgccgctggctgacccagctgtcgaacatgccaatggtcatgctcgaggccgaccgcagcgacaacagccgcgccggcgccgccgccaagtccttcgactgggacgagttcaagccgctgttcaacggccgcgcgttgggcgtgaccggccagaagaccgccggcaacgagacctacgagccacccttccgcggcaccctggtgatgagccagaacgccacggtacaggcctccgaagcgatcatgacccgtatcgtgaagctgcacttcattcgcccggaaatcacccgcgagagccaggccgcggccgacaacctcaaccacctgggcgtgctcgaggtcagccacttcctgctgatggccatccgtgccgaggcccgcgtgctggagtgcttccgcgagcggctgaaggttcacagcgcgacgctgcgcggtctgaaacagattcgtatcgagcggctgatactcaaccacgcgcagatgatggccctggtcgacgcgctgcgcctggtggtgccgctgtccgagcaccagctcgcctgcgctcagcagaccctgatgacgatggccctggagcgccaggacgccgtcaacgccgacgcgcccgaggtggccgagttctgggaggtctacgactacctcgaaaacctcagcgaagagccggtgctcaaccacagcaagaaccccggaaccatcgccatcaacctcaacgagttcgtgaagctggccgccgaccaccgccagaaggtggccgacgcggcaaccctgcgcgacctgctgaaagagtcccgccggcacaaattcatcgaatacaaggccgtcgacagcgcagtgcgcgcggcacacgcccgccagaaccctttcaccaaccgacccagcaccgtcaagtgctggattttccaagcctaa

SEQ ID NO: 329515 - DNA, 273 bp, Pseudomonas aeruginosa
atgcaactgaatgtatcccgcggcgcacccgctactggcaagacggtccgcctgcgccaaatcgcaaaggctgacggccaaagcgagaaccagattctggtgggtcgtcacatgacgacagcagcactgaaagacgcggtttggcacctctccaatcgcggcgcgacggtcatctgcatcgacgagtgcagcgaagagcagatcgcggctctggagcgctaccagcaccgcatgccggaccacctgaccatccatgccgttgtagcgaactga

SEQ ID NO: 329516 - DNA, 342 bp, Pseudomonas aeruginosa
atggaagcaacagagaaaaaggccacccctatcaatgacttttacgactacctcttctccatagaacgagagatggaggccgtggaagacgcgcagaaacgtctggcgatagccaaccaggaattgaagaacacgaaggacaaggcggtagccctgtaccacgcggcctgggaagccgcacgggaagccgggcaggagatccccgacagcatcatttgcgggaccactctcgtgcgaatcgacgacgagggggggatatctgttgatcgcgttgaggccgtcgaccgttacaggctgctcagcatttccagggcagcgggtgaagtgcaagaacaaggctaa

SEQ ID NO: 329517 - DNA, 354 bp, Pseudomonas aeruginosa
atgcaacccctcccccacgactatctgcagttgatccacgacttccaggccaggcagcaggagaacgaggtagccggcatcacagcgttgaaacgcctgctcccgatcgcacagcgcgacagcggccagagcggcgtgatcggtcggttcctgctcggcctgtacaacggccaagcccaccgcttcgacctcaccgagctacgccgcctcgacccagctctgttcgatgcgtgcctgtccgtgctgcgtatggactacgccccgaaacaggaagtgcatgagtacttcgaggacggcgacgcgatctggcaggacctgcgcaaacgctgggccgcagcatcgctgccggcatag

SEQ ID NO: 329518 - DNA, 207 bp, Pseudomonas aeruginosa
gtggatgtgatcgaccaggccaacgaacgggccgagaacatgatccaggccgccctggctcagcggacgaacacccgcctggcgcccagcgctctctggtgcgaggactgcggcgagcagatacccgaggcccgccgccaggccgccccaggctgcgagtgctgcatcagctgtcaggaactgcgcgagcaccccgcgcggcgctga

SEQ ID NO: 329519 - DNA, 252 bp, Pseudomonas aeruginosa
atgcaagcgaatcaaccccaaggcggcgacgccaaggctagcacagccacgtcagccacccgcactcgtccagcgatggccagcaagcgactggaccttccgagcacctgcgacatctgcggcaacgcgcgttccaccggcaagcaccagcgctgcagccggattcgccaacaggccaaggcggtcgagtgggccagctacatggccaacctggcggccaagaaagcgcagggagggcggcggcatgcttaa

SEQ ID NO: 329520 - DNA, 132 bp, Pseudomonas aeruginosa
atgcttaagcgcatgggcaccaccctgctgctggccgagcagggcgagaccttcaggctcagcaacaccccaatctgggtgcgcaacgtggcggtggcgctgagcgtttcacaacccgctgaaagtcgctga

SEQ ID NO: 329521 - DNA, 189 bp, Pseudomonas aeruginosa
atgcacgaattattgaagatgctggacaacccgcgcagcttgctgaacttctcgctggcgattctgactgtcctggcggtgttcttcatgttgaagagcggcgcgcaagctgattcgaggcccgtcatcgatacccagaaaactggggccatcattctagtcagccccgagggagacagggcggtatga

SEQ ID NO: 329522 - DNA, 213 bp, Pseudomonas aeruginosa
atgatcaagcagcccccgggcacaatcctgaccttcgaggatctgcagcagctaaccggatacaccaagcgctctggtgtagagcgagcactgcgtaaacagggaatccgttggttctggggccgtcacggcccctggaccaccgttgaaatggtcaatcaggcaggcgggcaagcagcggacgacgggcattacgacagcagaatcctatga

SEQ ID NO: 329523 - DNA, 1149 bp, Pseudomonas aeruginosa
atgaggcgatcccgcaagcggaagcataatccgcacatacctcagcacatcgaccaggccgccattccggcggccgttttcttcgatcatcgcggcaacggcgtgtggtacacgctgcattatgatgaaggaggccgccagcggcggacgaacctcgccccctcctacgtgagcctctccgagctccaccgcattatggaggaacgggacgggatcgatcgagacagcctggcgcacctgtgcagcgagttccataagagcactcagttcaagcgattgaaacccaagacccagagcgactacgagtattgccgggaaattctactagccatcccaacgcggctaaagaagccgctcggtgagttggcagttcgaaagttctcccctgccctagtacagcgcttggtcgaccgtcttgccgaagaaggcaccccttcgaaagccgcccatgtgctgcgctacttgcgacgagtgatgcagtggggccgcaatcgcggctaccttgagatcaacgtcgcccaaggcatcgaagcgcctgtagaacgaaagcagcgtcgccttcctgccccgacggtgatgtaccgcctgatcaatcgggcgcgcgaattgggcaagctcaagcgagggcaaccaggcgcatgtcccgcgtacctaagcagcgtcatggaactggcctacctatgtcgcctgcgcggtatcgagacagtcaccctcagcgacgccaacgaactccccgagggcgtacttacgaaccgcagaaagggcagtcgcaacaacgtcgtgcgctggacacctcgcctgcgggctgcgtggaaccatgcgaaggcctaccgtgcccaggtatggacctcgaagtccataccaaccccgaccgcgccggaacggcggccgatcatcgtggcatcgcacggcggctcactgcagaagtcgagcctagactcagcctggcagcggttcatcaccgccgccctcgaggcaggcatcatcactcccgaccagcgcttcgggttgcacgacctcaagcggcgcggcattaccgacacccccggcaccagggccgataagcaagaggccagtggccaccgagacgagtcgatgcttgatgtctacgatctgagcgtgcctctcgtatccccttccgccgactga

SEQ ID NO: 329524 - DNA, 171 bp, Pseudomonas aeruginosa
atgggctacgcactgaagaaaaccgaccgcatctatatcccgccgcgcgacaagtcgcaggtagcggtagcgcgtccggccgaaggcgaatacaaagcccagctcgaaaaggctttctgtgccgcattccagcggtacgagaaagcgcttgaggaactggccaaggtataa

SEQ ID NO: 329525 - DNA, 507 bp, Pseudomonas aeruginosa
gtgaccggtagggacctctcgcaattcggcgagatttgcgaaggcattcgctacctcactgtcgacgcgctggtttggataaaccggcaactcatcatcagccaaaccccggccgaaatggtcggggttctgaagccgaacgagcttgagtcctcacagcaacgccccgcccagtaccgttgctacgtccaggatcaggacatgtactgtctagcttctgtcctcatggaaagcctggtcagaaaccaccccttcgccaatgccaacaagaggactgccgctgtcgccggcttcatcttcctgttgatgaatggttacgaactcactgccccaggccatgagctcgtaacgattttggccggcctttccacaggggtgtacgaaagggaagatgtcgagaactggcttgcgcactggggccgcgcctacgacagccgcaacctcaacgcacctgatgcctggcttgaaatgtacgcagccacactgagcgtcgtcgccggtgagtag

SEQ ID NO: 329526 - DNA, 1200 bp, Pseudomonas aeruginosa
atgaacaagaacaacaccgccgttcgccgaatcctgccgctgaccctggcctcgctgggtgccctgggcggcctgcaaccggccgccgccgatatcctgctgtacgacaaggacgagaccaccttttccaccgacggctacttcaatgccttctacgtcaacagcgacgtcgaccgccagggcgagacctacgatcgccgccagtcgcgggtgaagatgggattcctgccgaactacatcggcttcaacttcggcaggaagatcgacgagctgagcctcggcggtcgcgcctccttctgggtgaccatcaacgacagcgagaccgacggcaccgataccgccatcgacgtccgtcagttctacggcacggtcgccggcgactggggcgaggtgctgatcggcaaggacttcggcctgttctcgcgctcgaacatcttcctcgacgaactgctggccggtttcggcaaccccagcgacaccctcggcctggtggacggcaagggcgtctccttcggcaacatcggcaccggctatccgtatccgttccccacctcgcagatcacctaccgcaacaacgacctgctgcccggcctgcgcatcgccgtgggcatcctcgacccgatcgactccaaccagatcgacaaagatgccagcgacggcctcgacgacaaggcctaccaggacaacccgcgctacgagagcgaggtcagctaccagttcgacctggctggggcgcaggtctacagctggatcaacggcggctaccagacttcgaagaacaccagcgacagcgtcgacagcgtgacttccaagggggtcggctatggcttgcaggtgaagatgggcggtttctccgtgaccggttcggggttcaccgccaagggcatcaatcccttcttcaccaacaacgccggcgaagccgcgctgcgcgaggtggacagccgcggcgcattgctgcagggctcgtattcatggggcaagaaccgcctggcgctgtcctacggcaagaccgtcgacgacggcaacggcctgggttccgcggccgactacgagagtcgcggcatcgcctatttccgcacgatcaacgacaacctcaagctggtcgccgagctgaaccgctaccggatcgacgggcgcgacggtgccgcgctcgacgaggacaccgacaccgtggccctcggcgccgtactgaactggtga

SEQ ID NO: 329527 - DNA, 2286 bp, Pseudomonas aeruginosa
gtgctgcccaacggcctgcgcctgcacctggcgcatgatccggcggcatcgcgcgccgctgcctggctgcgggtggcggcgggcagccacgacgagccgagcgcgcatcccggcctggcccacttcctcgagcacctgtcgtttctcggtggcgcggcgtttcccggcgacgagcgcctgatgccgtggttgcagctgcgcggcggccaggtcaacgccagcacccggggcaggaccaccgactatttcttcgaggtgacggcggagcaccttggcgccggtctggcacggctgatcgacatgctcgcccgccccttgctggacatcgatgcgcaacggcgcgagcgcgaagtactcgaggccgaatacctggcgcgctcggccgacgagcagaccctgatcgacgcagcgctggccctcggcctgcccgccggacaccccctgcggcgtttcgctgccgggcgccgcgacagcctggccctggagaacgatgcgttccagcgggccctgcgcgaattccatgccgcccactatcacgccggcaattgccagctatggctgcaagggccgcaggcactggacgagctggagaggctggcgcagcgtgcctgcgccgacctaccggggcgcgcgccaggcgcgagtccgccgccgccgccgttgctgcccttcgccggcgaagcgctggcgctgcgcctgccgggaccgccgcggctggtgctgggctttgccctcgacgctttgcgggaggccgacgaacagaccctgctggcgttcgccgaattgctcggcgatcgctcgccgggcgggttgctggcggcaatcggcgaacagggcctgggcgaatcggtggcgctgcgggtggttcatcgggacgcgcggcaggcgctcctggcgttgaccttcgaactgttcgacggcagcgcggcggcggcgctggaggcggcctttttcgactggctgggcgccctgcgcgacgatgccgccagcttgctggcggcgcgccggccgttgctggcggagcccactgcgccgctggagcgactacgccagcgcgttctcggcctgccggcggagattcgcccggcctgcctggacgcgctgcgcgccgaccgctgcctgcggctgcacctggacggcgaactcgacggcgccgaagcgcgctggtcggcgggcttccgcctgagcgtggcgccggttgccgcagcgccgccgctgaccgcgcagcggcatgcctggcgcttcgaactgccgttgccgcccagtgccgccgccgagggcgcgctgttcctgcgctggcgctttcccggtgtgcccgcacggtcacgcttcctggcgctgcgccaggcgttgcgtccgctgtgcggccaggcgcgcctggggggagtggagatgggcctggaggcgctcggcgaagactggtcgctgagcctgctcggtccgcgcgatcgcctcgaggccgccgtgcgcccggccctggcccggctcctcgcggcgccgcccgactggcgcgcaaacggcgagcgtctgtcctctgccgagcggcgccgcagcgccactggcctgccgatccggcagttgctggacgccttgcccggcctactcggcgagccgctggcggaggtcgacgactggcggcggacgcgctgggacgccttggtcatgcaggccgcgatgccagatccccgatggatgcccggccaggctgccggcgagcgcctggagcctatgccgccgaggcccggacggcatcgccgcgaactggccgtggacggcgagtcggcgttgctgctgttctgcccgctgccctcgccggaggtgccgatggaggcggcctggcgcttgctggcgcgcctgcacgaaccggccttccagcggcgcctgcgcgacgagctgcaactgggctacgcgttgttctgcggcttccgcgaggtcggcgcccggcgcggcctgctgttcgccgcgcaatccccgcgtgcctgcccggaacgcctgttggagcatatggagaccttcctccagcgctccgtcgaggcgctcgcgcaactgccggcgcaacgcctggccggcctgcgcgaagccctcgccgacgacctgcgccgagcgccgggtagcttcgccgagcgagcccggcgcgcctgggcggagcaccttggcggtggcgccggtcgctcccggctgctggccgaggccgccctcggcctgagcggcgacgacctgctcgcggcccaggcccggttgctggaggcgcgcggcggctggtgggtgctttccagccggcgctga

SEQ ID NO: 329528 - DNA, 639 bp, Pseudomonas aeruginosa
ttgctgctggcagtcggcgcggcgctggcgcagtgggacctggagtcgatactgagccgtgccgagcagcgctacggcgagctaggcgcggcgaaatcacgcctgggcgactggggccgcctgctcgaacagggcggcacgctcgacgaagcggccaagctgcgcgcggtcaacgacttcttcaaccagtcgctacgcttcaccgacgacatcgaaatctggcagcaggaagactactgggcgactccggtcgaggcgctggtcaagggcgcagccgactgcgaggactacgccatcgccaagtacgtgaccctgcgtcgcctcggcgtcgccagcgacaagctgcgcatcacctacgtcaaggccctgcgcctgaaccaggcgcacatggtgctgacctggtacgccagcccgggcgccgacccactggtgctggacaacctgatcggcgagatccgccccgcttcgcaacgcgacgacctgttgccggtgtacgccttcaatgccgagggcctctggctgcccggcgccgacggcggacgccggaccggcgacagcaagaagctgtcgcgctggcaggacctgctgaccaagatgcgcgccgaaggcctcgacctcgacgcacccaaggaggattga

SEQ ID NO: 329529 - DNA, 1953 bp, Pseudomonas aeruginosa
atgtcactgctcaagcaattgttcctcgccatctgcctgttcctcgtcgtcgccttcagcggcagcttcgtcagcagcgtggagaactcccgcgagcagttgcgcggccagttgcgctcccacgcccaggacgccgccaccgccctcggcctgtccctgacgccgcacgtggacgacccggcgatggtgcaactgatggtcagctcgatcttcgacagcggctacttcgccagcatccgggtgatcgacatcaagagcggcaagccgctggtcgagcgcgtgcaggcgcatgacgagcgcacggtgccaggctggttcgcgcgcctggtggatctccagccccagggtggcgacgcgctgatcatgcgcggctgggaacaggcggcgcgggtcgaggtggtcagccatccgcaattcgccctggcgcgcctgtgggacagcgccctgggcagcctctactggttgctggcctgcggcgcggcgagcctgctgcttggcggctggctgctgcgccgccaactgcgcccgctcgaccagatggtgcgccaggcccatgccatcagccggcgggaattcctcagcctgcccaggctgccgcgcacgccggagctgcgccgcgtggtgcaggcgatgaaccagatggtggagaaacttcgcacgctgttcgccgaggaggctgcgcgtagcgacaagctacgcgcccaggcctaccaggacagtctcaccggcctgcccaaccggcgcctgttcgacgcccgcctcaacgaacagctgggtgccggcgagcacgagcatgccgggcagctcctgctgctgcgcctgaacgacctgaacgggctgaaccagcgtctcggcgggcaacgcacggatgaactgatccaggcggtcgcccgcttgctggtcgactcctgcggccagcaagggcgcgccgactggctgctggcccgcagccgcggcggcgagttcgccgtgctggctcccggttgctcccgcgagcaggccgaacgcctggccgaggaactctgcgaaggcctggagaaccttgcccgcaccggtgccagcgatctcacgccggtcgcctatctcggtatcagcgcgttcgccgaaggcgactcgcccgcggatctcctggccggtgccgaccaggccctggcccaggccgaaagccagcccgcccagccctgggcgagccaggacggcaccgcgctcgcggcgctcaacgatagccaggactggcacgactggatcgaccaggccctgacggagcgccgcctgctgctctatttccagccggtggtggactgcctggacacccagcgcgtcctccaccacaaggtcctcgcgcgcctgctcgacccgcaggccacggccatcgccgccgggcgcttcctgccctggatagaacgtttcggctgggccgcgcgcctggacctggcgatgctcgaacagagcctggagcacctgcggcgccatccacggccgctggcgctgagcctgtcggccgccagcgtccgcaatgcgcaggcgttcgccccactactggccctgctcaaggcgcatccgcaggaggcgcgccagctgaccctggaactggacgagcggcacctgccagccgcggccgaactggagcgcctcagccaggtcctgcgcgaactgggctgcggtctcggcctgcagcatttcggcggtcgcttcagcctgatcggcaaccttacccatctggggctggcctacctcaagctggacggctgctacctgcatgccgtcgaccgggaaggcgacaagcggttgttcatcgaagcggtctatcgcaccacccacagcatcgatctaccgttgatcgcggaacaggtggaaacccacggtgaactcgaagtactgcgggaaatgggcttgcgtggcgccatgggacgcctgttcggcagcccggcgccctggtccggggatgcctga

SEQ ID NO: 329530 - DNA, 624 bp, Pseudomonas aeruginosa
atgagcggcattcccgaaatcaccgcctatcccttgccgaccgcccagcagctgccggccaacctggcgcgctggagcctggagccgcggcgcgcggtgctgctggtgcacgacatgcagcgctacttcctgcgcccgctgcccgagagcctgcgcgccgggctggtggccaacgccgcgcggctgcgccgctggtgcgtcgagcagggcgtgcagatcgcctacaccgcccagccgggcagcatgaccgaggagcagcgcggtctgctcaaggacttctgggggccgggcatgcgcgccagtccggccgaccgcgaggtggtcgaggagctggcgccggggccggacgactggctgctgaccaagtggcgctacagcgccttcttccactccgacctgctccagcggatgcgcgccgccggccgcgaccaactggtgctgtgcggcgtgtacgcccacgtcggggtgctgatctccacggtcgacgcctactccaacgacatccagccgttcctggtggccgacgccatcgccgacttcagcgaggcgcaccaccgcatggccctggagtacgccgccagccgctgcgcgatggtggtcaccaccgatgaggtgctggaatga

SEQ ID NO: 329531 - DNA, 789 bp, Pseudomonas aeruginosa
gtgcgtcactccgatcccctgggcgaggcggcggaaagccgggccaaggcttccgggctgatcgccgcgctgaagagccaggcgccgcagcgcctgggctcgcacccgcacgtagtggcggcgctggccagccgcaacgcgccgatcgccgacttctggctgcgcggcgccagcgagcgccagcagttgcaggccgacctgtccggacgcgaggtgctgatcgtcgacgccgaggacaccttcacctcgatgatcgccaagcagctcaagtcgctgggcctgacggtgaccgtgcgcggcttccaggagccgtactcgttcgacggctacgacctggtgatcatgggccccggcccgggcaaccccaccgagatcggccagccgaagatcggccacctgcacctggccatccgttcgctgctcagcgagcgccggccgttcctcgccgtgtgcctgagccaccaggtgctgagcctgtgcctgggcctggacctgcaacgccggcaggagcccaaccagggcgtgcagaaacagatcgacctgttcggcgccgccgagcgtgtcggcttctacaacaccttcgccgcgcgcgccctgcaggaccgcatcgagatccccgaggtcggcccgatcgagatcagccgcgaccgcgagaccggcgaggtccatgccctgcgcgggccgcgcttcgcctccatgcaattccaccccgaatcggtgctgacccgcgagggtccgcgcatcatcgccgacctgctgcgccacgcgctggtcgagcggcggccctga

SEQ ID NO: 329532 - DNA, 3642 bp, Pseudomonas aeruginosa
gtggccagcgccctcgaagcgcgccgcgacatcgccctctccgccgggcgcgacgtgaccctggcggcggcggcgaacgaggagcacagcttcgccaccggcaagaaggtgacggcgaagaacgatcgggtggaacaccaatcgaccgtggtcagcgccggcggcgatctcagcgtgcaaggcggcaatgacgtgaccttcgttgccagtcaggcgaaggccagcaacgaggcctatttgtacgccggcaacgacctcaatctgctggcggctcacgacgaaagctattcctactacgcgaagaagaaaaaaggctcgttcgggcgcagcagtagccggatgagcgagagcgaaaccagtaccgtggtgtcgtcgtcgatccaggcgggacaaggggcggaactggtcgctaagcgtgacgtcaacgtcgaggcctcttccgcctccagcatgaagggcgagctgacggtcgtggcggggcgcgacgtgaacctcacggcagctgcgaacagctactccagcgcgtccgcgaaatccaagtccggaggcctggggctgtcatccaccagcaaggccaacgcccagtcctcttcctacaccagcgttcagggcgccacgttgagtggcgataccaccgtggtgcaggcgagaagggacatctcggtggccgccagcaatgtggtttctaccgggaagactgcgctgcgtgccggcaacgacatcatcatcgacagcgtggcggagacgtcggagtcgcatcgcagcgagtcgaagaagaagtccggcctgatgagttccggagggatcggcatcacgctcggcacggcgaagaatgcctcgacgcaggacacccgtaccgtcgtcaaccagggcagcaccatcggcagtgtgctcggcgatgtcgacatgcgggcgggcaagaacctgtctatcacggcttcggatgtggtggccggcaaggacatcaacctcgtcgggcagaacgtgagcattctcgctgccgacaaccagaacgtcagcgagcagacccgcaagaccagcaagagcggcttgacgctggccttgtcgggaacggtcggtagcgcaatcgacgccacctaccagaatgccaagcaggccaggaacgaagacgacagtcgcctttccgcgttgcaggggatcaaggccggcttgagcggcgtccaggcctggcaggcagctcagcagaacggcggcatgacgggcgagaacagcgcgcagttcgtcggcatcagcgcttcgctgggctcgcagaagtccagctctcggcagcgccaggagcagcagatcagccagggaagcacgctcaccgccggtggcaacctgaacattatcgccacgggttccggggctgtcggcgaagacggcgacttgcgcgtgcaaggcagcaagctgcaggctggcaaggacctccaactgatcgccaaccgcgacgtcgtgctggaagccgcggccaatacgcagaagctcgatggcaagaacaagagcagcggcggcgctgtcggggtaagcgtcggcgttggttcgggcgaggctggcatcagcattttcgccaacgccaacaagggtgccggcaaggaaatcggcaacggcaccacctggaccgaaaccaccctggacgcgggccagaaggccagcttggtcagcgggcgcgacaccacgctgaaaggggcgcaggtcaatggtgaaagcatcctggcgaaagtgggtcgtgaccttaccctgcaaagcctgcaggatcgcgattactacgattccaagcagaagaacgtcggtggtggggcgagtttggctatcgttggccagggtggcggcgccaacttgagtctcagccagagcaagctgcattcgaagtacgacagcgtgcaggagcagaccgggctgttcgccggcaagggcggcttccaggtggaggtgggcaagcacacgcagctggatggcagcgtgatcgccagcaccgccgaagccgagaagaatcgcctgagcacaggctccctgggctggagcgagatccgtaacaaggccgagtacaagagccaacttcagagtgtcagtgtcagcagcgccaacgatggcgccggtgcgttcgtcagcaacatgcctagcggcatgctcattgcctacaaccacggcgatagtgccagcggtaccacgggttcggcgatatccgaaggcaccctggaggttcgcgatccggcgcgccagcaacaggatgtggcgacgctcagccgtgacccgagccgcgccaacgatagcgtcagtccgatcttcgacaaggagaaagagcagaagcgtctgcagcaggtccaactgatcggcgagatcggcacccaggccatggatatcctgcggacgcagggccaactcgacgccgacaaggcggcgcgggccgaactggaagcgcggggtatctccgcgccggacgccggcgccagcgagcggcaagtcgaggactaccgcaaagcgcttctgggcacgaatgcctaccaggacatcatgggcaagtacggcaccggaggcgactaccagaaggccgcccaggcggtgaccgcagccttgcaagggctggccggcggcgacattggctcggcgttggcgggagcttcctcgccctatgtggcgggcgtgatcaagcaggtggcaggcgacaatgacacggcgcggatcatggcccacgcggttcttggcgcggtggttgcgcaggcccagggcaattcggctgctgcggggggcgcaggagcggcggggagcgaactggcggcgcaggtgatcagcgagcgactgtacggaacccgtgatagcgcgacgctgaacgaagcgcagaagcagaccatcaccgcgctggccagcctggccggcggattggcaggctccgttgtcgatgggagcagcggaggagccattgccggggccgcaggcgggaagaatgcaacggaaaacaacttccttggcggcggaactccgccgggcttgatcagctacggtcaagcagcgagttccttgaccgagtacatgcgcaagaacggcgcgacagccgaggagatcacccaggcgcaacgtgatctggcccagggacagggcttcgatggcgtacagccagcgaatgagttcatcaaggcctggggcgaggccatggttgcggaagctgccggccttgggattgttgcggggttgggtagatttgggttgtggggtgcaaagggagcgactcctgttgtaactgctgaggggcgaatcggtaactcagtatttacggatgttaaccagacggctagaccagcagcccaggcgaatcccaaccaaccgaccttgattgccgatcgagtggacgcaaagatagcggctaaggggacgcctcatccgaatgggaatatggcggatgctcatgcagagattggcgttattcagaaggcatttaatgaaggtaaaacggtaggctccgatatgaccatgaacgtagtaggtaaggatgtttgtggatactgcagaggtgatattgctgcggcagctagcaagtctggtttgaaatctttaactattcaagccaaggatgatattacaggtttgccgaagacgtattactgggaggtaggaatgaagtcaattagagagaaaaaaatatga

SEQ ID NO: 329533 - DNA, 1842 bp, Pseudomonas aeruginosa
atggctgctgccggtagcactgcaatggtccaggccggtacagcagtaggaacagctgccgccggctgggcgaatgccgctggaactgccgtggctatgggcatggccagcaatggagcgatcagcaccatcaacaaccggggaaacctgggggatgtcgtcaaggacgtgacctccagcgatgcgctgaggggctatgtagtcgctggcacgactgcggggctgactgccggcgtctacgacaaatggacctcgacccagaccggcacctcgaccgctctaccgaacaccggggccgtggcgcccgccgcagggttgggcacctggcaaggtgtgggccagttcacctcgaaccagttgctgcagaatggcacttcggtgctgttggaccgagcgctgggcggcaagggcagcctgggcgatgcgttgcaaaacagcctggcaaatgccttcgcggcctacggcttcaagctgattggcgacaccacccatggcgtactggacgacggcagcctcggcaagatcggcttgcacgccctgatgggaggtctggccgccgaagcggtcggtggcgatttccgtaccggagccctggctgcgggagtcaacgaggcgctggtggatagcctcgccaagcaatacgccagcctgcccatcgatgacaagaagggcctgctgaccatgagttcgcagttgatcggcgtgctggcggcttcgacgcagggcgatgcggacgccaagagcttgcagacgggagcctgggtggcggggaatgctactcagtacaacttcctcaaccatgcggaaaatgaggagcgttggaagtcccaaaaggcctgccaaggaggagacgaggccgcctgtgggcgtgcggatgcttgggataagttggaccgcgaccgagatctagccttgatgactgcctgctctacgggcggacaggcatcgacttgtagtgcattgcgtcaagaagcctggaaggctgctcaaagcctcaagcaggccagttggagcccggaagcgagggaacaatacgcgcaagccatgcaaaatccggaattgcgtgcttacacgattgagtcagagcttcgaagcatcaatcaggtaaataatcctattaccgctggagattcaaagcgcctcgctaaagctttggccagttttggatccgacttcgtccccgtctacggtgacacaaaagcattttctgaagctcaagacccctttgactatgcaatggcaggggtgggactggttcctggtgctggagatgcggcacagaaagtattgagcaaggcgaaaaagctcttccaagaagggaaggtggcagagtctgctgatttagtagagggattaacaaaagaggtaaaaaacagtaacgctgcaaaaggatttattcctgcagaaaggactgggcttaattttgaagagaaggtaaaaaataaggccggagggtatgttgatgttgagttgtctgctaggcagaagtttgataagtcaggtgttgtagtagatagtaaattcgcccaaagcgatctagttgctcgttactcgcccgatgggaatctgtatatagattggtatggcactactgtgtctgggaagggagttggtagcgagatgatttctagagcaattgaggcagtaggagcaaataaggttaagacggtttcggcgcagttaggaaaagacaatcttgatgcttttaaagctgggtcttcgagagggctttccaaggagcaggcagtatggaatactccactaggtaagacaatgagctctttaggttttacggaagttgaggttcatggggcaagtgttaaatttcttcatttagagtga

SEQ ID NO: 329534 - DNA, 2160 bp, Pseudomonas aeruginosa
gtggccagcgccctcgaagcgcgccgcgacatcgccctctccgccgggcgtgacgtgaccctggcggcggcggcgaacgaggagcatgcctacagcaagaccaggaaggtcacctaccaggaagacaaggtcgcccagcaaggcacccgcgtggacgccggcggcgatctggcgatcaatgccggacaggacctgcgcctgatcgcgagccaggccagcgccggcgacgaggcctacctggtggccggcgacaagctggaactgctggccgccaacgacagcaactactacctgtacgacaagaagaagaaaggcgacttcggccgcaaggaaacccggcgcgacgaagtcaccgacgtcaaggcggtgggcagccagatcagcagcggcggcgacctcaccctgctcagcggcggcgaccagacctaccagggcgcgaagctggaatcagggaacgacctggccatcgtcagcggcggcgcggtgaccttcgaggcggtgaaggacctgcaccaggagagccacgagaagagcaagggcgacctggcgtggcagtcgtcgaagggcaagggccagaccgacgaaaccgtgcgccagagccagatcgtcgcccaggggaatctggcgatcaaggccgtggaagggctgaagatcgacctcaagcatatcgaccagaagaccgtgagccagaccatcgacgcgatggtgcaggcggatccgcaactggcgtggctgaaggaggccgagcagcgcggggatgtggactggcgcatggtgcaggaggtgcacgatagctggaagtacagcaactcggggttgggggctgcgccgtcactggccattgccatcgttgcggctgcttacctggggcccgtttatggcgcaatggccagcaatcttgcgactgggaccataaacaatggcggtgacttcggaaaggggctgaagtttgcgacgagctccaatgctttgaagggatatgccgttgcgggtgcgacagcttatttggtcagtccgcaactggatgagatgtttggtgtaagcaccgacaacgtcaataaagtcactaaaggatttgacctgagcactatgagtggtctaggtgggttcgccacctattctatcattcaaggtctctctcaagcgggtattcaaactgccgcgtttggtggaagttttgcagacaacttaggtgatgcaatggccggtcaagcaacaaacttggctatggctgctgggttcaatctcatcggtgattgggctgatggaaagtttgattctggctctccgcaaaaaattatggcgcatgccttgatgggaggattgctcgcccaagcaacaggtggagacttcaaaactggagctatggcagcaggggctaacgaagcgcttgtcaatgtgctgtctaacatggccggtggcgaagaaaagctagagcttatggcctcacagctaacaggtcttcttgctgctactgtagttgatggagatgttgcgaaaggggcagagattgccaagaacgcaacggcctacaatcagcaggttcaccgggacgctctgagtcgactgaaaagaggaatgagtgcgcttcatgaacaaggcaagtatgctgatcttgagccggagatagtgcttgctgagctgcaaaaaatagccagtggcgaagccaaaagcgtttcggatttgaacccgaaagtggttcagtttctgaatagtgaattttctcctgcgagcctgagagaaacgttgttcgagccggagtcctgggaagaatatgctgcgatagccgtcgacgtactttatccaacgcctggggggaaggcagcagctattgagaaggcaggtggtaagctgtctaaagaggcgttggaagctctggagaagaagttttctgaaagcactaaacaggagcttaagtcaaaacttttacaggaagacccaaggaatctaattcctactcagactaaggccgaaatgtcaggctcgcagattaaaaggattgtgaaaagcattaaggagaacggatttgatcaagaaaaaccagtagacgtttggcgtaatccaaaaaccgggcgccttgaaattcaagatggacatcatcgaacggaggcagcaaagaaggccggattagataaaatacctgtaagcatatgggagtga

SEQ ID NO: 329535 - DNA, 1365 bp, Pseudomonas aeruginosa
atggcgagagtccgagctgcattcgtaaacgatcagatgctcaagggtatgcagccgggctgcaagccgcttagtgaaagtctcccagggcgtggcactggtgccatcatgttcaagcgtcctggtgaggccgcgccgtctgctttcttccgctactacctggacggtaagcagaagctcatcaagatcggtgactaccggctgacgcatcggtccggcggtatgacgctgacggagatccgggataaggcccaagcactttcgaaccgactacgccatgagccggacctgcgcgcagctatggaggcagacgaggcgctacgggaagccgagcgccgggagcgtatacggcagttcgaggcattgaaggccaagcaggccgaggaagctgcgcggggttcgctcggcgaccttctgggtgactacgttgggtctcggcgtgggaaggtcggtcagcgtcaacttaatgagtggaggagggttatcgatagcgatatccccgcctctgtcatttcgatgaagtgcagtgccgtgactcccgccgtgattgagaagatcctcacgccaatctggaatcgaggcgcgccaagccaggccgagaaggtccgggcactgctacgagcggcatttcagtttgggttaacggcggagcacaccattggcaggtccagcggtaaacgctacgccttgacggtcaatcccgttgacgcggtgagggtcaaccacgagtcgcagccggtagagcgagcactcaccgatgcagagctgcggcagttctggacgaccatcgaagtaacggacggcatcggtccggtaatggccttgctattcaagttcgtcattgccacgggaggacagcgcatcgcccaggtcgcccgggaaccgtggtcgagcttcgacgtggaaaagcgggtgatgcgtctaattgactcgaagggcagggggagtgtgaagcgcattcacctggtgcctttgagtgaccaggccgtgggtatcttgcaggacgtgttcgagatcacgggcgggttcgactggccctggacgactcgcggcaaagccccattcgttgtaacgagttttacccacgccattgcagactggtgccgttctgagcatgcgatgctcaacggaacgagagttccccgctttacgccgagagatctgcgcagaacttgcactcagcttatgcagcggcatggtgtgccggatgagcagtccgatctgctgcaaagccacggtcaatccggagttgtgggccgccactatcggaacagtccagaggcttacttgccaatgaaggttcaggctatggaggcatttgatagggcgttaaacacggtaatagctgggctggaaaggccctag

SEQ ID NO: 329536 - DNA, 216 bp, Pseudomonas aeruginosa
atgacgcatgccgtcgccgtgacccactccaatgggttttcctgtcctgggaactggtccactgtccagcaactgtgccgcctgtatcaggtcagtcgtaccacctggtggcgctggagcaaggctccgggctttcccgctccagtccgctttggacgtgcagtgcgctgggatgccgccgccgttgaggcgtttctaactcagcgcgaggtctga

SEQ ID NO: 329537 - DNA, 201 bp, Pseudomonas aeruginosa
atggagcgtttacacgccctcagtccgtcttctcccctgcatgcccatgccttggccatcctcggtgaggccgtcatcgtcaatcgtgtcaccggcacgtccgccagtcggacccgtctgcttgccctggtcgatatggcctatgccgtgtcggtagtgtctgccagtgagcgccaagcagtgatcgggggtgccaaatga

SEQ ID NO: 329538 - DNA, 228 bp, Pseudomonas aeruginosa
atgaccagtctgaccccagctcaagtgatcgataacgcccgccagcggatcgaagccgcgcaatgccgcgaaggtttggacgttgcctgggaccaagggcttggtgcgttgcacacgctgctggccttggggcgcatcgacttgtccacctggcgctggcatcacgccgatttcgacagccgcgcagagcttcgtgcgttcgccctggagcaagggggtgggcaatga

SEQ ID NO: 329539 - DNA, 387 bp, Pseudomonas aeruginosa
atgaccgtaccacgccgtaaagccaccccggccccggtcctgcccgagtggctcagcgcgttgcaaatctgtgccaagtaccaggtcagccgcaccacgctttggcgctgggcgaagtctccagactttccagcgcccgttcgcatggggcgcgtgctgcgttgggatgcgggtcaagttgacaccttcctgtccaaagggctgagtgccgacgagttgtgcgagcgctaccagatcagccggaccaccctgtggcgttggacgaagttgccgggcttccctgcggcttccggtatcggccggatgctgcgctggaacccgcagttggtggacgccttcctctccagatcgcgaccatcaggcacagaacaggatacgtcggcgtaa

SEQ ID NO: 329540 - DNA, 567 bp, Pseudomonas aeruginosa
atgaagaatattcaagagcgccgttcggcgctgacgggatcggcttgcccggaaaaagccaacgacacttcgcaccaggaccagagcgcgagccctgacggctacgtcgcgccgcagcgcacttgtcgtcatgtcggtgaccgccagtgcatccaggtcggcgacttcggcacagcggtagccggtgagcgtggtcatgccatggtgggcgaaagcggattcgccctagccggtgatcgtggtacggcgcgggcgggggacttcggcaccgctatggtcggcgagttcggcaaggcgattgccggtgactgcggtatggcgtccgcgtgcgatggcggcagtgctcgggccggtttccggggcattgccagtgccggttttcagggggcggtcgcagcgggtgagttcggcgaactgcgcctcacctactgggacagtccgagcaagcgctaccgcacggcggtcggctatatcggcgaggatggtttgctggcggacaccttctacaccctcgacagtaaccaccagtttgtcccggccaggccggaccaggaggtggcccgatga

SEQ ID NO: 329541 - DNA, 1011 bp, Pseudomonas aeruginosa
atgagtcggctatcgcctgtcgaactgattcgccacgcggcgactgaggcattggccgcggctgaaatgttggtgcctgagtggttgcccgaaggcaagcggcagaagcgcgaatgggtggctcgaaaccctgttcggggggaccgccacgccggttccttcggcgtttcgctcgataccgggcgctggcatgacttcgccgacagcagcgcccacggcggcgacctggtgtcgctgctggcctatttgcgccgatgcgggcaaatggatgctgctcgcgagatcgacgaacgcctgcgcctggggctattccgcctgggggcgctcgatgcccagcagatcgaacagcgccgccgagaggccgagcaacggcggcaggagttcatgctgcgcgaggaactgagccagcaggaaacgcagcaggaggcttgccggcaggccagtcagctttggcggctgggcagacgaccggagccgctgcacgcctacctccagcgaaaggccgtccagggctatggactgcggcaactgggtcagggccgcctgatggtgccggtggtgcgggatcgggcgctattcaacctgcaattcatcgacccggacggcagcaaacgctacctctccggcgggcgggtgcagggctgctattcgccgctgggcaaggttacgccggattgccgtttgtacgtgtgcgaagggtgggccaccggggcaacgattcacgctgataccgggtgcccggtggtctgcgcaatgaacgccgcgaaccttaagccggtagccatggcgatgcgcgagcgtttcggcgagcgcgtcgagctggtgattgccggcgatgatgaccgggccgtcttcggcaatccgggccgtatggctgcgactcaggcggccagcgctgccggggcgctcgtggtgtttcccgaatggccggtgggcgtcccggtcgagctttcggattttaacgacctgcacctgtggcgcatcgggcagtggcaagagaggaaggcatga

SEQ ID NO: 329542 - DNA, 1788 bp, Pseudomonas aeruginosa
atgagcagccgtaagaaatcgccggacttggcgttggtcggggaaccgaaaacacccaagcccgacaagctggagcggccctgtttcgccgtatatgacgaagatacccgtgtggagggaaaaaccttccgtgcgggcacttggcttcacggcgtcaagttcagcgggccggaggaaaagccggtgccgttcgatcaccgcatctgtgcgccgctgcatgtcgatgcattgacgctgaacagtgaaaacggcggcgtcggtcgcctactgcgcttcgagttcctgggcaagtcgatagagtggatcgcacccatggacctgctcatggggaagggcgacgatctggtcaagacgttgtcgctcatggggctggaggttgagtatcagcatcgccgccatatcgcggcctatctgggagggcatgagcgccctgagcggatcattcgcaccacgacaaaacccgggtggcatgagtccggggtttttgttcttcctgaccgggtgattggtgccggggacgtgcgattccaaagctcaggtcgtggcgtcaacctgttcaccagcaaaggcaccctgaaggcgtggcgcaaggaagtgggcagctactgccagggcaacccggtattgatcctgtcggtctgtgcggctctggcagggccgttgctcgccaaggtgggggtgaacgggggcggcgtgcacctggtcggcgactcttccagcggcaagtctctggcgcagttgatcgcggcgtcagtgtgggggaacccggctacattcgccgcgtcctgggacatttccaagggtggcgtggagatcgaggctgcatcgcgtaatgacacggtgctgatcctggacgaaatcaagcgtgccgaccccaagcgcgtccaggaaatggcctacttgatcgccaacggtactggccgctccaccatgacccgcgagcgggaaagccgggctcgcctcgactggcgcatcctggcgctctccagtggcgaacgatcgttgtccgagcatgcggccatcagcggtaacagcgctcatgccggcgcagaactccgcctggtggacgtgaacgccggtactcgcccattcagggcgttcgacgacgtgcacggtatgagcggccagcagtttcaccgctgcctgagtgatgcggtgatgcagcactacggccacctcggccccgccttcgtggaaagcctgctgactgacaagcatcccgatgtgttgctggatgccttccgagaaatgtcgtccgccttcaccgtggaaagctcccaggcgggacgggtggcggatcgcttcgcgcttatggcgctggccggggagcaggctattgcccgcaagctgctcgattggccaggcgggacggcgcagcaagcctgtcggcaactcttcggcgagtggattgccacgatgggggatggcaacgtcgaagaccggcagatcctgcgcagcatcggagacttcatcgccctgcacggcgacagccggttctccgatgcccattccgattacaacaatgcactgatacgggatcgggcgggctactacgagattgaggaagggaggcgcttgtatctgttcaaccgcccagccttgaccgaggcggcacctggttttggctgtgatcggatcgtacgtgccctggtcagtgtagaagcgctcgccaaggtggacgtggaggcccaccagaagcgtttcaccaagagctatcggcgcttgcctggaaagcggttctacgtgatcgatccggacaagctggatggcaccgcagacaaggcatag

SEQ ID NO: 329543 - DNA, 294 bp, Pseudomonas aeruginosa
atgctgttgaccattcgtgatgttcctgagtacctggtgcgccaggccaagatcgaaaccggtaagggtactggcagtcaggcgttcatcgccggtatcgagctgatgcttaaacagcgtgaacgcattgacgaaatgcaggaagagattcggctgctgcgggagaccctgggagtcttccagggcgtgctggctgatgctcatgcggccgccgtccagttggcagagattgccggccagaaggatctgctcatttcagatgatccgctccgccctgggtatcgtcaccgctag

SEQ ID NO: 329544 - DNA, 273 bp, Pseudomonas aeruginosa
gtgcgaatctattgccccgagtgcgacagcaaggctcggatagcaacgcgtgaagagatttcccggcagttcgtgaagctgtattgccagtgcactaacggacattgcggccagcggttcgtcatgcaactgactttctcgcatgccctactcgggccatccagcccactggacaagctgctgtttgaccggctgcgcgaaatgccgagcaaggagcgccgtaccttgttcgatcagttggaaagcgtgactgtcgcggaccgcagcgcctaa

SEQ ID NO: 329545 - DNA, 1026 bp, Pseudomonas aeruginosa
atgagcaaataccttagcgctcgggcctcgacccagtatttccaactgcaacgcaccgtggccgaggcgtaccacgttgacgacgcggctcggaccttcgccgtccaaccgacccacgcccaggaactcaatgaccagatcaccgagcgcgtggacttcctgggtcgcatcaacgtgattccggtcagcgagatcaagggcgagaaagtgatgctcggcctgtccggcccggcgaccagccgcaccgacaccaacgccagggaccgcgagccgcgccacctgctggacctgaagaacaacacctacgaactcgcgcacacggaaaccgacgtggcgctgtccttcgccaccatcgacgcctgggccaagttcccggacttcgttgaccgctacctgacggcggtacagaaacgcattgctctggaccgtatcctggtcggctggtcgggcacacacgccgctgtccagaccgacccggcgaaatacccccaactcgaagacgtgaacaagggctggctccagatcgcccgcgagcagatccccgagcaggtgctcaagtccgaagacccggctaagaaaatcacccttggcccaggcggcgactacgccaacctggatgccctggtgcatgacgtgaagcagatgatcgacccggtaatgcgtgatgaaggcgacctggtggcgatcatcggttccgacctgctggcagcggagaagagcacgctgtacgccgctcagggccagaagccgaccgagaaggagcgaatcgaagaggtcaaggtcactgagacctatggcggcctgccctcgctgctggtgccgttcttcccagtgatgggcgtcgtcgttaccagcctggacaacttgtcgatctactaccaggacagcagttggcggcgtcatctgctggagaaccccaagcgctcccgcgctgaggacttcaacgggcgtaacgaaggctacgtgatcgagcagctcggcaagttcgccgcgctggagggatcgtcgctggaactggtgcgctga

SEQ ID NO: 329546 - DNA, 753 bp, Pseudomonas aeruginosa
atgagcttcaagaccatcgaccgcggtgagctgaatcccgcgctgaaagagcgcctggcgcacttcgagatgaaccgtcacgcctacgccgacgcccagcagcgcttcagcgatatcgcccaggaagacacgcgcctggccgccgaggcatccaagctggaggcccaggccgaggccaccgaacaggcatggcgcaagcgggccattcagccgcaagtggatcagaccgagatcagctcggagatcgagcgcggcgcggccctcaaacgtcaggcccaggcgctccgggcgactatcgaggcgcgtagcggcctgaccgcgcccgtactgctcgaaatggctgagttacgcgcagagctgcacaaggagccaggcgcgatcaatgcggcctactggcgggagatgctcgaccaggtgctgagccaagacggcttgcgtgacgctctgctgcaagccttcaccctgagtcgcgatatttacctgagccaactggacagtctggaacccgtactggcggcccgttgcagcggtcagcgggagcggcaggcgttcatcgcccagggtatctgggaagcctttgccgatgagctgaagcggctatttgcggggacggaaaacggcatgggttcgcctatgctcgccagcctgccatcgcctctgcgcggcgaattgctggccgagacgccgggcgagctgtaccggctccggcaggcgtccgccagtccgctcaatgggcgcaccgcactacgctga

SEQ ID NO: 329547 - DNA, 822 bp, Pseudomonas aeruginosa
atgagttttaacagccgcgaaagctcgcttgcggatgggcagccggtgcggctgtaccagttcagccgtggcgcgatccgctggagctacaacagcagcgaccgggacatcacctaccagaaccaggttttccgcaccgtgccgggcggcatcaccgacaacggaattatctgttccggcgatccgcagtccgaccagttcgtcatcaccgcgccggccgacctcgatgtcgcgctgctgtacaagacgcggtcgccgagcggtgcaatcgacctggtcgtctacgacatgcactacggcgacgccgaggcagcggtttcttgggtaggccagattggcgatgtggactggccgaccgtggatagctgccgcataacgtgcgtgtccgaagacgaactgatggaccagcccggcttgatcgacacctactgccgcacctgcacggcagtcgttggcgaccatcgctgcaaggtcaacctcgttccgtatcgcgtgacgctgacgccgcagagcatcagcggctgggtgatctccagcggcgtggtcgccggctatgccgatggctggtttaccgggggctacgtcgagtggcaggtggacggcgacaactacgatagccgctacatcgagcggcacgccggacccgatctttacatcctgggcggcaccgagggcattccggcaggtggacaactgcgggtctatccaggttgcgacgggctcgcgcagacctgcgacgacaaattcagcaacctccccaacttcagggggtttaacgcgatgcaaggcaggtcgccgttcgatggcgaccaggtctggtga

SEQ ID NO: 329548 - DNA, 1704 bp, Pseudomonas aeruginosa
atggcgacgtttccggggttccaggtgccaaagccgctggtggggatcgttgccggcattacgccgaacatcgacgccctggagctgaatcaggacatcagcctggcagcggtcggggcctcgacgtgggccggcgtctacgcggcgcatcagccggtagaggtgatccattcgtcgtacccagccgtccaccagagcgctctggaagacaactattacaaccggctgtggctgatccctacgactatggagctgggcaacgtcgtcagcactcaggtacgccctgcatctgtctggaacgcttatttcagtccgcgcacgctgaccgccatcgaccgcgaagccgcagacggcattacgctgtctggccaggcgtcgccgccgctgggttttgctgccctggaggaacgcacctggacggtcagcatcggcaccgacggcccgcccgtggtcaatgcacgcatcgtctggaggctcttgggcgagccggacctggtcctggtcatcaccggcaatcggatcatcgcctggacgttcgccccggactggggcgacagcatcgtcgagcgcctgagcgcctcgacaaatatcctgcaaagcgaatcagccgtgacccagcgccgggctatgcgcctggcgccgcgccgggagttcgaagcgaacatgtacgcggtggaccgcgagcggcagctactggacatgacgctgtttggctggggcgcgcgcgtttgggcgctgccgatctggcctgatatccaactgctccaggaaccgctggcggccggctcgctgaacatttcgtgcgacacggccggcctcgacttccgcgacggcggcctggcgatgctgcgcggcgaggacgcttttacttatgaggtcgtcgaggtcaagacggtgaccgccagcggcctggacctggttcggcccgtccaggccgcctggggaactggctcgcgactgtacccggtgcgcaccgcacagctgaccgaacagcccacgctgacccggctgaccgataccgcgcagtctgcgcgggtgtcgttcctgataatggagcccagcgcctggcccgaggtaatgccggcgacgacctacaggggtcggccagtgctggagcagcgcccggacgaaagcgaagacctgacgtcgagctatcagcgcctgctgtccaccctcgacaacggcagcgcgattccccgcgtgaccgacgtcgccggcatggcgctgcccgtcatcggccatcgctggatcggcatgggccgagccgagcggtcggcgttccgtagcctggtctatgcgctgcgcggccagcagaagccgctatgggtgccgacccacgccgacgacctgacgcttgtcggaaccgtgtcccagctgtccaccgcgctggacgtgcgcaatatcggctatgcccgtttcgccaacggccggccgggccgtcgcgatatccgcatcgagctatacgacggcacggtctatcaccgccgcatcctcaccagcaccgagctggacgccgacaccgagcgcctggccatcgacgctgccctgggccgactggtcgagcccggcgacgtggcgcgcatctgtttcatggcgctctgtagcgccgccagcgacgtggtcgagattgagcacgtcaccgatagcgagggcgtcgcaactgccgcgctgacattcaaaggggttcgtgacgatgagttttaa

SEQ ID NO: 329549 - DNA, 924 bp, Pseudomonas aeruginosa
atggcttacttcacaggaacagcgaacaacccggccgacttgctcgccaagctgcgcgtccacgccgagtcgctcggctgggtcaccgaccgcgcctcggcatcggaatggctttgtcacaacgccgacggctactggtcgttcaacgccggttccaatcaatggcagctcgcgggcaatacggggttcgacgacgggcttgcgtggaatgcgcagcccggcaactcggtgcagaacaacccgtattcgtcgaaagaagcaaccatagcgcagctcagcgccgggccattcacgcgctatcacctgttcgccaccgctgcctatctgcacctgcacgtcgaaatcgctgccggtcagtttcgtccagtgatgatcggctccctcaacaagcgtggcgtcggctatacgggcggccagtatgtttgcggctcgttcctctacagctctggccaggcgctcacaaacaactggtcatcgcatccattcgatggttaccacattcgatacagcggcggcggcagcatgctgcggctagacagcctcgacggtagcccatcgccggactggttgccgttcgactacacaacgaacgtctcccggcgcgtcgtcggccccggtcgcggaaactacagcagtcagtaccatcccgacgtggggctgatcgacgcgagcgcaaacgagctgaacagctcgaccacccctgtgccctgcgccatctatgcgttcggcgctcagcagcgctcgcggtacgtgggcgaggtgccggactttggcatatgcaacatggcgttcctcgcgcctggcgatccgctggtgatcggcagcgacacttggcgcgtctatccgttgctccaacgcggaagcgctaccgatttcggcaacaccagcgcctgggtcggctactgcttccgggtacttgagtaa

SEQ ID NO: 329550 - DNA, 957 bp, Pseudomonas aeruginosa
atggccaccgaattcggcaccgccacgaaccaccagaacctggtcgagcgcctcgtccagttcctcaccgcgaacccagacctggtcgcggctgggcaggcttacgagaaggttttcgacaacaccatccccgcgtccggcacggccatcgccgtgcgccaggtgaccctgcgcgccccaggtctgggcggcaccgacagcatctacatggggattcagagctacggcgataccgccctggactactacaaccttcgcctgatgggcggcacggcgttcaatcctggagcaatcccgcctggcggcgactactggaccgcgtttgctaactacagcccgcgggttcaggcgctgctgtggaatcagcccatgccgtactggttcttcgccaacggccgcaggttctggctggtcgtaaaagtctcgacgatctacgagtcggccggcgccggcttcatcctgccaccctgtccgccgtcgcagtatccgtacccgctggcggtggtgggttcctaccgtggcgacgtcgccacccgctggtcagacgtcagcgaccggcacagaggcatcagcagcccctacgagcgtagctgctatctccgcgatcccgccgggcgctggctcggtttcactgtcgatggagggtctgccaacgagtccgactacagcaatcggacgctcctcccgctgggctgcggccgatatgcgggaagcagtgacaccgtggtcaaacaactgcgtgattcgttcgggaagttcccgctcaaagcgctgtcgttcgtcacccgcgaaaccgagggacgccgctacctgggcgatttcgacggcgccttctacgtgccgacgctcaactcgggcgctgaagacgtgattgtcgaggacggtgtggaccacgtcgttttccaaaccgcttggcgtagcggtaacccttggctctacgcgatcaggaaggactga

SEQ ID NO: 329551 - DNA, 771 bp, Pseudomonas aeruginosa
atggcacaggaaacgtatttgtacgggcaaggtgagattgacgccgcgcctatcgtcaacggcgtcctcggcaaatggcgctggattcaggatgtctcggccatgagcatccagctcgcagtcgagaaggtcgagcacaaggaaagctacagcggccagaaagctctggtccgaagcttccccatcggcaagaccgccaccgtcaacatcaccctgcacagcatcggcccggacaacctggcgcttactctctatggcaaggtcgtggccaaggcggcgggctccgtgacgggcgaggtactccccgccgacctggtggctggcgatgtgatccgattggccaatttcggcgtcagcgaactggtcatcaccgacagcgcgagcagcccggcgcccctcgacccgcagtattacgccctgcgagccgatggcgcctacggcgaggtccaactgctgggtctgccgacgccggccccgacccagccgttcaaagcggcctatgagtacgccgccaccaagcaggtgggcatgttcaccgcgccgcagccgaccgttgccctgcgctataagggcatcaacctggccgaaggcggcgcgccggtcatcgtcgagctgtacaaggtcgcgaccgacccgctccaggagctggcattgatcagcgacggcaacaccgtcgccggtatgcagatcagcggcggaatcctgctggacaccagcaagccggataccggcgacctgggccgcttcggccgcattattcagctggggtga

SEQ ID NO: 329552 - DNA, 180 bp, Pseudomonas aeruginosa
atggaaaccgtaaaagtcaccatcaccgccgagaaacccaatcacacccatgccggcaagccggtggcgcagggcgacgagatcgaagtcagtcgcgccgatgccgagtttctgctgcgccgtcaattgatcaccaagattcccgccgagcccaaggccgacgagaaacgcgacaagtaa

SEQ ID NO: 329553 - DNA, 291 bp, Pseudomonas aeruginosa
atgactaagaccgcacaaatgatcgctcagcagcacaaagatactgtcgcagcgtgcgaagccgccgaagccatcgctatcgctaaagatcaggtatgggatggcgagggctataccaagtacacgttcgacgacaacagcgtcctgatccagtcgggcactactcagtatgcgatggatgccgacgacgcagacagcatcaaaggctatgcggactggctggacgatgaggctcgctccgccgaagcgtcggagatcgagcgcctgcttgaatcggtcgaggaggagtaa

SEQ ID NO: 329554 - DNA, 1650 bp, Pseudomonas aeruginosa
gtgaaagccaagtccttcctttccgagctgaccgagcttgccgtccagttccgtcgccagatcgaggccgaggtcgcaggtttcgaccccgacccgaaggccagcgccgtccggcgtgaacgggccagcgcggactatgagtatttcgcccggacctacttcccgcactacgtgaagcgcggtaacgcgctgctccacgactacctctacaagcggttgcccgagctggtggaccacccggacggccagcacgaagccattgcggcgccgcgtggtaatgccaagtccaccctggtgagccagatattcgtgatctggtgcgtactcaccggccgcaagcattaccccctgatcatcatggatgccttcgaacaggccgccacgatgttggaggcgatcaaggcggagctggagttcaacccgcgcctggccatggacttcccccagggcgccggcaagggccgcgtctggcaggtcggcaccatcgttacggcgaacgatgccaaggtccaggtcttcggctccggcaagcggatgcgcggcctccgacacggcccgcatcgtcctgacctggtgatcggcgacgacctggagaacgacgagaacgtccgcagcccggagcagcgcgacaagctggaaaactggctgaagagaaccgttctgtccctcggctcggccgacgacaccatggacgtcatcatcatcggcaccatccttcactacgactcggtcctgtcgcgcctgctgaaaaacccgctgtggaagcggcgcaagttcaaggcgatcattgaatggccgcaccgcatggacctgtgggagaagtgggaagagcttctgctcaactcagatgacgaaggggtcgccgcgctggagttctaccaggagcgcgccgccgccatggaggacggcgcgatcatctgctggccggatgggcagcccctctacaagctcatggtgaaacgtgcccgtgatgggcactcggcgttcgactcggaacagcagaacgacccagtccagggcgagaacgcccccttcgccgcctgcatcacgttctgggtcaaccgcctggcgcaatggatgttctacggcgcgtgtgacccgtcccttggcaggcaaggtaccagacgtgaccccagcgccatcctggtgggtgggttcaatcgggagacaggtgtcctggacgtggtcgaggccggtatccgcaagcgcctgccggacaagatcatcgaggacatcatcaccatgcagcgggcctatcgctgcctggtctggggcgttgaggcggtccagttccaggagttcctgcgcaccgagctggtgaagcgctcggccaaggcaggctgcccagtacctgcccgagcgatcaccccgcacgccgacaagctgctgcgcatcgaaagtctccagccgcacatggccaacggcctaatccgtctgcatccaagccagaccgtcctggaacaacagttgcgccacttcccggccgcagaccacgacgatggccccgacgccctgcacatgctctggatgctcgcgacaaccggtttcgcttccatggagttcgccctggtaggccggcaagggaccgccagctctggtggatttgacgattcatttgacgtaggtggccgcatgggcggcgactggtag

SEQ ID NO: 329555 - DNA, 603 bp, Pseudomonas aeruginosa
atgatggacgttgcagttctcttcgcccggcacgacagcatctacaagagcctgccaggatgtgacgtgtgggacatcgagcgagacgccaggacgtggccaggtggtacgccaattgtcgcgcatcccccgtgtcgatcctggggcaccttccgccatgttgcgaagcccgtcgatggcgagcgtgaattggcattgtgggccgttgaccagattcgacgctatgggggggttctagagcacccagccaggtccgctttgtggagggagaaaccactgccagagccaggtcagcgggacgattgggggggggtggacccttgttgtatcccaatggtggtggggtcatcgagcagagaaagcgacccgtctttacatcgtcggatgcgagccttcggagctgcctgcgataccgtttcgtataggcccagcttcgcacgtcattgcccagtgccgactgctgccagacggcactcgaaagcggaaaggacatcccgattggcgacccgaggtaagcgccagagagcgagaggcgacaccggcagccttcgcctcctggttgtgccaagtggcacggctatgcggtcggaggcactaacgtga

SEQ ID NO: 329556 - DNA, 222 bp, Pseudomonas aeruginosa
atggacactcaacctgcgtttcagcccttaccaaagggctatcaggtcgcctggtacggtatggaaaagctctgcaccaaatgtcgggaatactggccagcggatgccgagttcttcttcaccaacccggacggaacactcaaaaattcctgtaaagcctgctggtacgaaatgccttccgtacagcggcgcctacagggtaaggcgcggagactgcaatga

SEQ ID NO: 329557 - DNA, 270 bp, Pseudomonas aeruginosa
atggccgtatacaccatcaccctcagcgacaccgcgcgcggagtagagttctccatgcaaggcccaccgctgcacgactccgaagcatcgaagatcgcctatgcccttatgcaagcgacgatgtccctcggccaggaactcgcaaagcagaacggaactggtaacggcgtttcctgcgcctgcgacgagtgcctggcgcgccgcgctcgcggcgacgaaccgcagcagggagtccactacaccaaggccaagaaccgcaccgtccattga

SEQ ID NO: 329558 - DNA, 450 bp, Pseudomonas aeruginosa
atggagcgctatcacaacccgcagaccgacccgctgccgcttcgttcgccgtaccacgaagccgaacggcagcgcctggagcagttgaccgccgagtttctcgccagtggtggcgagattcagcagctgggacaccagatgcgcgagacctacccattcgtcatccacgccacccggacgccggtctatgcgcacctcctggaacagcctgagcagcccctagcagccaaggtgtccagggccggcaaacgggagccaaccgcacaagcgaggccagagcgcaagattccagcgccccagctcgacgcgaagacgctagctgcgcggctaatggtccaagccgcactcggcgcgtcaccgagccaggctgcaagagcggtcggtatcggcgagcggcaggctcgccaggtgtgccgcgacttcaacatccaatttcatcgccaacgctag

SEQ ID NO: 329559 - DNA, 282 bp, Pseudomonas aeruginosa; identical to SEQ ID NO: 327655

SEQ ID NO: 329560 - DNA, 2070 bp, Pseudomonas aeruginosa
atgagtgaatggttctctgcccaagagcttgcagggttgccaggggttcctggaaccgcgcgaaacgtcaaagcaatggccgagcgtaagtcgtggagtggacggcgccgcgtcggcaccaaggccattgagtaccacgtttcggccctgccgaaggaaacccgcgccgcgctgctgaacgccgccctgggcgaggtggccaccaaggtggtccgccaggagacgcagctggccctggtcgaaaccaaccgccagcagctggtcgccgatgcccgccagggggtgctgcacgccctggacctgatgatggcccgcaccggctacagccggaagcgctccattaccctgatgctggacatggcgcgcctcggccaggtcgagccgcagctgctcgccatgctcaagatggcccgcgatcctcgcggccgccccagcgcggatggcctgccgagcgtgcgcagcctggagcgcttcctggaccaggccgagcgtggcgccctggtgccgaaggtccgccgcccggacatgagcgttcccgactgggcgccggccttcatgacgatctaccaggggccggagaagcgcagcgcccgcgctgcccatgcactactggagaagcactggcaggggcaaatgcccagcctggaccaggtctatgcgttcctgcgcaaggtgggcaacgtcagccgcgaggtcgggcgcatgggtgagcatgaaatcaaggcgctgcgcccgttcattcgccgcgacttcaccaagctgcttccgaccgacgtctattcctgcgacggccacacgttcgacgccgaggtccagcacccgatgcacggccggcccttccggccggaaatcaccaccatcatcgacatccgtacccgtcgaattccgggctggtccaccggcctggccgagtcggccctggtggtggtcgatgccctacgtgacgcctgcaccaagggcggcatcccggccatcttctacgtggacaacggctcgggctacgtcaaccacatgatgcgcgacgaggcggtcggcctcatgggccgcctgggcatcgatatgaagaacagcctgccctacaacagccaggcgcggggcgtgattgagcgcgtccaccagagcctgtggattcgcgccgccaaggaactgccgggctacatcggcgccgacatggaccgccaggccaagctggccaccttcaagctgactcgccgggccattgccaagggcggcaccatgccgctgatgtcttgggaatcttttgtcgcgttctgcgaacagcagattgccgagtacaacgaccggccgcacagcagcttgccgcgcatcgttgacccgaacaccggccgccgccgccacatgacccccaacgaagcctgggcgctgcacgaagcggagggtttcagcccgatgcgcgtcaccgacgacgaggcccggccgctgttccgaccccaggtgctgcgcaccgtccgccgctgcgaactggagttcatcggcaaccgctacttcgcccgcgagctggaggaattccacggcgaccaggtggccgtgggctacgacatccacgacgccagcagggtgtgggtctacgacggcgagggccgcttcctctgcaccgcagagctgaacggcaacagccgcgactacatgccagcttcgtatgtcgagcgtgcccgcgagaaacgcgcagaggcccgcgagaagcgcgccctggctcacctcgacgagattcgcgccgagcgtgacggcgggtatgccctggaaatggaggcgccgctgtccatccccggcctcggcacgatcacccccgagcaactccggtcgcgcagcgccgcgacccttgaagtgcaggccgagcggatcgatgaaccgcgcccgaccgcagccaccacccaagccaccaccgcccaggtcttcaccctgccgaccgctcccgcccagcgctaccggcagtggtgcgagctggccgagcggcaacgctccggcctgcccatcgagccggacgccgcccagtggttcgaggtttaccccaaatccaaagaattcgccgcccagcagcggcaagcatga

SEQ ID NO: 329561 - DNA, 198 bp, Pseudomonas aeruginosa
atgacaaacaccgacctcaaaccgctgctcgacaacctgcggaacgccaccgagttcttcaactcggccgatggcgacctcgcctcgatctgcaacggaaccaaacagattgcagccgaatggctggaaaccgccgcgcttgccctcggcaacgccctgatcgcccagcgcgaagctgctggaggcgaccatgagtga

SEQ ID NO: 329562 - DNA, 483 bp, Pseudomonas aeruginosa
atgcagctcagccaccgcccggcggagaccggtgacctggagacggtcgccggcttcccccaggaccgcgacgaactcttctattgctaccccaaggcgatctggccgttcagcgtcgcccagctggccgccgccatcgccgaacgccgcggcagcaccgtggccgtgcacgacggacaggtgctcggcttcgccaacttctaccagtggcagcacggcgacttctgcgccctcggcaacatgatggtggcgcccgccgcgcgcggcctgggcgtggcccgctacctgatcggggtcatggaaaacctcgcccgcgaacagtacaaagcgcgcctgatgaagatttcctgcttcaacgccaatgccgccgggctgctgctctatacccagctcggctaccagccgcgcgccatcgccgaacgccacgatccggacggccggcgcgtggcgctgatccagatggacaagccccttgaaccctga

SEQ ID NO: 329563 - DNA, 567 bp, Pseudomonas aeruginosa
atggggcactcacaagctagcaagcaggcaactcatgaccgcattgtcagcatcgcggctgaacgattttgcgagctgggaattgatggcttaagcatcgccgacctcatgaaagaagctggccttacccatggtggcttctacaagcacttcgagtcccgtgaccagttggttgttgaggctttggatgtcgcttttcagcgctcggaaaatcctgaccgcacctataaggcgaccttcgataagctcgtgagcgagtatctgagccaagagcaccgtgactccgtaggcacaggatgcgcagtgggcgcgctggtaagtgatattggtcgcgtagagggtgaggcgcgggagctgtatacgcgtaagctcaaggccaacatcaagggcatttcggctttggtggggggcggcaatagtgaaaagcgcgctgaagcgattgtggctttcagcactatggtcggtgccttggggctttcgcgtgcggtcgcggacgatgagctatctcaggaaatcctgtcgaccgtgcaagcctttctgcgtaataccttcggcgctgactcttaa

SEQ ID NO: 329564 - DNA, 705 bp, Pseudomonas aeruginosa
atgaataccaagaaactcgcaatcgtcactggcgttgggccaggcaccggcgcggcaatcgttcgtcggctcgtcgaggacggcttccgggtagcaatgattgctcgcaatgaggagcgcctgacagcgctggcgacagagctaccggacacctacatattccccactgacgttgccgatattgagcagcttgagctggctttggatcgcatcaagtcccagctcggggacgctgcggtactggttcacaatgcggtgggtgggacatttggcagcttcctagagatcgatcccaaggcgctcaccaacaacttcgaaacgaatgtcgtttcgctactgcacctagcccgccatctctcacctgcaatgatcgataaaggcgaaggcgcgatcatcgtcaccggcaatacctccgcgctacgcggaaaaagccactttgccggtttcgcccctaccaaggcagcacagcgcatcttgagcgagtcgattgcccgagagttggggccgaaaggcatccatgtcgcctacgtggtcatcgatgctgtgatcgatgtggaatggacgcgcaagatgcacccgactgcacctgatgagtttttcatccagccggcagacatcgccgccgaagtgggtcacctcattcaacagcccagaagtgcttggtccttcctgacggaaatccgcccctttggcgaaaaatggtga

SEQ ID NO: 329565 - DNA, 606 bp, Pseudomonas aeruginosa
atgaatctccagtccgtttttgattaccgaagcccttacgcttacctggccaacacccgcctgccagagttcgatacgcccatcagctacttcgccatcgacattttggaggtgatgaagaaggtgaataaccaaccctctcctgcttgccctgccaaagcgaagtactcgggcatcgacgccgcgcgttgggcagccgtctacggcgtcccgcttgcaccaaatggcgcgttcttccaagcaatgcgcgcagggcaagttgaaggcgcgatcttggcccgcgccgctcttgcggctcagcagaccggctcgtttgaagtcgtccatccggccttatttcaagccgtatgggcgggtactgacgacctcatcaccgcagaaggacgatctacctttctgaaaaatctcggcgtagacgaagacatctggcagttagcggatcgacctgccgttcgtgaccaactggccgccaacaatgaagaagccgctcgacgcggcgtatttggtgtgccgaccctcttctgcggcgacgaaatgttcttcggcaatgaccgactcgacttcgtgcgtgccgctctgcaaaaagccaaaggagcctcgaaatga

SEQ ID NO: 329566 - DNA, 993 bp, Pseudomonas aeruginosa
atgtccggctttcagcacaagtacgcattcaccaatggcattcgcatgcactatgtcgacgagggcgtggggccggtcgttgttcttctccacggctggccggagtcctggtattcctggcggcaccagatttcgttcttggctgaagcgggctatcgggttatcgcgcccgatcagcgagggtatggggataccgagattccatcggaggtaggcagctaccacatcctcaatttggtcggggacgtggtggggctgttgaacgcgttggaaattaagtcggcggcccttgtcggccatgactggggatcgatggttgcagcggcagcggcgctcctgcggcctgacctgtttcatcgtgtctgtctgctgagcgttccctacatgcctcgtcggagcctacgacctagcactcgcttccagctcgcaacccagggaaagcacttctatcaggactatttccagcgtgtcggcatcgtcgagaaagagctgggtgaggatacgcatcgaagcattttgggtgccctttacgcccgctcgggcgaggcgaaaaagcacccagagcacagccgctcaggcttcatcgccttcgacaaaagcactcgctttgtagacaacttggctgttccggaccagctgccggcttggcttacggaagaggaccttgatgtcttcgtgaagcagttcgagcgttctggcttcttcggcggcatcaactggtacaggaacatggaccgaaactgggagctgacgcccttttggaatggtgccgtgttgattcagccgttgctgttcatcgcaggcgagctcgacggtgttctcacgatggccggtgaagagtacgaagcgctggatatcaatgctaggcagctgattgggaaggagttgattcctggggcaggccattggattcagcaggagcgtccagaccacgttaaccaactactgctgaacttcgtagagcctgacagcccgagggatatctgcccctga

SEQ ID NO: 329567 - DNA, 936 bp, Pseudomonas aeruginosa
atggagtttcggcatcttcgttgcttcctcgcagttgccgaggagctgcattttgcgcgggcagctgagcgactgcacattgagcagtctccgttatctcgtgcgattaaggagcttgaggaagagttgggcacacagcttttcgtgcgaaccacccggagtacgagacttacgcatgccggacgactatttctagatcatgtgcctcgtgtattcactgctttgcaacaggcgcgcgacagcgtgagggccgtcgcgaatgggtactgtggccaactgcgattggctctctcggacgggatctctcccttgcgcttctcttcgtttctggcgttatgccggcaagaggagccggaggtcgagattcgcctgtttgaagtgtcgctgtcgcagcagatcaagggactgcatgatgatctttatgacgtgggcttcgcccagtcggacgaggtcggggatggcgtcgttgctattccagcctggagcgagccgctggtggtggcggtgccggagcgccatcccatcctgtcccacaagcacattccgctggaggaattgctgcgttacccattggtgttgtgtgacccacaagcttgcgaaggccatgcacgccaggtcgaacgcttcttgcgccagatcgaagcggagcccctggtcgcggagcaggtgacctcctgcgacctgatgatggcgcttgtcgcggcaggtttcgccctggggttgaccggagagtcatgcatcgcggctagccgcgaatcgggtgtagtggggcgcgcattaaggggatctccccagcttacgacctatctgctgcgttcgccgcgtgaaccatcggcgacgctggctcgcttcatcgaacgggtacagaccatcgattcttcggatgacgtccagatcgctagccagaccaataccagggagcaaatcgagccatga

SEQ ID NO: 329568 - DNA, 264 bp, Pseudomonas aeruginosa
atgaagaaaattatgccgtttctctgtgtcctgatccttgcggcctgcggtcagcctgaaacaccgacgccgtcggcgttgcctacggttgatgagctcgcggccgatcccgcgcggctgaaggacctgcgccagcagtgcaaactggatcgtgccaagttgggtgacgagctgtgcaatcgcgtcgccgaggccacacgcaagcgcttctatggcgatggaacggtgccctacacgccgccgaaggagccgcccaagttctga

SEQ ID NO: 329569 - DNA, 2001 bp, Pseudomonas aeruginosa
atgcaagggacgaacgtgctgttcgggcagatcgccgccatattcggcatcgtgatcgccggcgtgtgggcagccacacaatggacagcctccgccctgggctatcaggtacgcctgggctcgccttggttcgactgcttcggcacgccggtctatcacccctggcggttgttcgactggtggttcttctttggtgcctatgctccgcagattttcgacatcggtggcgccattgcagccgccagcggcatggtcgccgtgggcgtcgccatcgccatgtcgatcatgcgttcgcgccaatctcgcctggtcacgacctatggttcggcgcgctgggccgaggccgccgatatccactcggcgggcctggatcggccggcgggtgtcttccttggcctgcatgatggtcagtacctgcgccatgagggcccggaacacgtcctgactttcgcgcctacccgatccgggaaaagtgtgggcttggtgattcccacgctgttgtcttggacaggctctgctgttgtccacgacatcaagaaggaaatctggactgccactgccggttggcgctcaaggttctcgcactgcctactgttcaatcccaccgacccgctgtcggctgcctacaacccgttgctggaggttcggcgcggctcgcatgaagttcgcgatgtgcagaacatcgccgacatcctggtcgatcccgagggagcgctggagcgccgcaaccattgggaaaagacctcgcacgcgctgctggtcggcgccatcctgcacgtgctctacgcgggcgaggacaagacgctgcgcggcgtcgccaatttcctgagcgacccggcatgtccgttcgaggtgacgctgcaccagatgatgacgacgcgtcacctgggtgacgggacgcatccagtggtggcgtccgccgcacgcgaagtgctcaacaagtcggagaacgagcgctcgggtgtgctgagcaccgccatgtcgttcctcggcctataccgcgaccccacggtggccgaggtcacctcgcggtgcgactggcgcatcgccgacctgatcgctgccgagcatccggtgtcgttgtacctggtggtgccgccgtccgatatcagccgcaccaagccgttgatccggctcatcttgaaccagatagggcggcggctcaccgaatcgctcgacggttctgacggcatcgagcgccgccacaagctactgctgatgctcgacgagttccctgcattgggcaggctcgacttcttcgagacggcgcttgccttcatggccggttatggcatccgcagctttctcattgcccaatcgctcaaccagatcgataaggcctacgggcagaaccattccatcctcgacaactgccatgtgcgtgtgaccttcgccaccaacgacgagcgcacggccaagcgcatttccgagacgctgggcaccgctacggagctgcgcgcgcaacgcaactacgcaggccaccggctcgcgccatggttggggcacctgatggtttcacgtcaggaaacggcgcggccgctgctgacgcctggagaggtgatgcagctgccgccggacgaggccgtggtgatgatctccagcgtcgcgccgatccgggccaggaagctgcgttactacagcgacgccaacttccagcgccgcgtgctgccgccacccgtcctcgtggccgggcgctacgccgacgcaccgccggcgcgagcggacgactggagcggcctggccatgccggatgtgccgacggccatggctgcggccctgggcgatgacttggccgccactgtcgaggagggtggcccacgccaacagcccgaactgtccgaggccgtcgcctacaaccccgatccagagggctcggtcagtgacttgtcgctgctcgatgacgacgacctgcagcccgttctctctcgccagctcgatccggccatgcagcgcgtcgcccggctggctgccctcgaccccgacgacggagtccagctatga

SEQ ID NO: 329570 - DNA, 462 bp, Pseudomonas aeruginosa
atgagccagtatcgcctcaacctgttcatccagcccgagcatgccagccgcctggacgagctggccgccaagaagggcgtatccaagtcctccatcgtggcagcggccctggcgtcctggctgtcgccggatgcgggcgaccagcgcgaggcggccatcgccaagcgactggatcgcctgtcgcgccagttcgagcgcctggagcgcgaccaggccatcgagatcgagacgctggcactattcgtgcgctacttcctgaccgtcagcacgccggtgcccgaggcgcaccaggaagcggccaaggctcagggcaaggcgcgtttcgagcaattcgtggagcagctcggacgccacctgctgcgtgggcgcagcctggtacgcgacgtggtcgaggagctgtacccggacagcccgcacgcggatgaggcggcgctgggcgaagcgcgggagcgtgcctcatga

SEQ ID NO: 329571 - DNA, 1014 bp, Pseudomonas aeruginosa
atgagtgccacggtgacctcgctggaccggcgcatctgcatgctccgcacggcaatggggccggtgatcgccgccgcgctcgaagacccggacgtggtcgagatcatgctcaaccccgaccgcacgctctgggttgatcgcctgtcgtcagggcgcgcaccgctgggcgcggaactgtccgaggaagacggcgagcgcatcatccgtctggtcgctgctcacgtcggcgcggaagtgcatcgcggccagccgttgctgaccgccgaactaccggaaacgggtgagcgtttcgagggcatcctgccgccggccgcgccggggccggccttcgcgctgcgcaagcgcgccgtgggcatcattccgctggagcgctacgtgaccgacgggatgatgaccgtcgcgcaggccgagttcctgcgcggcgcggtgcgcgagcggcagaacatcctgatcgccggcggcaccagcaccggcaagaccacgctggccaacgccttgctcgccgagatcgccgccactggcgaccgcgtgctagtgctcgaggacaccatcgaactgcaatgtgccgcgcgtgaccatgtgccgctgcgcacccgcgtgggcgtggtatccatgcgcgaactggtgcgcgccacgatgcgcttgcgccccgaccgcgtggtggtcggcgaggtgcgcggcggggaggcgctggatctcatcaaggtctggggcactggccatccaggcggcatcgccaccctccatgccggctccgtcctgggcgcgctgctgcgcctggagcaactggtgctcgaagtggcggtgaatccgccacgcgcgctgatcgccgaggcggtcaacgtggtggtcttcatcgccggccgcggccgcaagcgccggatcgagcacatcgcccgcgtgaccggtttcgacgaggcgggttaccgcctggcggaagtgccgggggagccgcttgccgatcagctcacgccctttttcctgtccccgaccacgtctggagaactgctatga

SEQ ID NO: 329572 - DNA, 384 bp, Pseudomonas aeruginosa
atgacgccgacacgcgcccctgctttccgcttatccgtaaatatggcctcgtgcctggcacgcctgcgtagcctggccggccccgcacagcgtggcttgctgctggccgccgtcatgctgatgacggtcggcacggcgagggccgccggctcctcgatgccctgggagggcccactcgagtccatcctcgagtcgatccaggggccggtcgcccgcatcgtggcggtgatcatcatcatcgccacggggctagcgctggcgttcggcgacacctcggggggctttcgcaagctgatccagatcgtcttcggcttgagcatcgccttcgccgcatcttcgttcttcttatccttcttcagcttctccggcggggcggtcgtatga

SEQ ID NO: 329573 - DNA, 270 bp, Pseudomonas aeruginosa
atgagcacgggaggcgacttgccgggcttcgaggtgccgctgcaccgttcgctgaccgagccgatcctgctcggcggtgcgccgcgcaccgtggcgatcgccaacggcacgctggccgccgccgtcgggctaggcctgcagctctggctgccgggcctggtgctgtggctggtcggccatgcgctcgcggtatggggcgcgcgcgtcgatccgcagttcatgcaggtgttcgcacggcacctcaagcacaagccgctactggacgtgtga

SEQ ID NO: 329574 - DNA, 2436 bp, Pseudomonas aeruginosa
atgctgaaccttgccgaataccgccagcgcccggccttgctcgccgactggctaccgtgggccggcctggtggcgctcggcgtggtgctgaataaggatggctcgttccagcgcacggcgcgcttccgtgggcctgacctggacagcgcgacgcaaggcgagctgatggccaccaccgcgctgctgaacaacgcgctgcgccggctcggcgcgggctgggcgctgttcgtcgaggctgagcgccggccggcggcggattatccgcactcggacttccccgaaccgctgtcgtggctggtggacgaagagcggcgggcgacgttcgaggattccggcaaccacttcgagagcggctactacctcacgctgcaatacctgccgccggaggagtcgcacgcccgcgcggccagtctgctgtacgagaacacgccaactgccggcgtggactggcgcgagcgcctcacggcctttatcgcggagaccgggcgcatcttcgacctgctcgagggcgtgatgccggagatcgcttggctcgatgacgacgaaacgctgacctatttgcacgcgaccgtttcgacacggcgctaccgcatcgccacgccggaagtgccgttccacctcgacacgctgttgtctgataccccgctgctcggcggcctggcgccgatgctgggcgacgcgcacctgcgcgtggtgacggtgcgcggcttcccgacctcgacctggccggggatcctggatgacctcaaccgactgggcttcgcctatcgctggagcacgcgctttctctgcctagacaaggccgaggcggaaaaggaactcggccgcctgcgccgccagtggttcgccaagcgcaagaacatcctggcgctgttgcgcgaaaccctcttccagcaggagagcccgctggtcgacaccgatgccagcaacaaggcggccgacgcggacgccgctctgcaggagctgggcagcgaccaggtcgccttcggtttcgtcaccgcgaccgtgacggtgctcgatgctgacgctgccgtggccgacgagaagctgcgcagggtggagcgtgtcatccagggccggggcttcgtgaccatcccggaaaccctcaactcggtggacgcgtggctgtcgtcggtaccgggcaacgcctacgccaacgtgcgccagcccatcgtctcgacgctgaatcttgcccacctgatgccagtgtcggcggtttgggccgggccagagcgcaacgctcatctcgacggcccaccgttgatcatcacccgcaccgagggcgcgacgcccttccggctggtgacccatatcggcgacgtgggacacaccctggtggtcggcccgaccggcatgggcaagtccgtcctgctcgccacgctggcgatgcagttccgccgctaccccggttcgcgcatcttcgctttcgacatggggcgctccatgcgggcgacggtgctgggcctggggggcgagcactatgacctgggcgccgatggcgcgatcgccttccagccgctcgcgcgcatcgaccaggcgggctaccgcacctgggcggccgagtgggtggagggccgtctggcacacgagggcgtggtcgttggtcccgacgagaaggtggccatctggtccgcgctcggcagcctcgccggcgcgccggtcgagcagcgcacactcaccggtctgtcggtgctgctgcaatccaacgcgctgcgccaggcgctggcgccctatgtgctcggtggggcgcacggcaagttgctcgacgccgacctcgactatctgggcatggccgacgtgcagtgcttcgagatggaggagctaatgcccagcaaggcggcggtgctggccgtgctgggctacctgttcgcgcgcttcgaggagcgtttcgacggcgcgccgacgctgctgatcctcgacgagtcttggctgttcctcgacgacccggtgttcgccgcgcgtattcgccagtggctgaagacgctgcgcaagaagaacgtcagcgtgatcttcgccacgcagtcgctcgccgacatcaaggactcgaccatcgccccggcgatcatcgagagctgcgcgagccgcatcttcctgcccaacccgcaggcgaccgagccgcagatccgcgcgatctacgaaggcttcggcctcaacggccggcagatcgagatcgtcgccaccgcgcagcccaagcgcgattactactaccagtcccgtgcgggcaaccgcctgttcgacctcgacctggggccggtcgcgctcgcgttttccggcgcctcgatgcctcaggatcagcgcgccatcgacgacgtgctgcgcgatgccggggtgccgggtttcgccggagcctggctgcgtcatcgcggcctcgactgggcggccgagttgctgccgtccgcaccatccgccgcgtccttacaggaggtttcgccatga

SEQ ID NO: 329575 - DNA, 738 bp, Pseudomonas aeruginosa
atgaagacccgcgcgctttccacgtccctcgccgccgtgttgtcggtgtcggtgctggccgtgcagcccgtgtcggcattcaccgtcatcgacccgacgaacctcgtgcagaacaccttgatcgcgatccgtacgctggagcagatcaacaaccaggtggagcagctgcagaacgaatcgcagatgctcatcaatcaggcgcgcaacctggcgagcctggacttcaacgtcgtcaaccggctgcgcgcgtcgctggcgaggagcgagcaactgatcgccgaggcgcaggggctggcctatgacgtgcagaacctcgaccgcgagttcgcccggctgtacccggaggagtacgccgccagcgtcagcggcgaccagatgtaccgggacgcccgcgaacgttggcagcacacgctcgacggcctgcacactgcgatgcgcatgcaggcgcaggtgtcgcggaacctgggcgaggatgaaagcgccctggccgatttggtggggcagagccaatcggccacgggtgccctgcaggccatgcaggcgaccaaccaactgctggccctgcaggccaagcagtccatccaggcgcagcagctccagctcacccagggccgcgcggcctcgctggagctagcgcggcaggcggctgcgaccgagcgcgcccgcgaggttcggcgacgcttcctgggcgagggcacgccgtacaccccgcaaccggtccggttctacgggaactga

SEQ ID NO: 329576 - DNA, 330 bp, Pseudomonas aeruginosa
atgcgtagtgttttcatgctgtcgattgccttgctggcagcctgcgatcggccgtcctgcgagggtctggccgaaacactggccacccatcccgcccggctcgcgactctgcgtgcggagtgtgcggctgactggcaggcggtgggcgagggaatatgcagggccgccgccgtggcgtaccagcgccgcttcttcgccggccactccggcccggacgagtatgtcgtccttggggagttaccgccgattccaccgaccttcgatgagcctggcgacgaggtggccgaaagcggtgcgtggcgggttgtcgtcaaggaggacgcgccatga

SEQ ID NO: 329577 - DNA, 1374 bp, Pseudomonas aeruginosa
atgaacgatgtcacggtcatcgaccgcttcctcgataccttctcgcgctacatcgactcgggattcgggttgctgcaaggggaagtcgcctacctgaccgccacgcttatagcgatcgatatgacgattgccgggctctactggtcgctcggtcacgccaccggccagggcgaggacgtgatggcgaagttgatccgcaaggtgctctacgtcggtgcctttgcctacatcatcggcaacttcaactggctggccggcatcgtcttccgctccttcgccgggctgggcctgacggcaaccggcgcgctcagcatggagactttcctgcagccggggcggctggcgaaaaccggcatcgacgccggcgcgccgatcctggagcagataggcgaactgaccggtttccccgaggtgttcgtcaatctcgaccccatcgtcatcctgttcctggcctggctggtggtcatcgtctgcttcttcgtgctggcggtgcagctgttcatcaccctcatcgagttcaagctgaccacgctcgcgggcttcgtgctggtgcccttcgcgctgtggaacaagaccgcgttcctggccgagaaggtgctgggcaacgtggtgtcctccggcgtcaaggtgctggtgctggcggtgatcgtcggcatcggaacggggctgttcgccgagttccaggtgcatcccgacgagccctccatcgaccacgcgctggtggtcatgctggcctcgctggcgttactcgccctgggcatcttcggcccgggggtcgccgccggactgatttccggcggcccgcagctgggggcgggggcgatagcgggcgccgcactcggcgctgcgggtacggccgtcgccgtgggtgccgctgcaacgggtgtcggtgctgcggttgcggccggggcgcgtatggcgccggccgccgccaggatggctggcagtggcgtgcgtgccgccacctcgacagctagcagtgcgcgtgccgcattccaactcggatcttccgctgccggtggcggcatcaagggcaccgcggccggcttgggcagtattgccaaggtcggcacgcaggcagcgggacagagggttgccgccggtatgcgttcactcaagtcacgcgctgcttccgccttccaagccgaaggggccggtgcctcttctggtggcggcaggggcattcagggcaatgcgacccagagcgactccgtcgacgctacttctagtgcaacggcgcagcctgcctgggccagacgcctgcagcgccgccagcagatcagtcatgccgctaccaccgtcgcgcacacgctgcgcggtggcgacggcggtgggtcgggcagtggcccaagcctccgggattcggattcataa

SEQ ID NO: 329578 - DNA, 705 bp, Pseudomonas aeruginosa
atgcgcttcaagagaccacgagtgcgttatgccgaaacgccgcaacccgccaccccgtaccaggccgccgcccaggcatgggacgagcgcatcggctcggcccgcgtgcaggcgaagaactggcgcgtgatggccttcggctgcctggcgcttgcgctgctgatggcgggcggcctggtctggcgctcggcgcagtccatcgtcacaccctacgtggtggaggtggacaggtctggccaggtgcgcgcggtcggcgaggccgccactccctaccggccggccgatgcgcaggtcgcctatcacctggcgcgcttcgtcacgctggtgcgctcgctttcgatcgatccgatcgttgttcggcagaactggctcgatgcttacgactacaccaccgaccgtggcgcggccgtgctcaacgactacgcacgcaccagcgatccgttcgtccgcgtgggcaaggagtcggtgacggtgcaggtcagcagcgtcgtgcgggccagcgacgcctccttcaacgtgcgctggacggagcgaagtttcgtcaacggctcgccggccggcaccgagcgctggagcgcggtgatctccatcgtcctacaaaccccgcgcaccgagcagcgtttgcgcaagaaccccttgggcatctacgtcaacgggctgtcgtggagccgcgagctcgatacgtccgaaggagccaagccatga

SEQ ID NO: 329579 - DNA, 987 bp, Pseudomonas aeruginosa
atgaatctgtccttccgtaagtccgcgctccccctgatcctgctggccttggctggctgctccagccagggcaagccaccgccgcgcatctcgctcgacgagccggtacaggcgcagccgttgcccgagcctccgaagccgttggaagtggtggcggtgccgaaggtgctaccgatgccagggcagctgaagcagttgccagaggagcccagtccagccccggagccggccgacgagacggtgagggtgtcgcgcgcgaaccgggaggcgagggtggcgcccacccgtgagggttacgtcaatgcgatccaggtctggccctatagcgacggtgcgctgtaccaggtctatgccgccccagggcgggtgaccgtgatcacgttgcaggccggagaggatctggtgacggtggctgccggcgacacggtgcgctggatcgtcggcgacacctccagcggcgccggcgatgcgctgcgcgtcaacgtgctggtcaagccgatccgctcgggtctcaagaccaacctggtcatcaccaccagccgtcgcacctacctgatcgagctgacctcgaccgagaaagcctggatggcctcggtgtcctgggactacccgaaggaccggatgctggccctgcagcgccaggcgcaggccgcacaggcgagcgcgccggtcgataccggcctctcgctggagaagattcgcttccgctatgcgatcagcggcagcaagccttcgtggcagccgctgcgcgccttcgacgatggcgagaaggtctatatccagtttcccgccggcattgcccagggtgagctaccgccgctgtttgtgatcggctctcagagtgatgggcaactggtcaactaccgtttccgcccgccgtactacatcgtggaccggctgttcggcgcggccgagctgcgcctgggcggggacaagggcgacgtggtgcgcatcgagcgcacggatggcgtggcgcgggggaactga

SEQ ID NO: 329580 - DNA, 1275 bp, Pseudomonas aeruginosa
atgagccaagacgatacccccgacctggtcgcgccgccggccggcaaggttccgcccgagtcggtcgcgctccgtgcccagccgcgcccggtcacgcggttgaatcggcgtaccctggccgtgcttgccggtgggctctccgccgcggttctgggggcaaccatctggtccttgcaaccgtcgaagcctcggagtagcaacgatccggccgagctgtacaacgtcgaccgggtttcgcgctccgaggggctcgatcgactgccctcggactactccgagctgccgcctccgcccgaactggggccgccgctaccgggcgaccttggccccgccatcgtgcagtcgcaacgacctgcggcacccagctatacgacacccggacacgatcccgccgaggctgagcggctggcgcgtttgaaggaggcggaggaagcggcagcctcgtcggtgtttttccgcacgggcggacagcgcccagccatggctgcaccggcacaacctgctgcggatgcagcaacgctggcgggcttcgatccgctggccgccggcccagcttcgacggcggcgtaccccctcgatccgacaaccgtgcagaaccagcaggggcagaaagaggcgttcctgcaagccggctctacggatacccgcaattccgggaacctgcagctgccggcgtcgccgtaccaggtcatggccggcacggtgattgccggtgcgttggtgacgggcatcaagtcggatcttccgggtgacgtgatcggcacggtgacggagccggtctacgacacggcgaccggcaagcacctgctgatcccgcagggctcacgcatcctcggccgctacaacagtcaggtcagctacgggcagagccgcgtgcaggtggtgtggaatcgcatcatcctgccggatacatcctcgctgacgctggacaacctcgtgggcaccgattcagccggctatgccggcctggaagatggtgtggattggcactgggatcgcgtcattgccggtgctgcgttgacgacgctgctgggcatcggcgccgagctggccgcgcctgagaaccgccaggatggcgataggatcatcattgccggccgtgacggcttgcaggacagcgtgaaccaggtcgggcaggagataactcggcgtaacatgaacatccagcccaccttgaccgagaggcctggcctgccggtgcgcatcattgtcaaccgagacctggtgctccgaccataccaaccactgttcttcaatcggagagcttcacgatga

SEQ ID NO: 329581 - DNA, 246 bp, Pseudomonas aeruginosa
atgagcacgacacgcaagctgcggctggggccgctgcccaaggccgagagcatcaagctgaccttcgtttgcccggccagcctgaaggctgaccttgaccgctacgccgcgctgcatgcgcagacctacggcgagacggtcgatgctgtaacgctgatcccgcacatgctggaggcgttcatgaccggggatagggggttcaagagggcaggaaacgatcctgatcgtcagcttcccactatttaa

SEQ ID NO: 329582 - DNA, 234 bp, Pseudomonas aeruginosa
atgactgtattgatttctgggtacctaccatcgggaaatgatgagtccttgaaatatgaaaaaactgttcctttcgaatatatttcgaaagttatggaggtgatgcgttggaagaagggtgagaatattgagggtgaatatcctattaagaatgatgatgttgtaaggattgaggaggttataggcgaaaagcttccggttggattggagtattttattggggtttacgcctaa

SEQ ID NO: 329583 - DNA, 1857 bp, Pseudomonas aeruginosa
atggcacgacccattgctgaccttatccacttcaactctacaactgtcacggcaagcggagacgtttattacggccctgggggaggtaccggcattggccccattgccagacctatagagcacggcttggattcgtccactgaaaatggctggcaagagtttgaaagttatgctgatctgggcgttgaccccagacgctatgttcctcttcaggttaaagaaaaacgcagggagatcgagcttcagttccgagatgccgagaaaaaacttgaggcgtcggtacaagccgagctggataaggctgatgccgctcttggtccggcaaagaatcttgcaccattggacgtcatcaaccgcagtctgaccatcgttggaaacgccctccagcaaaagaatcaaaaactactgctgaatcagaagaagattaccagcctgggtgcaaagaatttccttacccgtacggcggaagagatcggtgaacaagcggtgcgagaaggcaatattaacgggcctgaagcctatatgcgcttcctcgacagggaaatggaaggtctcacggcagcttataacgtaaaactcttcaccgaagcgatcagtagtctccagatccgcatgaatacgttgaccgccgccaaagcaagtattgaggcggccgcagcaaacaaggcgcgtgaacaagcagcggctgaggccaaacgcaaagccgaagagcaggcccgccagcaagcggcgataagagctgccaatacctatgccatgccggccaatggcagcgttgtcgccaccgccgcaggccggggtctgatccaggtcgcacaaggcgccgcatcccttgctcaagcgatctccgatgcgattgccgtcctgggccgggtcctggcttcagcaccctcggtgatggccgtgggctttgccagtctgacctactcctcccggactgccgagcaatggcaggaccaaacgcccgatagcgttcgttacgccctgggcatggatgccgctaaattggggcttcccccaagcgtaaacctgaacgcggttgcaaaagccagcggtaccgtcgatctgccgatgcgcctgaccaacgaggcacgaggcaacacgacgaccctttcggtggtcagcaccgatggtgtgagcgttccgaaagccgttccggtccggatggcggcctacaatgccacgacaggcctgtacgaggttacggttccctctacgaccgcagaagcgccgccactgatcctgacctggacgccggcgagtcctccaggaaaccagaacccttcgagtaccactccggtcgtaccgaagccggtgccggtatatgagggagcgacccttacaccggtgaaggctaccccggaaacctatcctggggtgattacactaccggaagacctgatcatcggcttcccagccgactcggggatcaagccgatctatgtgatgttcagggatccgcgggatgtacctggtgctgcgactggcaagggacagcccgtcagcggtaattggctcggcgccgcctctcaaggtgagggggctccaattccaagccagattgcggataaactacgtggtaagacattcaaaaactggcgggactttcgggaacaattctggatagctgtggctaatgatcctgagttaagtaaacagtttaatcctggtagtttagctgtaatgagagatggaggggctccttatgtcagagagtcagaacaggctggcgggagaataaagatcgaaatccaccacaaggttcgaatagcagatggaggcggcgtttacaatatggggaaccttgttgcagtaacgccaaaacgtcatatagaaatccacaagggagggaagtga

SEQ ID NO: 329584 - DNA, 993 bp, Pseudomonas aeruginosa
atggactgcccctccgaggagaacctcattcgcatggcgctgggtggtctgaccggggttgggccgatgaccttcgatctggcccatcggcagctccgggtggtgcactcgggcgagcccgccaggatcgcccagaagctgacgcccctgaacttgggtgcggttctgctgacaagcgagaggcgcaccgaaggcgggcagtggaagacgcgtttctccgtgccgaagatggattgcccgtcggaggagaatctcattcggatggcgctggccgatgcgtcggctgttgcggcactggacttcgatctgaaggaccgtgtactcaccgtgcagcatgggggaagtacgcaagagctgctgggccgtctcatccctctcaacctcggcgcgcaagtgttggacagcgtgcaaagcgacgagtctacggccccagacgcagaggggaatgcctctgaggctcggaccttaaagctgctgctcgctatcaacggtgcgatgtttgtctttgagttgatcgttggcctgatcgcccagtccacaggtctcatagcggactcgcttgacatgttcgccgatgcggcggtctacggactggcgctctatgcggtgggccgcgccgccgccttgaagatgaaggcagcgcacatcgctggttggttgcaagtcgtgcttgcgcttggcgcgcttttggaggtcgttcggcgggcagttgtgggaagtgagccggcgtccatgctcatgatgagtatcgggctggtcgcattgatcgccaacgtcacctgcctggtgctgatcgccaagaagcgggatcggggcgcccacatgacggcaagctacattttttctgcgaatgatgtgatcgcaaacgcgggggtgatagtcgctggtgttttggtcgcttggacgggctcctcgtaccctgacctcgtgattggcgcagtcattgcgctgatagtgctcagcggtgcccggcgcatcctgaacctccgatag

SEQ ID NO: 329585 - DNA, 420 bp, Pseudomonas aeruginosa
atgaaaatcggtgaactatcgtcattggcagggtgctccgttcccgcggtgcgcttttatgaagcagagggccttctgcaggcgcccctgcgggccgccaacaactatcggcaatatggccaacagcatgtcgacaggttggccttcatcgttcggtgccgctcgctggacatgtcgcacgacgatatccgggctctgctgcagttgcaggacgaccccgccatgtcctgcgacgaggtcaatgccttgctagacgatcaaatgcgcttggtagagcagcgaatcgccgagttgcaggcgctgcgcaagcaactgcgtgccatccgcagtacctgtgcgggaggggtatgcgttggcgattgcggtgcacttgaatcgctgcgcagcgccactggggcaagctggccaaccgttcgctga

SEQ ID NO: 329586 - DNA, 966 bp, Pseudomonas aeruginosa
gtgctggtggccaagtacgccgaccacctgccgctgtaccgccaggaagcgatcttcggccgcgccggcctagccatcccccgctccacgctggcgcaatgggtgggctcgtgtggcgtgcagttgcagccactggttgacgccatgaggacagagctgctgcagcgccgcgtgctgcatgccgacgagacgccggtgtccatgctcaagccgggcaacggcaaggcgcaccgggcgtacctatgggcctatgccacgggcgccttcgagaacatcaaggcggtcgtctacgacttctgcgaatcgcgctcgggcgaacacgcccggcgcttcctgggcgactggagaggcagcctcacctgtgacgacttcagcggctacaaggccttgatcgcaagtggtgtgaccgaggtcggctgcctggcgcacgcgcggcgcaagttcttcgatttgcacgcggcgaaccaaagccagatcgccgaggtcgcgctgcagcagttcgcgcgggtctacgagatcgagcgtgaggtcaaggagattgcgaccgatcagcgccaaaccatccggcaacaacaaacgaagccgctgcttgatgccttgcaccagtggatggtgctgcaacgccagaaggtgccggaaggctcggcaagcgccaaagcgctggactacagcttgcggcgctgggaggctttgacccggttcgtcgatgacggacagctgcccgtggacaacaactggatcgagaaccagattcggccgattgccattggccgcaacaactggctctttgcgggcagcctacgagctggtcagagggcagcagccgtcatgacgctcatccagtcagcacgactcaatgggcatgatccctatgcgtatctcaaggacgttttggctcgcttgccgacgcaacgggttagcctggttcacgagttgctaccgcatcgttggttcgcaccgagctga

SEQ ID NO: 329587 - DNA, 1830 bp, Pseudomonas aeruginosa
atggaaaagaaagatcaatggaacattggctactggatcgtcgccggcctgttgctgctgacgctgcagaactactggcaggcggccaagaccgtcgagcccgtgccctacagcgaattcgagaaggcgctggccgaggggcgcgtcgccgaagtgctggtgtcggaccgcacggtcaccgggcgcctgaaatcgccggacagccggggcaagaccaccatcgtggccacccgtgtcgaacccgacctggccgagcggctgtccaagtacgacgtgccctatgcgcgggtggtggaaagcacctggctacgtgatgtgctctcctggattctgccggcggtggccttcttcggcgtctggttcttcctgttccgccgcttcgccgagaagcagggcatgggtggcttcctgagcatcggcaagagccgtgccaaggtattcatggagaagaacactggcgtgacctttgccgatgtcgctggcgtcgatgaagccaaggcggagttggttgagatcgtcgatttcctgaagaacccgcaggattacggccgcctcggcgcgcgcatcccgaaaggtgtgttgctggttggcccgcccggcacgggcaagaccctgctggccaaggccgtggcgggcgaggccggggtaccgttcttttccatctcaggctcggagttcgtcgagatgttcgtcggcgtgggtgcagcgcgcgtgcgcgacctgttcgagcaggcccgcgggcaggcgccggccatcatcttcatcgacgagctcgatgcgctgggccgcgcgcgcggcgtcggcggccccatcggcggccacgacgagcgcgagcagaccctcaaccagctgctcacggagatggacggcttcgacagctcggtcgggctgatcatcctcgccgccaccaaccgccccgaaatcctcgaccaggcgctgctgcgcgccggtcgcttcgaccgtcaggtgctggtggaccggcccgacaagaaaggacggctggacatcctgaaagtccacgtcaagaaggtgacgctggctcaggatatcgatctcgaacaggtggctgcgctgaccacgggcttttcgggtgcagacctcgcgaacctggtcaacgaggccgcgctggccgcgacccggcgcaaagcgtccgccgtggagttgcaggatttcaccgccgccatcgagcgcatcgtggcgggcctggagaagaagaaccgagtgctcaatcccaaggagcgggaaaccgtggcctatcacgagatgggccatgcgctggtggcgctggcgctgcccggcaccgaccccgtgcacaagatctcaatcatcccgcgcggcatcggcgcgctgggctacacgctgcaacgccccaccgaagaccgcttcctgatgacgcgcgccgatctggagcacaagatcgccgtactgttgggcgggcgcgccgcagagaagttggtgtttggcgaactgtcgaccggtgccgcagacgatctggcgcgagccaccgacatcgcgcgcgacatgatcacccgctttggcatggacgaggggctcggctacatcgcgtttgaggcgcagcggccgcgttttctcgacgtccccgagctggcccacggcggctgccgggtggccgaatcgacccaggcgcgcatcgatcaggccatccgcgacatcgtgatgggcgtgttcgagcgcgcctaccggatcctcgacaccaaccgcgcggtgctggagcgttgtgcgcgcgaactgctggcgcgggaaacgctcaacgaaaacgacatccttcaattgacccaaggacttgttcttgatggaaacgaaaagtag

SEQ ID NO: 329588 - DNA, 177 bp, Pseudomonas aeruginosa; identical to SEQ ID NO: 324481

SEQ ID NO: 329589 - DNA, 912 bp, Pseudomonas aeruginosa
atgaacttacgccatcttcgctgtttcatagccgtggccgaagagttgcactttggccgggcggcgcggcggctgcatgtggagcagtcgcccctgtcgcgcacgatccgccaactggaggccgacctgggcgtggcgctgctggagcgcacgccgcgcggcgtgcgcctgaccccggccgggcaggtgtttctggaggaggcccggcgcgtgctgctgacccttgagcaagcccagaccaagacgcgggcggtggcggtgggacaccggggcgccctgcgcatcgccctggccggcggcgtcgggcggacccggctgtcggcgctgctcgcgctgtgccgcgaggaggcgccggaagtgggcatccggctgttcgaggcgccgctgtcgcaggtggtgggcggcctgggcaacgacctgtacgacgcggcctttgcgatggccggcgagatggcggccggggtggtcgccaggccggtgtggcaagatccactggtggtggccatacccgcgcggcaccccttgctggcgcacaagcgggtaccgctggacgaggtggtgggctacccgctggtgctgtgtcacccgcaggtttgtcaggagtgcagccggcaatgcgagcgcctgctgcgcctggtggagacaccgccggtcgtggccgagtacgtgacgacccactcgttgatgctggccctggtggcggccggctatggcgtgggattttccaccgcggcgcacgcggtggcatgccggcaggcggacgtgatcgtccggccgctggacgaggactcggcggcgttgacgacctacctgctacatcccgagggcgcgatgtcggagccgctgcgccacttcatcgaccgtgctcagcgtgtcggccatatgccgttagatacgcaacggctcgcatga

SEQ ID NO: 329590 - DNA, 762 bp, Pseudomonas aeruginosa
atgccgaagtcgagcagcctggccgatggtgccaagacctactaccgcccgatcgaggcggcaatccgctggagcggattgctgcgcttcgagcggcgcatcctggcgaccttgggacagcggcctctaccggaggcaacggagtttccgcgctggccgatgctgcggttgaacgccgaaagaatcttcgatgcgctggctcacggcgagatgccgtatagcaaggagggtttggtgcgggacacgcagggcctgacgatggacgacctgtcgctgacggtgcggcacgtcgacctgaaagcctggatggcgtactactaccccggcgagaaaccggcgtttctgttcgatgagatcgagcgtgcacttcacccggcgatcagcctggacacagtgggcgcattgctggccgagcgggaagcgatcaaggcgcggctggcggaacacttgggcgtgcacgagacgctgcgcgccgagcacgaggcgctgctgaagacgcacgccgcctacacggccgacgcggagcgtgcgagcacgcctgggccgcgcagcgaatcgacctacctgaacatcgttggcgggttactgacgctactgctgggcaagtctcccagcggcatgccgtattccagcttcctgacgcaggaagccatcatcagcgcgatggtggcgcaccacggcaacgcgatgggcatcaccgagcgcacgctgcaggccaagttcgcactggctcggcgcaatctgcagagcacaaattcctga

SEQ ID NO: 329591 - DNA, 1659 bp, Pseudomonas aeruginosa
gtggctgagctgacgccgcaggacatggctgccaagctgctggccaccggcttcgagcgcagcggcccttcggccgcgaccttgagcgaccccatcgccgacacgccgatggtggtgacgctggaccagttgcggccctacgaccacgacccgcgcgtgacgcgcaacccggcctatgcggagatcaaggcgtccatccgcgaacgcgggctggacgcgccccccgcgatcacgcgcaggccgggcgaggcgcactacatcattcgcaacggcggcaacacgcggctggcgatcctgcgcgagttgtggagcgagaccaaggaggagcgcttcttccgcattgcgtgcctgttccgcccgtggccggcgcgcggcgaaatcgtggcgctgaccgggcatctggccgagaacgagctgcgcggcgggctgaccttcatcgagcgggccttgggcatcgagaaggcgcgcgagttctacgagcaggaaagcggccaggcgctgtcgcagagcgaactcgcgcggcggctgacggccgacggctatccggtgccgcagtcacacatcagccgcatgaacgatgcggtgcgctatctgctgccggcgatcccgacgctgctgtacggcggattgggccggcatcaggtggaccggctcgcagtgctgcgcaaggcgtgcgagcgcacctgggagcggcgtgcgctgggccgcaccgtggccgtggacttcgcctcgttgtttcaggacgtgctgacgcagttcgacacacagccggacgacttctcgccgcagcgggtgcaggacgagctggtcggccagatggccgagctgctggaggcggactacgacacgctggcgctggagatcaacgacagcgaaaaccgccagcgtgcgctgaccagcgaaccggcggcgccgacgccaccggcagcgcctgtcgtgcctgctggtcctcccccgccggtctccgcgcctcagcagccacccgcctcgtccgtgccgcgcgacaccacgccggtcgcgccttcggcgccagcagcgacaccgcctgcaccgctcgaagcgccggaggaccagcacgggcaacgcgacgagcgcctgcaagggcacatcgtgacaccggcaccgaccaccgagcgcctgcagtccatccagcggatggtcgcggaccagctcggcgacaagctgcccgacttcgaggccgatgcgctgcgtgcgatccccgtgcaggcgggcgggctctatcccatctcggacgtctggtacgtcgagccggggctggacgtgccggatcgcctgcgcgtgcacatcgcgcagttcgcgcgcgagatcggcgaggaagcggcggtcgccgaccacatcgaggccagcgtcggcggcatcggcttcgtctgcgtggcaccggccgtgggccaggcgaaggcgctgccggcgttcgcgcgggcggtgctgaccctgctgcatgtgctgagtgcggctccgccctccgcgaacggattggaccgcgcgcggctggccgacgagctggcggcgctgctgcatggccacggcggctcggccacacgcctgagcgatgctgcgctggtgaagctgttccgtctgctgcgcctggcgcgccggctgctggatctggaagccggcgtagcgagccaggattcctga

SEQ ID NO: 329592 - DNA, 561 bp, Pseudomonas aeruginosa
atgtcggcaccgcacccactcaaccaggccgtgatcgcccaggccctgcatgacctgcgcaacggccagttgcgccgctgcaaggctatgggcttcggcgaggaggagctggatgcgctgaagcaccccgaactcgtgagcatgctggtgaatgccacggtgtcgtggtgttcggtgtcggtgaaccgggaagtgttgaagcggctgctgagccaggtgcacgacgtggagcgggagatcgccacggtggaccgcatgctgcgcctgggggcgagcacggagatggtcagcaagttctacggcctcacgcatcaggaagtggcgctgcgccgcgacatcctcgggctgcccaagcgcaagggccggcatccggtgctcgacgaggcgcaggacgtggccttgtgggagcgctggaaggccggcgtctccgagcgccatatcgccctgaccgacgacatggcgatgctggcgctgaccatggatctggccgaggcgctgagcctgccgatgtcggtggtgtgggcggcgatacgcaactggatcgaccaggggctggtgtag

SEQ ID NO: 329593 - DNA, 303 bp, Pseudomonas aeruginosa
atggcactcgctgttctcaatctcgtctcgcaaccacggttcccatccgggcaagtggtcatgaccgccggcatcaacgatctggtccagcagggccagttcaatccggtgccttatctgcgtcgccaccttcgtggtgactggggcgatctcgacgactgcgaccggcgttccaacgatgccgcgttgaagtccggagaccgcttgttctcgtcctaccaggtcacgccgaccttgaagctctggatcatcaccgagtgggaccgcagcgtcaccacgctgctgctgccatccgagtactga

SEQ ID NO: 329594 - DNA, 2286 bp, Pseudomonas aeruginosa
atgtcactcgatctcgaaactgttcccgcggctgtttccgatgcctcgcccgtgcagggcgacctgctcgaagccgcatcttctccgctcaccctcagcctgcaggacttcgtatcggagttcggcgacgagctgctcgattcgctcaaccgcgccaatcctccggtctacaccggccaggtgcgggtgcatcggcaactgatcctcgccgcgctcaagcgcaagctgttcccggcgcaagccgatgtggtccacgccgtcaccgagctgttggtcgatcgtggcgaacgcgccgcgatcgtcaatggcgagatgggctgcggcaagacgacggtgggtattgccaccgccgccgtgctcaacgccgaaggctaccgccgtaccttggttctgtctccgccgcacctggtctacaagtggcggcgcgaaatccaggagacggtggccagtgccaaggtctgggtgctcaatggcccggacacgctggtcaagctgctgaaactgcgagagcagttgggcgtgccggcccagggccaggagttcttcgtcctgggccgcgtgcggatgcggatggggttccactggaagcctgtcttcgttcggcggcgcacgcctcacggcgacgtgggggcctgcccggattgcgggcatgtcatcaccgacctcgacggcgagccgatcaatccggtcgagctggaagccgaggagtcccgccgcaagtgcagccactgccgtgcaccgctgtggtcgttgatccgtcccagaggcctgtccgccagcgaccagtcctcgaccgtgctcaaggcactgaagcgtattccaaccatcggggaagtcaccgcgcagaagctgatgcaaaagttcggtgacgccttcctcgcgtcgatgctcggggacaacatccacgagttcatcaacctgatggatggcaacggcgagctggtcttctcggaccggcaagcccatcggatggaacgtgcgatggccaacatggagttcggcttcggcgagggcggctaccagccgtccgagttcatcaagaggcagcttccccaaggcacgttcgacctgctcatcgccgacgaggcgcacgagtacaagaacggcggctccgcacagggccaggccatgggggtgttggcggccaaggcgcgcaagacgctattgctcaccggcacgctgatgggcggctacggcgacgacctgttccacctgctgttccgagcccttccggggcggatgatcgaagacggctaccggccgacgaagagcggcagcatgacgtcggccgcgatggcgttcatgcgcgatcacggcgtgctcaaggacatctattccgagagcaccggcacggcgcacaagacggccaagggcaccaaggtatcggtgcgcacggtcaaggcgccgggtttcggtcccaagggcgtgctgcgttgcgtcctgccgttcacggtcttcctcaagttgaaggacatcggtggcaatgtgctgccgccctacgacgaggagttccgcgaagtcgcgatggacacggcgcaagctgcggcctaccgcgatctggcgggtcggctgacccaggagctgaagcaggccctggcgaagcgcgacacgacgctgctgggtgtggtcctcaacgtgctgctggcctggccggattgctgcttccggtcggagacggtggtgcatccacgcacgcgcaacaccctggccttcgtcccggctcagttcaacgagctggaggtgatgcccaaggagcgcgagctgattgatatctgcaagcaggagaaagcagaaggtcgcaagaccctggtctacacggtctacaccggcacgcgcgacaccacgtcgcgcctgaaggtgctgctggagcaggaaggcttcaaggtggcggtactgcgcgcgagcgtggatgcctcccgccgggaagactggatcgccgagcagttggaccgcggtatcgacgtgctcgtcaccaatcccgaactggtgaaaaccggcctggacctgttggagttcccgacgatcgtgttcatgcagtcgggctacaacgtgtattcgctgcagcaggccgcacgccgttcatggcgtatcggtcagaagcagtcggtgcgcgtgatctacctcggctacgccaactcctcgcagatgacctgcctggggttgatggccaggaagatcatggtgtcgcagagcacgtcgggagacgtgcccgaatccgggctggatgtcctgaaccaggacggagactcggtggaagtggcactggcgcggcagttggtgcattga

SEQ ID NO: 329595 - DNA, 945 bp, Pseudomonas aeruginosa
ttgagctttctcgcgctgttcatcagcctgcccaccaaggcatcgaccggccgcatgcgcgtctggcgctccgtcaaggcgctgggctgcgcgacgctgcgcgatggggtctatctgctgcccgactcggccgatagcgctacggcgctggacgaagtggcggcgcagtcggtcgaggccgggggcagcggcgaggtctatcgactgtcggggtgtgacgaagctcaggaagccgcgctgcgcgccctgttcgaccggggcgaggagtacgcgggcatcgtcgaggagatcaaagggctcggacggagcctggcgtccctggacggcgcagccgccgcgcgtaagctccagccgctcgtgcgccgcttcgagcaggtggcgcgcatcgacttcttccccggcgaggcgcagcggcagaccttgagcctgctcgacgacctgcgcgacgcgctcacccgccggctttctcccgacgagccgacccctcggcaggctgacattccgcgactggagcgggccgactatcggggccgtgtctgggccacgcgggcccgtccgtgggtcgaccggctcgcctcggcctggctgatccgccggtttatcgacccgaaggcccgcatcgtctggctgacgagtcccgccgactgcaaagccgattggcttggcttcgatttcgacggcgcggcctttagtcacgtgggcaccaaggtcagcttcgagacgctactggcgagtttcggacttgattccgcccctgcactgatacgcctgggcgagctcgtgcattgcctggatgtgggggggctaccggtagctgaagcgctgggcatcgaatcgctgctcgccggcctgcgggcatccgaacccgacgacgacgcgctgcttgcccgcgcatgcgaagtctttgactggctattgaagagttacgaggaaaaaacaacgtga

SEQ ID NO: 329596 - DNA, 1233 bp, Pseudomonas aeruginosa
gtgaacgccccgaccagtcctcagaccgctgccacgactgaagcggtccctccagcgatgagctacctgcagctcttcgcgcgcttcctcaagttcggcttgctcgcatggggcgggcctgtggctcagatcggcatgttgcgccgcgagctcgtggacgaggaacgctggatctccagcagacgcttcaacaagctgcttgcggtgatgcaggtactgcccggacccgaagcgcacgaaatatgcgttcatttgggcatccgggcgaaggggcggctggggggcgtactggcgggactcggtttcatgcttcccggattcttgctgatgttcgcgctgtcctggttgtacttccagattgaattcgtgggtaccgcgctgggcgcggcgttccttggcgtgcaggcggctatgatcgccctgatcgtgcgcgccgtgcaccgtatcggcgagcacatcctgcttgaccgctggttgtgggtcattgccatcgtttgcgcgctggcggccataggtcgtgtcgacttctggatcaccctgccggcgggcggccttgtgtacgccctgctcgtgctgaatcatcgggccttggcgctcctggtgacactggcggcggtggcgctggccgcggccgtggctttgtgggctgcaccgacagcgaagcttgtggaagcggtcgttcagggccaggcctcggtgctgctcatcttcgcgtcgggcctgaaggccggcttgctcaccttcggcggcgcctacacagcgattccgttcgttcgcaacgacgccgtcgggcgcggatggatgacggatgggcagttcctggacggcctggcgctgtccggtgtgctgccggcacccctcatcatcttcgccacgttcgtcggctatgtggcaggggggccgatcggggcggtggccatgacggtgggtgtctttcttccggcctttgcgttctcgttgattttctacgaccggctggaggctgtcgtggagaacaaacggctgcacgcgttcctggacggcgtcgcggccggcgtagtcggcctgatcggcgcaactaccctcgacttggcgcaggtcacggctgaacgtgtcccatcgctggcgatgggcatgtcgatcttcgccgcaggcttggcgttcctttatgcctggaagaacaagctcaacgtcgtcgtcgtgatcctcgcggcgggattggcgggctggctggtgtttccgaaccaaggctga

SEQ ID NO: 329597 - DNA, 594 bp, Pseudomonas aeruginosa
atgccttacgaactgaagcccctttcgtgcgatccagccaagctcaccggcctgtccgagaagctcatcgtcagccactgggagaacaactacggcggtgcggtcaagcgtctcaacgccatcgagcaacagctggcgcaattgacctggggagcggcgccggtgttcgagatcaacggcctcaagcgcgaggagatgatcgccagcggttccatgatcctgcacgaggtgtacttcgattccctcggtggcgcgggaggcggccctggcgggacgctgaaggcggccatcgtgcgcgatttcggctccatggacgcctggcgcgcccaattcacggccatgggcaaggcccagggcggcggctccggctggaccttgctggtttggagcccgcgccgcgagcgtctcgtgaacgcctgggccgccgaccacgcccacaacctggccggcgccacgccgctgatcgccctcgacatgtacgagcacagctaccacatggacttcggcgcaaaggccgcagcttatgtggacgccttcatgcagaacctgtcctgggcggctgccgaggctgcattggccaacgtggagggctga

SEQ ID NO: 329598 - DNA, 1026 bp, Pseudomonas aeruginosa
atgaagcacgccactgccccggcatcgttcgcgcatgaaccgatcggccggccgacgccgaatggaggcggcgcgagtcgagccatgaagtgcctcgcgcggtcgatcggcctcgtgctcctgagcctgctgggggtgggagcgtcatacgccgacgttctgcctgcacctcgacagttgtctccccatgcctgggcctggattggcccgtacgagggcccgagcaaggccaatcggggtttccgcatgaatctcggcttcgttgtcggcgaggaggcggtggccgtcatcgacagcggttattcacccgacatggccgaggcgatgctgcgccacgtccgcgcgcgcaccgcgctgccggtgcgttatgtggtcagtaccaattcgcagccccatcgctttctcggcaacgatgtcttccgccgggccggcgcccgcatcctcgccggccgggatgcggccgagcgcatgtcgcgggacggcgccacgatggtgggcgcggcggcgggcattctcggcattgccgaatggcccgtaccggccgcaccggatcgattgctcagcgcgggcgagtccgccgatcttgatctcggcggcggcgtcgtgctgcgcgtgcgccacgccggcacggcccataccaagggaagcctggtggcggaggtgcgccccgaccgcaccgtgttcgccggcgacatcctgtacgacggccgactgccggccctgattccggatggcagcgtcaagggctggcttgaggccttcgatgcgctgcgctccctggacagcgccatcttcgtgcccgggcatggcgagcccgcgccgctcgccgccttcgagcatccgacccgcgactacctgacgcggctcaagcgccacatggacgatgcggtgaagacaggcaccgacatcgaaccggccaagtcgggcttcgacgcctcggcctggcaatcgctggccaacttcaaggagctgaatggccgcaacgcctatcaggcctatcaggaaagcgaagccgaaggtttctga

SEQ ID NO: 329599 - DNA, 456 bp, Pseudomonas aeruginosa
atgaaatggatcacccgcgaacgccccaagatcgaccgcatcgcctgcccctggctggtggcgcgcttcatcgacgaggcccccgagttcctctacgtgccggccggcgacgtgatgcgcctcgccgccgacaccggcgccatcccctatgacgtgccgaatgtcgagctcggccaccacggcgaccactgtagcttcgacgccttcatcgagaagtatcagctcatcgacccggccctgaacaagctggcgctgatcgtgcgcgccgccgactgcggccagccccaactcgcgaaggaggcggccggcctgctggccatctcgaaagggctgtcgctcaacttcgccgacgaccacgagatgctgaaggcaggcatggtgatgtacgacgcgctctacgcctggtgcgcggatacgccgctgaagaaggtcgcgcggctgctcggctcgaagtga

SEQ ID NO: 329600 - DNA, 1215 bp, Pseudomonas aeruginosa
atgctgctacccgccggggccgcgcccgaggcgcgcctgctgctcgccggccgggcgctgcgggccttcaccgacggttatgtcgccatcctgctgccggtctatctgctggccttggggctgggcacgtgggaagtcgggctgatcagtaccgccacactgctcggctcggcgctggcgaccctggcggtaggccagtggggacatcgcttcccgcagcgccggctgctgctcgccgccgccggactgatgtgcctgaccggtctgctgctggccggcctgggtggcgttggcgacttctggccgctgctgctcgtcgccttcgtcggcacgatgaatcccagctccggcgacgtcagcgtcttcctgccgctggagcacgcccgcttggccgagtcggcgcagggcgaggcgcgcaccttcctcttcgcgcgctacaccttcgtcggcgccttgtgcgccgcggccggttctctggcgacggccattccgcaaaccctgacgaatgcgggcctggtgcagctcgacgcgctgcgcctcatgttcgtcgcctacgggctgaccggcgtcgcgatcttccttctttaccgcacgctgccgaaccatccggtccacgcacaggcggcgccgcccgcaccactggggccttcgcgcggcatcgtgatcaaactggccgcgctgttctcggtcgacgccttcgccggaggactgatcgtcaacaccttgctcgcgctctggctgttcgagcgcttcgacctctcgctcgccgccgccggccacttcttcttctgggcggggctgctctcggcaggctcccagctcgcagcgccctgggtggcgcgccgcatcggcctcgtcaacacgatggtgttcacccacatcccgtcgagcgtctgcctgatcctcgccgccctcgccgagagtctgccggtggcgctcacgctgctgttcctgcgcagcgccctgtcgcagatggacgtgccgacgcgctcggccttcgtcatggcggtagtcacgccggctgagcgcgccgcggcggcaagcttcaccgccgtgcccaggagcctcgcggccgcggtgagcccggccatcggtggcgcgctgttcgccgccggctggctggccgcgccgctggtggcctgtggcgcgctgaagattgcctatgacctcgcgctctggcgcgccttccgacggcacggggaggctacgccgtga

SEQ ID NO: 329601 - DNA, 183 bp, Pseudomonas aeruginosa
atgcgcatcctgatcatcgaagaccagctgccgtgtcggagcgccgagtcaccggagcaacttcgccggttcatcgagcggatcgaaccggtgcggccgcacttgccggaccgggcggcgtcttcaacggcgaacccgagcgccatcgccaccggcgaaatgacgggcccgaacccgtcctga

SEQ ID NO: 329602 - DNA, 645 bp, Pseudomonas aeruginosa
atggtggagcttgaggaaacttgccatacacacatcattccgcgtctcaggaaggtaattgacggcgaagataagggcggcgtcacagaggctctaagttggcacggcggcggcggcttccgctattaccgtcttgcccccagcctgatcgtcaacgaccgctggggcaacccggtgatcaaccccgaatacaacgctgcgcaactggccgaggcgctggccaagctggaaggcttcaactacgcgccgtcagaagcgcactggtggcagcacggccactccagcgagcgcgatttcatctatgtcaccacgcagaacctgtccgctgagcaactgcaagccctggccgatgaagtcggcccggagcggagcctgctggtgtgctgtgccgctttccacggcgtcacggcgaccaaagcggcggagcgctggccgaacctgacgttgaagaagatcccgaagatggtgctggcccgctgccattggggccgtgacgactacagcctgaatgtgaccaacctgccaatggcggagattgagaaggccgagcctgcggcccctggcaatagcgtcaagaacactaagagcagaaaagcggccctcgccaacgcgggacagggcggcctgtttggggagaacgaataa

SEQ ID NO: 329603 - DNA, 396 bp, Pseudomonas aeruginosa
atggaatattccctgggggttatattttgtggcgtgggatatcgagtgtacaccgacgagttcggtgattggtggggttctctgtccgaggatgagcaggagtcgctagctgtgacggttcgcttgcttgaggagcgggggccatccttggggcacccccacagcagcggcatcaatggctcccgccatggccatatgagagagctacggactcaacacggcgggcgacctttccgaacgctttacgcgtttgaccccagacgctccgcgatactgctgatcggtggcgacaagactggcgatgatcgttggtacgaattgaacgtgcccattgccgaccgcctctatgacgaacacttgcaccagctccgtgaggagggactgatcgatggttaa

SEQ ID NO: 329604 - DNA, 1353 bp, Pseudomonas aeruginosa
atggaggatgcgctgcaagcgctgtccgaaatgctggctgcttatgccagccaggatctttacgagatcgacccggatgcaacgcacatccaggcaggtcgtgaactccgtgaatggatcaagcggcgccttgttgtagagcgagagggccgcatctatgcaaccgacgcgctggagtccgccatacagttcgtcgactcgttggatagtcgtatcatgacctccacggcctctcgcctttcggtggtccagcgcgagattgaaaacctggaaacgggtctgaaccccagcccaagtggccgtattgccagcctgcgccgccgaatccaggacttggagcacgagctagcgcaggtagaagctggccacgtcgtcgtgctggacgaagctcaggcgatagagggtatacgcgaggtatataacctggccaccagcctgcgcgcagactttcgacgagttgaagactcttggcgcgaagctgatcgcgccttgcggcaatccatcatcagcgagcagtctcaccgtggagaaatcgtcgatcggttgctggacggtcaagatgcgttactcaacacaccggaaggacgtgtcttcgaaagtttccagcagcaactgaggcagtccgccgagctggaagtcatgcgtgagcgcttgcgtaccatccttcgtcatccagcggttccgaaggcactgaatcgtccccagcaacgtgagctgcgttggctggcgttacgcttggttcgggagtcgcaggctgtgcttcaggcgcgtgcccgaagcgagcgcgatgtacgtggcttcatgaagacgggcctggccgccgagcatcatcgcgtcggacagttactcaacgatttcttcaatctagcgctcagcgtcgactggcaacgccaggccgtgcgtcgtagcactgtccgtttgccgccggttggcgtagccattaccggagtcccagcgattgagcgtctacgtttcaagaccctggatgacgatgacacgggcgagctggatctgagtctgaagccagcggggctggaacagattgacgatgacttctgggatgctttcgacgggttggatcgcgaagcgctgattcatgacaccctggcggtgctggtggagcaggggcgacctgtgagtctcggggagcttgcgtctttgcttccacctgctcacgacctggaaacctttgcgctctggttggctatggcgcgcgaggcaggtattgaggtgctgacagaggagcgtcagctcgtggagctagttgacgaggatgagcaacgctggcgcttcaatctgccttatgtcggactcgaccacgaggcactcaaggacatcgattgggagttgtga

SEQ ID NO: 329605 - DNA, 750 bp, Pseudomonas aeruginosa
atggcaggggtcttcgatcgaattgcaggcgcctctggtgccgacgaaacggagctgacggtggagcccatggctttggatgacggcatggatgatgaacagcctctcatgagcgccgctgtacaggtcgatgagcgccggacgccgcaacgggtacgggaggccgtacaggaaatgctcaagtacggtctgctggaagagagtcacaagcccaacctgtatcgctcagcgctttccaatatcgaggcggtcgacagaatcctggagccgctcgaccttgccatgggggtcgacgaggttcgggggctgttgttcgttatcgttcgccagggcgaggtggccgagcaggatgactggtcgcaccccctagtgcgtcggcaaaggctgaatctggagcagtctctgctgatagccatcctgcgccagcagttcatcgcctacgaacaggaaagcggtacgggcgccagtcaggcatcggtagtggtcgatgagctgattccccaattgcaggtttacctgggcgagctgggcagtgaggcaaaggagcgcaatcgcatcatcacgctgctggatcagctcaaggggcatggcctggtgtcggctttggacgcccatgatcgcgtcatcatccgtcccatcattacccacttggctaacccggagaacctgcaggcactcgtggcatggctgcgagagcaggtggagggcgcggcgacgccggctgccgatggcgaggaggatatggcatga

SEQ ID NO: 329606 - DNA, 3306 bp, Pseudomonas aeruginosa
atgaagcaggcactcctttggcgtgacagcgagaccttcattctcaccagcatcgagctctataactggggcggctttcagggctatcaccgtgccgagatcgacccctccggtaccgccgtgatcggcccgacggggagcggtaaaacgacactggtggacgctctgatgaccttgctgtgcgccaatccgcgctacaacctggcatccacgggcgggcatgaaagcgaccgcgacctggtgtcctatgtccggggagttaccggccccggggacggaggtatagagcagtctcatatcgctcgccagggtaagacagtaaccgcaattgcggccacgctcgagcgtgatggtgcgcaggtacgactgggggccgtgctctggttcgaaggcacaagctcctcggcatcggatctgaaaaaactgtggctgttaagcgagtcccccgagcagactctggagcattggctcagccagcatcacgcaggcggtatgcgggctttgcgtcagatggagaaggatgggacgggtatctggccttatcccagcaagaaagctttcttggccaggctgagggattacttcgaggtcggtgaaaacgcattcaccttgctcaaccgcgctgccggcctgaagcagctcaatagcattgacgagatctttcgcgagttggtgctggatgaccgttccgccttcgagcgggccgccgaggtcgccggcagcttcgatgatctaaccgacattcaccgagaactggaaacggctagaaagcagcagcgctcattgcagccggtcgccgatggctgggagcgttaccaggtcttgcaagaacagctgcacgataagcaggctctcgaaggtatcctcccggtttggttcgccgagcaggggtatcgactgtggttggctgaaaccaacaggctcgagaaggagtacaaaaaggccgaactggatcaggagcaatgcaaaagtcagcttgaggcccagaaaggtgtggtcgatcaacatcgccagcgctacctgcgagtagggggcgcagggatagatcaattgcgcgagcgcatcgctgattgggtgagggagtgcgataagcgcagcctgaaagccgagcaataccaactcttggccaaaggccttggactagcggatgagttatcggccgctgctctcaaggagaatcagcagcatatcgcggcacgcctggaaatactggaccaacaaattactgacgcgcgccaaaaggcgttcgacgcaggcctcgtccagcaggaactcaatggtcgcctacagaccttacagcaggagggtgctgaggttgagaaacggccaggctcgaacctgcccgggcaatttcatgctttccgaagcgatctggcgcaggcgcttggtgtcaatgagtcggccctgcctttcgttgccgagctggtgcaggtcaagcccgaggagctggactggcgtggcgccatcgagcgggcaatcggtagccaccggctacgcatcctggtgccgcaggactcatcccaggccgcactgcgttgggtgaatcaacggcacaaccgcttgcatgtgcgcttgttggaggtacaggagccgacgtcgcgccccgtgttcttcgacgatggttttacccgcaagctgaccttcaaggagcatccgtaccgagaagccataaaggcactgctggcggacaatgaccgccactgcgtcgaaagcccggagcaattacgtcatacccctcatgccatgacggctcaggggctgatgtcgggcaaagaacgcttcttcgacaagcaggaccagaagcgtctggacgaagactggctgaccggcttcgataaccgtgaccgtctggccttcctggctgagcagattcgcgaggtcaatgagcggctcgagccagccaagctcgccttggatgctgcccagggcgacgttcgtcagttggagactcaagcttcgctgctgaatcgtgtcaaagaactgcagttcgaggatattgatctgccgggtgcccagagtcagctggagtcgctgcgtacgcaactggccaccctgacgcgccccgattctaaccttgccatgatcaaggtcgagctggatgcggccgaggccctgcaggagtctctggatcaacagctccgccaactgatcgaacagtacgttcagttaaaaactcagtttgaccaggccgcatccgctacccgtaaggcctataacagcgcggagaaagggctgaacgatacgcagcgtgaactggcgcaagcgcatttcccgactctgaccgcggatgacctcggcgatattgtcgagctggagcgcaagcatacgcgtgagcttcaagggcagctcaaagcgcttggcgagaaactgggcgatcagaaatcagagcttgccaaacgtatgtctgatgccctcaaggtagacaccggggcgcttgcagaggtcgggcgagagctggtggatgtccccaggtatctggagcgtctgcgtgtgctgaccgaggaagccttgccagagaaactcaagcgcttcctggaatacctcaatcgctcctcggatgacggcgtcacccaactgctcagctatatcgaccatgaagtctcgatgatcgaggaacgcctggatgacctgaatagtacgatgcagcgtgtcgactttcagcccggacgctatctgcgcctggttgcaggcaaggtcatccatgaaagcctgcgcaccctgcagcgcgcccagcgccaactgaactcggcgcgtttcatcgatgatgaaggcgagagccattacaaggcattgcaggatcttgtggggttgctcaaggacgcctgcgaacacagcaggaatcagggagccaaggcgcttctggatccgcgcttccgcctggagttcgcagtatcggtgatcgatcgagaaagcaggaatgtcatcgaaacccgaacaggttctcagggcggtagcggtggcgagaaggagatcattgcctcctacgtgctgaccgcttccctgagctatgcgctttgtcccgacggcagcagccggccgttgttcggcaccatcgttctcgacgaggcgttctcgcgcagctcccatgcggttgcaggtcggatcatcgctgcgttgagggaattcggcctgcacgctgtcttcatcacgcccaacaaggaaatgcgcctgttacgccaccacacgcgttcggcagtcgtcgttcatcggcgcggcctggagtccagtctggtttccctgagctgggaagctttggatgagcatcatcaacagcgcatcaaggccatgcatgaagtcgcccactga

SEQ ID NO: 329607 - DNA, 2352 bp, Pseudomonas aeruginosa
atgaaaacgcttgagctgcgcaccagccttttcagattcgacccgacacaactggggcgggcctaccgagtcgtgattggagagcattacctcgatgcttggcaagcgctcaaaggactgacaaagaagccgcacccaggcttgcctatcatcgctttagaagaaatgctgaccgtcctctctggtggccctgtgaaggtcaatctttccccgcaaaaagacggtggcgtatcggcgattcttctactcaaacctcttccgatcgacaccatcaacgagacgctacggctatggtcgatggatgtattgaggatctggaacgagcgactcgaaggctttgagggcaagctcgctgtcaccgacctcgtaccccttgagaccagcctcctcgtgacaccaggtgatatttcatcactggcatacaccgtcattccgtggctagttggccaggcgatgatccgcaaccccatgcaggccagcaaaccaatcacgctttatcaggcatcggacgcaacgcttttggcatgggacgatcccgttgtttcggagaacgatatccgctacgccagcgccgtacatgccattgagcccaagctggttttgttgcgcggacgagccgagccttaccttcagttacgtgtgaagctgagccaggtcatgccaaatcttgttgggacgaaaaagcatgcctgggtaaaagttggcgatcagatcgtgaaggctaagctcaagacccagccacatgaagggggatggaaaaccacgtacgagcatccgatcgaagacttactgggatttatgggcgtttcgtcttttccatctattcaggaaggcgacatccccatcgacagcgacttcaggcccatctatgccatccctccgtccaacccactgatagcatcaggacccgggccattgttcctggatcaggccggctttcacctgctggacaacctacctggaacatctccgttgttggccagaaaggccgtaggtagtttgcgagaggaaaaagcacaggccaccggcgaggtggtcacgttgccggtgatggtgcttgcagcccactccgaggtaatgctgcggcttcatgcggccagtggaacactcggtgaggacagtcagttcttcaaggaggtgatgcccccactggtaacactgactcggctggatgtgcctgatgcggggcgcatgctcgcgggacaacacgacctgctagtcctcagggcatggctatctaatcatgtattgcccgcagcttcgcaagcccactgcggtggccccaaggtgatgatcgtcgaaacctgcgcttctgcagcgaaattggaaggcgctcaggaccccaagcatttgatccggcaagttctggcagagcacggcattgcgacgcaattcatcatgcacatcgatcccgatgaacaactgaagaaaaagcgcaagggcaaagaggatgatcgcgacttcaaggccaccaacaccattatcgaggctatccgcctgagcggctaccttcccgcgccgataccaaaatccaaagcttcgccggagaagaccactgtagtttccgtcctgcttgatcgcatccaggaaaaaggcccggcagtgcttcttcctgtcatcacccgcgcggtgttgggggagcccaacactgagattttctggttcgagtcaggcccggactccgggggcaagtggttcagttataacgagggcgtctcggccatacatgcattcgccacgctgcttacatctgaccagctcaccaggctggtgactcaagccctgctggtacccaccaaagttgctgacgccccactgatcgcatgcctcgacagtggccttcgtacattctacaaggggctccaggacagtccaggcgagggccttcccccggtacctgaaggcgccgccatcgtacgaattcgcgcagacctggacgttgcccaaatgagcgggaatcagtcactgtcacctgataccccccactacataggcaccaaggtcggcatattccagtccaatgagagcttggacgtctattacttcgtcgctccgtccaaacagtacggctccgtccggtcgcaacgcaacaacacccgctatgagatctccgagaaagacttgcgagatccgtggcagcagctcggtgtcacggaaatcacgattatacgtgccggatcgttcgctcacccgacagctactgccgagcaagttgcactgctttgccgcaacgctccgctgtgggccgggtatcttcgcttgcccggtcccatgcacttgggcaagcaggtcgccgcagatcatcccattctggagcggttgcgcaagactgaggctaaccgctcggattga

SEQ ID NO: 329608 - DNA, 3075 bp, Pseudomonas aeruginosa
atgcgtcccctttctgatattgcgaccacactgttcctggctatcgctgtgcgctacgtcaccaacgaacctacgctggccgatgctgcggcaatcattgcaggcaggacacgcaagtggagcacctggggctccctgacggaagcgcagcaaacgctaatcgcccagagtttgcggctcagaccttctttgctggctcagccaaaacgcttcatgttgagcgccgagggcatcctgaagggcaagttgagctcttttgagctggtggacagctccaatctgaacactgaactccacgagcaagatcggtatcgcctgtcgtcccatctggatattgaccaggtcatcagggaaaacttcgaggcgctcaagaatggtcgtactgcgccggctcatggacagctacccaatgaaggagacgtcgtactcaagcacatcactggagatcacgtcagggtcttcgccatcccggaaaatgaacgtcatgtcctgaatgcgctcgaccagcacgtcctcattccaccatcaacggcgttacccgagatcagctgggagcacgccaggctgatgaagctcgcgaaacaaatggatgcctctcctgacctgcatagccagcacgcagcgtcattggtgaacatctggggtgatgagcccgttcgcaaagccgactcggggaatttttacagagtcaatgcgccgactggttccggcaagagcgtcgcgatggtgatgatggccatcgacgcggccgagcgtggacacagggttgctatcgcagtccctacgctagttgaagtcgagaacaccgtacgcatcatcaagcaatcggcggcggcagtaggcaaagagttgaaggtcgcaccgctgcattccgcctctcggatatacgagcgtgcagagatgcagttcgagcagggcaagaccgatcacccctacgattatgcctgcctgcttgacgcttactcagccgacttgatggctgtggagccaggcaacgagccgtgcttcaacatacgcatatcggcatgtggggatgatggagaggagtcgtcgaagcgcctcaaacattgccccttcctcttcaggtgcggccaaacccggatgctgtcacaggcgatggaggctgacatcgtggtgatcaaccaccacgccctgttgtctggcacaacccgcatcccgctttcagacgctgaacagtttccaggcccccgaagcttggttgaaatcctattgcgaacaacacccgtatttctggtggacgaaatcgatggcctcctgaagtcggctatcgatagcagcgtgatcgagctgaggctgggcaatgtaggtgataacagcccgttgctgcgtctgttcaaccacgttgttggaaagtcccacatccccggaatcgatcgaagcagcctttaccgggtcaactgggcattgatgtactgcacgctgagcgtcagccagctcatgaatcttcagcaagaacgctatttcgaatggccaatcaaagagaccacctggtcggacgctgatgacaccttcatcacacaagcccttggcattacccgagaaacacttgagtacctgtttagcaacgatctcggtcagcttccgcaccacctgcaatcactgagccgcaaccttgccaactggcgttctaacgatggggaacacagactcgaaacgctggccatcaccctgggaaacctgatcgcagacttatccgagagcggcaggctgcctgagcgcctgaaggaacatgatcggatacgcctgaaagcatctctgattctgcgcggtaccctgctggtcatcgagacccacctgcgaaatttgcaggtcgagctacctgccttcgtcaatgcggagatcccttatgcgtacgaggtcaggcggagcatcgccggcccagaaccgctgagcccaagccccaacgggccgctgcaaagagcagtctttggcttcaaacgcaaagacagcagcgaccaagactcgacgctacacgtcgtcgccatgcggggcgaccctcacagtaccctgctctccctccctgacatcagtgcgttgggctatgccggagtgaagaggctgttcatcggcttctccgcaacagcctattttcccggcgccagtgcgttcgatctgaaagcccaggacttcattgatgtgccggacgccaagggccaggtgacgttcgagaacgtcaatcagaccacggcgatctctgggggaccatttgcccaacgcaaattcctggttaccaagctcgccaaggaactctggccatggctaaaggcccggttggaaaagcttgcaaacgatcccgagacccgggacagggcccgcctgctgctggtcaccaacagcgatgcggacgctgaagcactcgccatgaccttggcgaaaatggcggacggcccgggcgagtccgtcggatgggtgcgtggtcgccaaagcgaatataaaccctcatcactggaggcccagcaaatgcttgtctatgacgaccttgccgagttcaccagcggcaagcacaagcataagacgctattggtcagcgcacttgggcctatggccagaggacacaatatcgtcaacgcagacggactctccgctattggtggagttgtgatctgtgtccgtcccttaccggcgtccgacagccccaacaacaacctggcccacatctgctacgaaaccgggaacacagtgctgccacgctccagtctgggagaggtcatgacgcaagaacgcaagctctccaatgcgctgttgcagacgatccgtaccgcacgtccggcgtttagccagcaacccgccaacatccgtcactacaccatcatgaacattctggtgagcctgacccaactcattggacgaggccgccgagggggcacccccgtcacgtgctacttcgcagatgcagcgttcctcaaaggtctgaagccctggtcagagatgctcaatgaaagtgtcaaccggctcaaggaagacagcgactgggaacagttcgagcgtcaccatgcaggcatcgcatcggcggttcagcaatacattcttcgatcaagaaaggagtccgtatga

SEQ ID NO: 329609 - DNA, 1041 bp, Pseudomonas aeruginosa
atggacaacacccaatacgcccaacgtttgctaagcctgctcgcgcaaggcgccaccttatgcgccaccgacagaaaaaaggcatttccacttctgcaacgggcatcggctctgctatggaggcttgagcctgggcgctctccagtgacgacaatcacactggagcacaagctgaacttgccaatagagcaatggctcccggaggccatacgggcggactattccggccccctgctctgctccaacatggcctcgcagacctgtaacgaaatgatgctggagctcaacgcccggcagctttgggaaaccatccaggcccgcgtaaaccgagtcaagcaagcgtgccggctgcggtccgatggtgacacgctctatcgcaactttcgcctgttcctcattgagcacggcgtcatcgccccctcccaggcccgcgacgtattcgtcccactgaacctctctctcagtgacttctacgagcccatcccgcttcacctgcggcataacgggttgctgtacctgtgcccggaatgccactggcccctgaacactcaacggcatgaggtgagctgcgactctgcctggtgccgggacaagaaaagcctctttctcagagacggcacgaagctcgtgaaccgcgtgaataacagccaccttgagggccaggatgcccaggaaaggctcatgctgaatccagccttatggaaattcacgctgcagccgggattgctggaactgtccctggcacacgccctgaccgagagaggttacgaagtagaactttggcctaacgtcgatcgaacagatcttcgtatccgtataggccaaagcactcaggatatcgacgcaaaggtgtgggtatcggcccacgaactcgccaaacacatcgaacagattccgtcccacttgcctcgctggatcgtgatccccgactaccagaagcagaacatacctctactccgagagcactgtcctatgggtgtgcgcgtgttcactcagagccaatgcgtacaggaggtgcagaagcatgcgtcccctttctga

SEQ ID NO: 329610 - DNA, 2160 bp, Pseudomonas aeruginosa
atggcctttctcgacgctctcgccctgcgcctgggccgccgcctgccgctggtgctgcagaccgaagccaccgaatgcggcctggcctgcctggcgatgatcgccggctaccacggccaccataccggcctgatggaactgcgccggcgcttctccgtatcgctcaagggcatctccctcaagcaactgatccagaccgcccaccgcctcggcctgggtacccgcgcggtgaagctcgacctcggcgacctcggcaagctcaagctgccctgcgtgctgcactggaacttcaaccacttcgtcgtgctcaaggcggtcgacgggcgcggcgcggtgctccacgaccccgcccacggccagcgccggctgggcctggaggaagtctcgcggagcttcaccggggtagccctggaactctggccggagagcggcttcgagaaacaggaggcgccgccgcggatcaagctgctgggcatgctcggcaaggtcaccgggctgtaccgctcgctggcccaggtgctgctgctcgccggcgcgctggaagtgttctcgctgatcagtccgttcttcctgcaatggaccatcgacaacgtcatcgtcagcgaagaccgtgacctgctcagcaccctggccatcggcttcggcctgttgctgctgatgcagcaggcggtcagcggggtgcgcgcctgggtgatgatgcacatgagcaccctgctcggcgtgcagtggcaggccaacgtcttcagccacctgctgcggctgcccgcgcagtatttcgagaagcgccacctgggcgacgtggtgtcgcgcttcggcgcagtgaacagcatccagcagaccctcaccgcggccttcctctcggcggtgctggacggcctgatgaccgtcgccaccctcggcatgatgctgctctacagtccgccactggcggccatcgccatcgccgccatgagcctctacgccctcggccgctggatctggtaccggccgttgcgcaacgccaccgaggagcagatcgtccacgccgcgcgccagcagagccatttcctcgagacggtgcgcggcatccgcccgctgaagctgttccagcgccaggacgagcgccgctcggtatggctcggcctgctggtggaacagatcaacgccggcctgcgtacgcagaagctgcaactgttctaccagcagctcaacggcctgctgttcggcgtggagaacctgctggtgatctggctcggcgcgaccatggtgatggacggccagttcagcgtcggcatcctgatggccttcaacgcctacaagtcgcagttcgacagccgcgtcggcagcctgatcgacaagttcttcgagctgcgcatgctccagttgcagggcgagcgcctggccgacatcgtgctccaggccccggaggtcagccacggcgacatcctcccggagaacctccgcgagcgcgaggcgagcatcgagatccagggcctgcgctaccgctacgcggaacaggagccctgggtcctcgacggcctcgacctgcgcatcgccggcggcgagtcggtggccatcgtcggcccctcgggctgcggcaagagcaccctgttcaacgtcctgctgggcatcctcccgccagtggagggacagatccgcatggccggcctggaccttgcgcaactgggcctggacggcctgcgcgaactggtcggcacggtgctgcaggacgacgtgctgttcgccggttcgctcagcgacaacatcagtttcttcgacccgcaaccggacatgccctggctgctgcagtgcgcgcagatggctgccatccacgatgacatccaggccatgccgatgggctacaacaccctggtcggcgacatgggcacggtgctctccggcggccagaagcagcgggtgatgctggcccgggcgctgtacaagaagccgcgcatcctgttcctcgacgaagccaccagccacctcgacgtacactgcgaacagcgggtcaacgccgccattcgcgcgctgcgcatcacccgcatcatggtcgcccatcggcccgagaccatcgcctcggcggaccgcgtgatagtcctcggccagggcaaggtaagcctcgacgaaagcaccgcgcgcctggccgaacgccaggccgccgcggcgcgggagcaggcctga

SEQ ID NO: 329611 - DNA, 1440 bp, Pseudomonas aeruginosa
atgacgcaatccgatcagaaagcgccgccgtattacccgaaaagccacttgttggccgccagcggtgttgcagcgctcctcagtttggcactactggtgttcccctcgagcgaagtcgaggccaagaggaccacgctcaatctggagcttgaaagcaacaccgatcgcctccttcaggagaaagacgacctcctgccgcaatcggtcaccaattccagcgacgaaggcacgcctttcgctcaggtagaaggcgcctccgacgacaacaccgccgagcaagactcgggcaagccgggcgcatctgtagccgatgccgataccaagcccgtcgatcccgagtggaagaccatcaccgtcgccagtggcgatacgctgtcgaccgtattcaccaaggcaggcctttccacctcggccatgcacgacatgctgaccagcagcaaggatgccaagcgcttcactcatctgaaggtcggccaggaggtcaagctcaagctcgaccccaaaggagagctgcaggcgctgcgagtcaagcagagcgaactcgagaccatcggcctggacaagaccgacaagggctactccttcaaacgcgagaaagcccagatcgacctgcataccgcctatgcccatggccgcatcaccagctcgctgttcgttgccggtcgtaacgccggcctgccctataacctggtcacgtcgctgtcgaacatcttcggctacgacatcgacttcgccctcgatctgcgagaaggcgacgagttcgacgtgatctacgaacaacacaaggtcaacggcaagcaagtggcgaccggcaatatcctcgccgcccgcttcgtcaaccgcggcaagacctacaccgccgtgcgctataccaacaagcagggcaataccagctactaccgcgccgacggctccagcatgcgcaaggcattcatccgtacgccggtggatttcgcccgcatcagctcgcgcttctccctgggccgccgccacccgatcctgaacaagatccgcgcgcacaagggcgtcgactacgctgcccccatcggcacaccgatcaaggccaccggagacggcaagatcctcgaagccggacgcaaggggggctacggcaacgccgtggtgatccagcacggccagcgctatcggaccatctacggacacatgagccgcttcgccaagggtatccgcgccggtaccagcgtgaagcagggccagatcatcggttacgtgggcatgacgggcctggccaccggcccacacctgcactacgaattccagatcaatggccgtcacgtcgatccgctgagtgccaagctgcccatggcggacccgctcggtggcgcagatcgcaagcgcttcatggcgcagacccagccgatgatcgcgcgcatggatcaggagaagaaaaccctcctggccctgaacaagcagcgctga

SEQ ID NO: 329612 - DNA, 672 bp, Pseudomonas aeruginosa
atgcatatccacgtactcgtcgtcgaagacaacttcgatctcgccggcaccgtcatcgactacctcgaggccgccggggtggtctgcgatcacgcccgcgacggccaggccggcctcaacctggcgcgcgccaaccgctacgacgtgatcctgctggacatcatgctgccgcgcatcaacggccggcaggtctgtcgccagctacgcgaagccggcctgcagaccccggtactcatgctcaccgccctggataccctgcaggacaagctcgacggcttcgacgccggcgccgacgactacctgctcaagcccttcgaactgccggagctgctggtccgcctgcaagccctcagccggcgccgcagcggccaggcccagcgcctgcaggtcgacgacctggtgatggacctcgacagccgccaggccagccgcggcggcacgcccctggcgctgtcccccaccgcctggaagatccttgagtgcctgatgcgcgccagccccgcgctggtcacccgcgagcagctggggcgcagcgtctggggcgacgaaccgccggaaagcaacaccctcaacgtgcacatgcaccacctgcgcagcaccgtcgacaaggggttcgccacccctctgatccataccctgcacagcgtcggcttccagctggagcgcaaatga

SEQ ID NO: 329613 - DNA, 1020 bp, Pseudomonas aeruginosa
atgtcgatctggtggattttatttcctgtggttttagtatcggcaggacttacaggattattgagattctacgccatctcaaaaaaagtcatggatgttcctaacgcccgcagttctcacaccgtgcctacgccgagaggcggtggggtggctatcgttctgacttttctcctagtggcttttcttctacccctattttccattctggagtggcgccaggcgttacttttcctactgggaggaggcggtgtcgctctgcttggtttccttgacgaccatggtcacgtggctgctcgttggcgcctgcttgggcatttcatggctgtactggtttcactctttcttctggctggtgtgccgccgttcaagctactgggttatcaatgggatttgggctgggttggggtcgtactttttgctttctatctcgtctggttgctcaatctttataatttcatggatggcatagacggccttgcatgtcttgaagctatctttgtctgtttgggaggagcactggtgtattggatgaatggcaagacagcgctttccttgatccccctgttgctggcttttgctgttctcggtttcttgttttggaactttcctcccgcgaagatcttcatgggtgatgctggtagtgggttccttggactgactctgggagtcctatcgattcaggcaatgtgggtcgagccagagttcttctgggcatggctgattctgctgggggtcttcatcgtggatgcgacctacacgctggcacgacgcttgttgcgtggcgacaaggtgtatgaagcccatcggagccatgcctatcagtatgcctccaggcatttcggcaagcatgctcctgttacactcggcgtaaccggactgaatttggtttggcttctacccatggcgctttgggtggcaagtggccatcttgagcctgctctgggtatcctcatagcttatacccccctcgttttcctggctgtgaagttcaaggctggtaagctagagtcggttggatag

SEQ ID NO: 329614 - DNA, 957 bp, Pseudomonas aeruginosa
atgaacaaggttttattgaccggtgcctcagggttcgtgggtaaagcattggcaggtgagcttcttcggcagggatatgcattgaacatggctttccgacagattccttcaaaggtgctagatggggctgtcgctattccggtagggaatatcgagggtggcaccctttggagtgacgctcttgcaggcgtcgataccgtcattcatagcgctgctcgtgttcatgtgatgaatgaccaggctctcgatcctttggctgagttcagaaaagtgaatgtcgagggaacactgaatctcgctcggcaggcggcagcagcgggggtcaaacgtttcgttttcgtcagctctatcaaggtgaacggcgagtctacgaccacgggtagtccattcaagcccgacgatgttccagctccttccgatccctatgggatctccaagctcgaagctgaaaccggtctgcggcaggtgtgtgaagaggcagggatggaatatgctattgttcgtcctgttctggtctacggccctggagtgaaagccaatttcctcaatatgatgaagtggttggacaaaggtattcctttgcctctgggggccataaacaatcgccgtagtctggtgtcgctgacaaacttggtggatatgctggttaccgtagcgagccatcctgctgctgctaatcaggtatttcttgtaagtgatggagaggacctgtctaccactggtcttttgcgaagaatggcggtagcaatgggaaaaagagcgaatctgctgccagtccctgaatcgttgctgaagactgctgctctcttgttagggaagaagtctgtaggtcagagactctgcgggtctttgcaggtcgacatctctaagaataagcagttgttggattggaatccgccgctttctgtggaccaaggactgcaacgggccgctgaatattatttggaatatcgctga

SEQ ID NO: 329615 - DNA, 1035 bp, Pseudomonas aeruginosa
atgctcccacgcgggctgcgtagtatacagcttgccttgaactacttgtcgttcttcatgagtgcgtcttttttcggggcgttcaggctaagaagaaggaagtttgatgtagtctttgtttacgctgtttcaccaataatggtagccatacctgcgattatcattggacgtctaaaaagagcgccagtatttgtctgggtgctggacctgtggccagagacattaagggccgtgggcgtcctcaacagtgatcgggctctttctatagtaggtaagatggtatcttggatctacaacagaacggactatgtattggtacagtcaaaagccttcatggatagtgtggcgaagtattgtaccaggcccatacccgaaggcaggattatctacttcccgagttgggccgaggatgatttctccaatagtgaatcggcgaactctgcccttttggaaagagatgattccgtttttacccttctgtttgcgggaaatgttggagaggcgcaggactttccctccattctagatgccgcggagcgtctacgccaagatgttcccatgcgttgggtaatcgttggcgatggccgcgcaagtgcatggcttaaggccgaggttgcagccaggggattggataatgtcctgctgctgggccggcatcctcttgaggagatgccgccgctctttgccttggcggacgctctatttgtgtcgctgaagactaatgaagtattcgaaaagaccatccctgggaaggttcaagcctacctggcttccggcaaaccggtgatcgcgatgatagatggagaggcatccagggtgatctccgaggctggtgctggctacgcatgcgcttccggcgacgtggaggctctggtggacatcattcgtcgagccgcggcgctaactggggagcagcgagaagggcttggtagagccgggcgagaatactatgaatgcaatttttcgaagcaagcacttttgagtcgcctggaggggctcttcattgacgcacgcttgagaagggatgaaaaatga

SEQ ID NO: 329616 - DNA, 618 bp, Pseudomonas aeruginosa
atgtttgaggttttgaactactatagggacggtattgagagttctgatgtgctggcgcggctgggcctggaagagaataggttctttgtggtgagtgcgcatcgggaagagaatgtcgactctgaaagaaacttcctttcgttggtcgagaccctgaatgaaatttcggaaaagtatgactttcctgtaattgtttccacgcatccgagaacgatgaagcgtgtggaagcaatgggtgtcaagtttcatgccaatgtgcgcttgctaaagccgttgggtttcaaggactacaataagctgcaattgtcggccaaggcggttctttccgacagcggtacgatcaacgaagaatcctcgatcctgaacttccccgccttgaatatacgtcaggctcacgagcggccggaaggcatggaggaagcagcggtgatgatggtcgggctcggtcgcgagcgcgtgatgcaggggctagagattctcgagagccagtctcgtggagctaaccggctgctttatcttgtgcatgactatagctgtgataacgtttcggagaaggtagtgcggattctcgtaagctatcgagactacgttatgcgtaccgtttggaaaaagtactaa

SEQ ID NO: 329617 - DNA, 171 bp, Pseudomonas aeruginosa
atgatctggctttcgaatgcccaggtcttgaaagaatatctcgttgagctcatagtcataattctgcccggtatggacgagaacatggtcacaatactcgtcgagcttcgccattacacgagagaggcgaatgatctcggggcgcgtacctactaccgtgacaacttttaa

SEQ ID NO: 329618 - DNA, 1116 bp, Pseudomonas aeruginosa
atgagggtcttaataaccggtgcaaatggctttgtaggaaagaaccttgctgctcatttagctgagcgaaatgatgtcgaggttataacctttacgcgcgagaatagtattgaaagcttgccaggaattcttggctcgattgattttgtttttcatttggctggtgtcaatcgccccgagaatcctgaggacttcaaatctggaaatgcgaatctgaccaaagcactatgtgatgcaatccggcgaactggtcgttctattcctctgctctatacatcttcgacgcaggcggagttgcagaataaatatgggctgagtaagcgcgatgcagagaattatattcgagagctgagtttggatacaggctctcctgtatatatattccgcttgccaaacgtctttggcaagtggtcgcgtcccagttataactctgcggtggcgactttttgctataatattgccagggatattcccattcagataaatgatcctacggctcaaattacgctcgtttatatcgatgatgtagtcaaaaagtttttggcaattctcgatgctccggcttctagggagcatgagactcgaatcgagccgcaatacaagatcaccgtcggtgatcttgccgaccagatacatgcgttccgcgacagccggaagtcgctcgttacggagcgcgtaggtgtcggcttggtgcgggccttgtattccacctatctcagcttcctccccgaggaccgtttcagctacgagctgccgatgcatggcgatgcgcggggagtcttcgttgagatgctgaaaacgcctgactccggtcagttctcgttcttcactgcacatcctggcgtcactcgtggtggtcactaccaccattccaagactgagaaattcctcgtaatcaagggtagcgctcgcttcaagttcaggaatatttccactggggctttttatgaattatataccagtggcgaaaaggccgaagttgtcgaaacagtcccgggctggacgcatgatataacgaatgttggttccgaggagatggtcgtcatgctctgggcgaacgaaatatttgatcgtgagcatccggatacctatgcttgcccggttggcgaaaaataa

SEQ ID NO: 329619 - DNA, 1035 bp, Pseudomonas aeruginosa
atgttttcttcgaagaaattgctgattacgggtggtactggttcttttgggaatgctgtcttaaagcgattcttggacacagatattgccgagattcgaatcttcagtcgcgatgagaagaagcaggatgatatgcgcaagcgctatggaagcgctaagctgaaattctatatcggcgatgttagggactatcagagcgttctcaatgccatgcgaggcgtggatttcgtctatcatgcagcggccttgaagcaggttccctcctgtgagttccatcctatggaggctgtgaagacgaatgttatcggaaccgataatgtcttggaagcggcgatacaaagtgatgtgaaaagagtcgtttgtctaagcaccgacaaggctgtctatcccattaacgccatgggtatttccaaggcgatgatggaaaaggtgatggttgcgaaatcacgtaaccttgaaaccacttccactgtcatctgtggtactcgttacggtaacgtaatggcttcgagggggtcagtgattccgctgtttatcgagcaaatgcgttctggcaaacctctgaccattactgacccgagcatgacccgcttcatgatgactctctccgatgcggtggatctggtgctttacgcgtttgagcatggtaacaatggggacctcttcgtgcagaaggctccagccgcaacgattgaggtgctggccacggcattgacggggctgcttggtaaagaaggctatccggtcaatgtaatcggtacgcggcatggcgagaaactctatgaagcgctcttgagtcgtgaggaaatggcttgtgccgaagatatgggagactattatcgcgtaccgccggatttgcgcgatctgaattatagtaagtttgtagagcaaggtgaggaaaggatttcccataccgaagactataattcacacaatacagatcgtctggatgtcaagggtatgcaggaattgctgctgaagcttgatttcatacgtgctattcagcgtggcgaacaggcaaaccccgaggaatag

SEQ ID NO: 329620 - DNA, 1305 bp, Pseudomonas aeruginosa
atggtaaaaaaagtcttgataataagcaataacgccttatctttttcggctaataacggaaggaccttgaattctttctttgccgattatgatggcgagaaactggcccagcttttttttaatgctgagaggcctcaatccaaagtcgtcaagcgcttcttcaatgtcagagccttcgaacagctgcgccaacttttttccaaagagcatgaggcggggagtgatgtttcgtcatctgtgagcagcgttgtcacaactgcgcacgggctagtttcaagctcggtaaaggttcgatttgttagtttcttgaatacctatcttgaatccttgaaactgtacctgcgcgatttaggttaccggtgtggcctacaaaagaataagcggctaatggcttgggtggaaaacttttctcctgaatgcattttctttgtggcggggaactgtaagtttgctatcgattatgcgctttttcttagcgctagattgaacataccgttgtttacctacatcacggacgactatgttctttcgaattgtccggttggcccttttggcaaggcttatcatcacgggcttcataagcgttacgccgagcttttacagtcttctcgacaggttttcttcataggtgactcaatgaggtccgcttttgagagcgcatatggctcgggtggcgaaacacttataaattgcaatttgatcagtcagcctgtacctgcgggtcgggagttcgtgactccagggcaagtcagagtggtttttgcgggtgggctccacttggggagagattctagtataatatcctttgccagacttatgtctggagtctgtggtcaactgggtctttcgtatagcattgatctttactctggacaaagtttttcttctgctatgctttcacgcttcgaggcttcaggcataagttaccgaggatctgcttcctgggatgatttgcaggttgagttcaagaaagcggactttctacttcatgtggaaagtttttcggagaaatatgcggagaagaccaggtattctctttccaccaagcttccggagtatctatccagtggtgtctgtgtgattggttttggtccagagacggttgcctccatcaagctcctaagggaccacaaaatagggttggcactgtcgaagaatgctggtgacatgaatgtgctgagcgacgctatacagagtacgttcataagaagttcttttggggaacagggtgtttcatttgcatgggcaaacttttctcctgagctgattaagaagaagctatatgattcactgcaggaggtttaa

SEQ ID NO: 329621 - DNA, 888 bp, Pseudomonas aeruginosa
atgtcggctgctaaaaacttgaggctttatgctgtaatagttgcttattttccggaggagcatgctctgtccagtttggtcaggtctttggtttctcaagggtgcaaaggtgttgtggtttttcagaactcgctgctttcttctgccttcatggatgaacattcggatgcctgtacatttctgggtgaaggggaaaacctaggcttgggaactgcaataaacctatcatttgaccatctaaagtcaaagggggcggatgctgttttcacctttgatcaggactccagtcttcatgaagactttgttcagcatatgcgtgccatgtaccaaggcctaactgataaagctattcctttttccgctgttgtgcccaggatagtggacagaagatctttagattttgaatatatacttcccgagatccagcaaaaagaacttcctgagggcttgaaatttttgaggattggtctgcagtcggggatgttgatcaattatgaaacttggtgggagcacaagttcgatggtggactcttcatcgagtatgtcgataccgagtggtgttatcgtctcggatatgaagggaggtatctctgtctcgccgaagaggctatcatgtatcatgaggtttctgatgagttaccaagaaagtttcttgggttttatttcttgaaatattcgcctgtgcgtcgttattatttttttcgaaactctatatttctcttgaggcagagttacgttcctgcttatttcaagttaagaatattgacggcttttgctaatcgcatcgtttcaatgattcttttttctgccgacaggcgtcgctcttttagtttaacggtgaaaggtattcttcatgggttgggctctgtaaaagggcctttgctctag

SEQ ID NO: 329622 - DNA, 1281 bp, Pseudomonas aeruginosa
gtgtatataaggctggatgctcttcgggtcgctgagttttttttcttgctgttctctgttgtttttttggcggaaatatcagtgggcggtagtggggcttggagtgaaaagctgattggtttttcgtttcgtaaactgctttttgtgttgatttcactttttctaatcctcatttttcttctagagcgaaagtgcctttctattattttttatctttctctggtttcggtgttttttattgtttgggggggcgttctgccttatcttaacgattactgggggcgcaattttcaagatgcttcgtcgctctttggtttgacggcgctttgtattgttgctgtcatcggttcagatagggttctactgtctatagtttcggccgctttctgtttttcctttgttctagcagtactgcactgtattctttattttggattttctgccggggcgatagacgtttcttgggtaaatgacttcttctatcagtatcttgctgggaagggagagattttcatatttacgaaggagcccagcattagggtcttctgggctagcacttcctttatcttggttggatatacaatcgctcttttcggttttttgaaatcgaacggattttttcgccgcttgttgattctttttgtgctctggatatttgtatttgcggcttatgcatctgatacgagagcgttactgggatatatggcgtttgttcctgtttcctatgttttctttagggttgctgcttatctgctttatccgttttcctccggagtaaagatcgcgctttatgtttttggtatggttatggtggagttgcttttgctacttgcggtgacaccctcggtactgaaagtgctcgggttgaacaaggagggggaggggactgaacgtgctgatcagatcgaagcgatatatcataccctgtctgagaatctattttggggtattggtctgggtggcaactccgagtacctgataagatcggagcaggcaccttggtcttatgagatgtcgctctgggcactggtgatgaaactagggctcattggcagtgctatattgctcagtattctatatatggccttgctgatcccgcgggcaggttttgtgcctgggtttgaaaagagcaagcttgtcaggttcctatgtgcggtcggctatggctatctcatcgttgtgagtaccaaccctttcttgtttagccttatcggctttgcaacaatcatggttttttattcgtggtacgtatatgcggggcgaaagaatgtcggctgctaa

SEQ ID NO: 329623 - DNA, 1233 bp, Pseudomonas aeruginosa
ttgagcttggctaggaatactttttggaactttttaggggtactgattccttccttggcggcgttgcctgctatcggttatctggccagagttttgggggtcgagaattttgggcttctgaccttgtcttttgccatcattggatatgccagtatatttgacttgggtttatccagagctgttatcagggaggtggctctgagttcagataaaggttcggaagtcaacaaggctgttgggacttcctctgtagtagttactattgcgggtttcacctgtgccttgctcttgtacttcaatagcgaacgcttagcctcgtcgttgggagtaacggcggggaactggccagacgtggtattggggctcaactaccttagttttgcaatagtccccttgctattgagtacggtctggttctcctttttggaaggccgtggggattttaggaacctgaattttctaaaaattatttctggtttggctgttgctatcattcctgccgcttgggtttggataagtggggacgaacggttttctgtggcgatgctggggctcgtagcctctcgtatattcgtcatgctgctggcgtatgtgttttgtgtgctcccgttcggacttcgagtgcacgtttttgattattttactttcaagcgtctgatcaactatggcggctggattactgttagtaattttattagccctgtaatggtctattttgataggttctttatttccagccatctgggggcggcaactgttgccttgtactcagccccctccgaggtgattggaagggttgccttcgttcccacgtccatatcccgggtcatatttcagcgtttgagtctggattcttctgatagtatacaaaccagagttgcctataagatgaccttcgttgtatgtggcttatcttcagctcttatattctttggtagtgacattattctttctgtatggcttggtgataagtatctgggggaggcctctcttgtcctcaaaatccttgctgttggctttttgttcaattctctggcgcaaataccttttgccaaaattcaagctgaaggtaattccaggttgacagctattttacatattttcgaggtgctcccatatctggctttgttgtattttctagttctacattcttccatagtgggggcggcaatagcttggactgtcagggtgtctgtcgactttctgctgttggaatatttctccaggaaatag

SEQ ID NO: 329624 - DNA, 1035 bp, Pseudomonas aeruginosa
gtgaccacagaaagatcaccccgtgttgtccctattgatgggcagatcgacctcgttgaacttgcacaaggtattctcaggcagaagtggttgattgcctctttttttcttcttgcaacggctctcgccgttgtttatgcattttatagtcggccaatctatgaggctcgagcttctgttttgcccccttccttaaatgaaatatctggttttaatcttgggcgaaaagagagtgacctgggagtcttttctgtcaaggatatatatgacgtctttatcaggaatttgatggctgaagagacacggcagaatttcttcaaggaaaagtatctaccgaccttgggagacaaaggggcggaatctcttgatgcattatataataagttcaatgatgaattgcagatcaaagcatcggtggatggttcagggcgctatttgatttctgctgtagctcatgagtcggatacagcagcttatttagttgactcttatattgaaatggtcgccggaatatccaagaatgaaatgctcaaaaatattaaaagagacttgcatgtaaaaagtgtgaatctagagcagcagataaatatcatgagggcaatggccaagactcgcagggaggatactatcttgcgcctgagggaagctctgaaaatagccgaagccctgaagattgaaaatccaccctcgtttgaggggcaaacggagcggcagctatcttcgatcatgatcggggaacttatgtatatgcgtggggcgaaagctctgcgggcagagatatctagtttagaggcgcgtgagtctgatgattctttcatcggcggattgagagctttgcaggaaagatatgctctttatacaaaactatctcctgatgaaagtcaagtctctgtctatagaaaagatggggtcgttgaaacttctgataagccaataaagccgaagaaattgattataattgtactgggtgctgtatttggtattttcctgggatgcttggtaggcctgctacgcattgtgcagtttaggcgctga

SEQ ID NO: 329625 - DNA, 1092 bp, Pseudomonas aeruginosa
atggctgaattgaaagatgcaaaggaaggcttcttctcttccataaaggtcaaacagaaccttaaaaaccttatatcaaaaatatcatccgaagacatatcatcggacccagagaccgccttcgttaagtactttataacaaaaagcttacaactcatgctagatcacgaagaagagtttaactctctctgtgcatttaacataaaaacgataggcgatggactaataagcaattcaaccctggcatcaatagatttaaacaaaaatatattaagttcattattctccatatgctacagattcctagtcgagttcgagttcaacctcaacaccgaaaataatgacataacatcgacactaaactccattcgctttggggagcaaaagctaccagcagagtttgaaaaatctgtcagatacgccgaactcttcatgcccgcaaaaattctaaaagacgcgcaaaaagatccttccatatcatccattaaagagttcaacgaaaacgttaaaaaatttccagagttacagatacaattcgagaaagacctcgacaatcgagaaaagcgcataacagatttacgcactacccttcaagaatataaatatgcctataactttataggactctacgacggattcaattcactagcagaacaaaagcgtaggatggcatgggcacacgtcgtcggactagtaataattgggatattgatgcttctcccagcctcaattaaactatactcactgataacctcagaagaaaacttaaacaccaacccatcaataaacattcagcttataatatccatcgccgccattgaacttttacttctttatttttttcgagtaatcctacaaagcctaagatcaatcagaggtcaattattgcagctagacctaagacgctcgatctgtcgcttcatacaatcatatgcagaatatgcagccgacataaataaaaacaacccccctctactagaccgttttgaagccctaattttcagcggaattgttgcccaggaagacaacatcccatccacattcgacggaatggaacacttgacaaaattgatagagagcgctcgaaaatag

SEQ ID NO: 329626 - DNA, 213 bp, Pseudomonas aeruginosa
atgaagattttacgcaagaaggcagtctgcgagaagctgggcgacatcaatgagacgactctctggcgcatctcgcgtggtgatccgtcatttcctgtatccatccaactcaacaaacgagtcgttggctggcttgaacacgagcttgatgcgtggctcgaacagaaggccgctgccgcccgcgctgccaacaataacgttgtctatccctga

SEQ ID NO: 329627 - DNA, 921 bp, Pseudomonas aeruginosa
atgatgcgcagcttgggcaacttgctggatgctggcgtggcagaagccacggccaagcgcgatccgctggcgtggatcaagcagaaagctgccgaggtagcagagcaggcagagcagcgggcagcaaatgaaccccgccagatgttcttgcccggcttcgatattggagcctttccaaaccatttgaacagatcaagcctcattgctcccatcgcacgagggaaacgcaaattccatcggcaagctgtgatggtgacgcggcgggattgcgtgctggagtacaccggggagcaactggacgaagcagacggcgacctcatcatggcattgatcgctttcgctcaaccgtttccgctaggtacacctgtgccgctgaaccgcaaggagctgttgagaaagatcaaaccgggcagtattggcagcacccaatacgattggctctatcggagcatgaagcgactgcgcgaaggcatcttgttccttgaggcacgcaagcgagacggttcaacccgctacaccgtgggcaagatggagtccttcaatgtcctgaaaagtctcaactacgacggtgggagcgagacgtacacctacattcttgaccctcgctgggtagtgatgtttggcaaccgggaatacagtctgatcgactgggacaagcggatgcagatcgggcgcgggctggacatggccaagaccttgcaacggctgatcgccaccagcgccgacccggttcaacggtacgggctggacagactcaaaacgcagatggaatacgctagccccatgcgcaagttcaaggagtcgctaacctctgcctgcgccgaattggagcgactggagatcatcacgacacacaagatcgaagaaagcacacggggcaagccgcagcttgctttatggctccaagaagcagtggcatag

SEQ ID NO: 329628 - DNA, 639 bp, Pseudomonas aeruginosa
atgcagcaggtcgtcactcaacaagcggttgatgcagccgctgacgccatcgtcgccgcaggtggcaaacccaccttccggctgatccagcagcgggtcggcggatcattcaccacactcaagccgatgctggccgactgggaagcacggcgcgagaaaggcgaagaaactgccgtggaagtgcctgatgccctgctggcacgcggcgcagacctcgtgcgcagcatctacgccgaggtagcccagcaggcgcgggtggaatccgaggctgtgcgcaaggatgccgaagcccgcgtgagcacgatgaaggccgaactggccgaagcaaccgaggaaatcgtccggctggaggcgcaggacgccgtccgcaccgatgaacttgtcgggcaacgagaggcgaaccgggcgctggaattgaaggttagccgtctggaagagcgtgccgagcacgcaacgcgcatggaggccgaactgcgggaagcccgtgctgctcttgccaaggctgagcagcaggtgatcgacctgcaaggccagcttgccaaggctggcgatgtccagcagcaacttgccagtctcgaagcgcggctggcagtggctggcgttgcgccgaaggctgtcaggaaaagcaggagcgagtga

SEQ ID NO: 329629 - DNA, 222 bp, Pseudomonas aeruginosa
atgccgaccgccgccgaatatcagaagctcgctgacgaattgcgccagttgggcgcggtgttcactcaggctatcaatctgggcgatcaggaacttgcattgtgggcagccggggcgctgtcgagtgctgccgcccagccagcttggtgggcgcgtgaggctgccgacaacgaagcggcggctgttgctgccgccgccatcgagaaagcccggctggagtag

SEQ ID NO: 329630 - DNA, 312 bp, Pseudomonas aeruginosa
atgtttgtgtttctacaccctgacgtaatggagcgtttctgcatggagaaggaagaacggcagaggtttgtccaggcgatgcgctcgtgccccggcgtgattctggaaatgctacccttcgcgcccagaaagcgcaggccggagcctcggattgtgctgattccgtccagttgccgacggcagagggaataccgccgcgaggaactggttatctgctgcgaccagtttgatctcgtcgagaaaatcacgctgctggcgtacatctcgatgctccagatgcggatcgaacaggctgttatggaggggcggtaa

SEQ ID NO: 329631 - DNA, 1122 bp, Pseudomonas aeruginosa
atgcgcaacaagctacttgctttggctgcactggtggccgtgactccggcactggccgacacctgcatggtgccgcccaccgagaaacagaccgtctccgggcgcttcggcaaattccggggcggcggtgcagggaacttcggtagcgccaaccagaagccgcacatgcacgatggtctggacttctcgaccagcggcgcatcgcagcccctgtacgccaccacggacggcaagatcaccttcatcggcaaccggcgctcggcaggcaacgcgatcctcatcgagcgcagcaatggcgacgtggtggcgtactaccacatgagcggctttgccaccggcttgaaacaggggatggaggtcaaagccgggcagtacatcggcctgtccggcaacacacccagcgacgcgatggtgaagcacctgcacttcacctacggcaccgctcagaaagatgaggcccgcgccaaggctttcactcagagcgcatcgaaaggcaccttcaaccccggccaactcccgtccgccttcaaccagcaacaggggatcggctggaagaccgacccagccccgtatttctgcgcgactttcccgatccaagacggcaacccgcagcactacccgattctgggcaaggacaccaaggaacagcacgcgatcctgtttggtagcgtccctccgggcggcgtggccccgaacgtcaagttcgagccagcacaagtcgcggcggcgaatgcggacgcggcgctggccgctgccgagggcaagtctcccgccgagtggctgtctgacaaggatggctacggcacgctgccgaccgcgccgattggtggttacgacacgatgtccactcacgaaatgctactgacagaggcggggcgtcggttcagcgacgccgaatggaacaacaacatcaccaaggtatcgagccgtgcgctctgggttgactacaaccgcgcagtaggcgtcagcaactacatggccgaagcgatctatcggaaaaaggagcgcgtcgaagccctgctagctatctacacgtcacagaagactgagcggctgcgcaagcagactgccgcagcacatgatcgggcgcaacgcggcggtgtgtcgcgcaacatccagtag

SEQ ID NO: 329632 - DNA, 528 bp, Pseudomonas aeruginosa
atgcgtagcaagcacttcatcacaattgctgcggcggcgttgtcgagcatcgtctgcgcccagatgcccgtcccgctgctcgacaacgagccagccgcacccaacgcagcactctgggccgtggctggcccgatgctgcaagcggcgctggaatgccgcgaagacctgcccgaccatccagccacccgcgccctgctgccacgcaaactggcaggcgaggaacagcactaccggctgacaccgcccagcgggttcaaggtattcggcctgcctgtggccgagattgaggtctgggtcgatgacggcagcggcgaactgggccacggctacacctcgcacatccgaggcaagacgttggccgaggtcgccaaggctgccaagctgaacaagggcaagagcttccccaaccgcaaaaccccgatgggtggcctgatggccgatcagcccttcgggccggtatcggtgcaactgacctgcaccattgacggcagctacgccgcccacgaaaacgagtaccgggagccatga

SEQ ID NO: 329633 - DNA, 189 bp, Pseudomonas aeruginosa
atgaaaaccgctgacagctatctcgtactgcgtgtctcgtggctgcgcgagcacgatcaggccatcggcgagctggtcgagctgtggctcgaccggcaggccaagcagcagcctgcccccaagcccaccaagcccatgcgcatcagggcacagcacaacagcgacatcaggagccatgcccatgcgtag

SEQ ID NO: 329634 - DNA, 240 bp, Pseudomonas aeruginosa
atggcccagatgatccactccctcctacttcgccttggccgcgagcgtgtcaccaacatctgctgcgtactcgggacatgtctcgccttgttcgtcgagcgcgatgcgctgatgaatggcccacccgctacccagctcggaacgatcagcctcgccatagctgtccccatcctctacctgacaccgcttgtttggctcgtttaccgctacctagtgaggcccgcccatgaaaaccgctga

SEQ ID NO: 329635 - DNA, 606 bp, Pseudomonas aeruginosa
atgaacctcaagaacggcgcgaaacgcgcagccaaattcacgttcgtcgagatgccgctttcgatcctcggctggcgacaactcaaggccaacaacggctacatccgcgacctgtggcgcacgctgcgtcacccacaatgccccgagtgcggtcgtggcgtcatgcacctgcccgccgacgctcaacccgacgaaaaggcgctttatccgtgggtgtgctccgccaaatgtgggttcggcgtactggccccgcaagacccggcagagattcgccacatcgtgcaggcgcgatcggagacacgcggcaagcagcgactggcgtttctcggcgaccctgagcgcgacaagctcatcaccagccatctgcgcaagtcccgcgcctattgggtggtggtcgccctcgtctttttgatggccgcatggcaactggctataggcgctccaatgatggttgtcctgagcgtgctgtgcatgtgcctgccgttctctgtccatgcaatccgctggagctatcgggcgtggcaagtgcgctccggcacgctgttcgttgaaggcgcgtttggccgctacgtccgcgacatgctctggattcgggggattcagtga

SEQ ID NO: 329636 - DNA, 525 bp, Pseudomonas aeruginosa
atgagctaccagtacgactacaacgctgaggccaccggccacgtcatcgggcttcgacgtggatacgaacagggacacgcgacaggccacgatcacggctggaacgatgcggtagcccagtggaatgcacagataaaagatcagtgggaaccgctcgttgatcggctgactgctgagcgtgacgaggccatccgcgcccgcgatgaactgctggagcaggtacgccatgcaggccagcaaacccgcaaatggcacaacgctttctacagcgtgctgtgcgccctcgatagcgcaatggacgtgctacagcacgcaccgcaggacatgcgcactcggatgatcctcgattacgccaaacgtgccgagtacatgaaagacaagggctggatcgactcgatgccgcaggaaaacagcgtcctgcgctcacgcgcccgcccaaccgctgaccagcttcaagggtggtgggatcaagtcctccaccacgccaagaaggcagcgaacgcagatcaatcccccagtccataa

SEQ ID NO: 329637 - DNA, 2847 bp, Pseudomonas aeruginosa
atggctgccgccgatccatcaatgccgttctcgccctgcgatccagcagcagggtcatgtaccgacgtatcggtcggaatccttcagtggatcttcgggccggtcgtcgagaagctgactcaaggagcaagccctgacgctgttgatgccagcgttagcgtgatggcctcgatcttctcggtctttaattccggcctgctggttgtcgccagcttgatcgtcagctacgtcgccgtcatgggcgtaaccaacacggccaacgagggcgaagcgatgggccgcaactggtcgtcactctggacgcccgtgcggatcgtttcgggcggcagtgtgctgctgccgaccaccagcggatacagcttcatccagctcatcgtgatgatgtttgccttgtggggagtgggcttcgccaacaccctgttcaagatcggcacagagaacgggatcatcaacggcgcactgactgcgaccagcgcccagatgggactcggaagcggcgcaaagccgaacccgaactatccgctctacgacatccgccagtttgcgcaggaatacctggctgtcgcatggtgcaagcgcaccgtgaacgcctcgttcgccgatttcggcggcggcacgccgaacgtcagcgcagccggaacacctgaccagagcattgccgaaggcggcagcaagaaggcgatgatctatcaggccaaggatcgcaacaccgtcaccaacttgggcggtggcgtcccgctttgcggctcggtcaaggtctatagctattcggctccggctgctatcgccgctgaaaccaccacctcagcggcatccatcttcgacccggccaagattcaagataacgccacggccatgtcggcaatccgtgtcgccgcactgaacgcaaaggcgaccgctgtcaacaaggtgatggcagacatcgagcagtgggttggcgaatggcccgcgaccatcaacgaatccggctgggagaatgtcacgagcgaccgtttcaaccagatcgtcaatcaagcacagagcaccctgaccgcaagcctgacggctcagattgcagccgacaccacgctgcaacagatcatgcagaagtacgtcagcgacatcaccaaggatggctgggcaatggcaggcggcttctatcagcgcctcggcggcatcaaggaagagctgggccgcatctatgccgagaacgtcgcacaggccaccgcaccgaacctcaacaccctgccgcaagggccgcattcctctcttgcggccaacagctacaccaccgtctacaacaccatcatcagcaagtcactgatcgggggaagctacaccacgcccgacactcctcgggctgccgatctcaagtcgaacctgatcccatcgtccctcgacgatctcagcatcgacacattgggcagccggggtgacagcttcatgagcggttttgtgcagtggggcatggagcgcgtgaccagcaccatgatcggcaccgatggcgacgtggacgccattgcccgcatcaaaaccacgggcgatgtgctcgcgctgctgcaatcgacgggttttgccgccgaccggctgatccacacctcgctgtccggtctgaaagccgcagcagcagcggtgggcagcgtcagtttcatgggcaataaggtcgatgccaccccgctggccgacaccttcctgaattgggtcatttacaacttcttgaccccactggccgaagtcacaacgtggctgggccgactggctttctacttcggcgtgttcctgccgagcctgccgtacacgattttcatgatcgcgtttgttggctggttgatggcagtgctccagtcgatcattgccgcgcccctgtgggcggtcatgcacatgacgcctgaccgcaccttcgtcggaagtcagacgcaaggctatctgctcctgctgtcgctcttcatccgtccggcgctcatcatcaccggcctgttcgccgcgatgatggtagccaatccggtggttgggtacatcagcaaagcgttctgggcgatgtatcacgccaacgtcacgtcggcggaatcgctgggttggttcattgaatttttgcagtggaagaactggctcatcgtctatggcttcgtgctgctgcccgtgatgtacatgatcttcgggctgtcgcagagcttgccggacaccgtgctgcgctggatcggcgctggtatcagctcgatgggcgaaacccaagctactgagcagatgcgtagtaacgcagcaatgtacggccccagtgcgttacagggcggggctaccccaccgggcaagggcggcgcaggtggcagcaaccgcctgaacggcgactctggaggcgcaggcagtctcagcgggccaagcggccccacgggcggcggcggtggtggccgcagcagcggcggcaaccatccccgcctgctcaatgccaacagccaaggcgtggcaccccagcagcacgacaccccgcccacgtccgcatcgaccagcacagcagcggccagcggcccggctcgcagcagcagcagcagcgtctccagttcggtcaatacgggatcgcaaggcgttgtcggcagccgctgggccagcaatgacattaccgacgccgacttcatcgaagtgaaggacaccgcgccgcgcagcaaaagcagcgccgacaagggcaccggcaatgccgtgctggcccttggcagcgcaggcgttatcagcgggttttcggcggacgatgacaacggctccggggccatcaataccgagtatgacagccgctacagctacaccccgccgactgctgacgcctcaagcgtcatcaaccacggagagaccaccgcaaacggaggacaaccggcatga

SEQ ID NO: 329638 - DNA, 474 bp, Pseudomonas aeruginosa
gtgcagcaggaagaggaacagaagcgaggacggggacgccgcccagccaacgaactagcagaacagcgtgagcgggaaatagctgcgctggcagccacggtggctcggcagaaaaagcggcttgaagagctgaaagaggctcagcgccgggcgcagaaggccgcaaggcgaacctacatcaaccagcgcaagtatgcggtgggcggtctggcgcagattgccgggctactggaagccgatcccggtttcgtactgggtctgatgctggaagcggcggaacagcgtgatcgcgacggcacatggcccagcgcggtattcgagaagtacaagcaccgtggcgatcaggtgctggccgagcgtgctgccgctcgcaagcggcgcaagcccacggacgacgacgatgacgaggacgtggagttcgactcggcagccgcgtctgtcgaggaatcccgctatcaggaaggagcgcactaa

SEQ ID NO: 329639 - DNA, 1224 bp, Pseudomonas aeruginosa
atgtaccggctggagctgaactacatatcccgcgacggcggcaagaagggcaagcagcgggatgccgccaagcaaggccacggcttttcggccacagccgccgctgcctaccgcagtggcggcatcgtcacggactaccgcgcgggcgaagtgcatgactacacgcgcaagcgcaggatcggtcacacggaaatcgttgtgccgcccggtgcgccgtcctgggccagccaccgcgaagcactatggaatgcagtagaggtggcggaggcacgaaaggatgcgcggctggcacatgagttcatcgtggcactgccgcatggactcacgaaagagcaggaaatcgagatggtgcgcgaccttgcccaaagcgtggccgaccggcatggcctgcctgtggacttcgcaatccacggtgatgatccgaagacgtgggatggctctttgaagggccttgtcggtagccacgcgcatcttctgatgccgacacgtgaactgacgccagagggcttctcgaaggtcaaaggacgtgagttcactgaccggaaacttgggccgcaaacactccgatattggcgcgagcaatgggcgttgatcggcaacaagcatctggagctagcgggactggatgagcggtgggatcaccgcacgctgtcagtgcagcgcgaagatgcactggaacggggagacatggcctctgccgaagagcttgatcgggtgcccggcgttcacatcggcgctgcggccaccgctttggagcgccaagggatcgacacctactggggcaacttgaaccggatcatcctcgcccagaatgcggagcgcaggctggggcacgagcgcaagcgcattgaagagtcgatggccgcgctagagcgccgtctggcggaactgagagctgcacaggaggctgatgccaatcagtcagagcatagtaatgatgatcctcgctgggcagcatttgaacgcaccttcatgcacgccgcccagtttgagcatggcctgagcttgactgggttggcggctcctttggccggactcaaagcccgcttcaccgcctacatggacaccgctgcggagcaaggcatgacgccagaaatgttcgctcaagcctgcgcaaaaggcatggccgaacaggagcgccgggctatgcaggaagaggcggcgagagataccgatccccaaccgccacaagagaactcccccgatgctgctccggccccatga

SEQ ID NO: 329640 - DNA, 336 bp, Pseudomonas aeruginosa
atgagaatctgggcgtttgatgagaaccgggccgactttgtagaggcgtcgccggagcggatgaccgctgatccgaccgggtgctacatcatccgacgcggcgataatgtgctcgtctgcgaacacggccaggaacggcccatgcctgagcggctgaccgtggctgggatgacattcgaccgagagcagttcgagggtgcccatctcccgtctttgcgggctgaaatgaagcgggacggccaatgggcgcggtcacagttgcaggcccgtgaccgtggcgaagtcagtctgccgctggagttgccgatctgggtgacgaaaggggaggcagattaa

SEQ ID NO: 329641 - DNA, 1035 bp, Pseudomonas aeruginosa
atggcaagaaaaccaaaagaccttacgccaagattcggaatcggggagtggtacgggtacaacctgacccagctctcgggcgcagagcggcagcagctcgcagccgaaaccctgaaaccgaagaaagagcggacaccacaactctgccccttccaagcccgcaagcaaggcgcggtttgctcgaaggatggcggggtgtgctcgctgcggctgtattcgtatgccccccacccggaaacgggccgggcgatgggccttcccgtggaaggcaagcaaggcgacctgcgggccacctgtccctaccgcttccacgaggaactggacgtgttcaagtgggtgggcgaaaccatcctcggcgaccctgacccgctgctcgtcggtgaagtcggcttcctcgaagccggggccaccacggacaacgaaggcggcgatgacgtgggccggatcgacatggtgctggtcagcaccaagacccagcagggcgcaccgatggcatgggcggcgcttgagattcaggccgtctatttctcgggcaacgccatgaagggcgaattcgaggcgttcaacgacgcggccgtggattgggtggtgttcccggcaggccgccgccgcccggactaccgcagcagcgggccgaagcggctgatgcctcaactccagatcaaggtgccgacgctccggcgctggggcaagaagatggccgtggtcgtggatcgcgccttcttcgattccatcggcgaaatggacaacgtgcccgacatctcgaatgccgacatcgcgtggttcatcgtccggttcgaggaagtggaaggccagaaccgcacccgcatcgtgcgcgatgaagtccgctacacgacgctggagcgttcggtcgaagggctgacgggcggcaagcctgtgccgctgccgaccttcgagggccgcatcaacgaaaagctgttcctgccgatgacccaaggggccgtggcgggcttgctcaccttcgatgacgcggagccgcccgccgccgatgaaggcgagggcggcgaagcgtaa

SEQ ID NO: 329642 - DNA, 1368 bp, Pseudomonas aeruginosa
atggctagtgagcatgatatggcaattgaggcacgcagcgcgacatacgcagacgctggcatgggcggcacggcccccaagacgaagaagccggccgctgtgaagcgggccaccggcaaggcaaagaaaggcgctcccctgcgcaccatcgacctgttctgtggtgcgggcggaatcactgagggcttccggcaggcgggctatgtgagcctgtacggcaacgacgtgatgcccgaggccatcgagacattcaagctcaaccaccccgaggccatcgcggactgccgcccgatcgaggaggccgatcccgccgaaatccgggccaagctgggcttggagccgggcgaactggacgtgcttgtgggcggcccgccgtgccaaggcttctcgatcaacgcgcccgaacgcttcctcaatgacccgcgcaacaagctgttcacgcactacgagcggtttctggaagagttccgccccaagacgtttctattcgagaacgtgccgggcctgatgtcgctgggtgacggcaaggtgttccgccagatcgtcaaaatcttcaccgggctgggctaccacgtcacggccaagattctgtttgcggcccactacggcgtgccacaggagcggtggcgtctgatcctgctgggttcgcgcttcgccgaggtgccgcacccggagccgacgcattacgcatccggccgggccaacttccggggcggcggcacgatgacctttcagcttaccgacaccgaccgcgaacgcctgctgccgtgtgtgaccgttggcgaggctatcggcgacctgccgcgcctcgaaatgggcgaaggggccgaggtgatcggctacacgaccgatccccacagcccctatgcgcagatgatgcgcaatggaacggaagtgacctacaaccactatgccgccaagctctcgaagcagaacgccgagcgcatgaagcatgtgaagccgggcggatcgtggcgcgacatcccgcatgagctgctgcccaaggggatgcagcgtgcccgcaagaccgaccacaccaaacgctacggccgtctgcgcaatgatgggctgtcaggaacgatgctgaccaagtgcgacccgcattggggaaccgtgttcctgccggatcaagaccggacgctgactgtccgcgaggcggcacgcttccagtcgttcccggacacgtacaagtttgtcggctcccgtgtgtcgcagtatgagcaggtcggcaacgccgtgccggtgctgatggcaaaggccatcgcggttcagctccagtcccatctggaagcgcagcagaccgagaccgccgcagagaagcccgtcaaggcagcgcggacgaaggcccgcgccgcgcaagtggcttga

SEQ ID NO: 329643 - DNA, 552 bp, Pseudomonas aeruginosa
atgaccgaacggaaacacctgacgcagaacgaagtcgagcgcctgattgctgccaccaagggaagccgccacgaggcccgcgaccgctgcctgctgctgctgatgttccggcatggcctgcgggtgtccgaggcgtgcggaatgcagctctcccaggtcgatgtcgaaagccgggtgctgcatgtgtcccggctgaaaaaggggctatccaccacccacccgctgcgcaccgacgagctgcgggccatcaaggcatggctggccgagcgcgggcgcatgaagccggacgactgcgacgcctttttcgtgtccgagcggcgcaacccgctgaaccggcgcacggcatgggatgcgatccgccgctatggcgagaaagcgggcctgccgctggccgcccacccgcacatgctgcggcacgcctgcggctacgagctggctaatcaaggggcggatacgcggttgattcaggactacttggggcaccggaacatccagcacaccgtgcaatacacggcgtcgaatccggcgcggtttgagaggctgtggcgatga

SEQ ID NO: 329644 - DNA, 579 bp, Pseudomonas aeruginosa
atgcaaattcgggtacagacctacaagggaaaggacgggcaccccaagccgggcaagtccgtttctctgctgcgctacgcctatgacccagaaaaacggcgctccaagcaggtcatcatcggcacggtagatcgctgggcaacggctctgccgcctgacattgacgccatcctgaccgacaccgagcgcgaagaattcagggagtgggctgcggagagagaccggcagcttgccgaacttactcagaaacatcatctgctgcacgtcgccgaacacatgggatgggcggcaaaagcactggttgccggagtggagccagtccagcccggacggatttgggatgcgctggacgtgctggcaaaagtgcttgagaaggccgggcacccaaggccggttcgagcacgcgggcgtccgtcgaagagtgagacgccgacgccggatgatctccttgctagcccctacgatgatccgatgctggctgccgagcaggaagaaatggctgaacggatggcggcactgccggatttcattcctgaccggccacggaaagcgatagcgcggggagatcggacaaaatga

SEQ ID NO: 329645 - DNA, 705 bp, Pseudomonas aeruginosa
atggcaaaggctgatgaacggcgtcagttccgcttcgcgcttgtgaaggacatcctgcgctgcgagtcggtcaggaagctccctcatgaccacaaaaagcggctttttcggctgttggcgaacggttggagcatcaccgataccccacccgatacatcgcgcatccgggcgcttgaaaaggctgcatccgatgcccgtcggctgcgggctgcgcttgacggcctcgacccgaaggatgcagccagtttggacttcaactacagccagaccatcccgctctcaacccgtctgcttgccttggaggaactggcccacgatgctgatgctctggcccgcgtcatcaagggcgaacaggcggacatcatgcggctgcggaaacggcagacggcaaaagggctggccaacacactttccatgttcggaatcccgttcagtacgcgcaatgactgggatgtagatgagtgcaacgtaacgacggctatgcgctgcgtgatgttcgccatgctggaagccggtgcaacgaaactgaactggggcacaaccgccgccatcatcaagctgggctttcagatgctgaccgatccaagccaagagaaggccgtgttttcagagggaaaaatatcagtaacggcgggggatgctgagaacttccgactatttctgcgtgaagcccctgagttcaacggcatcaaactggtggagtaa

SEQ ID NO: 329646 - DNA, 204 bp, Pseudomonas aeruginosa
gtgaaatacgccgtactcggagccaccggcctgctgggacatcacgccgcgcgcgccatcagggccgccggtcacgatctggtgctgatccaccgtccttcttcgcagatccagcgtctcgcctatctggagcccgagtgccgggtcgccgagatgctcgaccacgccggcctggaacgcgccctgcgcggctcgacggggtga

SEQ ID NO: 329647 - DNA, 1383 bp, Pseudomonas aeruginosa
atgcgaatgaacatcacctcggtcgcgctgacgtgcctgctcgcagcgcaacttgcccaggccgacgacccgatcaatgtgtccaagaccggcacggttctcagcgacgaggtcctctacagcattggcggcggcagtgcggtgagcatgggcagcgccggccagatggactcgatcggcgtcggcttcggctggaacaacgaccttatgtgcggaaacatgaacctgagcaccaccctggagaaccagctcaacggtgccacacagggtttccagaacatcatgggctcagtcatccagaacgcgaccggcgcggtcatgtcgctgccggcgttgatcatccagcgcgcgaaccctcagctctacaacctgatcaccaatggcatcctgcaggcgcggatcgactacgaccgctcgaaagggacttgcagagcgatcgccgagaagatggctgacatcgctggcgagcagaccggctgggggaaaatcgccgaaggccaggccctgggtgccacactggcctctggcgggaaagacgccgtatccgccctcgaagcagtggagaagaagggcggcaacgatggcataacctgggtcggtggagacaaggccggcggctccggccagaagcccattcgcatcgtcaacgacgtgacccgggcgggctacaacctgttgaccagccgctcagtgaatgactcgtcgagcgtgccttccgccacttgcaacaacggcctggtctgcaacacctggtcctccccccaggaagccgccgcgttcgccacccgggttctgggcgaacaacagcaacagacctgtgaaggctgtcagaagacggtgacggcggcaggcgtcggcctgaccccgctgatccaagagacctacgacaagaagctccagtcgctgcaggagctgctgtcgaaaagtaagccactgaccgccgagaacctggctgcggccggcaccgatgccttgccgatcacccgcggcgtcatcgaggcgctgcgcgacgagcgtgaccaggacgtcctggcgcgccgcctggcgtccgatgtctccctgatggacgtgctcagcaaggccctgttgttgcagcgcctgatgttcgccggcgccaaggagcccaacgtcgccgccaacggcctggccacccaagccgtcgatcagcagaccagcctcctgcagcaggagatctccaatctcaagaccgaactggaactccgtcgcgagttggccagcaattcgcccatgcgggtcatcgagcgcgggcaacagcgcgcctcagggtccagtggcgtgttcgagtcggcgcccgatgccgatcgcctcgatcgcctgcaggccccctctgccgccgacggcaagacgggagggagaccgtga

SEQ ID NO: 329648 - DNA, 939 bp, Pseudomonas aeruginosa
atgaccagccacaacctccgccacctggcagcggcggccgccaccttcagcctctcgttcacggcctcggccgcgatcaacagcgccgccatcgtctcctccaccctttcccctcagtgcctcgaatacaaggtcgtcgggatctgctactggctgctctgcggcccacatggctgcaaggtgaagacgtcggtcaaggtccgccactacgtgcctgacgcagtcgtctccagctatgcgaataccgggagcaacccctggacggaagtgtcggcgctgggcacaccgaatcccctcgcccaggccggcaatgacgcgaccaccaactacaaggccgagaacagcatcggccgcttcaaggaagcggatgtgatcggccatcctggcggggccacgttcagccggttcgccagcgcctctgggtacgtttgccctggcgccaccttcccgctggtgccgtacttcctcagcacactggacgccattggctggcggcatggcattcccgagcaggtgtaccccgaagcgttggtcccagggctgcgcgaggtggggggagtcttctccggcgacatgtgggggaacctctatccgcgcagcggattcctgcaccagaccgacgactacaagacggcagccgtcatcgcccagcgcgccggcgacatcaccacgcgagtcggccaactccacgtctaccttcccatgcgcgcagcccccaaggacggctactggccggcgggcgagctgaaagagggcgatgcctcgaccgggaaatggcaggagctgaccccgtccctgagcctcaactgcgcggtgtttcccaactcagggccgaagacgcaagccgtcgacggcgattacgcctgggcgctctggcgtccctactcctgctgccagcgcaaggggcagatcttcctcggcagtaccgacttccaataa

SEQ ID NO: 329649 - DNA, 2103 bp, Pseudomonas aeruginosa
atgacagcttttgaaggtgacttgcaagaggagttggtactccgattctcccataatgttttagagcatttaggtttaaagctctatcagaataagcctacgaatgttctggctgagctggtctctaactcgtgggatgcttacgcaaataatgtatggattgacatttccaatacctccggaggggcgccaagactaatagccgtagccgacgacggtcatggaatgacacacacatcgttgagggataactacctagttgttggaaagcccaaaagagacgagggtgaagttaataagggtgtaagggaaggtttcgctgaacgtaagccgatggggcgaaaaggtattggaaaacttgctccttttggcgtcgctcgccttgttagcctcataacggtgtccgaggggatggcgacttggcttacgttcaattacgaaggaatgcttaagtctgaaggggattacaagtccttctcagaatataagcctgatattttggctagtagtgtaccgttggcatcggtagactcatcgctggctggagagggggctaaatacgttgaatcgtttaagaggcgtctgggtgatgatggatcgggtacattaatacttgcaggagaccttactctgcggagggctatactggctgctgatctaatggaatctctcggtcgacgtttcactgttacgttatgtaggccggattttaaagtatgggttaatggtgaggagctacaggaaagtcatgctttccctgcctggtatttacgtataccagagagcggttcaaaaacagctgtagttcaaacccctgacggaagtagagaagttagttattgggtaggctttgtgaaagaggcttcttggcctcaggagcaggcgggtgtaggagtatatgctcacggtaaaattgctcaggacagagcttttttctttggggttaaaggaagtgagatattttcaaggtatatgtatgccgtagtggaggcggattggatagatgagttagactacgatgcaatttcgactgatcgaacatccattaattgggatgatccaaatttcgaagggttctatagttggggggcgagtagcgttaaggattgggttaaagaatatcagaaggccctaaagctttcagctaaggaagagggtgggaaattaatagataaggtggttgtggataaaagtttatacgttagaccttctgaaaaagaacacttggttgacctattgagcgagattacaccaaggatgcaaggagatggcgaaagtcaagagcgtttagtagaggcaactgttaaggcttgggtgcatgagccagctcgtagacttattaagaaactttgggaggaggctgcgctatttgatgctgagaagtttagcctaattatggacaggcttgtcgaacagttggtgccagagagcctttctcttgctgtggttttttcgcaacgagtgttcgctttgacgcagcttgaaggccatataatgcgtggtcaagaaactcagctacaatatctaatagaacagtttccatggattcttgataagaagtacgaaagctacattccacggcgggcgctgaaaactatttgtgaggaggcgcagcagcaggggatttttactgcgaggcccgtacatgttgcttcccctgctgactatactaagcctgactttgtgttttttgtggactctgcagatactcatatcttggttgttgagctgaaaggaccggatgctgtagctagctggccggagttcgagcagctccactcatatatgacatacttacagtctagagattcgtctaaaaaagttcgtggcgtattattggccagagagtttgatcctggaattcaagagcaaaaaagtaatgccatggaatatgtgaagtggcaggatgtattaaaactctcgcgtcgagaccacatgcagttgctcggagggttgcttgcaggggcagatgctgacccgaacgatattcgagtcagacaagtctgtgaccttggtggacatagcgttactggttttcttgctcaaatggccaagacatcccctgagcttgacgagattgtaaaggcggtcaagaagtcttaa

SEQ ID NO: 329650 - DNA, 1254 bp, Pseudomonas aeruginosa
atgcgacgagtaagatatcccgccttcattgctggctcacaacgaagaaagaaaaaaaactttaattttgtcagcttattttctggtgctggcataggagattacggcctacaccttgcaggcggagtgtgtttggctgcctgcgagatagacacccaaagagctgccgtacatactgccaacttcaaaaagcatgtatggggtgacatccgcaaagaaaaagtcaagatagtagaaagccttaaagataaaaacatagacctaattattgcgacccctccctgtcaaagtttcagcactgcaaactccagaaggggccttagagatgatgcagagcatgcaaaaggagatgagagaaacagcctgtttttcgaagcactttatataataagagaactaaacccctcgttcgttctatttgagaacgtaccaaattttctaatgaagagaataaaatgcgaagaggaaaaagtaacaagcagagttcatgaattcatcgaagcctcgttgcaagactatcaatcttggcaaggtaatatttgcttttcaaaatttggcgttccgcaaacacgaaaaagatcccttgcattcttcgctagacgagacttgaaaatcaacaaggatcagctcgcaccgaacaactggcttgctaaaatagatggagccccaagctgtattctggaagcaataagtgacctctcgcctcttgacgggatttctccaactgtggcgagggatgagtctgaccctttgcaccaagtacctgtatactcgcccaaacactactcatggatagcaggcataccggcgggaagtggaaagtctgcttgggagaataactgcttaaactgcggctttagtgcagctcctatattcacagttcattgtcctgcctgtcttgaacctatgaaaaataggccacacgtagaaagtaaaaacggcgagatacgggccattaagggtttcaagacaagttacaagcgaatgaagccaaatgagcttgcaaacactattaccacatccagcggtacattcagcagcgacgtaaaacttcatccacttcagaatcgtgtattaagtgtaagagagtgcgccagactccagactatacccgacagttttaaatggccacaagtcttagagtaccgaaaggctcacctttttcgagagatgataggtgaggcagtaccaccactcgtcacctatcaacttggccttacgctgcaaagcttaatttcacttaagacttcttga

SEQ ID NO: 329651 - DNA, 1758 bp, Pseudomonas aeruginosa
atgcatgccgtcgatttcatccaggacctcgccgtgatcatgctggtggcgggtgtggtcactatcctcttccaccgcctgcgccaaccggtggtcctcggctacatcgtcgccggcttcatcatcggcccgcacaccccgcccttcggactgatccacgacgaagacacgatcaagaccctggccgaactcggggtgatcttcctgatgttctgcctcggcctggagttcagcctgcgcaagctcttccaggtcggcgccacggcgttcatcgcggcgttcctggaaatcgtcctgatgatctggatcggcttcgagatcggtcgcttcttcgagtggagcaccatggactcgctgttcctcggcgcgatcctggcgatctcctccaccaccatcatcgtcaaggcgctcggcgacctgaagatgaagaacgagcgcttcgcccaactgatcttcggcgtgctgatcgtcgaggacatcctcggcatcggcatcatcgccctgctgtcgggaatcgccgtgagcggttcggtggaaaccggcgaggtgttctccacggtcggcaagctcagcctgttcatgatcgtcgcgctggtcgtcggcatcctcctggtgccacgcctgctggcctacgtggcgaagttcgagagcaacgagatgctgctggtcaccgtgctcggcctgtgcttcggcttctgcctgctggtggtgaagctggaatacagcatggtgctcggcgccttcctgatcggcgcgatcatggccgagtcgcgccagttggtgcagatcgaacgattgatcgagccggtccgtgacatgttcagtgcgatcttcttcgtcgccatcggcctgctgatcgacccgaagatcctcgtcgagtacgcctggccgatcgccctgatcaccgtcgcggtggtgctcggcaagatgttctcctgcggcatgggtgcgttcatcgccggcaacgacggacgcacttcgctgcgggtcggcatgggcctgtcgcagatcggcgagttctccttcatcatcgccgccctgggcatgactctgaaagtcaccagcgacttcctctacccggtggcggtagcggtctcggccatcaccaccctgctcaccccgtacctgatccgcgccgccgacccgctctcgcagcacctggccaacgccatgccgcagcgtatggcgaggatcttcggccactacggcgactggctgcgcagcatccagccgcagggcgaccgtgcggtgctggcggcgatgatccggcgcatcttgctgcaggtcggggtgaacctggcgctggtgatcgcgatcttcctcgccggcggttatttcgccgatacgctttccgcctggatgagccagtgggtcgcctacgacgggctacacaaggcattgatctggggcggcgcgctgctggtctcgctggccttcctgatcgccgcgtaccgcaagctcaaggccctgtcgatgctgctggccgaactcggggtcaagccggagaaagccggacgccatacggcgcgggtacgtcgggtgatctccgagatcatcccgctgctgtcgctggccggcatgatggtgctgctggcggcgctcagctcgagcatcctgccgccgggcgagttgctggtcgtagtggtgctggtcgccggcctggtgatcgcagtgctctggcgctggctgatccgcgtgcattcgcggatgcagatcgcgctgatggaaaccctcgaccaggaaaagggcagccactga

SEQ ID NO: 329652 - DNA, 207 bp, Pseudomonas aeruginosa
atggccgagaatctccaggaacgactctaccaacgactgcgggaagacttgctggccggacgtttccagcccggcgagcgactgaagatccgcgacctggcgaaccagtggggcaccagcccgatgccggttcgcgccgccctgcaacggttggtggcggaaggggcctggagggcgaggcacaacgctcgctcagggtgccgctga

SEQ ID NO: 329653 - DNA, 783 bp, Pseudomonas aeruginosa
atgaatgacttttcgaagtggacaggccaggtcgcgctcatcagcggcgccggcagcgaactcggcatcggtttcgccattgcccggcggctggcccgcgaaggcgtgcgtctgctgatcaccgccagcagcgagcggattaggcaacgagcggaggaactgagcgcatgtggtcacgacgtgcgcgccgcgagcgccgacctgaccgacgaagcccaggtgcagggcctgctggactgggccgaagcccagtggggacgggtcgacatcctggtgaacaatgccggcatggcccagttggacagcgcggagcccttcagcgcagtggaagcgacctcgctgcgggattggcaactgtccctgtcgcgcaacctgaccagcgctttcctgctcacccgcggcctgctgccgggcatgcgcgagcgcggctacgggcggatcgtcaacgtcgcctccaccaccggaacccgcggcagcaacccgggcgaagccgcgtatagcgcggccaaggccggtctggtcggctggagcatgggcctggcgctggaggtggcgaagagcggcatcacggtgaacagcgtcgcgccgggctggatcgccaccgcctcgagcaccgccgaagaacgccaggccgccctggccagccccagcggacgtgccggccggcccgaagaggtggccgccgcggtggccttcctcgcctcgcccgaagccagcttcgtcaacggcgaactgctggtggtggacggcggcaactgcctgatcgaaaacaaacggagctga

SEQ ID NO: 329654 - DNA, 1395 bp, Pseudomonas aeruginosa
atgaccgccagtggcatcgccgaagccgccgtggaaaccttcatggcccgcgagcagcaacgtttccttgcgcagaatccacagtccgtcgcgctcgccgagcgagcccggcgcgccttgttcgacggcgtaccgatgcactggatgagcgattggtcaacaccctgtccgctgttcgtggcgcgtgcccacggcgcgcgtttccatgatgtggacggccacgcctacgtggacttctgcctgggcgataccggcagcatgttcggccattctccggcgtcgatcgcccgggcgctcgccgagcagggcgcgaacggcctgaccaccatgcttccgggggaggatgccatcgtcgcaggcgagctgctggcgcagcgcttcggcctgccgttctggcaggtagcgaccaccgctaccgacgccaaccgcttcgtcctgcgctgggcgcgtgcgatcaccggtcgtaaggtggtgctggtattcgacggttgctaccacggcacggtcgacgacaccctggttcgctgccgcgacggccgcaccgtgcatcgctccggcctgctcggccaggcccacgacctcacccagttcagccgcgcggtgccgttcaacgacctccaggccctggagcgggcgctggccagcgaagacgtggccgccgtgctctgcgagccggcgatgaccaacatcggcatggtcctgccgcaacccggcttccaccagaagctgcgcgagctgacccgtcgtcacggcacgctgctgatcatcgacgagacccacaccatctccacaggtcctggcggctgtacccgcgcctggaagctcgagccggacttcatcaccctcggcaagccgatcgccggcggcgtaccgtgctcggtgtatggttgcagcgcggcgatggccagcgccatgcaactggccagggcacgtgccagcgagcagagcgaaggccacggccacagcggcatgggtaccacgctgtcggccaacgccctggcgatgcgctgtatgcgcgccaacctggaagaggtgatgaccgataccgcctacgcccacatgctgcccctggcggcgcgtctggccgagggcttccgcaggattatccacaagcacggcctggcctggtcggtgaccgagctcggcgcgcgcagcgagttccagttctgcccgcaacccccacgcgacggcgcggccgccgaggcggcgttccacgacagcctgcagatggccttgcacctgtatctgatcaaccgcggcatcctcatcacgccgttccacaacatgaccctgtgttgcccggacactcgcgaagaagatgtcgaccgcctgctctccagcctcgacgaggcgctcggcgagctgctcgccatacccggcgcgcgggaggcctga

SEQ ID NO: 329655 - DNA, 1368 bp, Pseudomonas aeruginosa
atgcatttcgccgatccgcgggaagcccgcgagttcctcgccgcacaccccgaggtgcgcagcatcgagctgttcctgatcgacgccaacggcgtgccgcgcggcaagctgctgcatcgcgacgagctgctggcggtctacgaaagcgggcggccgctgccgagcaccatcctcggcctgaccatcaatggcgatgacgtcgaggagaccggcctggtctgggacgtcggcgatgccgattgctggaccttcccgctgcccggcagcctgaccctgcaaccctggcggcagtcaccgaccggccaggtgcaggtcagcatgcatcccgaactcgggctaccggccgcggcgggcgatccccggcatgtgttgcagcgggttatccacagcctgcaggcggagggtttccacccggtgatggcggtggaactggagttctacctgctcgaccgcgaacgcgacagcgacggccggccgttgccggcgttacagatgaatggccagcggccgcgggcgacccaggtctatggcgtctacgagctggagcagttgcagccattcctcgatgacttgtatgccgcctgcgaggcccagggcctgccggcgcgcacggcgatttcggagtacgcgccggggcaggtggaaattaccctgcagcatcgcttcgacacgctccaggcgatcgacgaaggcgtgcgctacaagcgcctggtcaagggcgtggcgaatcgccatgggttgcaggcctgcttcatggccaagccgttcgccgatctttccggcagcggcctgcacctgcacgtcagcctggccgacgccgctggcaacaatctgttcgccagcgaggacccggccgggaccccgctgctgcgccaggccatcggtggaatgaaggcgtgcctgctggagtctttggcgctgttctgtccgaacgccaactcgttccgccgcttccaggcgaacagctacgcgccgctggcgccgacctggggaatcaacaaccgcaccgtgtcgctgcgggttcccggcggcccggcgtccagccggcacatcgagcaccgcatctgcggcgccgacgccaatccctacctggcggcggcggcgttgctcgcggcggtgcgcctggggattcgcgagcgactcgaccccggtgcgccgatcaccggcaacggctacgctcaagccacccaggcgttgccgagcgactggctgaccgcgctgcgcgcgctggagggctcggcctgggcgcgcgaggcgctcggcgaggatttcctgaagatctacctggcgatcaagcaggccgaataccgtgccttcatgggcgaggtcggcgagcaggactggcgctggtatctcaaccaggcctga

SEQ ID NO: 329656 - DNA, 1128 bp, Pseudomonas aeruginosa
atgcggattgcggttaacgcgcggattctccaggcgccgcggaccggcatcgggcattacctggtcgagttgctgggtgcgttgcaggcgcacgcggacttagagttttccctgttccatggctggggctggagcggcgacctgccggcggcggcgctgcccggctattcgcgtctgtcgccctggctgcgcaacctgcccggagcctaccgggcacgacgctggctggagcagcggcgtttcgatagcggtcggccgccggtcgatctctaccatgagcccagtctctggccgctggacttcgacgggccgatgctgatgaccctgcacgacctgacccacctgcattatccggcgacgcaacccgccgcccgcttgcgcgaaatagaacgccggctggcgcgcgggatggaaaaggcgcggttgatcctgaccgactcgcaggcgatcgccgacgaggcgcaggcgtatttcggcctgccgcgcgagcgcttcgtggtggcgcccctcggccatgccgcgcggttccgtccgcgggaccgggagtccctgcgcgagcccttgcgcgcgcatggcctggtgccgcgcgggtatttcctctgcgtaggaaccctcgaaccgcgcaagaacctgtcgctggctctgcgcgcccatgggcaactgccggcggcggtccgccagcgttttccgctgatgatcgtcggcatgccgggatgggaaagtcgctcgctcgacgacgaactgcgccaggcgctggcttcgggaacggtgcggctgctcggctacctgccggacgagcgggtcgccgagttgatgtcgggcgctcgggcgctggtcttcccctcgatctacgaaggcttcggcctgcctgtgctggaagccatggccagcggcacgccggtattgctcacgcgactctccgcaatgccggaggtggccggcgaggcgggcagctatattgacccggatgatgccaatgggctatctgacatgctggtccgcatgaccgaggataccgtctactgggagtgctgccgggaagccggcctgcgacgggcggagcagttttcctggaaacgttgcgcgaatctcaccgctgcagcctatcgtcgtgccgtggagggctga

SEQ ID NO: 329657 - DNA, 321 bp, Pseudomonas aeruginosa
atgcgggtactgcacttctacaagacctacctgagcgaaacggtaggcgggatcgaacaggtgatcttccagctttgcgagagcagcgggccgtgggggatcgacaaccacgtcctgaccctgagcagcgacccgcatccgcctgtcgtgcccttcggcggacatgtggtgcatcgcgccaggctcgacctgcagctcgcctccaccggtttttccctgagcgtgttcaagcagttccgcgagctggcgcggaggcggacgtggtcaactaccacttcccctggccgttcatggacctggtgcatttcctcaccggtatga

SEQ ID NO: 329658 - DNA, 738 bp, Pseudomonas aeruginosa
gtgagcctggccctggcccacaagcgccggattctggccgagggcgtggcggctgatgccgccaccgtcccggcctacaacccgagcgaagccctgaacagcccagcgaacgcgcagaagcacctggccctgatgctgaccgccctggatggcgacctggagcgcatcagcgcgatcaacagccgcgaggaacgccagcgcctgaagcgcgacgaactgctgcccaagtatctggactatgtgcagcgctaccgcgccgccggcctggtctacccgaatccggtcctggtccaggtgctggtctggctgttcgacactgtgcagttcgaagccggcctggaactggccctgttcgccatcggggatggccaggagatgcccgagcggttcaagcgccgcgacgtccagacgttcgtcgccgatgaggtgatcgactgggccgaagccgagtacaaggccggccgcgcgccggaaccctacgtctcgaacctgctgccgctggtggacggccagtggcagttgttcgagcggatccccgcccgctaccacaagctcctgggccagttggcgatggacaacgaggaatgggcgcaggccatcgagcacctggaccgagccgtggagctgtatccggaaatcggcgtcggcacccgccgcgctgccgccgccaaggcgctggccaaggccgaggcggcaaagcagagcgacgagggcgacgagcccccgcccaccccataa

SEQ ID NO: 329659 - DNA, 1023 bp, Pseudomonas aeruginosa
atgggagccctcagcgaacgcgcccaggcgcagtaccagcaactccaagaggacatggccgaggcctataacgtccacgacaccgcccgcaccttcgcagtggagcccacccacgcccaggaactcaacgaccagatcactgagcgcgccgacttcctcggtcgcatcaacgtcgtcccggtcagcgagatcaagggcgaaaaggttctgctgggcctgaacggacctgcgtcgagccgcaccgacaccagcaccaaggaccgcgagccccgcgacttgctggacctgaagaacaacgaatacgaactcttccataccgaaacggacgtggccctgaagttcgccaccatcgacagctgggcgaagttcccggactttgccgaccgctacctggcggcggttcagcgccgcatcgccctggaccggatcctgatcggcttccacggcacccatgcggccaagcagaccgaccttcagcaattcccgatgctccaggacgtgaacaaaggctggctgcaactggcccgcgagctgatcccggaacaggtactgaaatctgccgacccggccaagaaaatcgtcattggcaagggtggcgactatgccaacctcgacgcggctgtgcatgacgtcaagcagatgatcgaccctgtgttccgcgacgaaggcgacctggtggcgatcatcggttccgacctgctggcatacgacaagggcaagctgtatgccgcgcagggtcagaccccgaccgagaaagaacggattgaggaagcccaggtgatcgccacctatggcggcctgccgtccttcctggtgccgttcttcccggtcaagggaatcatggtcaccagttgggacaacctgtcgatctacttccaggacaccagctggcggcgccatcttctggagaaccccaagcgctcccgcgtcgaggactacaacgggcgcaatgaaggttacgtgatcgagcagttgggcaagttcgctgcgctggaatccgattccgtggagcttgcgccgtga

SEQ ID NO: 329660 - DNA, 954 bp, Pseudomonas aeruginosa
atgccccgttcccttgtttcaccgtggaagcgcgtggccgtcagcggcgacaccgtagacgggcgcgtcatcaccgagcaggaactgcgcgactgcgcggaaacctacgaccgcagtttctacacggcgacgatctgggccgaacatgatcgctggaggggcgcccacggcacggtctacgaagtgcgcctggtcgaagcaaaggacgacccggaacttgagcccggccaggtcagtttggaagcccgcctgcgcccgaacgacgacctgctggccctgaacgaccagggcaaaggcctgttctccagcatcgagatctggccgaacttccgcaattccggccgctgctacctctccgggatggccgtcaccgacgagccggcaagcacccgcacccaggaactgtatttctcccgccgccgccccaacggcgctggcgtccgcttcttcaccagttcccaccccctcagcaacctgcgcgaagacgacggcgcgaccgcgcccgaggtgcacggcctgatcgcctcgctaacccgcgtgttcaagctcttcagcgtccccaacacccccaccgaaaacccatcatccgacgaggtagaaccaatggatgaagccaccgccaaggccctcaaggccctttacgatcaactggttatcatcctggccgggctccaggcagtgatcgaacccgtcgtcgaagacgtggacaccagcgacacccaggaacaagtcgatgccgttggcgccgccgtccaggacgtggtggaccaggccgacgaagaacgcgacttcaagcgcaagaagggcaaggaaggcaaggaaaccaaggaactcagcgcccgcatggatgagctgcaggacaccatggccaagctgctcaacaccgcccaggggcgcaagatcccgcgcaccactggcgccgccgccaaggctcgcggtaaggggctgcgctaa

SEQ ID NO: 329661 - DNA, 2049 bp, Pseudomonas aeruginosa
atgtcgtactcaatcgaagtgaaggaagccgccaagcggctgtatctccggcgggcgaagccgaaggagatacaggcccagctgggcctgcccaacgtccgcatcgtctattactggatcgcccggggcggctgggacgaactgctgacagatgaagaacccctggccgcgatcagccggcggatcacgctgattgcggagaagcctggggcgttgtcgaaagcagacctggacgaactggaccgactgacctcgatccgcgagcgcctgcagaagcaggcggccaggcctgcgccgtcacctgcaggcgagcccgcaccggaagcccgcgccgagcgcggccgggagcgcggcgagcgtccgccacgagagggcaaacgcaagcccaaaaagttgaagaatgacgtctccggcgtgaccgaaatcgacttcctggacaagttcacgtcgcggatgttcggctaccagctggagctgttcgcggcgaagaagaatccgcttacggcgcggatccgccatatcctgaagtcgcgccagatcgggctgacctactacttcgccgccgaagcgttcatggacgcagtgctgaccggggacaaccagattttcctgtccgcgagccgcgcccagtccgaagtgttccgcagctacatcgttgcgttcgccgcgcaatggttcgatatcgagctgtccggcaatcccatcatcttgagcaaagacggcaagccgtgggcggaactgcggtttctctcgacgaacagcaacacggcgcagagctaccacggccacgtctacatcgacgaagtgttctggatccccaatttccagaagctgcagacggtggccagcgcgatggcctcgcatgcaaagtggcgcctgacctacttctccacgcccagcgcggtaacgcaccaggcatatccgtactggaccggcgaggagttccgcaacagcaagcgcggaaagaaggccgggccgtggcccagcgaagcgcagatccacgccggcgcgttgtgcccggacgggcagtggcgcaaggtcatcacgattcaagacgccatcgccggcggctgcaacctgttcgacctggagcgcctgcagttggagtacgacgaagagcgcttcgaacagctgttcatgtgcaagttcatcgacagcacccaggctgcattcgccttggccgacctggagcgctgctattccgacttgggcctatggaccgactacgacccggacagcccgcggccgttcgacaaccgcccggtctggctcgggtatgaccccagtcgaacccgagacgacgcgacgtgcgttgtcgttgccccgcccctggagccgggcggcaagttccgaatcctggagaagcacagctggcgggggacgtcgttcacgcatcaggcaaagcagatcgagaagctgtgcgagcgcttcaacgtccagcacatcggcatcgacattaccggcgtcggttacggagtgttcgacctggtgaaagacttcttcccccgggctactccgattcactacagcctggaggcgaagaacgccctggtgctcaaggcccaggacgtgatccagggcaagcgcatcgaatgggatgccggttggaccgaggtcgcggcggcgttcctgtcgatcaagcgcggcaccacggccagcggcctgattacctacagcgcgtcgaggaccgaggctaccggccacgccgacgtcgcatggtcgatcatgcacgcgctggctcatgaacccctgaacaccaacaagcggcggcgcagccgctattccctcagcagctcgacacaggcgacccatggcaaagcgaaaaccacggcagcaggcacaacagcgcaacggcgcgcgcgcgttctcgttcggcgcaccggaacaggtgctgacacagaatatcggcgagtacctgggcgtcttcgccagcgagtgcgggcggatctacctgccgcccgtgtcgcgccaggggctggccaagctgctgcgcgcaaacccccatcacggcgccatcgcaccgttcaagcgcaacctgctgttgcgtga

SEQ ID NO: 329662 - DNA, 708 bp, Pseudomonas aeruginosa
atggtgttcggggaatgcttcctgtacctgcgcgagaacatcgccggccaggtcctggagctggagcacctgccggcgatcaacatgcgttgccgattggacggcgggtacaccatgttactgccgcatggtgaggaactggagtttgaccaggacgaagtgctgcacctgaaagaatacgacgtggagcagaacatctacgggatacccgactacctgggcgggctccagtcgctgctgttgaacgaagcggcgacactgtttcgccggcgctactacagtaacggcgcccatgccggatatgtgttctatacgaacgacgagaacttgtcggaagaagatgaagagaatctgaaacagcagattgcggcaagtaagggagtcggaaactttcgctctatgttcgtcaacattcccggcggttctgaaaaggcaatccagataatcccggtcggcgatttccaggcgaaagacgaactggagaaggtcaagaacataacccgtaacgatgttatcgccgcgtggcgaatgaacccggcgctggcgggaatcattccagagaacagcgccgggttcggtgacattgagaagatcgaccgggtgtacatgaataatgagattcgtccgatccaacagctgttccttcaggtgaatgaagtgctgcgggaggatcgccggattgcgtttaaggaacctgtatcgggctag

SEQ ID NO: 329663 - DNA, 261 bp, Pseudomonas aeruginosa
atgcgagtttattgcaaggtgtgcggagagaaggcgcggattgctacgcgagaggacatcaccccggagttcgccaaactctattgccagtgcctggacgcgaagggctgcgggcataggttcgtcatgaacctgtctttttcgcataccttggttccggcggcggagcctctggaccggctgctgtttgaccggctccgggagttaccccgccacctgcaggttgagctatttaatcagctcggggccttgcgatcctga

SEQ ID NO: 329664 - DNA, 210 bp, Pseudomonas aeruginosa
atggagtttcagacagtcaacctaacgtcaatacgcgaaggactggacgacagtaggtatgtcatgaaatttattggtgctgccgtttgccatggccagttaggcgtggaagaacggctgggcgctcagatcgtgatggagtggctagaccaacgcatgaacgataccgcgtccacgctcctggttcaggatcgcaaggccccgagctga

SEQ ID NO: 329665 - DNA, 282 bp, Pseudomonas aeruginosa
atgagcaacggcgcccccgttcacgtccaggagcgacaggtattcaacgtcagcccggagcgtaaccgccaggcccaggcccagttaggcctaccgcccagcttcgtgatcttcgaggcctccggcgtcctgaactactttaccggcctgggcgtggtccaggtgcccctgccgcaaggcgagttcctggtgggcctgcaggatcctgtcggcgctcgacgcttcggcgttgtgcgctttgacggactcgacgaccaagagggatggggggaacagcaatag

SEQ ID NO: 329666 - DNA, 231 bp, Pseudomonas aeruginosa
atgaaagctgaccgccacggcactctggaagaacagaaacgctacgcgctgcgctggcaggacgtgaacgaacgcccggagtgcggcaactgctgttacctgcgcaccgagaaagccccggcagcagcttgtccaggtgcggccacactggccgtccaccactgcgaccggggcggtttcgtcaccaccaggacggcgatctgcgaccagcacaggaggaagaaagcatga

SEQ ID NO: 329667 - DNA, 216 bp, Pseudomonas aeruginosa
atgcgcgttcgtaacgacgagatccgccagctgtgcaagctggccagggcaatgggttacgccgtccagcagaccaagcggctgcacctgaaattcaccaagcccgggcggccaccagttttctgcagcagcaccccgggggactgccgcgcctggctcaatgcccgcgcccagttgcgccgttccgagctgatggcagagggtggtcccgcatga

SEQ ID NO: 329668 - DNA, 414 bp, Pseudomonas aeruginosa
gtgacagtagcaacccaaggcggcggcgccgctgagactaccaccccacggcccgatacgctcaccatcagcgttcgcttctcgaccggcacctatgttgcccgggcgaagggccataagcagacagccagttgcaccgaaaacgcctaccgggccgccgagcgactgaccgagaaactgggcatggaccccaagaccttggaactgcgggagcatctggaccagcgctggatcttccagacaatcgagctggtgcccggcgagttcacccacttttgccacctttgccccgactgcggacagacacacctggtgccaatcacgaaggatgcaccgcatccctactgttgcggccggcgcactctgttcaaaggcggacggcacgtccgggaggtcgcagatgcgcgttcgtaa

SEQ ID NO: 329669 - DNA, 357 bp, Pseudomonas aeruginosa
atgcagaacgaacagacgccacgccagaccctggaagccgtactggtgacagctctaatcgagagagccaccaccgccgcgctgaaacagttggtaccagcggccttgtgtcacaccgaaaagggcagcgtgatcggacgcttcctgctcgctttggacgacggagccggacaccccttcaacctgaacgatctgcgccgcctggagcatgtgcaactggatgcctgcctgcagatcctcgccgtcgatcatgcaggccggcttaacgtccgccagcgcgtggaaaaggacgcggacggccgcctggtctgggctctgctgagcagcatgtgggcgccccgcaaaccgaacgcctga

SEQ ID NO: 329670 - DNA, 402 bp, Pseudomonas aeruginosa
atgaacgcaagccaaccgctcacccatgaattggcccgcgtctgcggtccgttcgacctggcaagcaccaccgcgcaccaggactttctgcactgctggcggcgtggcgccaggttgctgggcctgccgctgctgcaactaccaccggcgaggcattgggaaatacccgtgatcgaggacgcgcacctaccgcaactgctcaaggcctttcggaccttggacacgtcccgccaggtactgctgctgaccatgctcagcctggccggcttcaagcggtcggcatggctcagtcaggaagtgggtctggagttcggccaactggccgcctgcagactcggaaatgaagtgttccaggtggtggtcggcctgctggcccaccaccgcgaaaccccaagcaactga

SEQ ID NO: 329671 - DNA, 201 bp, Pseudomonas aeruginosa
atgagcctgcccgccgatatcgcataccgccgcgactgcctggcccgccacgttctgcgccattggaggcgcgaagagatcaccgagtggctggccgatccgaagcactcggaggaataccgcgaagacatgcgcaagcgactgaacgagcaacagaaggagatccgcaggaatgaacgcaagccaaccgctcacccatga

SEQ ID NO: 329672 - DNA, 2694 bp, Pseudomonas aeruginosa
atgaccgtacgtagcacccaagagcagttcgaagatatctaccgccaggacgtgatcccggccctggagaacgacagagaactggacttcaaaccgcacgaagcctcggacgagtacctgaacaaaggggaatgtccgggctgcggcaagcgctcgctgtacatcagcaagagcaagccctaccagttgaaatgcaaccggttgaaccagtgtggttacgaagagaaaacccgcgaacgctaccgccacctcttcgagaatctgagcgagcgcttcccttcgacgccggagaaccccaacgccaccgccgacgcctacctgcagcgcagccgcggcttcgacatttccaagatcgcgggctggtacacccagggccgccggccgatggcgaacggatcctgggcggacacagtgcgtttcccgctctgcaacggctattgggaacggatcatcgacgcccgcgccgtggccgcgaacgaaggcgacaaggccgggatccgcaaaggcatgacgtacaagggcgatggctgggagccaactggccagacctacgagaagaacgaccgggtgtacatcgtggaagggatcttccatgccatcgcgctgtggctcgccggctataaggtgatcgcctcgatctcggccaacaacttcccgtggcgaatcctcgaagagaacaaagggaaactcattacctggatcatcgccctggatgatgacccagctgcccatgcagtgattcctaagtacctggcagggatccgcaagcgaggggaaatcggctgggtagccctagccgggcagcgggccgacgggaagaagcgcgactgggacgacgtgtaccgcgacggccagctggacgacgcattcctgcaggaagcgtgctaccggggccggctgttctgcgccacgtcgccgatgaagaaggcttatctgctgtacatcaagcgaccgcgcccgttcttcctggtcgagttcgacaactgcctgtactcggcccgggtgaacctcaccgagttgcagaaagatctggatggcgacgacgtggacggacaccagcccgagttcgccaaacacacaaccatcagccaggtggccaactgtgtcccgcgcttcgaatacatcgagcgcgatgcgatcaccggcgagcagcgctacttcttccagttcgacttcccgaactcccgcctgaactgcaaagagccgctgccgccgagcgcgataaccgagccgcgaggcttcacgaaagccctactggagcgcaccccaggcggcatgttcgaaggcggcgaacgggtgctggccatgctcaaaagcgagtggctacgcaaccccagcaccgttcgcacgttgcccttcattggctacgacgaagccactggcgcctattgctacccctccttcggcttccacaaaggcaaggaaatcatgaccaacgaccatggctttctggacattggcggcgacggtttgaagacctcggcgcgtagctaccccgtcttccagggcgaggccttcgacccgtcctggttcgcagacttccgcgcagtgttcagcctcaacggcctggcggcgctctcctggtggaccggtaccctgtttgcccagcagatccgcagcgcgcagtcctcctggcctttcctggaactgaccggcgtcgccgggtccggtaagaccaccttgcttcggttcctctggcgcttgatcggccgcaaggacgaggaaggcatcaagcccagcggcaacggcgcatccggcatcggtctactccgcgccatgtctgccgtctctaacatgcccgtggtgctcctagagtccgaccgggaaaagaccgacgccatggggcgcaccctgactgagcaatacagctgggatgaaatcaaaccgctgttcgaccataacgccaagctgcgcgtcaccggcgtgaagtcgggcaacagcgatacggaggcgctgattttccggggggcggtctgtatctcacagaacaccatggtagacggctcggaagcgatcctgaccaggatcgtctatttgcacatgacgctggaccaccatagccccgacctcaagcctctggccgaccgcctgaaagctatcccggtcgagcaactggcgggctacctgcgcgctgttctgtgccaagagaacgcctggctgcagcgctatttcgaggccttccctcactacgaacagcggttcatgacccagagcggcgtcagtcacagccggatcgtgctttgccacgcccaggtcatggcggcggccaaggccacccaatcgctgttcccggcctggaccgatcgtgatctggaatccctggcacgccatctggaggcccgcgccctagatcggcaacagagctgcactgcagagaacaagaccgccgcccagttctggcagatctaccactacctcaacgagcagaccgtcaccgtgacggacagcgatggcgaaacccaccacgagatccgcgagacgctgaaccacagcacggaaaagggattgatcgccgtcaacctgaaccacttccagcaggcttgccgcgctgccggccaggaggtgctgcctacggccctgctccaacgctacctgaggcaaagccgcacgcacaccttcatcgagactcgcaagtgccattcccgcctggaacagcgctccatcaactgctggatcttcaaaagggctggatag

SEQ ID NO: 329673 - DNA, 231 bp, Pseudomonas aeruginosa
atgaagatcaccatcgacacgccatatgtgaccgtcgctgagtttgtccgccgttccgggcagtccaccagcgccgttgagcgcgaaatcaaacgcggcaactacatcatccggccaaaggaagcaggttcgaaatcggccgtcctcatcaacatggtgcatatggccatggaggcagcagaacaggctcaacgggtgcgtggtgagaatagtcaggccggtaagcagtaa

SEQ ID NO: 329674 - DNA, 237 bp, Pseudomonas aeruginosa
atggacttcgccacgaagctgaaagcaatgcgggcacaagagcgggtgacacaggttgaatttgctgcgctgacagggatcagcatcagcacggtgaagaaatacgaaggggcctccttcgaaatggggtatggcgcgcttaccaaggtcttgggtcacgagcgtttcaagaagtacacgctctggctgatgatcggagaaacggcccctgagtgcgggcaggtagccccggaatag

SEQ ID NO: 329675 - DNA, 990 bp, Pseudomonas aeruginosa
atgggcgacggctccaagggcgagtttgagaagaagccgaaacgcgacgaacgccgcctgagtgaactggtggggctgtggttcaccatgcacggcaacaccttaaagcaaggcgacaagcgacgccgggaaatgctgaccactgtggcgcggatcggcgaccccatggtttgcaccttcaccgccgagatgtttgccgactaccgtgctgcccggattgcagggaagtgggggcggctcaaaactgggtcaggcaagaagaaagggcaggcggccaagcctgtaggtgccaagacgttgaaccacgaactggtgcacctgcgggccatgttcaatgagctggagcgtctggagaagtggacaggtgagaacccgttggcgaaggttcgagcgctcaagcaggacgagacggaaatgggctacctgagtcgggaacagatcccgcttttgctggccaagctggatcaacacccgtccacggttggcatggttgcccgggtctgcttagccactggtgccaggtggtccgaagcaatgaatctgacacctctgcaggtgcgggatggtcgaatccacttcgtccgcacgaagtcggcaagaaaccgcgcagtgccgatttctgccgagctgcagaagtcgcttgagggggcgctcccctggagatcgtcctactcggcgacttacaaggcgttcgagctggcggtggccgaactggatctgcaactgccgaaagggcaactgacccatgtgctgcgccataccttcgcaagtcattacatgatgaacggtggtgacatcctgaccctgcagcgcgtgctgggccacgcgactctccagatgacgatgcgctatgcacatttcagccccggacacttggccgaagtcgtcaacctgaacccattggctcaggggtgtggacgtttcgtggacgctgaaaaggaatgcgaatctggtgtggacgcacagggtcaggctgtagcccaggtgtga

SEQ ID NO: 329676 - DNA, 1494 bp, Pseudomonas aeruginosa
atgaaaccatcgctagtcctcaagatgggccagcagctgacgatgacgccgcagctgcaacaggccatacgcctcctccagctatccaccctggacctccagcaggaaatccaggaagcgctggaatccaatcccatgctcgaacgccaggaagacggcgacgatttcgacaacagcgaccccctcgccgatggcgccgaacaggcggccagcgcgccccaggagagccccctccaggaaagcgccacgcccagcgtcgaaagcctcgacgacgaccagtggagcgaacgcatacccagcgagttgccggtggataccgcctgggaagacatctaccagaccagcgccagcagcctgcccagcaacgacgatgacgagtgggacttcaccgcgcgcaccagcagcggcgagagcctgcacagccacctgctctggcaggtcaacctggcaccgatgtcggacaccgatcggatgatcgcggtgaccatcatcgatagcatcaacaacgatggctatctcgaagagtccctcgaagaaatcctcgccgccatcgatccggaactggacgtcgagctcgacgaagtggaagtcgtgctgcgccgcatccagcaactggaacccgccgggatcggcgctcgcaacctgcgcgagtgcctgctgctgcaactgcgccagttgccgtccaccacgccctggctgaacgaagcgctgcgcctggtatccgactacctcgacctgctcggcggccgcgactacagccaattgatgcggcgcatgaagctcaaggaagacgaactgcgccaggtcatcgagctgatccagtgcctgcatccccggcccggttcgcagatcgaatcgagcgaagccgaatacatcgtccccgacgtcatcgtgcgcaaggacaacgagcgctggctggtcgagctgaaccaggaggcgatgccacgcctgcgcgtcaacgccacctacgccggcatggtccgccgcgccgacagcagcgccgacaataccttcatgcgcaaccagttgcaggaagcccgctggttcatcaagagcctgcagagccgcaacgaaacgctgatgaaggtcgccacccagatcgtcgagcaccagcgcggtttcctcgactacggcgaagaagccatgaagccgctggtcctgcacgacatcgccgaagcggtgggcatgcacgaatcgaccatttcgcgggtcaccacccagaaatacatgcatacgccgcgcggcattttcgagctgaaatatttcttttcaagtcacgtcagtaccgccgaaggcggggaatgctcgtccaccgcgatccgcgcgatcatcaagaaactggtggccgcggaaaatgcgaaaaagccattgagcgacagcaagatcgctggtttactggaggcacagggcattcaagtggctcgccgcaccgtcgccaaataccgcgaatccctgggcatagccccttcgagcgagcgcaagcgactggtgtga

SEQ ID NO: 329677 - DNA, 3525 bp, Pseudomonas aeruginosa
atgaagattctcgccatccgcctgaagaacctcgcctccctcgctggcgagcaggaaatcgacttcacccgcgaaccgctgtccagcgccggcctgttcgccatcaccggtccgaccggcgccggcaagagcaccgtgctggacgccctgtgcctggccctgttcggcagcacgccgcggctggaaagcacttcggccagcagcaaggttcccgatggccggaacgagctgtccagcaacgacgaacgcaacctgctgcgccgcggttgcgccagcggctacgccgaagtggatttcgtcggcatcgacggccaccgctatcgcgcccgctgggaaacccggcgctcccgggacaaggcggacggcgccttgcaaaagagccagcagagcctccaggatctggagacccagcaaatgctggcagcgaacaagaaaagcgagttccgcgaacagctggagcagaagctcggcctcaatttcgcccagttcactcgcgccgtgctgctggcccagagcgaattcagcgccttcctcaaggccagcgacaacgaccgcggcgcattgctggagaaactcaccgacaccggcctgtacagccaattgagcaaagccgcctatcagcgcgccagccaggccgacgagcagcgcaagcaactcgagcagcgcctggaaggcagcctgcccctggccgagcaggcccgggccgggctcgaggcggcgctggaatcccacgcccaggcgcgtctccaggagcaacaggcactgcaacgtctggaaggccagcaacaatggttcaccgaggagcagcggctgctgcaatcctgcgagcacgcacaaggccaactggccgaggccaggcaggcctgggacgccctggcgacggagcgggaaaccctgcaatggctggagcgcctggctccgattcgcggactgatcgaacgcctgaagcaactcgagcaggaactccggcactccgagcagcagcagcggcagcgcaccgagcagcaagccgcgggcgccgagcgcttgcaaggattgcaggcccgcttgcaggaggcgcgcgagcgccaggcccaggccgacaaccatctgcgtcaggcccaggcgccgttgcgcgaggctttccagctggagagcgaggccaggcgcctggagcgaacgctggccgagcgacaggaactccatcggcaatcgaaccagcgccacgcccagcaaagcgacgccgctcggcaactggatatggagcagcagcgccatgtcgcggaacaggcgcaactgcaggcggcattgcgcgacagccagactctcgccgcgctcggcgacgcctgggtgacccaccagggccagctcgccgccttcgtgcaacgtcgccagcgcgcgctcgaaagccaggcgcagctccccgagctggaaaaatccctggcccacgccggggaaccgctcgaacgcttgcaggcgcaatggaccgccctccatggcagcgagccggacgacctggcggcacgcctggtcgaattgcgccggcagaccgatagcctggaacgacaacaagcgctccacaaggaatggcaacaggtcctcgaccaacgcgccggtctggctcgacgcctgggcgaactcgaccagcgtatggtcgagcaggagcaggcattgctcgacctgaaacgacaaggcagccaatgcgccgaggaggtgaaggcggcggagcaggccctgcaggtcacccgcgagttgctccagcgccaacgtctggcccgcagcgccagcgtcgagcaactgcgcgccggcctggtggacggcgaggcctgcccggtctgcggcagccaggagcatccctatcaccattccgagcaactgctcgccgccctcggtgaacacgacgaccaggagcaggtccgcgccgagcagtccctcgagcggctgcgacagacccaggtcggtctgcgcgagggctattccagccagcgggaaagactcaaccagagtcgccaggagcagcaggaactgactggccaactggccgcgctcgatcggcaactggaccaatggacgctgccggaagaactgcgactcctgcagccgtccgcgcagttggagtggctggcacaacgcctggacgacctggcagggcagcgccagcagtgccaacgagacttcgaccggctgatcgcccgccagcgccagacccagcaattgcagcaggaactgcgggccgccgagacgatcctgcaacagcgccagcaggcgctgacggaacaacggcagcgctacgaacatttgcagcagcaggtcgaggaggacagccagcaattgcgtccattgctctccgacgagcactggcagcgctggcaggcagatccgctgcggactttccaggcactcggcgagtccatcgagcaacgccggcagcaacaggcgcggcttcagcagatcgaacagcgtctgcaggagctcaagcagcgctgcgatgaaacgagctggcaactgaagcaaagcgacgagcaacgcaacgaagcccgccaggcagaggaaagggcccaggcggaactcgccgagctgaacggacgcctcggcgctcacctgggccaacacgcctgcgcccaggattggcaactatcgctggaacacgccgcgcaagcggcgcagagcgccgtcgagacgctccaggcgcccctggattcgctgcgcgaggaacaactgcgactcgccgaagccctggaacacctgcagcagcaacggcagcgccaacaggatgagttccagcgccttcaggccgactggcaggcctggcgcgaacgccaggacaacctcgacgacagccgcctcgacgccctgctcggcctttccgaggaacaggcgacgcaatggcgggagcaattgcagcgactgcaagaggagatcacccgccagcagacgctggaagcagagcgccaggcgcaactgctccagcatcgccggcagcggccggaaaccgaccgcgaggcgctggaagacaacctgcggcaacagcgcgaacgcctggccgccagcgaacaggcctacctggatacctacagccagttgcaggccgacaaccagcgccgcgagcagagccaggcgctgcttgccgaactggagcgagcccgcgccgagttccgcagatggggccgcctgaacgaactgatcggttcgtccagcggcgacaagttccgccgcatcgcccagggctacaacctcgacctgctggtgcagcacagcaacgtgcagttgcgccagttggcgcggcgctaccgcctgcagcgcggcggcagcgaactgggcctgctggtggtggacaccgagatgggcgacgaactgcgctcggtgtattcgctctccggcggcgagaccttcctgatttccctggccctggcgctcggcctggcctcgatggcatcgagtcgctgttcatcgacgaaggcttcggcagcctcgacccggaatccctgcaactggcgatggatgccctggacaacctgcaggcccaggggcgcaaggtggcggtga

SEQ ID NO: 329678 - DNA, 1182 bp, Pseudomonas aeruginosa
atgagttcgttaccgttgtacttcgattacgccgccaccacgcccgtggacgagcgcgtgatccgggccatggtggagtgtctcggctaccaggcgtgttttggcaatcccgcgtcgaactcccatgcctacggccgccaggcgcggcgggcggtggagcgggccagggagcaggtggccgcgctggtcggcgccagcgccgggcagatcgtctggacttccggcgccaccgaatccaacaacctggccctcaagggcgtggcccaggcgctggacacgcccggccacctgatcaccagtcgcctggagcacaaggcggtgctggacaccgtgcagcaactcgccgatgacggctggagcgtgacctggctggcgcccggcgccgatggcctgatccggccggaacaggtggaggcggcctggcgcgccgatacccgcctggtgtcgctgatgcgggtcaacaacgaactcggcaccctgaccgacatcgccgccatcggcgaacgggtgcgcgagcgcggtgcgctgttccacgtcgacgcggcgcaggccagcggcaaggtggcgatcgacctgggccgcctggcggtggacctgatgtcgttctccgcacacaagacctacgggcccaagggcatcggcgcgttgtacgtcgggccgcgcgccgagcggcggctgaaggcgcagatccacggcggcggacacgagcagggcctgcgttccgggaccctggcgacccaccagatcgtcggcatgggcgaggccttcgccctcgccggcgagcttttcgaggaggagggcaggcgcatcgccggactccagcggcgtctgctggaggggctggcgcagatcgacggctggcgcctgaacggcagcgccgacgcacgcatcgcgcataccctgaacctgaccttcgacaacccggcctttgtcccccaggcactggagtccagcctggcggtgtccagcacctcggcctgcaactcggcgcggccggcgccgtcccacgtgcttctcgccctcggccacgatgccgccagcgctggccgcagcgtgcgcctgagcctcggtcgctacacccgcgaggccgacgtcgacgcggcggtggccgccctcaaggccgcggcggatagtggcgcgccggcgtggcagccgttcctcggggtatccagggcaggctga

SEQ ID NO: 329679 - DNA, 276 bp, Pseudomonas aeruginosa
atgttccggcacatcctgcccaacgccatggtcgcgaccctgaccttcctgccgttcctgctctgtggcgcggtgaccaccctgaccgccctggacttcctcggtttcggcctgccgcccggctcgccgagccttggcgaactggtcgggcagggccgcgacaacctccaggcgccctggctcgggctgaccgtgttcgtggtcctggcgaccttgctcagcctgctggtgttcatcggcgaagcggtgcgcgacgctttcgatccgaggacatga

SEQ ID NO: 329680 - DNA, 1074 bp, Pseudomonas aeruginosa; identical to SEQ ID NO: 318793

SEQ ID NO: 329681 - DNA, 2958 bp, Pseudomonas aeruginosa
atgccgcaccatgctccatccacacgcctgccttccagcctggccctggccgcgctgctcgcggcggcctacgccgcgccgccggaggcacgtgcggagacgcccgcgcccgccgccaaggcgctcaccttcgacgtcgccgccggcccgctggaccaggtgctgctaggcatctcgcggcagagcggcttgctgatctccttcgagcagtcgctggtgcgcggccggcaggcgccggcggtgcgcggtccgctgagtgtcgaccaggccctggaacaggccctgcgcggtagcggcctgcagttccgccgttccgagcgcggcgcggtgatttccgccgcgccgctgcgcgcggccgtaccggcggcgaaggtgcagccgctggcggcgaaagcggagcagaccctggagcgggtggtggtgaccggctcgcggattccccgcgcccagcaggaagggccgtcgccggtcacggtgatcagcagcgaggaaatccagaaccgtggctaccgcaacgtcttcgaggccttgcagacgcagacccagaacaccggcatgacccagggcgaggactacggcaacacctggcaaccggcggccaacgccctcaacctgcgcgatctcggccccaaccacacgctggtgctgatcaacggccggcgcgtcgccgactacccgaccgcctatggcggctcggtgaacttcaccaacctggcgaacatcccggcggtcatgatcgaccgcatcgagatcctcagcggcggcgcctcggccatctacggctcggatgccatcgccggggtggtcaatatcgtcctgaagaagaaattcgatggcgtcgacgtcaacctgcgcgccggcaccaccgagcgcggcggcggcgacaaccagcgcctgcaactggtcggcggcggcgcgacgggcgacttcgaaggcctgttcggcctgcaggtcgagcagcgccagccggtctgggccaaccagcgcggtttcatggacagctacccggacggcaacaacgtcggctaccggctgaacccgcagagcggacgctacctcggcgacgcctcctgcgccggcctcggcggcctgttcggcggcaacgtggcgccggtgccgggcgccaggggtggctatcgctgcatgaccgaccagtactacaacaactactggaccctacagaccaagaaggaaaactacgacggctacgccggcggcacctggcacctgagcgacagcggcaagctgttcgccgacctgctgttcggcttcgaccacctgcagaacaatacccgcgggccgtccttcacctcgccggacttcatcaatgcctccagcggcgacctggagcgctggtaccggctgttctcgcccgaggagatcggcggcaagagcagcaacaacagcaagtggcgcgaggtgtcctggaccggcaccctcggctacagcgaccacgtcgccaatacttcctgggaatacgaactggccgcgacccgctccgagtaccgcagcgaccgcactacccgctacaccccagcggccgggatcctcgacctgtacctgggccgcaagctcggcgaacgcgacggctacccggtctacgatcccgatccggcgcgcctcggacgtccgctgagcgaggaagagtggcgcagcctgcggcgcaacgtgacccagcacagcgagtcctactcgcagacctacagcttcaccggcaacggcgagctgttcgacctgccggccggcccggtggccttcgccggcgtgctggaggtgggcaagcagggctacaggatccgtcccgactcgcaatacaacgacggctctctctacaacgtctccaaggccagcagctccggcggctcgcgcgaccgttacgccgccggcggcgaattcagcatcccgctgcacgacacgctgctggcgtccgccgccggccgctgggaccagtacaggttcagcggtcgcaccgaggagcagaccacctacaacctggggctggagtggcgcccgctgaccagcctgctgctacgcggcagctacggcaccagcttccgcgcgccggacctgaactacatctaccaggccgacgccaacggctactacccggcgcagaaggactactacggttgcgagaaaggcgtcgacggcgcctgcaagaacggccgggtcgactacgtgcagagcggcacgcccgacctgaagtccgagcgcgggcgctactggagctacggcttcgtctggtcgccgtcgagcaggttcgacttttccgccgactactaccacatccagatcgatgacctgctgaccaccctcgatccggacaaactgctgcgcgacgaggcggcctgccgtagcggcgggctcgatccggactcggcgcagtgccgcgacaccctggcgcgggtcgagcgcaacgccggcgacgccagcgtcgatccgaatcgcctgaacaaggtctacgtcaatgccatcaacgcggccaaggagcgtaccagcggcatcgacctgcgcagcaacatccgctggggcgccggtgactacggcgccttctcctcgaccctcggctacaccctggtgttgtcccacgactacaagcagtccgacgactaccccagcgagaaccagcgcgacagcctcgactcccacgactggcgcagcaaactcaacgccagcctgacctgggactacgcacagttcacctcgacgctcttcgcggtgcgctacggcagcgttaccaacgccgctggcagcgggcgcctgagcccgtggacggtgttcaacgccagcgcccgctaccggctcaacgaacgcgccagcgtcggcctgacggtgaacaacctgctcgaccagatcaaggaggacgactccgatggctggccgtactatcccaccggcaactacgacgccatgggccgccaatggtggctggacttcagctatcacttcggtggttga

SEQ ID NO: 329682 - DNA, 1308 bp, Pseudomonas aeruginosa; identical to SEQ ID NO: 324056

SEQ ID NO: 329683 - DNA, 1308 bp, Pseudomonas aeruginosa
atgatccgcgttcgaccggtcggccgcctggcccttttcctggcgctgggcggcacctcgccgtgccacgccgcgacagaggaagccaaggcacccgactacctggagtggcgcctgctcaaccgcaactacttcctctacaacgactatcgccgcgcggacgccgggcgcggctaccgcaaggaatgggcacacggcctgatcgccgacctggagtcggcctatactcccggccgcgtcggtttcggcctcgatctccacggcttcgccggcttcaagctcgacggcggacgtggccatgccggcaccggcctgttgccgctggactcatccggcgataacgccagcgagtattccgacgccggcgccgcactcaagctgcggctcggcgagagcctgctcaaggtcggcgagatgaccgtcgagaccccggtcttcgataccagcgacaagcgcctgcaaccccagtacgccaggggcttcttcctgcagagcgacgacctcgaccgcgtgcggatccaggccgggcgcttcaccgccttcaaggaacaggcctccagctccggccatggcgacttcgacggctacggcgcgagcaccgccggcagcgccatcggcttcgccggcgccagcctggcggccagcgacaacctgagcggctcgctgttcgccgcgcaactggacaacgtctggcgccaggtctatctcaacatgaacctgcaacgtgccgcgttcagcctggatggcaacctctatcgcacgcgcgaccagggccgcagccgggccggcgcgatcgacaccctggcctacagcctgcaactgaagtaccgcgtcggcgcgcagggtttctccctggcctaccagcgtgtccatggggatacgccgttcgacttcgtcggaggtgactccatctacctcgccaactcgatcaagtacgccgatttcaacggtccgggcgaacgctcctggcaggcccgctacgacctcgacctggccccgttcggcctgccggggctgagcttcatggcgcgttacgtcagcggccgcgccatcgacggcagccatgcgccggccggcggcgcctacaacccgctgggcgccgatggccgctaccggcccttgcagggcagcggcggcaagcactgggagcgcgacctcgacctgcgctacctgttcgcctcgggcccgttcaaggacctctcgctgaacgtctcgcacctcagccaccgggccaacgcggcccaggccggcgacgacatcgaccgcctctacctgatcgtcgaatacccactcaaaggctcgctctga

SEQ ID NO: 329684 - DNA, 1020 bp, Pseudomonas aeruginosa
atgatcgactcgaccttctcccgcgccacctggctcaactcgctgcacatgtcgaccctcactctctcgctgctggagaaggaagggttcgcccgcgagcaactgctcgaaggcagtggcatcacccccgccgacctgctcgacctgcggcgcctgatcagcccctggcaggagcagcaggtgttcgccaacgcctgccggctcagcgacgagccggccctcggcctgcgcctgggactgcgcacgcggatttccgcctacggcctgctcggctacgcgctgctctccgcgccgaccctcggcgaggcgctgcgcatcggcctcagctatccggtcttgctcggcacctacttccacctgtcgctggaagtcgccgacggccgcgcctggctggtggccaccggctacggcgaggacgaggcgctgcggccattcaacaccgagctttgcctgggctcgctgaaggtcacctgcgccgacctgctcggccagccgctgcccttgctggaagcggccttcgactatgccggcgacgaggcgatggcgcgggcctacgccgagggtttcgcctgcgagttgcacttcgaacgcgagcgcagcgccatcggcttcgccgccgaatggctggagcgcccgttgccgctggccgacccggtgacccatcgggagatgctggaacagtgccggcggcagaacatcgacctggccgcgcgtcgtgcctggctggacaaggtccgggcgatcctcgccgagcgcttgcaggacccgcccggcctggaggaactggccaggcgcctgaactgttcgtcgcgcagcctgcgccggcaccttcagcagcagcgcaccagctaccagcaattgctcgacgagttgcgcttcgcccgcgccaaggagttgttgcagagcggcgacatgccgatctaccggatcgccgaggaactcggcttcagcgagaccgccagcctgcgccatgccttccagcgctggagcggccagccgccgagccatttccgcgcctga

SEQ ID NO: 329685 - DNA, 1086 bp, Pseudomonas aeruginosa
atgaagaaacgctatgccattcccctgggcagcctggcggcgctgcttctgttgttgctggcgctgcacctggcgctgccgtacctggtgcgcgactacctgaacggcaagctggccgacatgggcgactaccgtgggcacatcgccgacgtcgacctggcgctctggcgcggcgcgtatcggatcgacggactgagcatcgtcaaggacaacggcaaggtgccggtgccgttcctcgacgcgccgagcatcgacctgtcggtgagctggcaggcgctctgggatgatcacgcagtagtggcgcgggtggtcttcgagcgtccgcagctcaacttcgtcgatgccggcggcgaccgcgacgcctcgcagaccggtgccggcaccgactggcgcgagcaactggacaagctgctgccgatcaccctcaacgaggtgcgggtggtggacggcaccctgcgtttccgcaacttcacttcgaagccgccggtgaacctgcacgcctcggcgctcaacgccagcatctataacctgaccaacgtggccgacgcctggggcgagcggccggcgcgtctcgaaggcacggcgcggatactcggccaggcgccgctggaagtggcggcgcatttcgacccgctgagcgacttcgaggacttcgacctgcgcctgcgggtcacccgcgtcgagctgaagcggctcaacgacttcgccagcgcctatggcaagttcgacttcaatgccggcaccggcgacctggtgctggaggcgcaggctaagcgcggtcagctggatggctacatcaagccgctgctgcgcgacgtggacgtgttcaactggcggcaggacgtggaggatggcgacaagaacctgttccgctcggtgtgggaggcgctggtcggcggtggcgagacggtgctgaagaaccagcgcaaagaccagttcgcaacccgtgtgagcctgagcggtaatatccaccagcgggacgtcagcgcgttccaggcgttcctcgggattctccgcaacgcgttcgtcgaggcgttcaacgctcgtttcgagcgttccccggcgacgcgcgacgacgacggctga

SEQ ID NO: 329686 - DNA, 348 bp, Pseudomonas aeruginosa
atggcgacgattcggaagcgcggcccatcacagtggcaggtgcaggtcagacgtaaaggatggcctttacagaccaagacgttcaacatccaggccgaagcgaaaacatgggcaaccatgatcaagcgcgagatggatgccggcgtgttcgtcagccgtaacgaagccgagtcgacctcattcgccaacgccctggagatgtacgccgaacaagtgacctccaaaaagcgcagcagcgactccgagctttcacgcattaaggtcttgctacgccacccgctagccctcagatcaatcgcaagcatccgggtgacctgctccccgatttcagtaccacgccgaacttag

SEQ ID NO: 329687 - DNA, 3102 bp, Pseudomonas aeruginosa
atgaccgaagaccaactggaacaggacgccctcggctggttgagtgagctgggttaccagcatttgtacgggccggatatctcccatgagggagctaatcccgagcgcgaaagctatcgagatgtgttgctggcgatgcgcttgcgtacggcgattgcccggctgaatccgcaggtgccgctggccgcacgcgaagatgctttgcgacaggtgctggatctcggattgcccgtgcaactttcggcgaatcgcctgtttcatcgcctgctggtcaacggcgtgcccgttcagtaccagaaagagggtgaaacccgcggcgattttgtgcggctcatcgattgggttgatgttagggccaacgagtggctggctatcaatcaattcagcattcaagggctcaagcatacgcgacggccggacatcatcttgttcgttaatggccttccactggtgctgctggagctgaaaaatccagccgatgtgaatgccgacctgatgaaggctttcgaccagatacaaacctacaaagagcagattcctgacgttttccactacaacgagattctggttatcagcgacggcaatgaggcgcgtatgggctcgctgtcggccgatattgaacgttttgcgcgctggcgcacaattgatggcgagaagcttgatccactaggcgaattcaacgagctagagactctgattcgcggggtcttggcgccggagctgttgctggactatctgcgttatttcgtccttttcgaggacgatggtcgatttttcaagaagattgccggttaccaccagttccacgctgtgcgggcggcaatctgccaggtggttcaagcttcaaggcctggcggcacgcacaaggggggggtggtttggcatacccagggttcgggcaaaagtatcaccatgacctgcttcgctgcccgggtgatgcaggccgccgaaatggagaacccaaccatcgtcgttattacggaccgcaacgaccttgatggccaattgttcggagtattctccctctcgcaagatttgcttcgcgagcagcctgttcaggccacgacccgtggagatttgcgagagaaactgggtaaccgccccagcggcggcgttgtttttgccaccatccagaagttcatgccaggggaggacgaggacagcttcccagtcctttctacccgctcgaacatcgtggtaatcgccgatgaggctcatcgtacccagtacggtttcaatgctgagctgaaggtggacacgcttaaggtcgcggaggggcaggctcgctatcaggtgggctatgcccagcacctgcgcgacgccctgcctaacgcaactttcgtcgcttttaccggtacaccggtttctagtgaggaccgtgacacgcgcgcggtcttcggcgattacatccacgtctatgacatgcagcaggccaaggaagacggtgccacggtggccatcttctacgagtcgcgccttgccaagttggcgctcaatgaaagcgagctaccacagatcgatgatcaggtggacgagctggccgaggatgaggaggaagatcagcaatcacgcctgaagtcccgatgggccgctctggaaaaagttgtcggagccgagcctcgcctgaagcgtgtagcggctgacctggtgacgcattttgaggagcgcaatcaggctcagcagggcaaggcaatgattgtggccatgagtcgcgagatctgtgtgcatctgtatagcgagatcatcgcactgcgtcctgaatggcatgacgaggatcccgagaaggggacgatcaaaatcgtgatgaccggcagcgcctcggataagcccctgctgcgcccgcacatctatccctatcaggtaaagaaacgccttgaaaagcgctttaaggatccgaaggatccgctgcagctagtgattgtgagagacatgtggctgacgggcttcgatgcgccctgcgtacatacgctgtacgtggacaagccgatgaaaggccacaacctgatgcaggccatcgctcgtgtgaaccgcgtgttcaaggacaagcagggtggcctggtggtggattacatcggtattgctaacgagctaaaggccgctttgaaggagtacaccgcaagcaaagggcgtggccggccgacagtggacgctcacgaagcctatgccgtgcttgaggaaaaactcgatgttctgcgtgccatgctgcatggtttcgactacagcgattttattatcggcgggcacaagctattggctggtgcagcaaaccatgtccttggattagaagatggtaagagacgctttgccgataatgccttagccatgagcaaggcattcagtttgtgctgcaccttagatgaggctaaggccgtgcgtgaagaggtggcattcatgcaggcgattaaagttttgctcactaagcgagaaatcagcgcgaagaagaaaacggatgaagagcgtgacttggctattcgtcaaattatctgtaatgccgtagtttctggcgaagtggttgatgtgtttgcggcggttggattagaaaagccaaatatcggattgctggatgaggatttcctttctgagattagaagtcttccagaaagaaatcttgcagttgagctcctggagcggcttttggaaggggaaatcaagagcaagttttccagtaaccttgcgcaggaaaaaaagttttcagagcttttgggggatgtaatcaagcgatatcagaatcgctctattgagacagcccaggtcatcgaggaacttatcgaaatggccaagaagtttgccgccgctagcaagcgtggtgaaaagcttggactgaatgatgatgagttgtcgttctacgatgctttggcaaacaacgagtcatctgtgcgtgaactaggcgatgagactctagctaagattgcccatgagctgaccgagagcctacgccagaacgtaactgtggattggaataatcgcgacagcgtgcgcgcaaagcttcggctcttagtcaagcgaattctaaggaaatataagtatcctccagatcagcaggaaactgcggcacagctggtgttggctcaggcagaagcgctctgcagtacatggatgtag

SEQ ID NO: 329688 - DNA, 1308 bp, Pseudomonas aeruginosa
gtgacgctcaagctgatcaccatccgtgaatacgctcgcctcactaccgaggcggtaatgccttcgctggatgaggcccaaatttcgaacagtgcctttgactggctctgcgagctaagtgcttgttttaaccggggcggagccacgcttctgcaggtggaggggcgccgttcgctgaagtgggatagctacgtaggcgtactggaaacgccctgcggtacgcggctggaaattcttcccaaacatcatcagcaggatgattgcaggcggaaaagcagagcgctgttgcgcaagcttattcagagcgctttgtcgttgaagcctcgagagatatcggcaactagcctcgaactgttcgacgcgcccctaagtgagtgggtaatggggcagtttctcaacgagttggacctgctgattaagcgtggcgtgcgcttcgattaccaacgtctggaagaagagcagcgctttctacgtggccagctcaacatggtggcacaaatgcgccaaccgccggggcggcagcatcacttccagatccgccacgatgtgttcttgcctgatcgagcagagaaccgcctgctgaagttggcgttggaactggtggccaagaccacgcaggacgctgctaactggcgtctggcaagtgagctgcgcgctatgctagctgagatgcctgctagtcgccacgtgagcatggacctgcgcgcctggagctgtgatcgactgatggcgcattaccaggcaattaagccttggtgcgagttgatcctccagcagcagatgcccgttgctgtgactggacaatggcaaggcatgagcctgctcttcccgatggaaaagctgtttgagtcttatgtggagcgctggttgcggcagcaattggttgtaggagcacgactaacgtcgcaggccgcacgccatagcctttgtgtgcacgatcaacgcgtcatgtttcgtttggaacctgacctcttgctggagagtggtcaaaaggcctgggtgctggatactaagtggaaaaagctggatggaagtgatcggcagaacaagtacggactcagtcaggcggatttctaccagctctttgcctatgggcaaaaatatcttggtgggcagggggaaatggcgctgatttacccacgatgggccgcctttgagcggcatctggcaccgttcgagttcagcccagagttgaagctctgggtgctgccctttgatctggacgccgataccttgttggggctggaccaggtggactttgctcgctgtatgcgccagccgtgctatgccttggacttgctggcttaa

SEQ ID NO: 329689 - DNA, 1860 bp, Pseudomonas aeruginosa
atgagcagcgcacctctgaatcaaatcctctttggccccccaggtaccggtaaaacctacgccaccgtcgaggccgcattggaggtgttggatcaggcctatctggttgccaatcgccaggaccgtggactgcttaagtctcgcttcgatcagttggcagaggaaggacgcattcgctttgtaaccttccatcagagcttcagctatgaggactttgttgaaggtttgcgggctgaaagcgacgagactagcggacagctgcgttatgaagtagtcgatggcgtattcaagagtctgtgtgaagtagctgccgctaaggtgatgcagaaagcggaggctccgctagatctagggaagcgccgcgtctggaaaatgtcactcggtaatacgttgggcagcgatgctggcatttacgacgagtgcttgcagggcggctatgtgctgctggggtacggtggcggggtcgacttcagcgggtgcaaaagtcgcggtgaagtccgacagcgctttgctgaggccggtgtatcgcttgatggctccaatgattacagcctgaccagcgtctcggcattcgtcaccaaaatgaaaccgggcgacatggttgtggtgagtgacggcaattttaaattccgtgcgattggcgaaatttctggcgactacaccttcaaaccgcatgctgagtatgaggatggctacgcccagatgcgcccggtgaaatggctgcgccaatacagcccctctctgccgcatggtgagctgctcaatgcccagttcagccagatgacgttgtacgagctgcgtagcccaacgttgaatcgcgagaagctgcaggcgttgttgggctcccaggtagccactcacgccggccatattttctcagtgggtcaggttttcggtagggactatcaggttgtacaggcaacctccgacctgcttgagctgaaaaagccaaacggtaattcgcttcctttctctatcagcatgttgaacgagctggctgaggcagtgcgtacaggaaagatcacgctgaaggatatccgtgagaaaaccgccgtcgagaagcttccgggatcgacgttggagccttacttggtcaacggctataacaacatcctgtccccattggttgagcacatacttacggcgggggctgcaggcggagctgatagcaattcgactgctcgggttttgatcatcgacgagatcaatcggggcaatgtttctcgcatcttcggtgaactgatcactctgatcgagcaatccaagcgcgcgggcgctgaggaggctctttcggtggtgctgccttactccaagcagcgattctctgttccgcagaatgtctatctgatcggcaccatgaatactgctgaccgctctctggcagggctggatatcgcactgcgccgtcgttttgagtttcgcgaaatgccgcctagacctgagctgctggatgatgtgcgcattggcggtctgaatgtcggccaattgctgcggactatgaaccagcgcattgaggtgctgctggaccgggatcattgcctggggcacgcctacttcataccactcaagaccgagcccacactggaaaggttggaggctattttccgcaaccaaattctgccgttattgcaggagtatttcttcgaggattgggagcggattggctgggtactgaatgatcagcacgcgaacactcggaacaccgagcgctttgtaagacgcccccagggtgagcagagacttgccgagctgtttggcggcgaggtggcagagaagctcagtgatcaacgctgggagttgaacgacaatgcctttaactcgttggacagctatctcacaattctgggcggagccctgtga

SEQ ID NO: 329690 - DNA, 3252 bp, Pseudomonas aeruginosa
atgctcgggcgattcttttcaaggaatgagcggaacgctcaaaaatcgaatgaagtctttaagccacaggtcgatgagttggggctctgttatccgctgagtttggctcaaagcgaggtgcattggccgctggcggcttatctcgaccagttgttcgaagaggatttcgcctcgcaactcagtgatcgttggctgttgccttgggatgcgctttaccaactgctggatgatcccgagcatcaaaccagcctgccgcttctgggcattccgccggaagccaattttcagccgctgttggctagcagcggcagcctcgccgaagcgggcttcatggtgttcatccagggctggcgagatcccaagactggcgctgccgtgaatattgatctcctagggcctgtcgttcgccagagagagcgtaccgagttgctgccccaagcggtttggtcactgctgcaagctgtgcggcgcttgagtacggcgcaaaaggaagcgcccggagaggctaccaatcagatcggttgggcgaatatccgcaagcaggccaagaaggccaacgctgggatggatggttttctcgacaaaacgtttgtggtcaagcctgagcggctgcagctgaaacccaggaaaagtatggtgggcggcaccccggtcatcgagcttgaagcgtccttcgacgggcagccggccaactggatggcgagcttcgatggctacaagcaggtgcaggataggtaccgtgtgacgggcgacgacggaacggtcacccacgtgctgatagagcctgaggtcaaggcggtgctggaatcggtgagggctctacccggccggcgcgtggcgggcgacgaggctttgtccctgattcgaaacccctacagcgtcattggcgacgccgctcagaaagtggtcgatccggaagagtacgaggccggtctcgcggaggccggtattcatttccatcgctttcgtattgagccggcactgagtgccgatggacggcagatcgagtctgtcggcctatacctggacccgatcacggcatcgccggagcccgaggtcgaattccgttttacggcggctcacgagctagcgccatttgtgcatgagttgcagatcaagctggccgctgggctgcctgctgggctttggcagggctatgagctcgagctgagcgacttcgacctggcccagctggcagggattagtgggttgctcagcgattggcagcgacaggaggtcgggcagaccttcgaggcggtgctggacctggcttcctacggggatcgcgtcatcggtatcggtgaagcggagcgcattacctcgccgtttttggtcaaagagtccaccgagaactggctgcccgatgacgtcaaggcattgggtattgatggcgagctgctgaacagctgggatcccgcgaaccgcgagcatttcaacgagtttgaacaccgtctcgatcaagcccgcgaggctggcgacgagcaagtgcatctgccaggtagcgagacgccattgcccctgaaagcggctgagcagctatacgacgcttggtccagaaagctcaatccaggtgaggcaaacgctacgggcagtgagaaagcagacaagcctcccagggccgtgctgcagatcgagcacaacatcgaagacgccgcttatgcccagacccgcgaggcagcgttgatggcggcacacaatgccaacgcggatctcccagagttactgcggcctgaaatccagttgcgagagcatcagctgaagggcgtggcctggatgcagcatttgttcaagctggcgccggatcgagtcgccggttgcttgctggccgacgacatggggctggggaagactatccagctgttgacgttcgtgacccggtacctggagcagcaatccgagggtgagcccgtcctgatcgtggcgccggtgtccctgctggacaactgggagcgcgagctgcagcggttcttctacgcggatgcgctgccggtgctgaagctctacggtagcgcgctgagcgctgtgaagttcaggaaggaagagataccgaatgaactgcaagcgaaaggcatcaagaacctactgcgccccggctggatggcagatgcgcgtattgtcttgactacctacgagacgcttcgggatcaggagttttctctggcccgccagcagtgggcgattgtgatctgcgatgaagcgcagaagatcaagaacccggcggcactcatcactcaggcggcgaaagccattcccgcgcgctttcgggtggcctgcaccggtacgccggtcgagaatactctgatcgatttgtggtgcctgttcgactttatccagccaggattcttgggcgggctgaatcagttcggccgagagtatcagcggcctatcgagtccggtgtcgatcgcgataccgaggcgctagaacggctgcgtggcttgattgagccgcaaacactgcgacgtaccaagcaggatgtggcaaaggaccttcccgccaagatcgaggaccaggccagccggtcgctgccgatgcatgccttgcagcgcaatctctatctgtccgaggtcgcccagtacagccagaagcagcagatgcaggagcaactggagcaacgcgaaagcggcatgctcggcctgctgcatcgcctcaagctggtgtgcgcgcaccccttcagcgtgcagcctgacccgcgcttgcgggagcactctcccaagctacaatggatgttggcccagctagggcgcatcaagcgttcgggcaacggtgacaaggtcatcctgtttaccgagctgcgggacattcagcgcgagcttcaacacgccatccaggagcgcttcggcttcaagccgaccgtgatcaacggcgacaccagcaccagcagccaaagtgcacaaagtcgccagcgcttgatcgatcgcttccaggaggagcctggcttctcggtgataattctctcgacggtagcggttggcttcggcgttaacgtacaagctgcgaaccacgtgatccatttcacccgctgctggaaccccgccaaagaagatcaggcaacagaccgcgcctaccgcatcggccaggagaaggacgtgtacgtctattacccgaccatccgcgaccccagcatgccgacattcgaagccacgctggatgagcttttgcagaagcggcgtgccttggcgcgagacatgttgcacggcgcttcggaaatcaaggcagcggagtttggtgaggttttgagagcgcagggatga

SEQ ID NO: 329691 - DNA, 1644 bp, Pseudomonas aeruginosa
atgagtcgggcgttgtcgtcactctccgatgccatagcacgtagcttgcagcgccagcaggaacgcacggcggataccgggctgaatagatttgtcgatttgcaacgtgcaaacgatgagcttactcggcgcttcaatcaagtcgagaaggctctgcctccgcctcaagagaagcggagggaagcactgcgcaagtttaggcgtgataagcaattaagctctacgccctcggaatacagaccggtgtttgctggcttggcagataaagatgacggcggcctgccggtgcttgaggatgacgtcctatttgaattggtgcatcgagaggtctctattcgaagtgaccaacaaaagctgagccgaaaggattggttggcactttgctacagctattttttctacgatcacgccaagccggcagataactccaattggcgggtcctgcgcagcgatatcgatcagggccttgatgcggtcaagcggcgcatcggtcgcgagaaagagtggatgcggattgtccagcagcaccgtgagctgttcggtgatcaggcgggaaaacagctcgcggaggaaatctttgcggggcgcgccaaggacctgtccgctctgcagaccatcgcacaggtgccggatagcagctggttgtggaagcgcatctttgatgtgttgctgtcgtgcatcgatgatctggatgacgacaccttcgtgcagcgcctgccggagctgactgagttggggcagttgaataatcggtacatggataaggtgctcagcgcctgcctgacccgctattaccgctcgcgttttcgcgaacagtcttcttctctgctcaagcaagccgcgcttgagcactggggcagtccgcaacttcgctcagaccaaaaccgctggctaaaccatgtggagcagcccgtttgcgccatggtgatggcctggttcgccaaggaggacctggagcacttcttcaggttgctcaagggcgaggcggaggttgatcattcgcgtctgttctattggctgcgctttgccaatcaaatgagctatacgcggatcgtgatgggtaatgatgcctggaatgaccgtggtagtgacttcgtggccttccgcgagaaaaacaaggggcgtttgagtcagttgacaggggcctcacgtcacgtcagcgccgtagtcatgcagatcggccaattcttttttgttgagttctccggaacagggcatgcctgctatgtctacaaagcagatcaagcacctttcaacccggatcggataaaactcgacctaaccactgagctgaagcagcaggggcgtgagctaaagcgcatgtctcactcgccggcaccgagacgccctaacctcgttgaaggttggctagaaaagttcgacaccgagctccgggagttgggcatagttcctcagtcccctagtggccacaacgagccccggaaagctggaagccagtcgtccattgagatccaggtggcagcccaactgcggcacgttaactaccagctgatggacaaccgcagcaagggtggcgccttgatggtcaagcttgcacgtgatgatgcgcgggccagagttgcgctagcgcggttgggatttaaagagatgaacaagaacccgctgacattctggagaagctaa

SEQ ID NO: 329692 - DNA, 738 bp, Pseudomonas aeruginosa
atgtttggcaaatcagccgcccctgctcgggcacgggacgaaggcgagaagcccttctggatctccttcgccgacctgatgacggcgatgatgatcctgtttttggtggtgatggtggcctcgctaagttctgtgacgcagcgtatccagcaggttgagcaaggcgagaagcagcggggaagtgaaatcaagaggctgtgtgagggccttaagcttaaagccgggaatctgaactccacgattgttgtggactgccacgataaccgcatcagctttggcgaggcgggccgcttcgggcacaaccagtacttgctcaacgcccaggggcaaaaggctttgcaggatgtcgtgtcgctgattctggacgcggccgacagcgaagaagggcgcaagtggctcaagcaggtggtgatcgagggcttcaccgataccgacggctcctatctgtacaacctccacctttccctgcagcgctcggaatgggtgatgtgcagcctgctcgatagtcgcagccccgtgcagcaaggcctttcagcggagcggcagcaacagattcgctcgatgttcctggccggtggcgtgtcgttcaacagtgcccgagaaactaaagaagcaagccgacgtgttgagttgcggatgcagttcttcgggctgaaggacaaggagcaacaggcgaaggaggagcagccaattttcacgacgacggcgctggagaagtgccagctggagatgcgctag

SEQ ID NO: 329693 - DNA, 2196 bp, Pseudomonas aeruginosa
atggacttcacgaattggttggatttgttagggaaagcaacacacgagcaattgactgcgcccgccttcgtggtgagcttggtgacgttgctatgcctttggtacggcgtgcgttacttcctgtattcgttcgttctgagccgccgcatcaagcgggtgtcgaaggaggttcgcgccgtcggcgagctgcaaccggccaagcgtcgaggtgcactggagcaggtattccagaagcctccactgcaacatgcgtggcaggaatacgcggaaacgctgcacgaccaatttgaagtgcgtgatggcgagcggcagctgctgcgctctcgggcaacggctggcgctggacacttctttacgtcgcagacagtggtggaaacaccgcttggcactgagttctacaagcacttgccgggcattctgaccggcatcgggattgttggtaccttcttcggcttgatgctgggcctgcagcatttcaatccaggtacgcctgagcaggtcaacgccagcgtcgaccaattgctcaaggacgtactatttgccttcctgggctccttcttctcgatctttgcctccatcgccgtcacgctcactgagaagtggcgcctggggcgctgctacaagcacctggaaaaactgaccgaggccatcgacggcctattcgacagcggcgtcggcgaggagtatctggccgaactggtaaagtcgagcaatgaaagctcgatccagacgcgccaactgaaggacagccttgtcaccgacctgcgcgagatgctgcagaacctggtggacacccaggtgcgcgaaagcctgaagctggccgacaccctgtccgccagttaccgcgactccggccaggtgctggccgagcagattggtggtgcgatcgaaagcagtttgaaggctccactagagcaaattgcaggcgctgtccaatcggcgagtggcgaccagagcaaccaggtgcagagtctgctgcaggatgtgctggtggccttcatgaataagctggagagcaccttcggccagcagttcaatgggctacacgaaatgatggggcagtccgtggccgccatgcagtccatgcagcagggcttcaatagcctggtggacgacatgcgttcggctagcgagagctccacgcaaaacagcgcgaagatgatcgcgcagctcctggccgatatgcaggctgggcagaacagtatgcaagccagtatgaatgagatgctggccaatctgcaggcctccattgcgcgaatcggcagtgaaggcgagggggccggcgagcgcatggcccagcagttggagaagctattcgccgagagcgaagcgcgccagcaagccatggcggaaaacctgcaggcctttatcgagacgatgaagcagaacatcggccaggggcagcaggaaaccatggccaaaatcgccggctcggtggatgttcttggcgagcagttgggcgccatgttcaagcagatggagcagggccgcgcgcagatggaccaggctactaaggttgcccaggtcgagctacaccgcggtactcgcgagatggttggtgatcttgagaagcaggtcaatgacctgttggatgcggtagctgagcagagcggctccatgcaggacaccgtcaagctgctcagcgctcagaccgagcaacatttgcagagcatgcaagctggcgcggagaagatgcgcgtcgcagcagaacgcttcgaaacggcgggcctaagcgtcaccaaggccggtgaagccactgctaacgtacttggggctatgcagggcaccggaaccgaactggtgggtgcctcgcgggaactcagcagcatcgtggccgactatcgcaacaaccgcgacgccctggctcaaaccctgagcgtgattcaaggtgtggttgccagcgcgcaaagcgaggcctccggacgcacccagtacctgctggatatgaagcagcagagcgagcggctgcaagcgctgaaccgtgaggttcatgactacctcgagcagatcagtggtgtgctgggcaagggcttcggggagttcaccgagggcgtcgaccgtagcctgcgacagaccctgggcagcctggatgccgaactgcacaaggccatgactagcctggccggtggcgtcgagggtgtgaaggaaagcctggaagacttcagcgacatcatggaaagcatccagaaaaagtga

SEQ ID NO: 329694 - DNA, 1368 bp, Pseudomonas aeruginosa
atgagttctgagtggcgtgtgacgaaaattgaggagatcgcggctccattttcaactgctttagcgaccggaccatttggatcggctatcagctcgaagtacttcgtcgattcaggtgttccagttattcgggggtccaatctaagcgcagatgcgtctacaaggctcattgacgcggatttggtttttgtctcgcaggagaaggcaagtgagtttcagcgatctgtggcgaggcgtggtgatcttgtctttacctgttgggggaccatcaaccaagtcggcctaatcgatggtcgctcgaaattcgaaagctatatcgtttcgaataagcagatgaagctaacggttgatcctgtcaaagcagatcatcgattcatctattacgtgttttccgggccggttaagcaaagtgagattctcgataatggcattggcagttcagtcccaggtttcaatcttgggcaattaaggcagcacgaagtcctgctgccaccacttgaggagcagaaaaggattgctgacttcttggagactctcgacgatcgtatcgtcctcctacgcgaaaccaacgccaccctggaagccatcgcccaggcgctgttcaaatcctggttcgtcgatttcgaccccgtgcgcgccaaggccgaaggccgccagccggaaggtatggacgccgccaccgccgctttgttccccgatagtttcgaagagtccgatctggggacggttccgaacggatggagggtgttgccctttactgaaactattacggtcattggcggcgggacgcccaagacatctattcctgaatattggcttggtgagatcccgtggttttcggtagttgacgctccgaatacatcagatgtttttgttctcgacactgagaagcatatatctatcgagggcttaaggaattcatctgccaaactgctacctataggaacaaccataatttctgcccgcggaactgtagggcggttggccttggttggtagtgaaatggcgatgaatcagtcttgctatggattgtgcggaaaatcaggtgactcttactttacgtactttagtacttgtcgtctggtcgtgacattaaaacagcgtgcgcatggctctgtcttcgatacgatcacacgcgatacgctggcgggagttgagcttacgtatccaactgtggccgtcattaatgcattcgaaaacttactttcgccactaatgggacgggtgaaaaataatatcaaacaaatcaagagccttactcagcttcgcgacacactattgcctcgcctagtctcgggtcaattgcgattacccgaggctgaagcattggttgcggttgatgcgtcagtacgcgttggcacgtactga

SEQ ID NO: 329695 - DNA, 1926 bp, Pseudomonas aeruginosa
atgagtgagttgaggcaggccctgctggccgccgttcccgtcgatggttcgagcattggtaatcaatcgctgctggaacgactgaaaaatcagtttgagcagctcactgaagaggcgtacctggaggctcgcgatgcgttgattgctcaaggcgtgctgctaaaggggcgtggccgtggtggttccgtcatgcgtgccgaagcgcaggagcagagcctggctgagcaagcgctgaggaaggcgcggcagcgtcaggaaacgctcgaattggaagaaccctccgagccgaaagccaagcccgctcgtgtgcccgccaagataaaggcggccaccggcatcgaggacatgaagaaaaccctctgggctgcggccgacaagctgcgtgccaacatggacgccgccgagtacaagcacatcgtcctcgggctgatcttcctcaagtacatctccgacagctttgccggcctgcgcgaacagctcacgcggcgcttcctcgacgaaaatgatgagtactacctgggcgatgacgacgccgaaatactcgccggcgagttggaagagcgcgattactacaaggccgagaacgtcttctgggtgcccgaggccgcgcgttgggaaggcctgcgggccgccgccaagcaggcggacattggcaagcgcatcgacgaggccttggccgccattgaggcggagaacccgagcctgaagaacatcctcaacaagcgctacgcccgcgcgcaactaccagacggcaagctcggcgagctggtcgacttggtcgccactatcggcttcggcgacgacgccagcaaggcccgcgacctgctcggccaggtctacgaatacttcctcggccagttcgccagcgccgaaggcaagaagggtgggcagttctataccccggccagcatcgtgaaaaccctggtggctgtgctcaacccgcaccacggcaaggtctacgacccctgctgcggcagcggcggcatgttcgtgcagtcggaaaagttcatcgaagcccacggcggcaagctgggcgacgtgtccatctacggccaagagtccaaccctaccacctggcgcctggcggcgatgaacctggccattcgcggcatcgatttcaacctcggcaaggagccggcggacaccttcgtgcgcaaccagcacccggatctgcgcgccgacttcatcctcgccaacccgccgttcaacatcagcgactggtggcacggcagcctggaaggcgacccgcgctgggtctacggcactccgccgcaaggcaacgccaactacgcctggttgcagcacatgctctaccagctcaagcccagcggtcgcgccggcatcgtgctggctaacggctccatgagttccagccagaatagcgaaggcgatatccgcaaagccatggtcgaggccgatgtggtggaagtgatggtcgcgctgcccggccagctgttcttcaacacccagattcctgcttgcctctggttcctggccaaggacaagcgccatgcgctgagcactggcggcatcgaccgcagcggccaggtgctctttatcgatgcccgcaagttgggcaccagcgtcagccgcgttcagatcgaactgaccgaggccgatatcgaacgcatcgccggcaccgttgcagcctggtgcggcgaggccctggatgaaggcgggcaggtcggcgagtacgccgatattcctggcttctgccgcagcgtgaccctggcggaaatcgccgagcatggacatgtgttgacaccgggccgctatgtcggcgccgaagaactggaagacgacgtcgaagcctttgccgagaagatgcagcggctgaccaaacagctgggcgagcagatggagaagggcgctgagctcgatcagttgatccggcagaagctgggggggctggggtatgagttctga

SEQ ID NO: 329696 - DNA, 1122 bp, Pseudomonas aeruginosa; identical to SEQ ID NO: 323336

SEQ ID NO: 329697 - DNA, 747 bp, Pseudomonas aeruginosa
atgcacaaggagccaccattatcaaaggtgttctatcgtcccatcgaagctgccatacggtgggctgggttgttgcggtacaaggcgtcgatcctcgcctcgatcgcatcaccgcggtgcctgccgcagacattggactgcccgcgatggaacgagtgtcggctgtactcggaacgcatctacgacggcatcctcaactcggaactgccctttggcaagaacgggatcacgctcaatgacccagagttggtgagttcacccgatctgaccatccgccacgtcgatctgaaacgctggatgcgcactcactatcctgagcatcgacccggattcctgttcagccgcagcgagcgcatggcgcatccctccatcaccctggaaacaggacaggcaatcctgctggaacggcaggctctgcaggccgcgctggaccatagccggcgtgagatgcgcaaacttcaagcgcaacacgaagccttgctcaagcagtccgcggtgctgttggcatccaagcagtgcgcgatcagtgatcgagcggagaccacgtacctgaacatcatcggtggcatgctgacgctgatgctgggtcaatccccatcgggtgtgccgtactccagcttcaagacgcaggaggcaatcgtcaccgcattgctcgcccactatggcggcaccatgggcatcacggagcgaaccttgaacggcaagttcgccaacgccaggaagaatgtgcgtagcgcagccgcgtga

SEQ ID NO: 329698 - DNA, 213 bp, Pseudomonas aeruginosa
atgtcgcaagtacctgtactgccaccgcacgagcgccgcatcctgcggctcgatgaagttgaagcgaagtccggcttcaaacgcgcccacatctacaacctgatgaagaagcgccagtttccacaggcgttgcgccttggcgtgcgcgcggtgggctgggattcggtcgagatcgatcagtggatcgccgaacgccttaacaaccgcacctga

SEQ ID NO: 329699 - DNA, 1665 bp, Pseudomonas aeruginosa
atggctgagatgacctcccaggacatggccggcaagctgcttgccgccgggttcgagcgcagtgggccatcggccacggctttgagtgaccccatcgccgacacgccgatggtcgtgacgctggaccagttgcggccctacgaccacgatccccgcaaaaagcgcaactcggcctacgatgaaatcaaggcctccatccgcgagcgcggcctggatgcggcgccagccatcacacgccgtcctggcgaggcgcactacatcatccgcaacggcggcaacaccaggctggcgatcctgcgcgaactctggacagaaacgaaggacgagcgcttcttccgcatatcgtgcctgttccggccgtggcctgcgcgcggggagatcgtcgcgctgaccgggcacctcgccgagaacgaactgcgtggcggcttgacgttcatcgagcgcgccctcggcgtcgagaaggcgcgcgagttctatgaagcggaaagcagcacgaccttgagccagtccgagctggcccgtcgcttgggcgccgacggcttccccgtgcagcagtcacacatcagccgcatggccgatgcggtgcgctacctgctgcctgcgatcccgaccgtgctgtatggtggcctcggtcgccaccaggtcgagcggctgtcggtcatgcgcaaggccagtgagcgcacgtgggagcactatgccaagggccgctccctgccgctcgacttcgacagtttcttccaagaagtgctgtcgcagttcgatacccaggccgacgagttctcgccgcagcgtgtgcaggacgagttgatcggtcagatgtccgagctgctgggcatcgactacgacgtgcttgccctggacctgaccgaatccgagagccgccaccgcgccctggtcagcgacccaaccccgccatcggcgccgccggcattgcctgagcctggggccatcgcacggccgccgattgaaccggcaccgtcccccgccacagcagcacattctgcaggccactctgccgccgcgccgacaaggccccaggacgatgcggccccgcgtgaggcatccgcagccacccctgcggcagcggctggcgatctacttgacgagcacatcgtctctccggcacccacgacgcagcggctccagtccatccagcgcatggtcgccgaccagttgggcgatgcgcttccgcccgacttctcggccaacgtgctgcagtcgattcccgtgcaggccggtggcctctatcccatctcggacatctggcatatcgacccaggtctcgacgcacccggccgcctgcgcgtccacatcgcgcagttcgcgcgcgagatcgcgggcgaggtcgacctggacgcgtgtgtcgaggatcgttcagatggcatcgggttcgcgtgtcgtgccccgacccaggtttcgtcgccgctcgcacgtgccgtgctcgcgctgctggtttccctggccggtcagcagtcggccgacgtgggcttggacggcgggcacttcgtcaccgacctgccagcgctgttgcacggccaaggccaacgtcatgccgacggggcccggcgattgagcgacaccgcgctggtcaagctgtttcgtctgctgcggctggcccggcgcctgctggatctggaagccggcgctctcggtcctgggacctga

SEQ ID NO: 329700 - DNA, 1251 bp, Pseudomonas aeruginosa
atggccgtggacgacgctgcaccacgagcaccacgccaaggcccggtcgccctcgctgatctgttcgacagcgcgctgaaagaccttgcaccgaaacctcgcccgcccgcgtccgcgccagctcccgcatccgcaacatctcctgtctccgcaaccggcgacggttttctgttcagcggcaatcggcacgagagcgtgccgcgacggctgttcctggaccgacgcctgacgccgctggaacgcaatgcctggcaagtctttcggatgatgctcaacgaggatggggtcacggcgtttccgacgtatgagcaacttcgcccgtggctcgcgtcaatgccctgcgccggacaggcctctcacgagaccgtggcacgggcgctgacgctgttgcgcctgactcgctggttgagtctcgtgcgccgcaggcgtgaccccaagaccgggcgcatcctcggcaacctctacgtcctgcacgatgagcccctgacgcctttcgaggcgatgcagctcgacccggactacttggagctcgtcagccaagccctgggccattcggccaaggccgtccaggtcgtgggcttgcacaccctcaaggaaatcgccgaagacccgttgttgtctggccgcacgttgccctcgcggctgcaggtccttgccgaacgcctcgcgagccagggcattgggtcgcaggagagttatccacagaaggatagggttcacgattccgaagaaggggcgccgagccttcttcggaattctgatgacccctcttcggattccgaagcagggccgaaacccgcgtcagacggcgctcttcggaatccgaagcaggaccgtactgtacgtagtagtcgtatgaatgaagtacgtactaccgcgcgtgagcgtgggcaggcgcgtgcgatgccaggagttcgcctgcctgatcgctttctcggcttgaaggaagagcagcaggccgccgccatcgtggcattgcagcaggtcgatgctccgctacgccaggccgtgctggacgaatgggcggatcgctgtcgcggcagcaccatccgcaacccggcaggctacctgttcggcatcatccagcgcgccatccgtggcgagttcaacgcctgggccaagcaagccgggtcagcaccgccacctgcccctgcacgagatgcaccgcctgaaccaccgcgcaatgtggttccacccgaggtggcccggcagcacattgaccggctgcgcgaccttctgcgcagtagctga

SEQ ID NO: 329701 - DNA, 264 bp, Pseudomonas aeruginosa
atgctggtgattcgattcaagggctggtcggtgaaactcgaccaccaggtgggcagcgctgggaaacatggcatctggtcgttccacggctcggagagcagctacgtaccggacatgcagacgattctccggcatgctgctattcggcctgcggagccgaaagaaggcggggaggtcgaggtattcatctgtgattcgcgtatgccgcaggacgaatggcgggcggtagggaccggcgtcgcggcttatgagtcggaccgctga

SEQ ID NO: 329702 - DNA, 330 bp, Pseudomonas aeruginosa
atgaagctgcaggcgtggcgaaagactgcaggtgcagcgatttccggcaggtgcagccgaaaggtgcaggtggtgcaggtgctggggttggtgttcgcgctggcgggatgcgccggccggcaggaagccgagccgcgcacggtgcgcgtagaagtgccggtggcggtgccgtgccgggtgccggcggtggaggtgccggcctgggcaaccgctgggctgaagaagagcgacgatatccagaccaaggtccgtgcgttgctcgccgaacgcttgcagaggatcggatacgaggcgcagctcctggctgcgaaccaggcctgccaggattag

SEQ ID NO: 329703 - DNA, 201 bp, Pseudomonas aeruginosa
gtggcggagcagggcaggcaggtcgccgcgctgcgtcaggctggtgagcagcgcgcccgggatgcagcccaggcgctggagcagggacgacagcaggccgccgagcggtattccgccgccaaccgtctgctgcgtgaccgcaccgacggcgaccagtgtgctgccgccgaggcggtcatcgacaaggaactggggctatga

SEQ ID NO: 329704 - DNA, 1125 bp, Pseudomonas aeruginosa
gtgcaggtggtgcgggccggcccagatgtacagggtgatcagcgcccagaagtggacgatggacagccggtaggagtagaccgggcgcccggcttgcttgggcacgaagtagtacatcatgccgaggaagccggtggtcaggaagaagcctacggcgttgtgcccgtaccaccactggaccatggcatcggtggcgccggagtacatcgagtaggacttgaaccagctcaccggcagcgacatgtggttgacgatgtgcagcatcgcggtggtcaggatgaacgagccgaagaaccagttgccgacatagatgtgcttgaccttgcgcttgatcagggtgccgaagaacaccaccgcgtaggcgacccagacgatcgccagccagatcgcgccggtgaactcgatctcggcgtattccttggtggtggtgttgcccagcggcaggctgaccagcaggatcaccgccaccgcctgccagccccagaaggtgaaggcggccagggtgtcggagaacagtcgcacctggcaggtacgctgcaccgtgtagtagctggtggcgaacagcgcgcagccgccgaaggcgaagatcaccaggttggtatgcagcggccgcaggcggccgaagctggtccagggcaggtcgaagttcatctggggccagaccagttgcgaggcgatcagtacgcccaaccccatgccgatcacgccccataccacggtcatgatggcgaactggcgaaccaccttgtagttgtaggcaggttccgtcgttgctttgttcatctgtacagtcccgaaagaaatgaacagccggcgaccgccgtcgaggggggagacggggcgccggccggagcctgcaatctaagggctggggcgggggtaaaacagcttcaggtcgatatggaatttgggtatcagatggggcgggggaaggcgttcgtgcagggcggcggcgcataccgggatgggggacgcgagccgatcatggcggatgaccgcgcgcggttatccgccctacgccggggtggctttccgtctgcggggcgtcatcccgccagcgactgggcgatccgcccgagtgtctccatcgccttctcctgccgcgcgctccacgggtgcccgtag

SEQ ID NO: 329705 - DNA, 1653 bp, Pseudomonas aeruginosa
atgacccgaacagctgaaagccttgcccatgaaaccctgactctcctcaagccgttctggccgcacgtcctgctttcggtactgctgggaatcgccggcggcctcagcgtcacggccctgctggccaccatcaacactgcaatgaatacagaaggcggcccgaacctgcacgtggccctgcttttcgccctcctgtgcgtcatgaccctggtctgctcgaccctgtcgaaactgctgacgaattatgttggccagcgcgtggtcgccaccctgcgtcgagacttggccgccaggattctcgccgcgccgatcgaacaactggaacgctatcgtgcgcatcgcctgatccctgtactgctcaacgacgtcggcgcactcagcgtcttcgctctgagcgtatcgcccatgctcatcgccttcactgtgaccatcggctgcctgagttacctggccttgctatcctggcagatcctgctggtcacggtgctgacagtggtgctcggtagtggcgcccaatatctggcccaccgtcgcggcacgcatagcctacaggcagctcgcgacggcgaggacgaactgcagaagcactaccaagccatttccgccggagccaaggaactgcgcatacagcgcgaacgccgcatcgatttgctggagaggcagatccatggcacgacagaagacatctgtaaggccaacgtacgctccgccgccatattcataagcgccgagaccttcggctcgatgctgttcttcgcggtgatcggaatggcgatcgccttcctggcactctggcccgctgccgaaagaaccgtgttgggaggattcgtgctggtcatgctgtacatgaaggctcccctggaacaactggtcatcaacattcccaacctgagtcgcgccaagatcgcactacgccgtatcggcgaactggcaggacagttctcctcctccgagccacaccttctggaaagcactcccgctccggcggacatgagcctggagcgaatcgaactgcgccaggtgcgctacgactacccacaatccgaaggcggtcagtctttccatctcggccctctcgacctgaccattcgccggggcgaaatcgtcttcgtcgtcggggagaacggctgcggcaaaaccacgttgatcaagctgctcctgggtctatacaccccacagcagggcgaaatccgtctgaacggcaagactgtggacgacgcgcgacgagacgactaccgccaattgttcgccaccgtcctcaccgactactacctgttcgacgaattgcttcgcggccgcaccgaattgccagcggaagcccacaaatacctggagcgcctagacatcgcacacaaggtgggtatccgcaatggcagcttcaccaccaccgacctctccactggtcaacgcaaacgcctagcgctgatcaacgcctggctggacgaccgcccagtgctggtattcgacgaatgggcggccgaccaggaccccgcattccgccgcgtgttctacaccgagttgctgcccgaactgaaacgccagggccgcacgctcatcgtcatatcccacgacgaccgttacttcgacatcgccgacaaattggtacatatgcacgccggccagattgtggaacccgcgctgcaccccgcctga

SEQ ID NO: 329706 - DNA, 2448 bp, Pseudomonas aeruginosa
atgccaacagcacatgcggtttcccctctggcaagggctttaggaagtttgggggcaaacaagatgtccaggcttggcctggcccttctgctggtgagcgcccaggcggtcgcgcaggagtacgaattcaacgttcccgcccagcggctcgacgcggcgcttcaggcgcttggccgccaggcgggtctgcaggtgctctacaacccgagcgacctgagtggtctgcgtagccgcagtgtcagcggcaaactcgaattggaacaggcgatcagccaactgctggatggggccaacggtatcggtttcgaactgcagggcaaaaccctgatcctgcgcctgcaggactcctcttcggtgatatccctggattcaatggtggtctcaggcctggcgctgaatcccactactgagaacagcggctcctatgcctcgcctgcggtgtcgatcggcaagggcaacaagagcatcaaggaaattccccaatcggtgacggtggtcacccagaaacggatgcaggaccagaacatgtccaccgtatccgatgtcctggccaacgcgccgggcgttacctccatcccgatgttcggtaccggcgagcagtactactctcgcggtttcttcatcgaaaacttccagtacgacggtgtacccctggagcgccaatcctatgcccgtggttcggacttcaccgggcagaccgcgatcttcgatcgggtagagattctccggggtgcgcaaggtctgctggagggcggcggcaatccctcgggctcggtcaacttcgtgcgcaagcgaccgacggcggagaaccaggtccgactgactgccaaggccggctcctgggatcactatggtacccaggccgatatctccggcccgatcgacgaacagggaagactgcgagggcgcctagttctcgactacgacaccaagaactcgttcgtcgaccacgtaggcgatgaccgccagaccatctatgccgcgctcgattacgatcttacggaagctacacgcctcggcttcggcttcagtcgcgagcggatcgacgccaacatcgatgtcaacggcttgcccaactataccgatggttcgatgccgcatttcagtcgctcgactttcctcggcggcgactggtcctactgggacaagatccaagagaccttctacttcgatattgcccaccagttcaacgaagactggtcgttgaatgccacggtggtcaatgcgcgcgagaagaacgactacaagtacctgctgatggccggcagcatcaatccggacaataccagtacgctgcggggagatgcctacgtcttcgacttcttttccgagcactggggcggggatgtctatgtcaatggtcgtaccaaggttgccgatcgccagctgaaccttacattcggggcgaactattcggacctggacagcagcgataccttcggctggaggcagcgctacgtacccaactgggatatcttcaactcgccggtcaataccaacaaaccatccgatgacgacatctattccgtcaggcgcagcgacgatggctacgcttcgatccagaaaggcgtctacggcatggggcaatactatctgaccgacgacctgtccgtagtgctcgggactcgcatttcgtcctaccagaaggcttatacctccaatgggccttggggttattcgaaggcggtggccaaggagtcggcgaaggccattccctatgccggcatcatctacgacctcaatccggagtggagtgcgtatgccagcttcaccaaaatcttccttccgcagtcggtgcgtaccgcgagcggcagcatcctgggaccgaaaagcgggaaaagcgtcgagaccggtctgaaaggcatcctcaacgatggccgcttgaatgccaccttcgcgctgttccgcatggaacaggacaacatcccgatccaggacgccaacctgcccgatgacgttcaggaagccaactgcggcggtacctgctaccacggcggcggcaaggctatcagccgcggcttcgagaccgagctcagcggcgagttgttcgacaacgtgcaggtatatgccgcctacaccctcaacctgctgcgttaccagggcgaggtgcccagcgaagcggatgacgttggcgccagcgtcaatacaccgaagcacatattccgctcctgggtcgactaccggttgccgggcaattggtcgcgggtatccgtcggcggcggcgtcaatgcacagagccggtcggccgggttcggctactacggacgggagcagagcggcttcgcggtatggaacagtcgcctggcctatcgcttcaccgaagagctgaccggtgcgatgaacgtcaacaacattttcgacaggcgctacttcaagtccgtcgactatggccacaactacttcggcgatccgcgcaacgtgctgttcacgcttacctatagttactga

SEQ ID NO: 329707 - DNA, 7023 bp, Pseudomonas aeruginosa
gtgctgttcggcgagcagcggctgagctatggcgaactcgacagccaggccaaccgcctggcccagcgcctggtggaactgggtgtgggtccggaggtgcgggtggccatcgccatgcgccgttcggcggagatcatggtggcgttcctggccgtactcaaggccggcggcgcctacgtgccgctggacatcgcctatccggccgagcgcctgcgctacatgctggaggattgcggcgcggcgctggtgctgacccagcgcgacgtgctcgagcgtctgccgttgcccgccggcctggcgagcctggcggtggacggtccgggcgaatggcaggatcgtccggagggtgcgccggaggtcgatctggccgaggaaaacctggcctacgtgatctacacctccggttcgaccggcctgcccaagggcgtggcggtatcccacggaccgctggtgtcgcatatccgtgcgaccggcgagcgctacgagacgagcccggcggactgcgagctgcatttcatgtcgttcgccttcgacggtgcccatgaaggctggatgcacccgctgatcaacggagcgcgggtgctggtgcgcgacgacagtatctggctgccggaggagacctatgcgcagatgcatcgtcacggtgtgaccatcggggtctttccgccggtgtacctgcagcaactggccgagcatgccgagcgtgacggcaacccgccgccggtgcgggtgtactgcttcggcggtgacgcggtgccgcaggccagctacgagctggcctgggaaagcctgcgcccggactacctgttcaacggctatggaccgaccgagacggtggtcacgcccttgttgtggaaggcgcgtccgcaggatccgtgcggtgcggcttacgcacctatcggtaccttgctgggacgtcgcagggcctatgtactgggcgcggacctggacctgctgccgctgggtctggccggtgagctctacctgggtggagaaggtgtggcgcggggttacctggaccggccggcgctgacggccgagcgtttcgtcccggatccgtacggcaacggcgagcgggtctatcgcagcggcgacctgacccgggcacgtgccgatgggctggtggactacctggggcgtgtcgaccaccaggtgaagatccggggtttccgcatcgagctgggtgagatcgaagcgcgcctgctggagcaggagtgcgtgcgcgaagcggtggttctggcccgcgatggcgcgagcggcaagcaactggtgggctacgtggtgccgcaggatgtcggtgcgctggaggacgagaagcgcggcgccctgcgtgaagtgctgaagtcggcgctcaaggcgagcctgccggaatacatggtgccgacccagtgggtgttcctggcggcgttgccgctgacgcccaacggcaagctggaccgcaaggcgctaccggcgccggacgccagtgacagccagcaacagtatgtggcgccggtgacggagctggagcgcacattggcagcgatctgggcggatgtgctgaagctggagcgggtcgggatggccgacaacttcttcgagctcggcggggattcgatcatctcgctgcaactggttagccgggcgcgccaggcgggaatccgctttactcccaaggatctgttccagtaccagacgatacagggactggcaggggctgtgcggttcgatacggggcagcttgtcgatcaggggcctgttctcggctcgatgccactgatgccgatccagcaacgtttcttcgaggaggatgtccccgagcgccatcactggaaccagtctttgctgctggaacccagcgaggcgctcgaccctcaggcgctgcagggggccctggcggcgctggtcgaacagcatgatgccctgcgcttgcgttacatgcctggcgaaaggggctggcaggcggagttcctgccgcaggaggcgagcgaagagttgttgtgggaacgtacgctggatgctacggaagaactggaggaggtgatcgaggcctgccagcgcagcctggatttgcgtcatggccccctgttgcgggcgttgcttgcggccctgccggacggcagccagcgactgctgctggtcgtacaccacctggtggtggatggggtgtcctggcggatattgctggaagacctgcagcaggcctatcaggcattggcgaccggagagatgccgcacctgccggcgaagaccagttcattcaaggtctgggccgagcgtgtgcaggaacatgcccgggggccggcactcaaatcggagcttgcctactggcaggcacagcttcagggcttgtcggataacctgccctgcgataaccctcatgggagacgtcagctgaagcatgccgcctacgttggcgggcggctggagcgagagtggacccgccgtctgttgcagcaggctccggcggcctatcgcacgcagatcaatgatctgctgttgacggccctggcccgggtggtctgccgctggagcggtgaggccgaggtgctggtgcgtctcgaaggacatggtcgcgaagatcttttcgaggatatcgacctgagccgtaccgttggctggttcaccagcctctacccattgcggctcagtccacgaatcgatctggtcgactcgatcaagaccatcaaggagcagatacgggccgtgccgaacaagggtatcggctatggcctgctgcgctatctcggcgacgatgaagctcggacaacgctcgggtgcctgccggagggccaattggtcttcaactatctaggccagttcgacggcagcttcgaccaggagcaggggttgttcgtgcccgcgcgggagggaagcggtgccgagcgtagcgacgaggcagttctcgacggcctgctggctctgagcgggcaggtctatgacggcgaattgagtctgcaatggacgttcagtcgggaagtgttcgaagaagccaccatccagcggcttgcggacgaatacttgtcagaactccaggcattggttgcgcactgttgcgaagagcggaatcgtgggctgacgccttcggactttcctctggcggatatcgaccaggcacgcctggatagcctgccattgcccgtcggctcgatcgccgacctctacccgttgtctcccatgcagcagggtatgttgttccactctttgtacgaagagggcgctggcgattacatcaaccagatgcaggtggaagtggaagggctggacgtcgcccgcttccgcctggcctgggaagcgaccctggaggcgcacgatgtcctgcgcagcggcttcgtctgggagggagagctgggtcggccgttgcaggtggtgcacaaaagcgtttcgcttccttttgccgagcacgactggcgcgggcgcaccgacctcgagtcagccctggaggacctggcagaccaggagcggctgcggacgttcgatttgcaacaggcgccgctcctgcgttgggtctcggtacgagtggccgaccaccggcatcgcctgatctacaccaatcaccacatcctgatggatggctggagcggctccctgctgctcggcgaagtacttgaacgctactcggggcgtcagcctgctcctcaggccggccggtaccgcgactacatcgcctggctacagcgacaggaccgggaaagcgccgagcgctactggaaagagcggctcgccgagctcgatgcgccaactcgcctggcacaggctatacgttgcgaactgttgccagcgagcggacatggccatttcgtccacgccttcgatccggtttccacccagcatttcgaggcatttgcccgcacccagcgggtgaccttgaacaccttggtgcaatcggcctggctgttgctgttgcagcgttacaccgggcaggacacggtgtgtttcggcgccacggtggcggggcgaccgatggagttgcccggcatcgagcaacaggtgggattgttcatcaatactctgccggtgatcgctagcccgagggcggacctgagtgttgtcgattggatcagccaggtgcaggactgcaacctgggcctgcgcgagtatgagcatacgccgctgtacgaagtgcagcgctgggccgggcagggcggcgagggattgttcgacagcctgctggtattcgagaactatccggtatcggaggcactggagcagggagccccgtcggggctgcgcttcggtgaggtagagaaccgggagcagacgaactatccgctgaccttgtcggtcggtctgggggagaccctccaggtacagtacagctacgatcgccgttatctggattccgagacggttgagcggttggcgtcgcactggcgcaacttgctagaggctatgtgccgggcgccggaaatccgccttggcgaactgcggatgttggacgaggacgaacggcagcgttacctggcgcttggctgcgacatggatgcggaatatcctcgcggtctttgcctgcatacactgttcgaggcgcaggcagggcgcttcgcggacgcgcctgcggtgctcttcgacggtgagctactgacctacggtgaactcaaccgacgcgccaaccgcctcgcgcactacctgctcgctgagggagtggggacagagagtctggtgggaatcgccatggagcgcgggccggacatgcttgtcggcctactggcggtgctcaaggcaggtgccgcctatgtgcccctggatcccgactatcctcgcgagcggcttgcctacatgctggaagacagcggcgtacggctggtactgagccagtcctggctgtcccctgggttgcccttggcgaagggcgtggccgccctcgacctggatcggactggctggctggatggttatccctcgaatgacccgctgcgtcccctggctgcggaaaacctggcctatgtgatctacacgtcaggctcgaccggcaggccgaaaggtgtccagatcgaacatcgttcgctgctcaacttcctcgccagcatggcgcgggagccggggtgcacctcttccgaccggctgctgcaattgacctctctgtccttcgatatcgctggcctggagctatacctgggcctgacccgcggtgcctgtatcgtcatgcctaaggctcagcagagcaaggatccgcaggcgctgctggccctcatcgaagaggctgaggtcagcattatccaggcgacgccggcgacttggaggatgctgctgaacggcgctccggagcgcgccgaggtcctgcgtggccgcaaggcgctctgtggtggtgaggcgctgggcggaggcctggcacgacgtctgctcgcgcacgtggactccttatggaacgtctacggtcccaccgagaccaccatctggtcgtcctgccagcgtgtgctcgacagcgaggtcatccatcttggcggacccatcggcaacaccgcgctacacgtcctggatgacgaactcgaacccatgccggcggggggcggcggtgaactgctgatcggcgggggcggtctggccaggggctatttcgcacgtcccgccctgacagcagaacgcttcgtgcccaacccgttcgatgcacacggcggacgcctctaccgcaccggagatttggccagccgccgctccgatggcgttatcgactatctcggccgtgtcgaccatcaggtgaagatccgcgggttccgcatcgaactgggcgagatcgaggcgcgcctgcaggagcagggcctcgtgcgcgaggctgtggtgctggcacaggagggagcccatggcgcgcaactggttggctacgtagtgcccatcacgtcagaactggcaccagattggcgcgatgtgctgaggaatgcactgaagggctgcctgccggaatacatggtgcctgcgcaattggtggcgctcgaacggttgccgctgacgcccaacggcaagatcgaccgcaaggccttgccgaagccggatgccggcgcacagacgcaggcatacgagcccccgcagaccgaagcggaaaaagacctggcgcggctctggagagaggtactcggtgtcgagcgggtcggtttgcacgacaacttcttcgagcttggcggcgattcgatcctggccgtccaactggtggggagaatcaggctgtggcgtgctccgggcttggagatcagcctgcgcgacctgatgcacaagccaaccatcgccgcgttgctggagtcgcggtcacatgcagggagtccgctggtgagcttgaacagggggcttgagcaggtgccgccgttgttctgcattcacggaatctttggcacggccttcgactacctgccgttggcgcggcggatggagggacgacgcacggttatcggtatccagtcgccgttgctctccggttatcgccccgaaggcctggcgatgcgggagctggccaggcagtacgccggactgatcaggcaaagacaacctcagggtccttacagcctgatgggctggtcgctgggcgcagtcatcagcctcttcgtggcgcgggaactggagaagcagggcgaggaggtcgtcttcctcggcctcgcggatgcaccgctggtcgacggcaggggaagaagcgatcaggagctgggccaggtcctcgatgagttcttggagatattcctggggacgcgctcccggcttccggccgaggcgtcggtggatgcctctgtcgtagccagtcatatccgtgctcaggtggcggagaaacctgttcgccatggcctcacggcggatgagctgattggtgtgttcgaaaccgtggcgaccttgcgcaagctctgctgggatgccgccgaactcgcagggctcgttgccggggttcattgctggtgggtcgaagggcgcgaggcggaggcgcggcagttccaggcgcagatgtctttcaccttggcgcgagaaaccttctgccaggccgagcacgacacgatcatgcaggacgagcgcctgttgcaggagcttgacgaggctagcgagcggtctttgaagcaacgtacgtag

SEQ ID NO: 329708 - DNA, 228 bp, Pseudomonas aeruginosa
atgttcgaacagcgctgccagaggaagctccagacccaaccgacgacggatgcgggaaagcacctgagtcaccagcagggaatgaccaccgagctcgaagaagttgtcgtcgcgaccgacccgctccaccttgagcacctcggcccagatttccgcgagactcctttccagcccttcgtgcggtgcgacgaaatgggactgatcctggctgtcctcgattggaggtaa

SEQ ID NO: 329709 - DNA, 1110 bp, Pseudomonas aeruginosa
gtggttgttgtcggtggcctggccaataggcagataggtgccgccagtgctttgcgtgtctacccggaagaaagagacgtcgtccgagcattcggccggcccataggcattcatcaaccctacctgcggataacgcgtcagccagcggcgagccaattcgggggagagggcttcgccggtggagagcatccagcgcaatccaggcaaggtttcctggggatcatcgagcacctcctgaatcagcgagggcaccagttccagcacagtgatgccacgctcgcggacgcgccgcgagagtgccagcggatcgtgggcaatatcgttcggcaggatgtccacctgcgcaccgaagagcggtgccgcgaggaactgccagaccgagatatcgaaactctgcgaagcggtctgggcgattacgtcgttctcgtccagggccagcaacggcaccttgctcaactgattgttgagcatgcctgcctgttccaccatcacccccttgggatggccggtggagccggaggtatagatcacataggcaaggccattggtcggcgcgacaatgcctggccgttgttcgcacttgccttgcccctgctgggcggcccagtcgagaagcgccggccgcgattcctccggcaattcctcgagcaactcgcgagccagggcctggtggccctcgccaacgaccagggcaggcacacctccaagtttcagcagatttaccagccggctccgcggcaaggatggatcgagcggcagataggctgctcccgccttgaaggtgccgatcatcatcgccatcagttccaacccacgatcggccagcaaggccaccgcgcgatcgcgttctacaccggcctcgagcaggccccaggcaactcggttggcctctgcgtcgagctggcggtaggaccaggcgcggtcgcggcaggtcgcggctactcgctcgcccagacgatccacctgcgcctcgaacagacgtacatagccttcatcgaaaggataggcgcggcgccccgcggggctgggcaacagcgctgcgtactcttcttccggcaccagcggcagctcggtgaaagcgtcgtggaagccatcaccgatcgccagtag

SEQ ID NO: 329710 - DNA, 372 bp, Pseudomonas aeruginosa
atgctcgtgttcacgcaactcgagattctgctggaacaggccctgcagccattcgcgaaccgtcagccgcgagtcgccaccgggcaggcggacccgcagggcgatactgttgatgaacagcccgacggtattctgcatttccggtcgactgaccggccgcccggcgacggtaacaccgaacagtacgtcgtgcaggccgctgtagcgacgcagcacgagcgcccaagccgcctgggccagggtattgacggtgagatgatgctgttgggccagttcgcgcaagcgacgcccttgttccggcgccaggttagcgtagcggtcgccaatgatggaggtcccgccctgccggtgtactggtcggtcgaacggtaa

SEQ ID NO: 329711 - DNA, 2634 bp, Pseudomonas aeruginosa
atggaaggatgcgcgcaatgcatcgtgtcgtcgggccacctcgcgccaggctgcctcgaagcgcggcatatcgatgtcgctgtcgatgacatagcgatcctgcatgaaatagatgccagagttcggctccatcagggtgtgcagcagcaaaccttcctgcatcggagtcagtggatagatgtcttcgatttccccataaggcagggacagcgcatcgagttgcgcctgatccaatccggcaagagggaagtcggacggcgtcactcctccggaagcaggatcgcaacaatgctcgatcaatccgttcagatcggccgcgaaggcgtcgacgagctcctgcaccgtctcgtcggagaacatatcggggctgaaggtccaagtcaggccgagttgcccctgatagacctgcccttcgacagagagccagtttgcaagcggcgcacgttcgtcctgtgcactgccggaacgctccgcggctggcacccacagggcctcgtcggcgaactgatggtcgaactggccgagataattgaaggttatgcgtggttgcggcgaccgagccagaacttcaccgcaagcagggtctgccaggtagcgcaacaggccatagccgatccctcggtcgggaatcgaacgcagctgttccttgacgctcttgatcgcggcgccaggctcgacagccggatgcaggtgcaccggatagagactggtgaaccaaccaacggtgcggctcagatccagctcgccccccaattcctcgcgcccgtgtccctccagttgcaaaagcagactttcgtgaccgctccagttacaaaccacacgtgccagggcggtcagcagcaagtcgatgacctgggtgcgataggctgccggggcctcctggagcagacgtcgggtagcctcggcatcgagggtcagggccagcttgcgggcgtggcggttctccaaaggagcatgaggattctggcaaggcaggtcggctggcgcgccatccaggtgtgtctgccagaacgccagttcgtcatgccgcttccctgccacttcacgcaaatgtgcgctccaggcctggtaggagtgtgtgcgcaataccgcaggcgagtcagagctctggtagaactgctgcaagtcttccagcagaatccgccaggacacaccgtccacgaccaggtgatgaatcaccagcaagagccgctgctcaccttcgggaagctcgaccagaagagcgcgcagcagaggaccggtgctcagatcgaggctacgctgggcttcctcgcacaacgcggagagttcttcgaccgaagcgacctggcgccgccagagcgggctttcaacctcaccggaatattcctgccgccagcacccttcttcctcatggaagcgcaggcgcaaggcatcatgctggcgaatcagagcgagcaaggcctgctccagacgttcgccatcgacagactcgcgagccttcaaaagcaacgattggttccagtgcctgcgattcgggatgtccaacccgaagaaccagtgctggactggtgtcaaggccacctccccgcctaccggtgcctgaattaccgcgctgtcgcaaggcaccgccacctgcgccaacccacggatggtctggtgttggaacaggtctctcggactcaacccgaaaccggcctgacgggcccgaccgaccatctggatagagacgatcgagtctccaccgagggcgaagaaattatcgtcaagccctacccgctcgatgcccagcagcgcttcccagatttccgccagacagcgttccgccggactgcgcggcatgctgtaaaccacctgcccaagggtcgcatcaggcctgggcagcgccttgcgatccaatttaccgttggggctcagcggcatgcgctccagagcgacccactgcatcggcaccatgtattccggcaggctctcagccagatgggcagagagcatcccgcgccattcgtcgggctcggcagccagcgtcacatagccgaccagttgcttgccatccaccaccagcacagccgcctcgcgaacagcgtggtgctccagcaggcgcgtctcgatctcacccagctcgatgcgcaatccacgcagcttgacctgatgatcgatacgtccggcatattcgatgacgccatccgctcgataacgtgcgaggtctcccgtacgatacatgcgctcgcccgtggcgaacggatcggcgaggaagcgttcggcgctcaacgcggggcgaagatggtagccccgcgcaaggccggcgccagccaggtacagctcacccagcgcccccactggcaccggctccagggcatcgtcgagaacgtagcaacgcagattggcgatcggacgtccgataggaaccgtatcgcgcccctcctcccgacagtcccaatgggtcacgtcgatagccgcctcggtcgggccgtagaggttgtacaggcgtactccaggcaattcggcgagcaccctttgctgcgcatccaccggcagagcctcgccactacagacaatccgcttgaggctggtgcaagcggaaaccccaggcgcctgcaggaaggcctgcagcatggacggcacaaagtgcaacgtactgatgctctcccgaccgatcagatccatcaaccgtga

SEQ ID NO: 329712 - DNA, 627 bp, Pseudomonas aeruginosa
atgatcgcctggctgagccagtaccaggcgtgcgccgaccatgaggggccagaagaactcccatacggatacgtcgaaactgaacggcgtcttctgcattaccgcatcgctaccatccagttggtaggcatcctgcatccagcaaagccggttggtcagcgccgaatgtcggttgccggcgcccttgggtcgtccggtcgagccagaggtgtagatcacgtaggcgagattctctccggtgacggccacctccggatcggacgcatcgaagccctccagccgctcgctgtcggccgccagcaccagcggctgcacctccgccgacaccggcaggccatccagcagatgcgcctgggtcagcaacagccggacaccactgtcctccagcatgtaggaaagacgctcctgcggatactcaggatccaacggcacgtaggcgccgccggccttgagaattcccatcagggcgatcaccagttccacagagcgctccatcgcaacgcctatcaacgattccgccccgacaccccgcgctatcagggcatgcgccagacgattggcgcggcggttcagctcgccataactgaggcgctgttcaccgaacaccagcgccggcgcctccggtga

SEQ ID NO: 329713 - DNA, 306 bp, Pseudomonas aeruginosa
atggcgctggaccagactggcgaaggctgcctcgaaagccgcacgatccagcgggccgctgaggcggaccgccatcggcaggttataggccgcaccctgagggtcgagctgccagaggaaccacatgcgccgctgggcataggaaagctcgtcgcgatcctcgctgacgacgccatcgggaatgggaagcagggaaaactccaccccttcctcgcgcaggccatcgagaaacaggggacgcttgtcctgtggcagctcgatgaaacggcgggcgagtttcaaggcgatttcggcattcatctctaa

SEQ ID NO: 329714 - DNA, 954 bp, Pseudomonas aeruginosa
atgagccttgccgaaacactggcacggaaccttcgcgacctgacccatcacgccggcctagccaaggtccccagctatcgtctgttcgacttggtattgaagcgacggagccccctcagcccatcgctggttcgtttcaccttcggcggcccggaaatcgctcgggtgcgcacgctggcgcccgatcagcgagtaaagctgctgtttcccgccgctgacggcagcctgccgcaacttccagccacgggcgactggcgcagacaggtgcgcagcctcgaggcgcgccgccgcccgcccatgcgcacctataccatccgcgccctgcgccgcgaagccggagaagtggacattgacttcgtcctgcatggtgagaccggtcccgcctcccgctgggccgctcacgctcgtcccggcgagcgcctggtaatgtcggcgccagatggagagtattccggcgatcctgggggctacgaatggcgtccgccgaaggatatccgccatatcctgctgattggcgatgaaaccgccctgccagccatcgcaggaatactcgaggaactcgccgaccgcgaccagcggccgacggtgcaggccttcatcgagattccccgggaatcggaccgactggacctacggtgtgcgccggaaacccaactcaactggctggcccgcgacgtggcgaaacacgagcacggccaggaaatgctccgcgcagcaagcgaactggccactctaccggaagccggcaagccacagcgcgtcagcgaagtggatatcgacaggcaggtactctgggaactggccaagccaacgaacggagagttctatgcctgggttgccggtgaatcggcagcagtgatggctattcgccgccactggaccggggagttgggtctggatcgccgcactgcaagcttcatgggttactggcgccagggcaaggcatcgacctga

SEQ ID NO: 329715 - DNA, 351 bp, Pseudomonas aeruginosa
atgggcaagagagtggttgtattgctatggctgctattcacatcaatgtcagcccatgccatcgataaaaaagtcaacaatgtcaccatcatgcgcgtgggcttcatggtggacgcgaattctccgggtggaggctggggcttcatcgtcagcaagccgggagcggcggattgcggctttggcctgatgcgcctgccgccgatgaataccgatgccggcaaggccatgctgtcgctgatgctgagcgcccaggccacacagaacaaactgccggagatcgcctattcggccagcgccacggtgaacgcggtatgccagatcacttcggcgcagatagacagcggcgcctga

SEQ ID NO: 329716 - DNA, 1257 bp, Pseudomonas aeruginosa
atgcttaccgacaccgcactgcgcaatctcaagcccaaagccaagccctacaaggcttccgatcgtgatgggatgtacgtgacggtatcgccaggcggtaccgtcacctttcgctatgattaccgtctcaatggacgccgggaaacgctgactatcgggcggtatggcccagcaggtatttcgctggccatggctcgcgaaaagcttctggatgccaagcgaatggttgcccagggcatatccccttccttggagaagcaacgagccaagcgccgtctgaccgctgccaaatcgtttggtgacatgctgaaaagttggctggctgatgcgcgtatggccgacagcacgcggtccatgcgcaagagcatcatcgaccgcgacatcctgccggtcttcgagaaccggctcctgaccgaaatcacccctgacgatctacgcgcgctctgtgccaaggtgaagggccgtggtgcgccggccacggccgtccacattcgcgacatcgtgaagcaagtttttgcgttcgcaatcctgcatggcgagaaggtcgagaatccggccgacgatgtgaaggctgcgtcgatcgccaccttcgtgccaaaggatcgagcgctgaccccgaccgagattcgcctggcttttcaccagttggagtcgattgctgcatatcccaccattcggctggccttgcgcctggtgcttctgaccctggtgcgaaagagcgagctgattgaggcgacctggaatgaagtggattttgagaacgccacctggacgatctccaaacagcggatgaagggacgtaatccccatgtggtttacctgtcgcgccaggctctggacatcttcgtggcgctgcacacttgtgctgctggctcgaggttcgtgctgccctcgcgctatgacatccaccgctgcatgtcacacgccaccttgaaccggatcacccaactcattgcatcacgtgctaaggaagcggggctgccgttggagccgttcacggttcacgacctgcgcaggactggctccacgctcctcaacgaagtgggcttcaatggtgactggatcgagaagtgcttggcgcatgaggacgggcgttcctcgcgctcggtctacaacaaggccgagtacgctgagcaacgccgccacatgctgcaagagtgggccgatatggttgatgcctggggcgatggtcggactcatgtgcctaagctgctgcccgacaatgtgaccgtgccggtgttgagtgccgccgtttag

SEQ ID NO: 329717 - DNA, 276 bp, Pseudomonas aeruginosa
atggcccgtccctcacatccgaagaaagaggtcgaagaagcgctcaagcatgccgaagggcaggggtggcgcatcgaagttggcggcagtcacgcctggggacggatctactgtccctacaacgacgaggagtgtcgttgcggcgagttctgcatcaccagcgtgtggagcacgccgaagagccctggtaaccacgcacgcgccttgcgacgcgtcgtggataactgcaccacgcaccgtaagccgcaagaggctgccgacggcgcagaggagtag

SEQ ID NO: 329718 - DNA, 525 bp, Pseudomonas aeruginosa
atggaatacaccttcaccctgaaataccaactcgccgatgatgaccggaacccggatgtgctggtcgaacgccttggcgaagctggttgcgacgatgccctggttggcatcggtcagccggggcggctggcgctggagttcattcgcgaggcggagagcgcagatgcggctgtgcgtagcgcactggctgatgtgcgtagtgccgtgccctcggccaggctgatcgaggtcgccccggatctggtcggtcttaccgatgtggctgaaatgctcggggtatcgcggcagaacatgcgcaagctgatgctggccaacccgggcagcttcccggcgccggtgcacgagggcagtgcgtcgatctggcacctggctgacgtgctgacctggttgcagaccagaggcagttactcgctggccagggatgttctggaggtggcgcgagtggctttgcaggtcaatctggccaaggaaagtcggcgtctaccacgttcgacttctgaggaactgggggctcttgttggttga

SEQ ID NO: 329719 - DNA, 792 bp, Pseudomonas aeruginosa
atgacaacaattttcgaactagttaaagacccgtacgagcgcaaggctcgcgtggttccaggtcttctcgtggcgttgccattgctcgtccctttgctatgcgtatacggagcaaaacatcctgttctcacaggtgttatcggtttacttggcggctgcggcgccatttacgcgcttgcgagcgtggcacgtgggcgcggcaaaaagcttgaagagcttttagtcaaaaaatggggcggcatgcctacaaccatagccctgcggcatcgcgacaattttctcgatagcgtcagcaagcagaggtaccactctgcgatcacaactaaactgggtattgacataccaacggcagaagaagaatcagcgaaccctgacaaagcggacgacatctacatcggagcaaccaagcgacttcgcgaactcacgcgtaccaataagcaactcctactgaaagagaatattgcctacggattccaccgcaatatgctggcgatgaagcccgtcggcatcctgtcgagcctcctgggaatcctctacggattgctgattgcaaaggttctgcagataacgcctccccatttttaccccgtgcattttgcagacccggggctcgccgctggcttgacgctgcttatttcgatggcgttactcgcggcctggctgctgtatttcgatcagagtgccgtcagacgtatggggtttgtgtatgcggaacgtctgtttgagtgcctgccgtcgctgacttcttcagcatcacgaaagaaggcaccaaaatcgacacctacagaatga

SEQ ID NO: 329720 - DNA, 912 bp, Pseudomonas aeruginosa
atggtgcctatgaaaaaagcctcgaatactaatgtcgaaccctctgagcccaagagcttgagctggggcctggagagcaggttgcaattcatcgattttcgtctgcgctgggagcgacgcatcaatcggatggatctcaccgagcatttcgccatatcggttcctcaggcatcactggacattgccaagtacacagagctggcgccgaacaatctgacctatgaccgtcgctccaagacctacaccgccacctcacactttcaaccgctttaccaacgaagctcggctcaacgctatctagcggaactactggcaaccaagatgggcgttgtcgaaccgagagccagctttattggctcagcccccgaaacagattgggctccatctccctggcgctcgatcaatgaagagaccgtagaagcagtggtccgggctattcgccagcaggaagctattcgagtgagctaccaatccatgacgtctctagacgaatcaatccgactgctttcgccgcacgctctcggcaatgatggttttcgctggcacgtgcgagcgtattgccataagcgtcagcgcttcagcgattttgtcctcgctcgaattttgcacatcgaaggtttcgaaccgagtcatgtggactccagccaggatgctcattggcacacagtgctgacgctagtacttgcaccgcatcccgatttgcctgcagccaaaaaacgagtactggaactggattacggcatggaagaagggcaggtcaagcttccctgccgtcaagcgtttctgtactacacgctaaggcgtttgggcttgcataccaaagaagcgccagaccctctcgcgcaacagatcacgctgagaaatcgtgatgaaatccaaccctacatcgatgctttgacagcccaggcctga

SEQ ID NO: 329721 - DNA, 1194 bp, Pseudomonas aeruginosa
atgcctacaaccatcacattctttcccgtagacaacggggatatggccctcatcaagtttggcgatgtggacgcaaccaccctgctgatcgacataaacattaggcaggacgctgaagacccggatggggtgtcgcgtgatgtcgccaaggatctgcgagatcgtttgaagcgggatgagaacggaaggccttatgtcgatgcattcttgctgagccacccggatcacgatcattgccgggggctgacgcggcatttctatctgggaccgctggacaagtacccggatgacaaaaaggacgataaggacaagaaaatcgtgattcgcgaggtgtggtcgtcccccatcgtgtttcgacgcgccagcaagacgcacaacctgagtgacgatgccaaggcattcaacacggaggcgcgtcggcgggtgcaggttaatcgcgataaaaatttcgctgtcgggagcggtgatcgtattcagatcatgggcgaggacatcgacggaaaaactgacgatctcactccgattgtgcgaagagtggacacgagcttctcgtcgatcaatggcaagagttctgcgtacttctccgcgtttgttctggcgcccctggatgcccaagacgacgaggaagaggagcagaatctgatcaaaaaccagtcaagcgtgatcttgaacatcacattggccgctgacgcaaatacgccagatggcgcgaagtttcttacaggtggcgatgctgaggtgttcatctggaaccgccaatggcagcgccataaggctgaagccgatgtgcttgagtacgacattatgcaggcgccgcatcattgctcttggcattcgctgtccgaagacagctggtctacccatcgcgaaaaggccaggctcgacgccgacgctcgtaaggcgctttcgcagactcgtgacggtgccgtcatcgttgctagttgtaagcctattgcagacgatgacagtgatcctccctgcatccgtgcaaagcgtgagtacgtcgcaatcgtgggtgaagcaaaaggcgagttttactgcacgggcgaatacccgagcgaaaaatctgttgagcctctcgtgtttaccgtcactactcagggggtgcagcctccctcgaagaaagaagctggatcgaaggccgcagccgtgatcacctctgcgcgtacccccatgccgcacggcgcatcgtga

SEQ ID NO: 329722 - DNA, 2253 bp, Pseudomonas aeruginosa
atggacaggattgcggatgcactgcatcagcttcagcggcatcgaggcctggtccgcgttggggagccaagtgtaagcggtgaattaacgcagatcgaagtcgatgttgctgttgagctgccgagccggtctcggcgctatggtgtatctgagaccggcgtacgttcggtcgagacatgcattcttgtcttcgacaatgactggcctctatccgcgcccaagcctttcttgcgtacggactttccactcagcttgccgcacatcaacccccatcgcgaaggcgagttggtctcaccttgcctgttcgagggggcattggacgagctgctgcatcggtttggtctggacgcgattatcgatcaattaatcgattggctgcacaaggctgcagctggggcgttgctgaatcttgagcaggggtgggagccgacgcgtcgagacagttgtccttcgaccattgtattcagcgccgagaaggtcgcgtccgctgctcccgctgacggctcgattttgatcgttcccgtaagctatgtgacgattgatgatggcctatacgccatcatcaataccgaactgaccgcccaagtcgatcctgtgttctatcaggacgctcacaacgacaagctgggtaaatggggaaacggtcatacggcggccttcatcgcacgcgctccaacaaccgacggccttcatcatgtgatcgaacgttatcaaccggagacggttttcgatctcgcgacgttgcttgatcgagctgcggagctcggcattgatcgcgacgctttggccaaaagtctggatggtttttacggacactcgatcctggatatgcaacaggactcgcgcggctgggtgcatggtttgtacgcggttgtgattctgactgtgcaaaggcctgtatcgcttgtgggctcaccagggcgaagtattgaggtactgccctatgtggtgcgctatgagctcaacgctcaatcgctcctagagcgaagcgccacggttcacccagcctttcatgcgcatgcattgtctcccgaactgttggcaaggacgtccggcattccagcggcgaccacatctcagccgctggtcatactcggctgcggaagtgtagggtcgaaaatcgcgatgcatctggggcgagccggtttcggttcaatggctttcgtcgacaacgaatccatgtcgcctcacaacgcagcacggcatgcactcattgagcgggcatcagtgctggtcccacctcgaaaggcttctctgatgaagacggcctttgaggagctgtcacatcttcaatcgcgcgcgttcgacgccgacgcagtgagcctactagtcgatccagcacagttcgccacagctgttccgcaggatgcagcgcttatcgtggacgcaacagcttcacttaaggtgttagccgcagaaacacagtcgacagcgctggatcaatcacctgctcggctggtacggatcacgatgtacggtcagggccgctgtgttgcagttttgctcgaaggacttggccgcgacggtcgggttgatgacctcacggcatttttgttcgagtgctgccgatttgtgccggaactgcgtgcgtcgattgccggtgatacttctgagccgacgcgtatctttgtgggtgacaactgccgctcactgaccatgccaatgtctgatgccgtcgtttcgcggtctgcttcactggctgggctgcaactggaacgctggctcattgacgggcttcctaaggaagcgactctttgcgctgggatctcggatgccgaaggcctcggcatagcatggactcgcaccagccttggtcctaccactgtgctcgatgtggcggacgatggtggttggagcattcggattctgcacccggtcgcgcaagcgatccatgctgatgcgctgcgctggggtgcgttggaaacaggcggtgccttggtcggccgcatctcgtttgaaaatcgaaccatcatcattgcggggcttgttgacgcaccgccagacagcgttcgagaggccgcacgctttgttttgggcaccgatgggcttgttcaaaatttgcgtactgcgaattcgacctctttgggatatctcgcctttatcggcacttggcacagccacccgaaaggcggtgctcattcgggtatagaccgacatacgttgcgcggcatcgccgaggatgctggtggtcttcctgctgtgtcgttggtatggactccgacaggactcacatgtgcggtggatcgctggtag

SEQ ID NO: 329723 - DNA, 1071 bp, Pseudomonas aeruginosa
atggctgactactttgagatcgattttcttggcgtcgaaacagcgaagagcggggatgcaatcacgctgcgctactcggtaaatggcaccgaaggcatacacgtggttgacggtgggtatctggataccggtgatcagatcgttgaacacctgaaaacctactatggcacaacggttatcgatcacgtgatcctcacgcatccggatcgcgatcacgccaatgggcttcgaaaagtcttggagcaatgtacggtcaggaatctctggatcaataggccgtggatatatgcagagcagttgatagatcgattcgagacctatgagtcagtggaagcgctgagacggaaattacgttctgtctacgatgccactgcagcgcttgagggcattgcgcttgagaagggaatccccattcatgccccgcttcaggggcagagcatcggccccttcacggtgatggcaccgacgctaggtcgctacatggacttaatcgtggattccacgaagacacctgaggctgttgaagagggtgccatggatagtgctctgagcagcatttttcgggcagttaaggctgcgacttcctacatcaaatccttgtggggcgacgagtattttccctctgcgccaactagtcgtgaaaatgaaatgagtgtagtccagtcagctgtcctgaatggtcatcgcgtcatgcttactggcgacgccgggcgtgaagcgctgcaagaggtgattgactacgcaccttttgcgggacttacgttgcccggcattcggtatttccaggtgccgcatcatggcgggcgacacaatgtttcgactgagattctggatcagttggttggcccaaggttggacagcatgccagacaaacatacctggaatgccatatgcagctccgctaaggcggatgaggatcatccacggaagtcggtgattcgcgctgtactgcacaggggtgggcactgggcagcaaccgaaagcaagaacatacgcatcggggcgggtattacccgtgatggctgggtatcaattccccaagcagcgtatcccgaagagcaagaaagttga

SEQ ID NO: 329724 - DNA, 1326 bp, Pseudomonas aeruginosa
atgaaaccacggtctttcattcgtgcgcttggtgactgctgggacatcgtaagtaccatctggtctcgatacgaaacccgcaccctgaccgagcgtgaactgctgcatatcgtacgcccgttcactatcggtaccgaccagcctgagcaggttgcagtcaagcgcatggtcgatatcggtatcctttcggagttctcccgcggtgggcagggctattcgctgaacctgcagatcgtgccctttgtgcagtttttgcttgatgagcagagtctgggcttgatcgaggagatcagtgctaacgccaacaggctcgaggggcaccttgaagagctggctgcggccctgctcagcggtcggcgcacgggttttttcgccaagtcccaggagatgcagtcgcgctttcagacgttgcgccgcatggtcgaatctaatacgcgtgctatctacgcgctggtggacaaggccaagcgctcggatcagagccagccgctggccgagcgttatgagcaggtgatcaaggcctgggacgagtacgtaacaccggcactacagatgaagagcatgggtgggccgttcgatctttcgctcatgcgcatcaagcgcactctgcaggagtggcagcaggacccggcgctgcacctgctgagcatggatgatgcacgctacgaaatcgacagcatcctgtttcgcatgctcgattttcgcgagagtctcaatcattcgatcgagaacatggcgagccatctggcgccgctggtgcgccaggcgcaaattaatgcgcgcattgcccagggagctgcgctgggccttcaggaccttggccaccacaacagccaattggcgcgcagcgacactctggccctgccgccgcgcaagcgacgcgtccataagcctgaccaggattcgctgcaggcctggtgggcgcagctcaaggagctacagtcgattgctcccgacgcgatcctcgtgcgcgtcccctcggccgcagcgctcgaggcccgcgagcggcgggagatgtccccgcagatgctcgtgtggctgaagagtcagcagcctgtcgaggatgtcgtcgcgaagctgatggttcagtaccccaaggcccggcctgactcggtgttgcgcgtgctgacccgcttgacgatggaagataagactgcgcctttcatccaacgccacgacgacatgcagcactaccgattcgaggacctcgaaatccgtatgaaccggcgctcatacaatgccgaaccggccccgcggcgattggccccgatcgccttctacagccattacgaacccttgcctacccgggaacccgccgatggatga

SEQ ID NO: 329725 - DNA, 750 bp, Pseudomonas aeruginosa
atggatgatctgcctcaggacgagtctgccgaggatctcgagctgtcgctcgaagatcgagtgcgcgatgccagacactatgcccagcgcctcgagcgagagctccgactgttctcccggattgtcgaggcgctcgaggcggggcgctttatcagcagcaccgaccggatcaaggaatatcgcgagctgtcgcgctttcaggacacctacgaggtgttgttgcgcatgatggggcatgagcttcgacatcacaccgcagggttttactatctgcagccgcgcgagatgagtcaggcccagttgccccagcgcgagcggatggcagccgcggcgatcttctccctgatcgagcacctgtgcgacaagggattgccgatcgaatcgatgatcacccatgaagaacccatcctcctcgacgacctgggagcgatgttcagccagtgccacgaccggctcacccgccttggactgggcagtgtggagtcattcatcgacaacggcattcgccggctggtcgacgtcggggtgatgaatgaacgccgtctctcccaagacaaggtcgcctacaccttgggcctgccagcctacttctacctcgacatctgccggaacctggctgaacagcatcagcaacagctcgaggcccaagagcgcggggaaggctattcctacagcgaccgctcggtggacgagctggcagacgactttctgaatacccagcccaacgaagacgacgagaccccggagtaa

SEQ ID NO: 329726 - DNA, 2925 bp, Pseudomonas aeruginosa
atgcgcagcaaagcactcaagacccgctggggcgtgcgccattacgccatggtcaactctggcaaccacatcatgtcggtttttcccatggacgggccgctgagcatctgcggacacaacaacttgggtaagacccaggcgctgcaaagcatgcagtttctcttcttcacccaccttgcacacatgcacttcggcgcccaccaggccaacaccagccgcgcattcttctttcccagcgaccacagctacctactgatggaggtgctgacccccgacggcgtgttcatcgtcggtgctcacggcaagggtcctaccgctggcaacgaatatgaactgttcgtggctaaaggtgagctggacatgggtgatttcgtcgacccgatcaaccgcatacgcccctacaaggagctgttccggcactggtacgaacggggcatcgaggtgcgtaacctgacccgcgaacagatgcgccaaatgctctacggagagagcgggcgggtcaaaggtggtgactgggatgtgaccatagtgcctctggcgaacgccaacgaaaggcgctaccaggtgttccgccagatctatcgcaacctgctcactcagcagctactcaagagccgcgagatcaaggagctcatcctcaacgtcttcagtgaaaagctgagcaatgccaatttgaacttcctcgaggtgcgcgagcgcgcgttccagcgcttccgtcttgccgagcgggaagtggagcgacttgcgtaccgtcgcgaggacatcctcgccctcggcaaggaatacgacgaatacgccgcactttcagaagaaggcggctggttggcgcgcgagctgagggtaaacctgaccctggcggtggagcgggcaccgctatgcattgaggagctcaacgcgcttcacaaggaagaaatcgaaaagcgcgccaagctcaacgaacagcttaatagccgcatgcaagaacgcgatcgagcggtcgagcagcgcatcaccttggccggccggctgacccgcctcgacgagttacgtgagcgcaatgcgatgacctgccgcgagacggtcgagaaatcgattcgcacactggcagcccagcacgccacgctcagcgatcagttgcgccaggctgacatctacgatgtggcaaccgtcagtagcagactgcgccacactgaacatgaaattctcaagctcaacaagcgactggagcaggtccgcaatggagacggactgttggatacccaaggctttgtcgatgcggaaaaggccgagctgtcgcggctgcttcgcagcgacatgttcagccttgaggccgcagcactgactgaaatccacccgggcagtttcaacaattgggtacgcacccaactcatgtcgaagggagggctgctcaatttacagggtttcgagttagacctgaccgatctgcctccaatggattttcatggcgatgatccggcacagctacaacagtcaatcgccatgtaccaagaggacctggccaagcttcaggggcaactcgaggttgcccagaaccagacgctcaagcgtaacgaattggagtcgctggcaaagcagctgagcaaccagcagggctacctgcaggaactgaccgagctcgcggctctggaaaccaccgagaccgctgatcgccatgtgctcgagggtgtaatgatgtgtctcgcccagatcgacgaatggctgcaagggcaccaggagcggatcgaggaggccacccgggccatcagtgttatcgagcagaagctcaacgatgccctcgagcaggcccgccagctcaaggtcgtgcagcaacaccgccagatccagaacagtcctttcattctcgctgaagggccgaacgaggacttcgagcgcgatctcaccgggtacaacttcggtgacacgttgaatcggctggagtggatcagcaacgcgctcgaccgcatatccctgaccatgaagaactaccagcactcgatcgttggcgacctacctgatcttgcccgacatgcgaatctgagcgatctggtgcagcatgcacgcgagcggttggaaacgctgccgcagatgcgtgagatgctcaagcgctaccatcaggagggcattgcccagctctcgggagctctgcgcgatctttccgagaactacgtgacgctggaacacgagatatcgctattcaaccgccggatcaatgcgcgcaaagtctcgaaccttcgtggcttcaggttagatctgaagaggaacgaaccgatacttgaagccattaatatcctgtcctcatatatcgcccaggctgacgaaaacgagaccgacctgttcggtcagcaaggcgggggcgcatcccaggccgggttggtgcgcgctatggatcggctatctcgtctggttgaagatggtcgtgacggtaccctcgagctcggcgacctattcgacatcggattcaccgtggaagaggtcaacggcaaggtcgttgtctgcaacacgctcgacgagctggcttctaatggctcgaccatgacgctcaaacctttgttgtatttctctctgattcgccacctgaccgaccgtggcgctcgggtcgaaccgttcctgccgttctacttggacgagattgcttcggttgatccgaacaaccagcgcactatcttggcattcagcgagaaccttggtttcacccctgtgtttgcatccgtcgacccgactaccacggtgcgctattgcatcaatatcagtgagtgtatcaacgccgacaatcgtatctatgtgacccaggcggactggcagcacttcgatcaccacgaagacgtcaagctggggcaggctccgcagcgaagtgagagagacgagaagtccgaggtagacgtcgagcagttcagtgatagcttgcaggtggcgaccgcgaaagctgacacggtagctcagtcatga

SEQ ID NO: 329727 - DNA, 897 bp, Pseudomonas aeruginosa
atgagtcggtcgagagagctggaaatactacagcggttgcgcaaagggcctgtccctgtgcgcagttggccgaaggcacttgaggctgtgctcgatcagctcagagtctccggcatcgtcacggtgggccgtgtgcccgggcgaatatcgccgcatgtgattgtgcagcatgccgattctctggggcagcgtattgcccggttgcagccgcccaaggatttggaaagctgttcggtgcgcggcttgaacattatccacggcggctcgagcaagcgcggggggcgactgccctcgctcatgatcagttgtagcgctggcgaggccgtcaggtgggaggatgcacagggtaatatcctgcagtgggaatcgccttcaccggcgtttctgaagttgctatggcacgacgagcgcagacccgacgcgacccccaagccaaccggccatgtggtgctagtggaaaaccgtgacaccctgctgcatctgccgacacggctgccggcagtattgagcggcgcgctggtggctcattacgaaggttggctatctgagcggctgctggcgctgttggtgtcttgggagagcgcgaagatctggctgctgcctgaccttgatccagttggcctagccaacgcccggcgcatagccgaagccttgccctgtgcgggtatgctggtaccacttctgagtcccgaaatagtcgatcagtatggagacgaaaccatctggcgggagagttttgccctggtcccggcgctgcttccttggctagagcagcaggacccacccctgcgggatctgttcgccctgctcaaatgcaagggtagaggtgttgagcaggagtattgcctggcagtgccctcgaccgtacttgaacccatagaactaagaaggggctga

SEQ ID NO: 329728 - DNA, 597 bp, Pseudomonas aeruginosa
atgttcgatttcgaatgtgtagctaacgcggttcgagccatggagctggacagcgtgcccgccgacctttcccgctgtcgtcagctggagctcaaagcaaagcacctgggttaccaaaactggaaccatctgctggacactttgaagaacgagcccgcaaaagatcgccttcaaaaaagcacaatgcgcctgatgcagcggatttgccagatgcgcttgccgctccgcaacaaagcttacgttcaactgactgtcctgcctggtggcggagttggccattacagctactggataggctgggacaagaaaggcaatgaggttcgcgtaccacgcccaattgacggcagggagcaggcgcgaaaactccgcaagctccagccctcaccagtttttgctattgaaacagaaagagagtttatagcttggaatcacttgtggttttcgactgccatagtgccaccagacttagccagagaatttttcccggcgctgttcaacaagaagcaccttgtggcaaaaaatccccccattgatctcatcaaagcaaagtacgaggcaatgggtgacatctacgctaacaacctcgaagaaaactaa

SEQ ID NO: 329729 - DNA, 510 bp, Pseudomonas aeruginosa
atgtcgcaactttccttttcctcgttcgatgccatgctgctggtgcgtgatgcacaggggcgctacctgcctgcgtctgcagatcagatcctgaatatggcgcgtcaggtgatcgaccagaaataccagcgtggagcgttgttcacgtcgccggagctggtcaaggactacctgcgcaccaaactggctggttttgagcacgaggtgtttgcggcgctattcctcgacagccagcatcggctgcttgagtatgtggagttgtttcgcggcaccatcgatgcggcggcggtgtatccacgggaagtagtgaaggaggcactgcgcgtcaacgcagcggcggtgattttctcgcacaaccatccgagcggaaatccagagcccagccaggcagataaggtgctgacccagcgcctcaaggaggccctggcgctggtggatgtgcgcacgctggatcacatcatcgtgggtggcgaggcaactgcatcattcgcagagcaggggctgctctga

SEQ ID NO: 329730 - DNA, 810 bp, Pseudomonas aeruginosa
atgtgtaccgcaccgacctcatccccgcagcaaacctgcgagaacatcctgatcgacgataaaacctacaacgtcgagcacaacatcctgcctagcgaaaacgccatcattgattgcctgctcgcgcgacgcctcgagctgaatgaggcctacggtgagctgtacgacaaactgcacctgcatcctcgggcactcccggccttcctgagcctcttgctcagtaccgcagcattctgggccccagataagatcgccagggctcgtggtcaacgggacgaacttgtcgacaccaaccagcagattgcgcagaaagccgaggaactggcccaactgctggagcaccgctccaacctgcacaatacatcgggtttcagcagtgacactcactaccatgtctgtaacgtaattgaggatgcagcgaaggatcactacctctttaacgcctatgttaaggagcgcctgaacaccgttcgcaaccagttcgaatggaagtactggcccaccgtggaacagttcgttcgagcgctgggcagagatgccaacggcgccgaactggaggccacagatccgctgactcgagccgcaaccgcagccacacgccactcgcctgcggacttcttcaaggcactcttcgccgccatcgaggagaacagcgagcagagcggtggtccgctacccgaaggcttcaggctcagcgatgccacgctggcctcgctggtgaactgcgcattggatctgggccctgacgaactgaaagacagcgcctacgtgaagcgactgcgacaacgcgaacgcaatagcgacaagtga

SEQ ID NO: 329731 - DNA, 831 bp, Pseudomonas aeruginosa
atgcaacttgcttccagcttctcttaccgctccccggtactgcgctcggaatctcccttgtcggatgaacagattcgcgacgtggccccgtccatcttcgcggaggccccgcacgaaagccgctccgagcgctacagctacatcccgaccgccaccgtgttgcaggagctgcgcggcgaaggcttcgagcccttcatggtgtgccagacccgtgtgcgccgggatgaccggcgcgacttcaccaagcacatgatccggctgcgccacgccagccagatcgacgcccggggcgaggccaacgaaatcatcctgctgaactcgcacgatggcaccagcagctaccagatgctcgccggcatgttccgcttcgtctgccagaacggtctggtctgcggcgacaccgtggcggacgtgcgcgtgccgcacaagggcgacgtggccggccaggtgatcgagggcgcctacgaggtgctgcacggcttcgagcaggcgcagcagtcccgcgaggccatgcaggccgtcaccctggacggcggcgaggcggaagtttttgcccatgctgcgttggcgctcaagtacgacgaccccgacaagcccgcaccaatcaccgaacggcaggtgctggccccgcgtcgtctcgacgacaaccgcgccgacctgtggagcgtgttcaaccgcacccaggaaaacctcattcgtggcggcctgcttggtcgcggcggcaatgggcgccgccagcgtacccgtcctgtgcaaggcatcgaccaggacctgcgactgaaccgcgccctgtggctgctggccgatggcctgcgccagttgaaagcctga

SEQ ID NO: 329732 - DNA, 2034 bp, Pseudomonas aeruginosa
atgaacgccattaaccaaaccgaagccatcaccctgtccacactggaagtggccgacccgaccaagaacctgatcctgctgtcgctcgcgcagctcctgccgcgccgctccaagcgcaacgcgcgcaccacgccgcgcctgtccatcgacgagctggccgcgagcatttcccgcatcggcctgctgcaaaaccttgtcgtcatcctcgccgccgatggcaagcattacgaggtggtggccggcgaccgccgcctgacggccttgaagctgctggcgaagaagaagcgcatcgccgccgacttcgaggtgccgtgcctgctggtgcccgacgcctcggcccgcaccgtcagcctcgcggagaacctgctgcgcgagcagatgcacccggccgaccagttcgaggccttcgccgcgctggtcaaggagggccgccccgtcgaggatatcgccgccgacttcggcgtcactccgctggtggtgcagcgccgcctgaaactggcgaacgtctcgccacgcctgatggcggactaccgggctggcagcgtcaccctggagcaactgatggcactgaccatcaccgatgactacgccgcccaggaggccgcgttcttcgacgcgccggagtggcaacgtggcgcggcggcgctccgggctcgcctgacggagcgcgaaatcgatgtgcgtcatccgctggtgggcttcgtcgggctggaggcttacacggcggcgggcggcggcatccgccgcgacctgtttgccgacgacgacaatggcacctacctcaccgatgccgcactgctggagacgctggtgcgcggcaagctggaggcactggccgaggatgtgcgcaccgagggctgggcctgggtggaagccgtgccgcagttcagctacgtggatcggcaggccttccagagcgcgccgcgcacccgccgcgaaccgactgcccgcgaggcgcggcgtatcgcctcgctgcaagcgcggctggaaaaggtcgatgccgagctggaggatgcctacgacgccgaggatgaagacaaggtgcaggccttggagcagcggcgcgaacaggtagccgccgagctgcacgccgtggctgagtccttgcacggctacaccacggaggtgctcagcgtggccggcaccgtggtcaccatcgaccgcagcggcgaggcggtgatccatcgcgggctgttgcgcgaggccgaggccaacgcgctacgtaccctggagcggctgcgccaaggcatcagcgatagcgaaggcgcgaacgacgaggcgggcgagggcatcgagcaacccagggcagtgatcctgtccgaccggctggcccagcgtttgagcgcccatcgcacggcggcgctgcagatcgaggtggcccggcacccgcaggtcgcgctggcagccttggcgcatggcatggtgcaaaccgccctgcaggtcaattatcacggcgacagcatgccgctcggtgtgcgcctgatcgtgcgggaccgactcgacagccttgccccggactggccggagtcgcccgctaccgtggcgctgcatgagctgcatcaggcctggggcgagaagctgccgcaagacggtgccgagctgtacgccgcgttgctggcgatgccccaggacgagttggtgcagttgctcgcggtgtgcgtggcggtgactgtcgacgtggttacaccccgcgctgcccagcatcaacccggagccgagctagcgcaagccgtgggactggacatgaccgcatggtggaagccgaccgccgagggttacttcaagcacgtcgccaaggcggtgatcctggaggcggtgggcgagttcgcgccgaagcacgtcaatcgactggccaagctcaagaaagccgacattgccagcgaggccgagcggctggtcgaaggcactggctggatgccggcggtattcacggcagagcagggtgtggggctacaggtcgcccaggaagtggcggaggagccggaaccgacagaggctgacgacgaggcacacggccacacgttggccgcctga

SEQ ID NO: 329733 - DNA, 198 bp, Pseudomonas aeruginosa
gtgaacctcactgacgcgacgatagcgctactgctcgcagccaagattcatggcacggatgcagcggtgcaagccaccgccaagcgttgctcccagcgcctcgcccgcagcaaacgcgacctcatgtttactgtcgtaaacagtcgcgagcccctgaagctggtcgagcacatcgctcagcatctggatctggactag

SEQ ID NO: 329734 - DNA, 1278 bp, Pseudomonas aeruginosa
atgaatcagtcctataccccgccaagcaccctctcgggcatttcccgcctcgccaagaaaatccgcaatgaacgcggcatcgcgtacaaagaagcgcttgagattgccgcacgcatagccggcttcgaaaactacgctcatgcaaaacgccaacttgctaaccgagctttgccttcgcagctggtaccgctgtatctgactgtttactggaaggacctagacaatagatcatctgccgggcgttgcactgcccttgtccaccttcccaaggaagccctcacgacccttcctacattgaaggccagaggctactggatgctgggaggcttccagctagaaagtccggatcatcttcaggccgtgacagatagccattcttacgggcacgcgcagaaacggctcactgacgcagtgcgtgatttgcagttctgcacagcaaccggtctaaagccaatccggaaagtcgccgataaacgccgaatcgaattcctgcaggatctacctgagttggatcaccagtctaactggatctccccatcaggaagctggttgaccctggatgagccctatcaccctcgctcaagcgagaaaggcactaaacgcggtgactggctcgccaagcacgggcttggaatgactgcacctgcctggactgggctatacgctcctggggcatcgatcccttacttgatctctgactcccctgagctgctgcagcggatcaccatgatcgttgagggcttgcctccgcttccccaaatcgactgggacacccactctggtagttacttgtctgatttccacagcccgctgcgaattgctagcggaaagccgtaccgctcccgtccccagccttcgtacggaatgcgtgcgggtgcactaccttatggcggccgtccaggacaggcgtctgagtggcgcccagcaactgccatgtcgcttcagcaacaccgggatctaggatttattctccgcggcttttcttggtcaaatctctcaagtcgcgtgctggataagctcagcagcacgatatctacgctggatgactgggcgaattatgagcactccgacaaggccagtgatcagatcgacaggctgtactacggatccgacagggccaagtatgcgacgctggacgacttgctgaagggcgtgaatggcgcacgtgcgctgatcctctctggctaccaagagtgccgcccgcgccgagatattatgaaggtgctcgatcttgtggagcgtgatgcaagcaaacgcgctcagaagcaggtcgcctaa

SEQ ID NO: 329735 - DNA, 312 bp, Pseudomonas aeruginosa
atggccaacatcggcaccttcaccgctcagaacgacggtttcaccggcacagttcgcaccctgacgctcaacgtcaaggtcaagttcgtccccaacgacaggagcagcgagaacgccccgaactaccgcatccaggcggccggcggctacgacatcggcgcggcctggaagaaagtcagccaggccgagcggccctacctgtccgtgaccctcgacgatccgtcgtttccggcgacgatctacgcccggctgatcgaggaggaggacggtacgcacaacctgatctggtcgcgcagcaagcaggtggcctga

SEQ ID NO: 329736 - DNA, 1782 bp, Pseudomonas aeruginosa
atgacacttctccataatgaccccaccacccaacttgcattttccgtctacgagaacaagggagttttcgcggttcttctagggtcaggcctgtcacgctctgcagaaattccgacaggctgggaaatcacgttggatctggttcgtcgcgtcgcaaccgcccagggcatcgagaaccagtccgattgggcaacttggtaccgtgagaagacgggccaagaacctaactattctgccttgctggaagaaatcgcgaattctccagacgagcggagggcgatactgcaccggtatatcgagccagacgagcaggaccgcgaagagggccgaaaagtccctaccaaggcacatcacgcgatagcgcagttggttcgctccggtcacgtccgcgtaatcgtcacgaccaactttgaccggctcatggaaaatgctcttcgggagcaagggattgagcccactgtggtgtcctctgcagatgttctggctggtgcagagccgctgacgcacagccgatgctacttgcttaaactgcatggcgactacaaggatgcccgcatcctgaacaccgatcaggaactgagcgcttacccggaaagctacgacaagttgctggaccgcatctttgatgagcatggtctgatcatctgcggctggtcgggtgaatgggatcatgcactacgggccgcattcctccgtgcaccgaacagacgctatcccgtgtattgggcagcccggggtgcgttgggctcgggagccagcgagctggccatccatcgaagtgccaaggcgataccaatctcaggcgcggacgagtttttccaaacacttcaacagcgagtggaaacgcttgatcaaagccagcgccagaatccgctgagcatcgaattgctggtcaatagtacgaagcgctacctagcgaagccagaacatcgcattcaactggacgagttgctttcgcaggaggcggagcggttgatgacgcagttcgatgggggccaattcgccccccatggccagtgggatcaggaagaattccgatcacgggtacggcgatacgaagcgctggcagaacccttgacgcgcatggctggcgtgctcggaagatggggggatggttctgaactaaccacagtcctcgacatcgtccgggggttgtatctgcaggccgagaagattggaaacggcctgtcggcttggctcggcctgcgatcttacccagccgtcttgatattcacggcctacggagtgggcctaacccgctcacagcggtggcagacacttcacgaactgctggttgcgccctggcctcgggaatatcgcgacccgaaacgagtggtatccacactgttcctgaatgaatggaaaggggcgagaagtgagatctggaaagagttggaaggacttgaccgccgcaagactcccctgagcgatcatctgctcgaagtgatgacgaactggcgatccagctttgccggtgtatcggctgagtttgaactggtatttgaacgatttgaactgctcgctgctcttgcctatctggaggaaaacagcgaagcaagtttggaacaagcctttgccgatacgcctcacggactattcgcccgtatgcccgtagggcgtgttggatggcatgactcctcagccaatgcactgattctggagcttcaatcggaagcgacgatcacagctttgctggacgcaggctttgcacggaacagccgccgtttcttggagctctccatcgagagtttcaagcgctacatgaacaagatgtcctggtag

SEQ ID NO: 329737 - DNA, 282 bp, Pseudomonas aeruginosa
atgacagcgaaaccctcgttggcaacggcactacggacggtcaggaaggcgcgtggcctgagccaggaagccttctccgaggtgtccagccgcacctacatgagctcgctggaacgcgagctgaaaagcccgacgctgaacaagctggccgagctatgtgaggtgatggaaatccatccgatgacgcttcttgcactggcatattctggaagtgatcgaaagaagctggaacagctactatcgacggttagggatgagcttgaactgctggcaacggactga

SEQ ID NO: 329738 - DNA, 351 bp, Pseudomonas aeruginosa
atgaccctgccgctcatcactgagacggagcgcaagcaactgctggcgaacagccgcgcccgggcggtggaccaggccgtcgatccgttgccggtggtgcgcctgttcacccccgatgcgcatgcgacctggcttctggctgctctcgatccggtcgacggagacacggcctatggtctgtgcgatgtggggattggcatgcccgcgctgggcaccgtgaagctgtccgagctggcgtccatcgtcgggccgctcaagtgtccggtcatgcgcgacctgtacttccggccgacacgcacattgtcggagtacatgcggctggcgcagctcaacggctcgatcatggactga

SEQ ID NO: 329739 - DNA, 798 bp, Pseudomonas aeruginosa
atggccgatcacgacgccgagcagtggtatcccaccgcggcttatctctacgtcctgcagctggatgacctagccctggcctgggagtacctgcgccggaacccggagtaccgccgcgactggcgggttcgccagcgccggcccgaggcggcgcaacgctgggggctgcgcctgctggaagacccgcgcctggacgcgcgtgacgcgcatccggtctggtttcccgaccacccggcgctgatccacctgtatcccgatgtcgaccccatgcccgactccgtggtgttcgacttctggcgcctcccaggcagcaaaagtctggtccatgatggccggcgcctactgctgacaacacgttggccgggctactgtctgcggctgaccgttgcgcccggcctggagcagggcatggcctatgtccacgccgtccgggcgtgcgccaggccctgcgcacgttactgcgctctcgcggccgagctggacaggctggctgtcgctgccgatgtcgcgccgctcgcggcggcccggtgccgacccaacccagctgcactgctggagctgcataccctccaagcgctcgacgccaccctggcgggggcatccttgcgcgaggtggctgcggggctgttcggcccggcggcggtggccgacgcctggcacgccgatagcggtctgcgctcgaaggtgcgtcgcctggtgcggcgtggccgaacgctgatgctcggtggctatcgccgcctggcacagatcgacgggcgcggggagggccgttcgacgcagcccatagaacgaccctga

SEQ ID NO: 329740 - DNA, 297 bp, Pseudomonas aeruginosa
atgcgacctgctcccgtgcgacctgctgccgcccacgccaagccccagcaacccgccgccactgcccagccgcagcgctacctgaccaacgacgaggcggccacctacctgcgcctgtcgccacgcacgctggagaagcagcgcgtgatcggcggcggcccgcgctttcgcaagttcggccggcgcgtcatgtacgctgtcgcggatctcgatgcctgggccgaccagcacagcttcgaggccacctccgatcctgagtatgccgagcagcactcggccgacagccgtgcgcgctaa

SEQ ID NO: 329741 - DNA, 834 bp, Pseudomonas aeruginosa
atgtccagctcggcgccggagcgggagcagctcgacctgttccgcgccttgccgggcgacatggcaccgcgcgacagccaggatctgatggcctacccgttcttctcgctgaccaagtcgcggcgcaccacgccgatcgatttccagtccggcggcgtcaccgtgcgcgtggagggtacgcgggaacacggtattgccacgatctgggatgccgacgtgctgatctgggcggccagccagatcgtcgcggcgcgcgacgcgggcctgcccccgtcgcgcctgatgcgcgccacgccctacgagatcctgcgcttcatcgggcggggagtgtcgctgcgcgactaccagcgcctcaaggccgccctggatcgcctgcaatcgaccacggtggccacctccatccgcgagaccagcggccggcgcctgcatcgtttctcctggatcaacgagtggaaggaactggccgacgcccgcggcaccccgcagggcatcgagctgatcctgccggactggttctacgcgggcgtgctggacgccgccctggtgctgaccatcgacccggcgtatttccggctcaccggcggcatcgagcgctggctgtaccgcctagtgcgcaagcatggcggcaaacagccggacggctggcagttcgacttccgtcacctgcaccgcaagtcgggcagcacggccaggctctgcgacttcgcctgcgacctgcgcgccctggcggcgcgtcagtcgctgcccggctacgtgctcggcatcgagcgcataccggaggccagtgtggagctgctgacgttccggcccgtgtcgcccacggcacggggataa

SEQ ID NO: 329742 - DNA, 639 bp, Pseudomonas aeruginosa
atgatcatcgccttgctcaaccagaagggcggtgtcggcaagaccacactcgccacccatatcgccggcgaactggcgctgcgcggtcagcatgtcgtcctgctggatgccgacccacagggttcatcgctggactggacgcaacggcgtacccagcagggtttgcccaggctgttcagcgccgtgggcctcgcccgcgaaaccctgcatcaggaagcgcccgaactagcccgtcgcgccgatcatgtgatcatcgacggaccaccgcgcatcgccgccctggcgcgctccgcgttgctggcggccgagcgcgtgctgatcccggtgcagcccagcccttacgacctgtgggccagcgccgagatggtcgcgctgatccgcgaggcgcaggtgttccggccgcaactggcggcggccttcgtcatcaaccggcgcgtcagcaccaccatcattggccgcgaggcacgccaggcattggccgaccaaccactgccggcgctgcgcgcggaggtgcgtcagcgcatcgtattcgccgacagcgtggccgccgggcgactcgctcgtgagacggcaccggacagtgccgcagcgcgggagatcactgcgctggtcgacgaactgctgcggtggacggcatga

SEQ ID NO: 329743 - DNA, 252 bp, Pseudomonas aeruginosa
atgacccgcgaacgcgacaagcgcactgccatcggcgcgcgcccgccggcgaatccgcacgccgaggcgtgggttcgccagggtgacgccggcggtctgcagaaaggtgacctctacaccgcgcgcctgaccctcgacatcacgcccgccatgcgcgcccgcatcaaggtctcggcgttcacccagggagtcactgtcgccgatttgctgcgcgcgctactggagcgcgaattcctggagaagtccccatga

SEQ ID NO: 329744 - DNA, 534 bp, Pseudomonas aeruginosa
atgaacgcccagctttcggaggcctcggctgcgccgccgccatcgctcgcagtgctcgccggccagaccgacgccgcgcagctgacccgcgtttcgctcacctatgtggagcagcgcatcaagctctacctgcgtttcggcgagccggcacgcattacccggctggatcactggcgacgtgtcgcggtgttcctgccgggtgccgtcttctgccgcactcgctggcaggccaacgactacggcacgatccgctggcaactcatggtgatgcaggcctgcacgccactggacgccgtgcagcgcatccccggcgtgctgcctggcgcgtgcctgctgctgcatgccgaaggcgataacacggtgcgcgccgtgctccaacgcatcgacgccatcgaggcgctgggcatcgcacccgccgccgcatcgcccgcgtactggcgcatgctgggcaaccggctcgcggcacgctcgcaactgcccgactacaccgtcgagcggcacgccgcctggctcgccgggagagcattgccatga

SEQ ID NO: 329745 - DNA, 588 bp, Pseudomonas aeruginosa
atgaccctcgtttccacgacagatcccgcgccgcgtcctcgctcgcgcctgcgcgctcgcatcgtcctggctatgctgtccgccgttggactggccgcgctggcctgggcgtccttcgtgcagccgctgccgcgcctgatctacaacccgtccgacagcattccggtcggctggtatcgcattgaaccgctccagttccaggacggctcgctgttacgtccgttgtccgtgggcagcatcgtcctggtccggttgcctgccgacgctaccgcactcgctgcgcagcgcggctacctgccggcgcacatccctctgctcaagcgcgtgggcgcggttgcgccgcaacacgtctgcatcgtcgccggccaggcacgtatcgacggcgtgccggtggccaccgcgttgcctgccgatcgcctgggccggccgctgccatcctggcggcattgccgactgctgatcgagggcgagttgttcctgctgagcgtgaccaacccggcgtcgttcgacagccgctacttcgggccggtcagcacatccgccgtgatcggcgtcgcgcgcccgatctggccggagacacatccatga

SEQ ID NO: 329746 - DNA, 1980 bp, Pseudomonas aeruginosa
atgaccgaccgtcgagatgatgatttccgcatccggcccagcgccccgaagaaccgggacaagggcttcgtttccaaggtgctcaagcaggtcggcaaggccggcggcaagtcggctgtgcggcgcccggcgctggccggtggcaaggggcaacacgctggccagcggcccggttcacgcctggggcgcgggcacacggcggcgcgcttcgcgggcgcctcgctcacgccattctcgcgccgggtgaccatcaagaccttgctggtcaaccagcgccaggccagcccgcggtcgctggccaagcacctgcgctacatcgaacgcgacggcgctggccgcgacggcgaaccgggccgcgcttatgggccgcagaccgacgaggctgacctcagtgcattcagggcgcgctgccaggacgaccgacaccatttccgtttcatcgtcgcgccagaggatggcgccgagctggacgacctgcgcacctacacccggcatctgatggggcgcatggaggccgacctgggcacgcggctggactgggtggcggtggatcactggaacaccgacaacccgcacacccacatcgtcctgcgcggacgtgacgataccggcaaggatctcatcatcgccggtgactatatcgcccacggcttccgccaccgggccgccgaactggccaccgaatggctggggccacgcaccgaactggagatccagcagaccttgcagcgcgaggtggagcaggagcgctggacgagcctggatcgcacgctgaaacgtgaggttggcgacgatggccagatacatgccgaacgcctcaacgagccccgtctgcaacgccagcgcctgttgctgatcggccgcctgcaacgcttgcagcgcctggggctggccgacgagacacagcccggcacctgggccgtccaagcggacgcggaaaagaccttgcgcgccctgggcgagcgtggcgacatcatccgcaccctgcagcgcgccttgggcggccagccgcgtgagctggcggtgttcgagccgggagaggaggggcgtaccgtgatcggccgggtgaccgccaaagggctggccgacgagctgcgtgaccggggctatctggtcatcgacggtatcgacggcaagtcccattacgtcgcgcttaatgcccgcgacgaactggcgaactacccctccggatcggtagtggaggtgcgcggctcggccgagatacgcgcggccgaccgcaccatcgtcgcgctggcgagcgatggcctgtatcgcaccgaccatcatctggcgattgctcggggtcaggcacaggctggccgcgatccgcaggaggtcgtggcagcccacgtcagccgcctggaagccctgcgtcgtgccggtatcgtggggcgtgtggctgaaggattgtggaaggtgcccgacgatttgcccgaccgtggtcgccagtacgatgcacagcgcctgggaggcgtggccgtggaactgaaatcgcacctgccgattgagcgacaggcccgtatgatcggtgccacttggctggatcaacaactgatcagcggtgggcaagggctgggtgacttcggatttgccggtgaggtgagacaagccatgaagcagcgtgccgatttcctggtcgagcaggggctggccgagaggcaaggtcagcgtgtgatcctagcgcgtaacctgctggcgacgttgcgtaatcgggagctggccctggtcgctcgagagatcgccgcggaaaccgggttagatcatcgaccagtgtttgatggccagcgcgcatccggtgtctatcggcgtagcgtcatgctcgccagtggacgttatgccgtgctcgatgatggtaagggattcagtttggtgccatggaaacccatcatcgagtcacgacttgggcagcagattaccgcgaccctgtacggtggcggagtgtcctgggggattagtcggtctcgaggcgtcggcatttag

SEQ ID NO: 329747 - DNA, 528 bp, Pseudomonas aeruginosa
atgatccgctgctccaaggtgttccggcgctatggctaccacggaaccaccatggacacacttgctgcagcctgtgagctgaccaaggcgtccttctaccaccattacccaaacaaagagtcgttgatgagcgacgtgcttcaatggacgcacgaacgcatcgacggggcagtgttcagcctcgcctatgaggaaagtcagcctgagctgaaaagatttcaaggcatggcaaagaaagccaaaggcctgttcaaagaggatggcatcggctgccttatgggcgtaattgcgatagacgcgacttacgccctccccgatctaatgcctcagatcagatcctttctcgatgcctgggctcaggccctagctcagctgttcatgggaataatgaagaagcctgccgctctggaatatgcacggcaaacagtggctgactacgaaggagcaattctgctaggtcggatctatggggatttcagctgctttgatcgtgtcactgaaaggatccagggtttattcatccagtga

SEQ ID NO: 329748 - DNA, 693 bp, Pseudomonas aeruginosa
atgagcggcttcaattgggttgaagacctgaaacctgagattcgaaaggctctgcttgaaagggcccgtatcaaaatcttccccgacggcgccacgatctactcgcagggggatcccgtgacggacgtattccagatcatctctggtgagattcgccagtgcatcctcactgaggatggtcaggaagtcctcatgtacatctacaaggcaggagacttggtcggtgacagctccgtggtagatgacgatccttactctgtcacgatactggcgcgaggagatgtcaccgcaagagcctggtcgatcaaagattttgcgaccattcgcaccgcgcatcatgaaatcgaggctgccatttcagcccagagtagtaggcgtctgaaaagtaccctgaaactggttgaggagctgctaacgcagccagtagctgcacgagtcgcgtcgaggctcttgcggctgtctgagatgggcgcgccctgcgtcgagggtgccgacctgtctctatctcaggcagatattggtctgatggtcggaacaacgcgccaaagcgttaaccgggtggttactgatttgcgcaagctgggcctgattgacacagattatggaaaggtcactgtcaaagacttggaaggcttgaaacgctacatcagtgaccatcaacgccatggtcgaggagaaccagaggatcactga

SEQ ID NO: 329749 - DNA, 801 bp, Pseudomonas aeruginosa
atgtgggaatgtgtcgagttggacatcgccggggcggtcgccacggtgcgcttgaatcgtcctgaaaagcacaattcggtgagtactcagctgctaatggagctgattgcctgtggcaagcatcttaaatcgaacaaggacatccgagccgtaatcatcaccggtaacggaccgtcgttctgctctggaatggatctgaaggacatcatgaccggtggcgtcatgaagaagatcatggccttcctgccgctctggaaaccctggaccaatcgataccagaaggtgtcgttggtctggcgatccctcagcgttcccgtcatcgctgcggtgcatggaaactgttttggtgccggattgcagattgctctcggggcggacatccgagtcgcggcgcctgacgctcagttgtcgatcatggagtcggtttggggccttgttcctgacatgggaggaaccgtgctgctgcgtgagctactgcctaaggacgttgcgatggagctgacgttctctggccggatcattgatgccaatcaggcgaaggaactggggctcgtcacccacgtcgccgacgatcctgtcgcatttgcacgttcgctttgccaagagttcgagaagcactcgccagacgcgattgcagccggcaagagattactcattggcagctggagtggcagtgagttttcagcgcttcgactggagcggttgtggcaacggcgggtgatcggaaagcgaaaccaaggcattgctgtagccaagcggctgaagaaatcccaacagagctaccagcgacgcacctggtag

SEQ ID NO: 329750 - DNA, 354 bp, Pseudomonas aeruginosa
atggagggctggctaagtacgctgatcaagatcaagcgcaaggtcggcaacgacgtactggtgcttccggcccacaacgagtgcttcagaggattgcacgctcgcctggatgacctgctacagcttcaacatcgtctgctagccgatctgcttgtggagctgcaaaagccccgtcgtgcggtcgatgtattcgagtgtctgttcagccggccaataacgatatcggatggctttctgctgaccatggcgaccggcgaaagccttgcgaacctcaactacctgatcgcatctgggaaggcagtgaagcggcaggatacggctggtgtggattggtatagctcgacgagcacctag

SEQ ID NO: 329751 - DNA, 462 bp, Pseudomonas aeruginosa
atgagcttttccggcaaacccacccacgtgatccagcaggccatccccaacgacggcttctggccggacctggacgtcgccgagttccagcgcctgtaccgcatgccggcggaatacctgctggatctgctggtggacggcgtgaccaccgcccgggcagaggtgaaccaggacctggccaagcgcaagcgcgcctggcagaccgccggggtcactcggctggaaaccgcagatccgcaggtgctgccggatcgcgccgagtacgtggcgcactacaagcgcgccgtctactgccgcgccaaggctcagctgctgggccagttcgcaacggtcaaccgccgtcccgaagccgagaacctggcgaaagaagccgaacagacccgcgagctgttcctttcgtacagccagcaggccgtccgcctgatccagggccggtcgcgcatcacggcggagctgatctga

SEQ ID NO: 329752 - DNA, 438 bp, Pseudomonas aeruginosa
atgaacaagctgcgcgccctgaccgcgtacctgatcgaacgccgtctggtccccgccgagcagctggattcgttcgccgagcaggtgaacctggctctggtctggaagcccgaggaacgcggcctgcgcctgggcgacatgcgctatcgcgccgtcatcatcctggagcggctggcagaccaccccgcacgcctgatggcgctggtcggcagttggcttgagaacaacgaccccgaccgcgacggcctgccggatccggtgttcgacgtcgagcagatggaccgcgacctggccgacgtcgagctggccgtggagttcgtcgagccggtccacctggcagaggattccgccggcgagatcgaggcgttcggccggcgctgggcgttcgtgccgttcgatctgtggattgccgaacatggcgaggtgcgccatggctga

SEQ ID NO: 329753 - DNA, 666 bp, Pseudomonas aeruginosa
atggctgagccgctgaatctcgacctgcgcggcctgctcggcgtgcgtgcccagctggcgctggcgacgctgccgccgcagctgcgccggcgtctgctgaacaacgcgctaaagcgcgtacgcgcccaggcccgccgcaacgtctccggccagcagagcccggacggtacgccctttgaaccgcgaaagcgcaagggccgccgcaagatgcttgcgggcctggtcaagcccaagcacctgaacgtcacccaactgaacgccgaccagggcgtcctgggctggcggaacggcctgatgggccatatcgccgggcagcaccaggacggctacaccgagcgccgcaccgccgcgcagatgcgccgctggaaccgcgtccagccgaaccaagcatgcactgagaaacaggccaagcgcctgcgccggctggggtttcgcgtgcgccaggccggcaagcgcgggctgtcgcgcccgtccgtgccgtggatccaggagcacgtcgggtttctccaggccgggctgctgatccgcgtcctgcgcgacgagcagcccgggccacagagctgggaaatcacgctgcccaagcggacgtttctcggcatcacccaggacgaaaccgggcgtctggtcgcccagctcctggaacaaatcctgaactcaccccgataa

SEQ ID NO: 329754 - DNA, 1116 bp, Pseudomonas aeruginosa
atggctctaggcagcgtcagcgtcaataacctcaacctcggccaaggcccagtgacggctatcgaacgctatttccttttcatcggcccggcgtcgaagaacgtcggcaaattcctggccctcaacacccagtccgacctggacgttcagttggggatcccggacgcggacctgaaacgccagatcgcggccgcacgcgccaacggtggcccgcgctgggcgtgcatggcggcgcccatcggcgccgacggccgctggcaggacgccctggccgccgcgcaacagcagggcgtgtcggtcgaggcggtggtcatcacccgtccggtggccaccgccgccgagctgcaggagatgcacgccgccgctgtggagctgagcaaccgctacggccgccgcgtgttcgtgatggccgccgttgccggcctggtcgagggtcaggactgggccacctacctgagccaggcgcgcgccctggtcgcggatctggcagcgcctcgcgtgctgtgcgtgccgcagctgcacggcaacaacctcggcgtcctcgccgggcgcctggccaccgacgaagccagcatcgcggacagtcccatgcgcgtccccaccggcgccgtgctcgccctgggcgagacgcccaaggacaaggacggcgttccgctggacatggcgaccctggccgagctggacaaggcccgttactcggtcccgcagacctaccccgactatccgggcgtgttctggggtgacggcaacatgctcgacgccccgggcagcgacttcaacgtcgtggagaacctgcgcgtcgccgacaaggccgcccgccgcgtgcggatcctgctgattcagcgtgtcgcggatcgccgcgtgaacaacacccccgcgagcatggcggccaccgcctcggcgctgatgcgcccgctacgcgagatgagccgcagcaccacctttgccggccttgtgttccccggcgagatccagccgccgctggacggtgacgtagtgctgacctggaagagccgcaccgagatcgaggcgttcatccgggtccgcccctacaactgcccgaaaaccctgaccgcaaacatcgcgctggatctgtccggcggcgacgaggagtaa

SEQ ID NO: 329755 - DNA, 450 bp, Pseudomonas aeruginosa
gtggcccgcatctctggaatgaacttcgatatcaccctgggggacctgcaggtccacgtcgagaaggcgaccctggatatcaccgacaacagcgcggtagcccagacccgtggcgtgccggatggattcgtagacggcgacgtgaccgccagcggcgaatacgagttggacgccgcgaacttcgccctgctgatcgaggcggccaagcgcgccggcagtttccgcaagctggagccggtcgattccctcttttacgccaaggcgggcgacagcgaagtccgcgtagaggccttcggctgcaagctgaaggtttccagcctgctggatatcgaccccaagggcggcagcaagaccacccacaaggtgcccttcgacgtcaccagccccgacttcatccgcatcaacggcgtgccgtatctggacgccagcgaaaccgaggacctgcgctga

SEQ ID NO: 329756 - DNA, 210 bp, Pseudomonas aeruginosa
atggccgactgtttcgaccgcgcccaggcccgcgagctgcaggaccgcgaactggccctgcaggcgcaccaggtgcgcgtccggcccagcgggccgagcctgacccactgccaggaatgtggcgagcagatccccgaggcgcgccgcgccctgggcgggatcatccgctgcacgccgtgccaggcccgtttcgagaaagggggccgctga

SEQ ID NO: 329757 - DNA, 306 bp, Pseudomonas aeruginosa
atgggcaaccgcactacgcctgccggccgcctcggcaaactggagcgtgacatggccgtcatcgatcaccgcctgaccgacgtcgagcgcctgaaccgcgacgtaccgccccggctgacccgcctggaacaacagttcgagcacgtcaccgaccagctcgacgaactgaaccagggccagcagaaactggccgtcaccgtagacggcctgggccggaagatcgcctgggcactgggcgtcgccagcgcgctgtgggccgttatccagatggtcgcaccacacctactgcgcggggtgatgccatga

SEQ ID NO: 329758 - DNA, 462 bp, Pseudomonas aeruginosa
atgaagctgccgcccaagctggccgccggcggcggcgtgctggcactggccgccgccctggttgcgccgttcgaggggcgttcgttggtggcctacctggacccagtgggaatcccgacgatctgcgagggcatcaccgccggcgtgcgcatgggcgacagggcgaccccggccgagtgcgatgcactgcttgaacgcgagctgcagcgcgccgtcgatgccgtggaccgccaggtcctggtgccgctgcccgacacccgccgcgccgccctgggctcgttcgtctacaacgtcggcgaaggccagttggcccgctcgacgctgctgcgcaagctcaacgccggcgacgtgcgcggcgcctgcgccgagctgtcgcgctgggtctacgccggcgggaagaagctcggcggcctggttcgccggcgcgcagcagagcgcgaactgtgcgagatcggtctatga

SEQ ID NO: 329759 - DNA, 486 bp, Pseudomonas aeruginosa
atgagccgcgtcctactcgccctggtcgcctgccttgtcgcgctgctgatcgagcgcggctgtctgcagcgcaccaacgaccgggcatcccgcgacctgcaggacgcccgccgcgaggtcgccgggctgcagcaggccgcgcaggtcgccggcgagctgctggccgcccgcgatgccctcgacctcaagcacacccaggaactgaacgatgaacgcaacgcgaacgagcgcctgcgcgctgctgttgacgctggccgtcagcggctgcacgtcaaggccacctgccccgcccctgtgcccaccgatgccggcgccgccggcctggctgctgcaggagccgccgaactcgatagaacggctcgacaggattattacgccctccgcgacgatctcgccctgacccgccgcatggtgctggccctgcaggactatgcccgcagctgctcccgctccttttccacccaaccccaaggatccacgcaatga

SEQ ID NO: 329760 - DNA, 288 bp, Pseudomonas aeruginosa
atgaccgaacgcaccgaaatcaccctggagatccaggacaccgaattcctgttcaccctgaccccggcggacgtgacccgctatttcaacgccgtgacccagaacaacaaggtcgcgccgtcgaacaacctcctgcgcagcaccgtcaagcaggagcaactggcgtccctgcgcccgcacctggccaaccccatgacggtcatgaagctcgccggcgcgctcctcgaggagtacgcccccgacgttgaagtcaccgtaaaaaagcgctcgaccgagccgagcgactga

SEQ ID NO: 329761 - DNA, 2055 bp, Pseudomonas aeruginosa
atgagcaccaagagcaccgcgaaactcgactttgtgctacgcctgatcgaccaggtgacggccccggccgcgaaggtcagcaaaagcctgatggacgtggccgaggtcggcaaacgggggttcatgcaggtgggcgccggcatcgccggcgtggtcggctcgctgatggcattccggcaatcgctcgccccggcgcttgagcagaccggcgccctgggcgagatccagtccctgggcgtcgcccaggacgccctggacgagctgaaccaggcgtcgatggagttcgccgcgaactacggcgaacacgcctcggcgttcgtgcgctcggcctaccaggtagaaggcgccatcaagggcctggtgggcagcgagctggccagcatcaccagcgcgtccaacgtgctggccaaggccacgaaggccgacgccgacaccatgacgacctacatcggcaccatgtacggcctgttccagggccaggccgatgcgatgggccgggcaaagtgggtcgagcaactgaccgggcagaccgcccgcgccgtccagttgttccgcacgtccggcgcgcagatgaacgacgcattcaaggccgtgggcattggcgcctcggccgccggcgccgacctggtggagcagatggcggtcctgggcacgctcagccagaccatggaaggcggcgaggcaggcgggctctacaaagcgttcttcgaaaacgtcagcgccgcccaggacaagctgggcatgaagttcaccgacgccggcggccggctgctgcccatcatgcagatcctggacaagctgcaggtgaagttcggccagttgaccaagcagagcgacctggacgcgatcaccggcgcgtttggcggcgaggcggcgcggatgatcgtcaccctgctgaaggacaccggcgccctggccaacaacctggaccagctgggaaaagtgaaggggatggagcgcgccgagcagatggcgcgggcgatggtcgatccctggcagcagctcgacagcgtgatcgagaacatccggatctccttcgggatggtcctgctcccggtactcaacccactgatcgaaggcctgcgcgatgctggcaacacgttccagcgctggcttgtcatgttcccgaacatcgctcgctggctcggctatatcaccctcggcgtgctcggcctggtcgcggccgccggcatgctgaccgtgctgggcggcctgctcagcctgttttccgtcctggtcagccccgtcgcgctgctggtgctggcgttcattgccctggccgccgccgtcgtcggcgcaatcgtctactgggacgagctgcgggcggcgttcggcgacaccagctggttccaggccatcgtcatcatggtcacgccggtggtgctgctgttccggatcctcggcgcgctgctcggcctgctgtgggacaagttcgcccagctgtgggacatgggcgtgaagttcgcccagtcgctgggcctgctcagcgaaagcaccgccggcgccactgatgcctggggcgggctgctcaaggtgctggccaacctgaccccgctgggcatgctgggcaaggccttgcgcggcctgatccagctgctgaacctgattcccggggtgagcatcgacgcggagtttggcgatctgccggcagcacctcagccggccgagctgccggcgctgcagcagtcggtcgcgcccgtgctcgagcacgccaccgcgccacggatccccgcgcagccgctggtcctgctgccccaggtcgcaccgctgccggacgtgccagcgctgcaggcgctgccccaggccaccgtcccgccggcgccagtggccacagaacggatggacgccgcccagcgcgcccgcgaggcgatcaaccgagcgatcccgagcctgagccccagccagcccgcaagcgtgccgcgcggcgggctgctgcagacgatccagaacagcaaccgcaccgaccgagggacgcacatcgagaaagtcgagatccgcacggacaagccgctgacaccgcacgaactggaagggctgctggagatggccggatga

SEQ ID NO: 329762 - DNA, 321 bp, Pseudomonas aeruginosa
atgactgccctttatatcgatctcctgatcgtcggcaacgacctggacctggacccgtcccaccagccgcggcttgtcgacgaccgggccagcatcgctcaggacatcgcccacctgatccgcgaaagcggcctgctggtcacgctggtcgccgagcgcagccggctaaggcagcgtgactgtatccagcagctggaactgctggtggagtccgacgaacgcctggtgccgggcacagtacggattatcgaagaggggccgggccgctacctggtcacggccaccactgttgaattcggcgcaatcgaggtaacgctgtga

SEQ ID NO: 329763 - DNA, 1173 bp, Pseudomonas aeruginosa
gtgactgtagatttcaaggccgcactgcgcgatgccggcatccccaccaccgaagccgaactgcgcaaggcgtgggaaaaggaagtcgaggcccagggctcgctgttgtccaacaccagcgcctattcgccgttctggcgcatcgtcaccgcgctggtgacgaagccggtcctggccctgctggagttcgtcgccggcaccgtgctgccgaacttctttgttcagactgccggcggcgcctggctcgacatgctggcctgggcagtggacgtcgagcgcaagccggcgacccgcgccctgggctcgctgctgttcacccgcgccgcgccggccagcacgctggaagtgcccgccggcacgcgggtgcaatccgccgcgatcaacggccacgtctacgagctggagacaacccagccggggctgttcaacgatggacagacccaggtggccatccccgtccaggccgtcgagccgggcagcgggttcaacctggcgcccggttactacgcgatccttccggtaccggtccccggcatcgtccaagtcgtcaacccggatgggtggctgacccagcccggggccgactcggagcccgacagccagctgcgcctgcgcgtgcgcaaccagttttcagcggtcaaccagtaccacaccgacgccgtgtatcgggcgatgatttccgggttccagggcgtgcgcccggatggcgtctatttcgagcacggcgccccgcgcggccccggctcagccaatgcgttcgtgctgttcgacgccggcgtgccggcggacgagtacctgcagcagatcaacgcctacatccgcgaccagggcaaccacggccacggcgacgatctccaggtgttcgtcatgcccgagacgctgcaccaggtgcgcgtcgagatctggccccgggctaacctcagcatcgagcagcgcgccgagctgaaaacccaggtggagcagttcatccgcgccgccttccgcgaaagcacggccagcgactaccagccgacgctgacctacccgcagtcgcgcttcagcttcagccgcctggccgaggagctgcacgagcagttcccgcgcctggagtccctgcacttcgacaacaccgacattctgtcgcagctgaatatcccccggctccagagcctgcaggtggtcgcccatgattaa

SEQ ID NO: 329764 - DNA, 525 bp, Pseudomonas aeruginosa
atgattaagctgcacttgcccttctggctggacggccccgagctggccaagctgcgccgcgccgcgcaggcttggtgggagcgggccgagggctggctgcgctggccgctgctgcagctcgacgcggaaacctgccacctcacgatcctggatctgctcgcctggcagcgggatatcagccggtttcgcggcgagccggaacccctctaccggctgcgcgtgaagcacgcattcgtcaacgccgtggatgccggctccgtcgctggcgtgaagcggatcctgcagcgcctcggcgtcggctatgtcgagatcgaggagcgcatgcccggtcgggactgggacgtcgtgctgctgacgctgaccgactcgcagttgtccgcgaatcccgagctgttgcgcgtcctggtgcaacagtacgggcgcacctgccgccgctacgacttccagaccatcaccccggtgacgctgcacgtcgtcgccgtcgatttcaacgacgaccagcagaccctggtcgcgaccctttag

SEQ ID NO: 329765 - DNA, 1965 bp, Pseudomonas aeruginosa
atggcacgcatcaccgccgccggcgaacgcttgattgcgcagaagctgggcgaaaagaagatactggaggtcagccgcttcgtgctcgccctggtccccgggctggatcccaccaggcctgtggaccgcgacgcggcgctgccgccggcgcagcagatcgtccacaccgcacccgtcacccaggccggctacgtcaaccccaaccaggtggtttacagcctcatgatgggttcggacgtgggcgacttcgactggaactggatcggcctggagacggcggaaaaggtcctgctggcggtcgcatacgtgcctgtccagcagaagcgcaagaaccgcccgccgctgcagatcggcaacaacgtgacgcgcaacttcctggtggcgttcgacggtgcccaggaactgaccgggataacgatcgatgccagcacctggcagcacgatttcaccgtccgcctggccgggatcgacgagcgcgagcgcctggccaatcgcgatatgttcggccggggtacgttcttttcgaccggtctgttgctggagaaggcaagcacgaactaccgcctgaaggcgggcttggcctacgtcgagggaatccgcgttcacgcgccggaggacgtcagtatcgccgcaccgtcgctgccgaacacggcctggctcgatgtgcgcctgcagcgcagccagtccgacgtcgtggcgtcctggtccatcgcctggggcaccaaccagaccgactacaccgacagcgccggcgtccgtcactacctggtcccgctcgcggatctcgacgccggcggcaatctggtggccgaccggcgcctgccgaaacccatcaccggaccgctggtggatcactgggccgcccaggtcggcgattatccgaagctgcgcgcccgggcgacgacaaagacggacgtcgggctggacaagatcccgaacgcgatcagcgacgacccggccctggatcgcggcgacgtgctggccacgacgaaggcgacccgggccgtccagctccgggccgcccaggatctggacgaccttgccaagagcctggggactgccgcacggcgagacgtcggcaccgacgccggcgacctcctcgaggtcggcgcattcggctggggaacgaatgacagtccggtcgccgcctcagtgaacatctatgaatcatccgttaccaagttcaccccggcgaccgaatacgttcccgagatcttcggcatgagctacggcgtcgtcgcgacgttcgcttacagcgagcgagaaacccgtgcgtcgcaactgttttttgggcaaagccccgaaaacaaactgatgttccgctctggcaattacacctgggccccgttcctggaaatctggcatagcggcaacctgaacccccaggccatcgtacccgccggcgccgtcgtggcattcgccatgtacagcccaccggcgggctacctgaaggccaacggcgccgccgtcagccgtaccgcttacgccgctctgttcgccactatcggaacctactacggcgcgggagatggatcgacgacgttcaacctgccggattatcgcggcgaatttttgcgcgcactggacgacggtcggggactcgacctggggcgccaattgggcactctccagtcgagccagaacctggctcatacccacggcgcgagcagtagcggcaatggcggccacacgcacaccgtaaccgggaccgctgcggcagcaggcgcgcacagccacagcattgcttcggtgaacgccaccgcactggttagcggcacacgcctggcaacgctggtagggaatgcgtccaacagtacgacagacgttgccggtgatcacacccacgccgtcactggtgtcgccgcactcgaaggcacccacaaccacacgatctacgtcgagtccagcggcggcagcgaggcccgcccgcgtaacgtctccgtcctcatttgtatcaagtactga

SEQ ID NO: 329766 - DNA, 711 bp, Pseudomonas aeruginosa
atgaccaccctgaccgtttaccaaaccaacgccctgggcctgtacgtcggccccaccgacgccgatgaatcgcctctggagcccggcgtgttcctgattcccgccggttgcgtgcaactggccccaccgaaggagccgaagggcaagcgcgcacgctggacgggatccgactgggagctggtggactggctcgacggcgtgaccacctacagcacccgcgacggctcgcccctggtgctgcagggcctggaaccgctccccgagggctacaccctgcagcagcccgggccgaaccaggtctggaaggacggcgcttgggtagacgatctgcccggcctgctcgccgccgcccacaagcggaagaccctggagatccgcgccgccggccaggcgttcctggacggcggtttctactccagcgccctgggcaacccgcacttctacgcaagcagcctgagcgatcagatgaacgtcaccagcctggccgccctgggcatcagcgccgactatccgtgcgccgccggcggcgagcagaaccgcgagtggcgccgccacacggccaatcaactgcgccaggtcggcgtggacctggtgcaacatcgccaggctggccagcagcaggtcgagcgcctgcaggacgaactggacgccgccctggccgcccaggatctggaacgcctggaggcgatcacctggagcattccggcatga

SEQ ID NO: 329767 - DNA, 921 bp, Pseudomonas aeruginosa
atgacatgggcacccgtcaccatgcgctggcccgcacagacgacccgctggctggacgacctgggcgcggcccagcagctcgccagcggcgagctggcgggcaccgccgagcgcctgcgcgggctccaggacctggccaccaccaacccggggccggtcgccggcgccgccaaggcggccatcacagccgggcgcagcgccatggccagcacactgggcgaggtaccggcgtgcctcgcggtaacgccgttcctcgccggcgtcggccaaggccagggcaaccagcgattcctgtccgcgccgaacctgctgcagcaactggccgacaagctgctgcagccgcagcgcgacgaccaggaacagtacgccctggtcctgctgttcctcggcacccgctacgaccagttggccgcgacgctggcccgcttcaatgccctgctgccggtccctgacctgcagcgcgccgagcgccgcgccgcgagcctggcccgcctggaactggaaaagtggatcatgcccaggaccacgcccggaccgcgctggcaggacctgccgctggatcgctgcaccatcacccgcgccgcccagcagagcctgtccggccagttggcggttctggagggctacaccgccgacagttcgcccatggccgagctgggcgccctggcgcagcgcaagcaggcactgcaggcgagcaaggacaacgcactgcaggcgctgcgcgagcagttggccaacggcgtggcggacggcacgatgcaggcccgcctggtcggcccgggcaatgccgtcgagctgcgccggcaactgctccagggcgaggccccgggccacgaatgggtcctgtgcgccggcctggcactggtcggctccctctccggcctggcgttcgtgcgcgagctggtggggctggatccatga

SEQ ID NO: 329768 - DNA, 540 bp, Pseudomonas aeruginosa
atgacgctgctcctcgatggccagcaggtccatggaaagggcctgcaggtgacggccaatctgcggatcgaaagcgctgacctgtccgggcagaccagcaacacggccaaggcgcacaagggcttcaagcccaaggggctgaccgtcagcctgatgattccctacgtggaccaggtgcacctggtcgagctggtgcggatggccgaggcgaccgccggcggcggccagttgcacacctatcgggtggtgaaccagacagcggccgcgttcggcgtgcgccaggttcagttcagcgacaacctcagtgtccgggaagatgacattctgcgggcctggcggatccagttcaccctgaccgaacagctgtccaaccccgagcgcgtggagacgcgccggcccgggaaaccggtccagcagcaggtcggcgccggcgcgccggtcgcggatcccgccgccggcggcgacggcaagtcaggccaagagctgaccgggttcgaaaagatcctgcagcgcgtagacgatgccatcgggggcgcctga

SEQ ID NO: 329769 - DNA, 699 bp, Pseudomonas aeruginosa
atgaaacttcaccaggtactcaccatcaacggccaggccgtgccgctggtccagagcgaagtccgcctggatctgcgcacgcccgggcgggcgtcgttcaccatcaaggcgccggcggcggagccggtacgcggcctggtcgccctagacattggctacaacgaccggccgctgcagcggcacttcctgggctacgtcgagcgctgcagcgcggcgaacgcgacggaacaggtcctgttctgccgcgagctggccgccgtcctcgcccagcccctgccgatggggctacgccacgtcgatatgcgcgaggtcctcgaggacgtgagccgccagaccgggctgtcgttccgcgtccccgacgccgactactccaggacgaaggccccttacttctactcgctcgccgccggctaccaggccatggacagcctggcccgggtgttcggcatccccgatttcgtctggcatcagcagggcaacggcgaggtctacgccggcagctgggcggacagctactggggcgcccgggcgcccatcgaactagaggccgagctgttcgacagctaccaggggcggcagtccgccgtcatcgcagcactccccgggatccgtcccggggccacgatcaaccagggcgagcgcatcacatccgtaacgctcaccggcactcaaatggccatcaaatggaagaagccgtaa

SEQ ID NO: 329770 - DNA, 972 bp, Pseudomonas aeruginosa
atggaagaagccgtaacccgcatcgtagagcgtcaattccccgaactctccggcggctaccacctgccgcgcttcgcccgcgtcatcgccgtggcggatccaccggcagcgaacgggatctgcgacgagttccgcccgcgctatgccgtggacctggagatcctggacgtgaacggcgaggccgacccggcattgccgcccatgccaggcgtcccgctaccgctgccgaacggcggcggcgaacgcgggttcctggcgttccccgaggaaggcagcatggtggtggtgggtttcgcctacggcctgccgaacaagccgttcattttgcagatactgccccacggccagagcctgccgaagctgccgaaagaggatcagctgtggcagcacagcgaagccgttctgcagcgcgtagacggcgcgggaaactggacgaggcagacggacgggcggatccgcgatcaggccatggagcgcgaggtagaggccctggagaacgtcgagcgctaccaaggtagccgagtcgagatcgaggaccacgcgaccgagcaggtgggcggagtcaagcggatcgaggcgctgggtgcgctcaagctgttatccggcggatccgccagcctggccgccgtggacgatctacaccaggccaccgggcgcgacctgaacctggttgccagccagcgctacaacgccaccatcggcgccgacatggacgaacgtatccagggaatgcgccggagcgtggcggccgtcgcccagcgcctgcaggcgccgacgacctgggtcggatccgcgggcgtgaacgtcctgcaagtgctgtgcgacctgctcgacctggtggagcagatgaacaaccagctggccgggcacgtccacccgccagtaggaccaccgacgaacgccggcgacttcaccgccgacgcggcccaggcggccaacctggccgcgaaactgaagccgatcaccgcatag

SEQ ID NO: 329771 - DNA, 405 bp, Pseudomonas aeruginosa
atgaaattccccgtggtgttacacaaagaccctgattctgactatggcgtgactgtgcccgatgtgccgggttgcttctctgccggcgctacggtgtccgaggccctggccaatgtagaagaggcgctggccttgcacttcgaaggcttggttacggacggcgaagagctaccccagccgcaggacgttgacgcccatatgaagaatccggacttcgaaggtggcgtatgggcggtggttgacttcgacgtgaccccgtacctgggcaaggccgtacgctttaatgcgacgctcccggaacaccttctgcagcggatcgatgagcgcgtgaaggtggataagcgctatcagtctcggtcgggctttctggcaacagcggcgatgcgcgaactgtcagtggcgtga

SEQ ID NO: 329772 - DNA, 183 bp, Pseudomonas aeruginosa
atgcggagtagggaagtgattgatttgctgttggaggatggctggtatgaagtggcggtgaaaggtagccaccaccagttcaaacatccttcaaagcctggaaaggtgacggttcaacatccgtcctcgacgataccgaaaggaaccctgaacaacatactgaaacaagccggcctcaagtga

SEQ ID NO: 329773 - DNA, 903 bp, Pseudomonas aeruginosa
atgaaggcgttgctccatggcatcgccgaaggtaacgggcggacgctgcgcaacctgctgggcctgctgatcttcatcggcggcggctacctgctcggccgccacgcgctgttgctggccgaactcaacctgccggcgcccatcgtgctggcattgaaaggcggcctgctctgtgccttcggtaccgctctcggggcgatgccggtgctggtggtgaagaccatgccggcgcgcctgtcggatgcgctgctgggcttcggtgccggcgtgatgctctcggcgacggccttctcgctgatcatgccggcgctatccgcggccggcgacctcggctactcgaagttcggcgcggggttcctggtcagcttcggcctggcggtcggcgtgatggggctgttcatcctcggccggctgatgccggacgtccatcccggttgcgagggcgcgccactgtccggtggcattcccccgcgcatcctgctgttcgtcacggccatcgtcctgcacaacatccccgaaggcatggcggttggcgtgtcggccggtgccggcctggacgaggccaacggcctcgccctgggcatcgctctgcaggatgtgccggaaggtctggtggtggcgctggtgctggccggagtcggtatgtcgcgtttcaaggcgatgctggtcggtgccgcgtcgggcctggtcgagccgctgttcgcggtgctctgcgcctggctggtcggcctctccgcgctgctcctgccctgggggctggccgccgcggcgggagcgatgctcttcgtggtcacccacgagatcattcccgagtcccaccgccagggacatgccgccgaggctacgctgggcctggtgttcggtttctgcctgatgatggtgctggataccgcgctgggctag

SEQ ID NO: 329774 - DNA, 450 bp, Pseudomonas aeruginosa
atgcgtcattggcaacgaacgatcgaacagggcaaccgctgtttcgtcaccggcgcattgatcgatgcgcgtgagcactacctccatgccctggccctggcccaggtgctgctggaacgctggggcgacgccgacgaggcggtgatggcgttcgtcatttcccatcacaacctggccgacttgcacctgcaactggagcaaccggaggagaccgcagaatacctgtgcgcctgccacgagcgcctgttgcgggtcagcgccgaccagaagctgccgctggccctgcgccaggcggcccagcatcacagccggcgcacctatgtcgaactgctgtcgttcatcggcgaacacggtgcctatccgcgcaccgagcgcctgctcaagggaccgccgaacgcggaggtccgacccgagttcctcgctccgcccccctcacttcgctatcactga

SEQ ID NO: 329775 - DNA, 681 bp, Pseudomonas aeruginosa; identical to SEQ ID NO: 323742

SEQ ID NO: 329776 - DNA, 528 bp, Pseudomonas aeruginosa; identical to SEQ ID NO: 323740

SEQ ID NO: 329777 - DNA, 258 bp, Pseudomonas aeruginosa; identical to SEQ ID NO: 323739

SEQ ID NO: 329778 - DNA, 1218 bp, Pseudomonas aeruginosa
atggctcgaaagcctttgggtatgcccaccggggtggaagtcatcggcaactctatccgtatccgcttcatgtggaacggaacaaggaagtgcgaaacactcccctatcccgcgacgcaaaaagggattaagactgcatccggtcttagagatcaggtagtccaggccatcaagcttggcgtcatggacgaagccaagtatgcagagttcttcccaggttctgcgattgcggaatcggtcagcagccaaatccctctgttcggtgagcatgcgcaactctggctagacagccgagagatcgtgcttggcacccgcaagaactacaagagcatcctcaaccaatactggatgccgcatctagcagtagcccggctggaccagatcacccctaccctcttgcgccgaatcatcagcagcatcgagtggacgtcgccaggcgtgaagcggaacgcgatgttcaagctgtctacgatcctagattccgctgtgaaggacgggctgatcaagaagaatccgatggcgcctcttgagaagccccgggtgtctaagaaactggtggatccattcacccgggacgaggcagagcgcatcatccagcacctttacgcgacccttgggaagtactcaaggatctacgccgcgctgtacgagtttctgttcttcacagggttgcggcctggggaagctttcgccctcagatgggacgaggtagacgaagaggcccggcgcatccatgtgtgccggatcgtcatagatcgcggaatcgaagagcgcgtaaagaccaagcatgagcgcgacgtgctgctcaatgagcgcgccttgaatgccctggcagaggcaaagcggattgctcggctgaagcgcttcgcctccgtctccgagttcgcagtaagcccattcgtgttccccccgagcaagggcgggctgtggatcaaggagccaagtgttaccataaagcacttccacgccgcgctggatgctctatccatccgaaggcgccggcagtacgacacccgccacacatacgcgaccatgtgcctgatggccggcatgaaccctgcgtttatcgctgggcagctaggccacagcgtgcagatgctgctatcgacctatgccaagtggctgaactccgcctcggattggagcgagctggagaagctacagaccagggttaaaactggtacggaattggtacaggaagcagaggaaggcgcgtaa

SEQ ID NO: 329779 - DNA, 264 bp, Pseudomonas aeruginosa
atgaacattcgtccggttttgattgcagctctagccagcgcctcgctcgcttcgccattcgtgatggcccataccggcgggcatgaagacgatgcgaaggcgataccgaagacatgcgagcaattggcagatacgaagcggtatatcagtgacgtggcttatcccgaagtaaagaagctgaaggagcaatgcgacgccgcgaagaagaagccaaacgcggcgcaatcttctgcggaacgccgcccgtccaacggcggcaactga

SEQ ID NO: 329780 - DNA, 597 bp, Pseudomonas aeruginosa
atgaccgccgtttcgactgccggcaccgcgccgcgtcctcgctcgccccgcgcacgtttgcgcgctcgcctcgtgctggcgggcctgtccgcctgcggcctcgctgcgctggcctgggcgtccttcgtgcaaccgatgccgcgcctgatctacaacccatccgacagcgtggcggtcggctggtatcacgtggagccgctccaccagcacaccggctcgctgctccggcctttgtccgttggcagcatcgtcctgaccacgttgccggcggacaccgccgcgctggctgcgcagcgccgctacctgcctgcgcgcgtgccgttgctcaagcgcgtgggcgcggtcgcgccgcaatcggtgtgcgtgttcgatgcgctggtctggatcgacggcgtgccggtggccgccgtcctacccaccgaccggctgggccgtccgctgccctcatggaggcagtgccgccagcttcggcctggcgaactgttcctcttgagcgtgaccaacccggcgtcgttcgatagccggtatttcgggccggtcagcgcatccgccgtgatcggcgtcgcgcatccggtctggttggagtctcggccatga

SEQ ID NO: 329781 - DNA, 1509 bp, Pseudomonas aeruginosa
gtgatcagtatggaaatgatgggcaaaattcggcggatgtatttccgcgacaagctgtcgctgcatgagatagccaagcgcaccgggttggcgcgcaacacgattcgcaagtgggtcagagcacctgaggccaagcagccggtgtaccaacgccgcgcgatcttcaacaaactcagcccttttcacgccacgctggagcaggcgctaaaagccgattcgctgcggcccaagcaacagcggcgcagtgccaaggcgctgttggcgcaaatcaaagccgatggttatgacggtggctacagccagctcaccgcgtttatccgtgcctggcgagggggacagggcaaggcgtcgcaggcctttgtgccgctgacctttgctcttggcgaggcgtttcagtttgactggagcgaggaaggcttgctggtcggcggcatttaccggcgtatgcaggtggcacatctgaagctgtgtgccagccgtgcgttctggcttgtggcgtatccgagccagggccatgagatgttatttgacgcccatacacgctcgttcggcgccttgagcggcgtgccgcgccggggcatctacgacaacatgaagaccgccgtcgacaaggtcaataagggcaaaggccgggcggtgaatgcacgctttgcggtgatgtgcgcgcattacctgttcgatccggacttctgcaacgtcgccgctggttgggaaaagggcgtcgttgaaaagaacgtgcaagacagccgcaggcgtatctggctagacgcccaggactgccagtttcactccttcgaggaactcaatgcctggctgggccagcgctgccgcgcgctttggaacgagctgacgcaccctcaatacagcggtctgagtgtggccgaagtgctggagttggagcgcgctgaactgatgcctgtgccagcgccattcgacggttacgtcgagcggcctgcgcgggtctccagcacctgcctggtcagcgtcgggcgcaaccgctactcggtgccgtgtgagtacgcgggtaagtgggtcagcagccgtttgtatccgacgcgaatcgaggtggtggctgacgacgcgctgatcgccagccatgtccgcttgctggatcgcgaccaggtcagctatgactggcagcactacctcccgctgatcgaacgcaagcccggtgcgctgcgcaacggcgcgccctttgctgatctgccggcgccgctgcgtcagcttaagcacggtctggggcgtcatgccggcggtgaccggatcatggcgcaagttctggctgccgtaccggtcgccgggctcgatgcggtgctggtggctgttgagctggtactggaaagcggcagcctgagcgccgaacacatcctcaatgtcgtggcgcgcctggccgcgaccgaaccaccacccagcgtcgaaacccacttgtcgctcaaggaagcccccgtcgctaacacggcgcgctacgaccgcctgcgtggccaggccgaggaggtcggtcatgcgtga

SEQ ID NO: 329782 - DNA, 174 bp, Pseudomonas aeruginosa
atgagatggttttgcgtagcgatattttgcggtggcatcgggctttggctaagtaccgaataccaaatcccgcaatggctgctttggtctttgctgtcgctaggaagcacgatgtggggcctggccaagtggatggagcggcaggaggccaagacggagtgcagtcatgattga

SEQ ID NO: 329783 - DNA, 270 bp, Pseudomonas aeruginosa
atgagcaagtccagcaggaagattaagcgccaaggcattaaacagccagcacacctcaattcccaacagagtgctatggccctccaccacgcgaaggtacttgagcacgcaatcaatgtgttcggtaatcagcagccggtcgaagagtggcttggccgtccctgcaagtatttgaacggcaatgttccgctggacgttatcgataaccctgcggggttacaggccatcgagaattatctcgaacgtatcgaatacggggtctatcagtaa

SEQ ID NO: 329784 - DNA, 2325 bp, Pseudomonas aeruginosa
atggggcttataaaggcattaaacgcctcggaagtcgaaccaaaatttagtttcgacggtatcgacaaggcggttctgctaagtacgtgcaaatggattgcttcactgggggctcaaccaaacatcgaagctttgtttggtaaaagtttttggcttggaaacccaccccctatccgaaatcctgtgcttaaccaaggcgtaaaaaagtttggatttccttacgcagctatctggcatgcgcctcgcgattctgaaaatgagcaagactactatcgattgcttgcgcagctgctatctgtttttcagcgacgaaatacagataggctccaatcgcagcggtacgctgtttttttagatttgcgtcggctgtgtgatttaaagcagatcgacattccggatcaattgaaaatatggggagaaaccgatgcgtttgtaagggcgtgccggatttttcatcctcaagaaaacgaatctgaaagctcaaaagccctaaagtcaatctgccgactggttgcatactgtagtggcgacgaacctaaagtcagatctgggggaggtgggcatcatggcccacgcccaagactcacaggtccagaactatctcacttcatcgcagacaatccattggggtttgcccttgcagaccccgatgatcccgaccagctaccgggctactacagcattttatgggagccaaccggatcagtagacggagagctggcaccagaggaattatcttcggaaaccgagatttggctactcgatgatgatggctgcgaacggccgtatgtcgcagatcttctgagccagcaggccattgaggctcatatcgttcgcagccgacaatatgtgcctttttcgtataaccaattcaccctgtcggagctgcgagatctgttgttcggtgccagcgatctgttttatgcgtgtaggcaagaacttggtcacacgcaggacacatccgggctgcggcgcaggatggaggcgatcctcatgatccatgtttgcctgtggctggggcagcctgctgcccagatattggagatgacggtggcggacagcacagcggaggactctgatgggttgattctcatttctggggcgcctgcacagttcagcatgatcgttcggcggccagagctggtgggtgatgatcgttggcaagctactgcgggaattcgacgcgcagcgttacgaattctgctgcctgatctggctggcagctcagccatggtcgacgctctccgagaggcctttcctccctcatctagcctcgtattcacatgtcaagccaatgaactcgaaggcgaggtgaaagcggttttgcatcagctgggtggaggtgaccgacgattcacgctgaacaagctgcagagctacctgttccaccagctcgtatcagatacgcatgacgtagctgcggcatcgatgctctccggcgttacgatgccttcggcacagacaccgcgctattacctgcaactcgatgctgactatctacgccagatctatgtggactcgttggagcgagtactgcaacaggtttatgcctgtgccggcctggcgtacgaacccatcgagttcaagcagactcagcaaggcggattaggtgcgacccactgcctgttgcccgaaaccattgagggcaatgtgagcgcgatggcagaggtgctgcgcaaaaagccgatgggtcgcctcagcgagatgctcgtctggcacaactgctacaccctgtggactgtgcaaatgttcatgctagtgacaggttgtagagcgattcgtaaccctctgctgtttatcgatgaattcgatgcggacctaggcatgggcgcgctttctgacaaggacagcggtgatcgtcatatgagccgcttgatttgcatgccacccatgttgaggcggcaaatcgcacactactttctgcattgcgcagccatcagccaagagctgacgggctacctgccacaggatgatgggggcggcagatggtcgcgtggtttttttctgcggattacaccgaccggctggcgtcgggatgagatcaccccatcccgtatctataggcaaatgaagctggtgcctggctacaccacgcatcgaatcaatggctaccgaaagttcctccgcaccgagctgactgaacgcggctgccctgccgagcccttagccgcgttcatggggcactggcttcgaggcgaggaaccattggatgcgtactcatcgttctgtccagcgacatatgccaggacgattgatgagtggattactccgctgttgaaggagctgggctggtccgcactcgctagctcgtgggtgacggaatga

SEQ ID NO: 329785 - DNA, 3126 bp, Pseudomonas aeruginosa
atgaacaacattcgtctgagtgatccgttccaaagtgccatctgggccgatcgggagccggactcactggccgatacgcggaatcgcttgagagcgatagcaaaggaatccggaacgcaatttgggaaattgctgttgggcgaatgcgccatgcgcggaatctcgactgagcatgtccgcgagctggaatcccacctgggtatggattatccgctacgcaatatgctgcgccgcattacccagcggttaaggcagcagattccgagattcccgcttgcgcgaatcgccatcgctatcaaacgcgcagcgaatccgatcaatcccgacctctacacggccgaacgtctcctgcacagccatcaggtgctccaagccctgcggcaaggtctaaagctcagcctcgactcgctcgatgcggaagaacgcatcggcctgttactgctgagttcagcctattgcggcggcctgatggatctggctcagctgaacgctgtgctcgaggtgccgctgaaaagcatcgaatggctggcaggtatcccggagatccgcctgccactctcgatccgcggcacggacgaggccgagtaccgtcagtggttccctgacccggccacgttggcgctgctgatccgctgtgcggatgatgttcgcgcaaggaaggagcaagtgcagcgtaagggtggaaagctccggtgcatccactcctttttgagagcggcaggcatgcctgagcaggatctgcctcgcaacctgaccgagctgctggatctgctgcgaatgcagatgcaattgcgcctgtcccaaatgctggtgaatttcgcctgccggcaagcgttcgtctcccaatcgatacgcccgtcaagctggggcgacatgttcggccatgccgatctggaagacccagccggagcctatggggatgacaatcgttcggataccgccaaggatcccgatgcccccgactgggtgctggagctgtgccagcggatccgggcaggcgaatctagcgagataccactgcaaaccgaggctcaagcagagctcgccgatctcgtccaaggctggaccgcatttatgctcaatggagcatcagcatacggccatgacatagggcgcagcaccatcgcccgctatgctcgactgctcggtcccgcgttggtttcgcaactggatggcgcgagcattttcgagctcgaaactgatgccctggaaatcgtttatgagtcggcgttggaggctcaaagcactgacggcaaacggcgcaccctggccaaagccatccatgaattccatttcttcctgcagcgccgctacagctaccctcccatcagtccctactctctgctgggcatcggcaagggcgtgacccgagtggatgcacgcattctcagcgaagatcagtaccagtccgtgctgcaagcgctcggcacctgcgggctggaattgcgaacgccacagctggtcactgcagccagactgtttctgattctggggttcagactggggctacgacggaacgaggctttgaagctgcgcctctgtgatctgcacctgcccgaactggctacagaagcgagtgcgcgcattcaaaaacggcatccgaacatgcgcaagctgtccagcgaggagctggctgggctggagctgccggtcgatctgctcattcgtcctcatgcacagcgcgggcttaaaacccagaatgccgtccggcgactaccgctacgcgtgctgctggaacctgatgagctccagctgctcatagactggtatcgacagcgcctagaggaggaggctgcaaatccagcctcggagtacctgttctgcatcccgcagctgaaaactctgtggatcagtgagagcagcctgcttcctgctttgcacggatgcatgcgtgcggtcactggctctgagagcgtgcattaccaccacctgcgccattcctgcgccacctggttgtcgctcaagctgatggcgtcgctcggcgagttctcaccggaaatgatcttccgcgatctgccccagaccatgcgctggctgagagatgacctcaggctgcgcagcgcgctgttctctgccaaaggcggccctacccggcgcatcgtgcatatcgtcagcgccatccttggccacggcagcccgaagaccacgttgctgcactacatccatagcctgcctcagatcatggcaatggcttggcagtggagtcctcgaaactggctgttcagcgcctacaacatcgcctcgattgccggcgtgagccaacccaccatgaaggccgagcccagcgacggtgtttctgtagattgccagcaactgctcgatatcatcggtcggatcaaaccgctgaaagagcgcaggcgagcccggcaaaaagcaccccggaaccaggctcagcaggtagagcacaactgggcgattgagcgggttagaacgatcgagtcgatgctggcctatgcctcgtatgccgagcagacaggtcgccaagtcaatctcgattggctcgagttctctgctgaagatcgggcgctgatgctggagcgggcgcgctatatccgtgatatgcagcagccctcgcgcaccaacactccaagaccgaagcacaggctgcaatccaccctgcatgccaacgatccctcatatacctcgctgctacccacacctccgaagcacggtggcagggacgcagtgaccgagtacgcacagcgcctgtacgaactgctcgaaggccccgacagcgagcgtgcccagcgagtgatcgatgacttcgtcgagcgctgctggacgacggaaacgacgctgcgcttctaccgcgatcgtgatgaggagcatgcgcgggattacctgtggctgctcaccgccattggcatccccgcccgcgccatagaactgatcatctacgacaccaacaagcccaagaccaccaaatcctattggcgccagaggctcggaaacatccgtcgaccgttcagccagcatatgcccgagaacccggatgtggagaaccttcatctgggcatccgggcgcagctcaagctgccggacgagcaagggcagaacctccattctggttcggctttgcgctacctgatgctgatggcttccatcgactggcacttccggggctga

SEQ ID NO: 329786 - DNA, 285 bp, Pseudomonas aeruginosa
atgaaactgatcaagcgcaacaacgtcatccagctgcacccgtcgacggaagctcgcgagcaccagtacctgaagcatctggcctcggccatgggccactatctcgagaaccccaacggcaccgaactggtctgcatcctcggttccggctatgagaagaacaaccgccaggcgctcgatacctgggtcgcctaccaccgcaacgaggtcttcgaaacgcgcctggaaggccgcagcccgctggacttcctgatcgcgaagctggaagacctgctcaccaattga

SEQ ID NO: 329787 - DNA, 2391 bp, Pseudomonas aeruginosa
gtgaaccacgcggtccacaacaagctggtttctttcatctggtccattgccgacgactgcctgcgcgatgtctacgtgcgcggcaagtaccgcgacgtcatcctgcccatggtggtgctgcgccggctggatgccctgctggagccgagcaagaccaaggtgatggaagagctggccttccagcagggcgagatgggcctgaccgaactggacgaaagcgccctgcaggccgcctccggctacgtgttctacaacatcagcaagtggacgctgagccagctgcacaagaccgccaccaacaaccagcagatcctgctggccaacttcgaggaatacctcgacggcttcagcagcaacgtcaaggacatcatccggcgcttcaacctcaaggcccaggtgcgccacatggccagcaaggacgtgctgctggaagtactggaaaagttcacctcgccctacatcaacctgacccccaaggatatcgaggacccggagggcaaccgcctgccggctctgagcaacctgggcatgggctatgtgttcgaggagctgatccgcaagttcaacgaagagaacaacgaggaagccggcgagcacttcaccccgcgcgaagtgatcgagctgatgacccacctggtgttcgacccgatcaaggatcgcctgccgacggtcatgaccatctacgacccggcctgcggcagcggcggcatgctcaccgagtcgcagaacttcatcgaggagaagtacccggcgcagggcatccagcgcgatatccacctctacggcaaggaaatcaacgacgagacctatgccatctgcaagtcggacatgatgatcaagggcaacgaccccgcccacatccgtcccggctccaccctgtcggtcgacgagttcgccggcagccgcttcgacttcatgctctccaacccgccctacggcaagagctgggccagcgagcagaagttcatcaaggaggatggcgaggtcatcgacccgcgcttcaaggtcaggctcaaggactactggggccacgaagaagtgcaggacgccaccccccgctccagcgacggccaactgctgttcctgatggagatggtcagcaagatgaaggcgccgggcgagaccggcatcggctcgcgcatcgcctcggtgcacaacggctccagcctgttcaccggcgacgccggcggcggcgagagcaacatccgacgccacatcatcgagaacgacctgctggaagccatcatccagctgcccaacaacctgttctacaacaccggcatcaccacctacatctggctgctgtcgagcaacaagccagcgcagcgccgcggcaaggtgcagctgatcgatgccagcctgctccaccgcaagctgcgcaagaacctcggtaacaagaactgcgagttcgcccccgagcatatcgagctgattacccgcacctacctcgagctggccagcatcgaccgcccggccggcggcgacggcatcgccgcgcgggtgttcgacaaccgcgacttcggctaccacaaggtcagcatcgagcgcccggaccggcgcaaggcgcagttcagcgccgaacgcatcgaaaccctgcgtttcgacaaggccctgcgcgagcccatgcagtggatctaccagcagtggggcgaggcggtgtacctggacgaaaccctggcccggcagcagaaagccatcctcgcctggtgcgaggaacagggtctggagctcaacgccaagcagcgcaagaaactgctgagcctggaaacctgggccaagcagtccctgctggtgactgtggccaactacctgatgcaggccatcggcacagcagagttcgacgacttcaacctgttcagcaagatggtcgacaaggtgctcaagcaactgggcaaggaagccggcatcaggctcggcgccagcgagcgcaaccagttgctcaatgcgctgagctggtacgacgaaaacgccgccaaggtgatccgcaaggtggagaagttcgaccgcgggcagctggcggcgctgctgcagcggctgggctgcagcgaggccgagctgcccgacttcggctactacccccacggcaagcccggcgaattcatcaccttcgagcccagcagcgacctgcgcgatagcgagagcatcccgctggccgactccatccaccgcttcttcaaggccgaggtgcagccccatgtcgaggaagcctggatcaatctggagtcggtgaagatcggctacgagatcagcttcaacaagtacttctacaagcaccaaccgctgcgcagcatggaggaggtggcgcgggagatcgtcgcactggagcgacaggcggaggggctgattgccgcagttttgggtatagatgtagcggcaatgcaggggttctaa

SEQ ID NO: 329788 - DNA, 903 bp, Pseudomonas aeruginosa
atgaagctgctggggtctggcgttagacagaccattagtttcaatcatatttcagatagcctgctgatctaccctcctctcgaagagcaattttcgatttcaaaattccttaaccataagtgctctcagatcgaccaggcagtccagatcaaggagcaccagatcgagctactgaaagagcgcaggcagatcctgatccagcaggccgtaaccagtggcctgaaccccgatgtgcccatgcgcgactccggtatcgaatggattggtgagattccggagcattggcagttgcggcggttcaaatatctcttttcacaaagccaactaccggtccgctcgaatgacggtgttgtgactgcctatcgtgatgggcaggttaccttacgcgccaaccgccgcctggctggctacacagaggcaattcttgagggggggtatcaaggtattcgcaaaggccagttggtgctgaactcgatggacgccttcgaaggagccattggcgtttccgagtcagacgggaaatgtacgccggagtatgtagtttgcgactcgctttcaagaaattacttgcccgaatactttgcgtatctgctcagagaaatggcactagccagatatattcaggtgatctgcaatgcggttcgccagcgagcggtccgcatccgcttcaataatctggcttcccgtttcatggtggtcccgccgattgaggagcaaagggctatagtcgcgttcatcatgagcgaaacagaaaagcaggacgctgccgtggcgctgctggaacagcaaatcagcaaactcaaggaatacaaagccatcctgatcaacagcgccgtcaccggcaagatcaaggtaccgggcgtggtggagccctgcgatgaggctggacgggagagcgcctga

SEQ ID NO: 329789 - DNA, 1470 bp, Pseudomonas aeruginosa
atgaccgtggaacgcgaccttggctatctgcagtccctgctcagggagctgtgctcgctgccgcaggaaaccgagtgggtggagttcaagcaggataacgacgatgcgccgctgatcggcgaatacatctcggcgctggccaattccgccgccctgctcggcaagcagtatgcctacctgctctggggcgtcgacgacgccagccatgcggtgatcggcacgaccttcaagccctccgccacccgctacaagcagcaggagctggaaagctggctgctgcagaaaaccgcaccgaagatccatttccgctttttcgagttcgccgccgccgacgatcaaccggtggtgatactggaagttcaggcggccagccataccccggtgcaattcgatggtatcgaatacatccgcgtcggctcctacaagaagaagctgcgcgagttcccggaaaaggaacgagcgctgtggcgcgtgttcgaccgggtgcccttcgaacagcagttggccgcgcagaacctcgccgtcgaccaggtgttcaagctgctcgactactcggcctacttcgacctgacccaccagcccctgccggagggccgcgaggcgattctcgccgcgctggccgccgaccggatgatccagcgcagcgacagcgggcaatggcatgtcaccaacctgggcgccatcctgttcgccaagcgcctgcaggatttccccgtcctggggcgcaaggccgtgcgcctgatccagtaccggggcagcggcaaactggaaaccgtgcgtgaactcaccggcaacaagggctatgccctgggtttcgaagggttgatcgacaccctgaagaccctgctgccggccaacgaggaaatcggcaaggccttccgccaggaagtgccgatgtacccggagctggccctgcgcgagctggtggccaacgccatcattcaccaggacttcaacctgagcggcaccgggccgatgatcgagctgttcgaacggcggatggaaatcaccaaccccggcgtaccgctggtggacccgcagcgctttctcgacagcccgccgcgcagccgcaacgaggccctggcctcgttcatgcgccgcatcggcatctgcgaggaacgcggcagcggcatcgacaaggtgatcgcccaaaccgagctgtaccagctcccggcgccgatcttcgagcagacggacgagcacacccgcgtggtgctgttcgcgcaccaggattaccgggacatggcacaggaggatcgcattcgcgcctgctaccagcactgctgtctgaagtacgtgaaccgcgagccgatgaacaacacctcgctgcgcgagcgcttccagatcgatgaaggtaacagtgcgatggtcagccggatcatcaagcagaccatcgcggcgaaattgatccgcctgtatgaccccaatgccaaccgcaaggcctatcgctatgtgccgcactgggcctga

SEQ ID NO: 329790 - DNA, 3018 bp, Pseudomonas aeruginosa
atggtgagcaagaccaacgaacaggcactggaagcaagcatcgagaaatacctgaccggcacctgcctggaagagcaggcagcgatccgcgacaatgccgccgagcaacctttcagcccacaccatggctaccgactgggtcgcacccaagacttcaatgcccgctacgcggtggatacccgctggctgtggcagttcctccaggacagccagggcgatgagctggagcgcctccagcagcgttatgacgactgggatctgcgcatcctcgaacgcttcgaccggctggcgaagaagtacggcatgctgcatctactcaagcgcggcttggccatcgacgatgtgcacctgcacctgatgtaccccgcgccgctggccagcagctcggagaaggtacggcacaacttcgcggcgaacatcttcagcagtacccgccaggtgcgctactccctgagcaataccctggaagagatcgacatggtgctcttcatcaacgggctgcccttcgccaccctggagctgaagaacccctggaccggccagaccgcgcgctatcacgggcagaagcagtaccgccaggatcgcgacagcagccagccgctgctgcagtttggccgctgcctggtgcatatgacggtggacaccgacgaggtctacatgaccaccaagctggccggtgccgccacgtttttcctgccgttcaacaagggtcacaaccacggtgccggcaacccgcccaacccgacggggcacaagagcgcctatctgtggcaggaagtcttcagccgggaaagcgtggccaacatcatccagcacttcgtacgcctggatggcagcagcaagacgccgctggccaaacgcacgctgttcttcccgcgttaccaccagctggacgtggtacggtgcctggtggcccatgccagttgcaatggcgtgggccagcgctacctgatccagcactcggcaggctcgggcaagtcgaactccatcacctgggcggcctatcaactgatcgaaacctatccggcttcgcccgaggtggccggcgccaggggcctggatgtgccgctgttcgactcggtgatcgtggtgacggaccggcggctgctggacaagcagctgcgcgagaacatccgcgaattttcggaggtgaagaacatcatcgccccggcgctgaagtctgcggatctcaagctggcgctggagcagggcaaaaagatcatcatcaccaccatccagaagtttcccttcatcgtcgatggcatcgacgacatggccggcaagcgctttgccgtgatcatcgacgaggcgcacagctcgcaggatggcagctcccacgggaagatgaacaaggtgatgggcagcgacgagcaggacgatgcccaagagaagattctcagcgccatcaagaagagcaagatgcgcggcaacgcctcctacttcgccttcaccgccacgccgaagaacagcaccctggagaagtttggcgagcagcagccggacggcagcttccagccgttccatctgtactccatgaagcaggccatcgaggagggcttcatccttgatgtgctggccaactacaccacctacaagagctattacgaaatccagaagtccatcgaagggaatccgctgttcgacactctgaaagcgcagaagaagctgcgcgcccatgtcgaacgcaaccagcagaccatcaacgccaaggcggagatcatgctggagcacttcattgcccacgtggtgaacccgaagaagctcaagggccaggcgaagggcatggtggtcacccagaacatcgaggcggccatccgttaccacaaggccatcagccggttgctggaggcgcgaggcaatccgttcaaagcgttgatcgccttctccggcgagaaggtgatcgatggcgtcgagtacagcgaggcgcagatcaacggctttgccgaagcggacactcgcgacaagttcgacagcgacgactaccgcctgctggtagtcgccaacaagtacctgaccggtttcgaccagcccaagctgtgcgccatgtatgtggacaagaagctgcaggatgtcctcgccgtacaggcgctgtcgcgcctcaaccgagctgcgccgaagtggggcaagaagactgaggatctgttcatcctggacttcttcaactcggtcgaggacatcaagaagtccttcgatcccttctacacggccaccagcctgtccagcgcgacggacatcaacgtgctccatgagctcaaggatcaactggacgaggtcggcgtctacgagtggccggaggtagagagcttcgccgcactgtatttcgacaacgccaatgccgagcaactgagcccgctgatcgacacggccgtcgagcgcttcgatgggaagcttgaacttgaagaggaagcaaaagccgacttcaagatcaaggccaaacagttcgtgaagatctacggccagatggcgtcgatcatgccctacgagatcctggcttgggaaaagctcttctggttcctcaagttcctgatcccgaagctcaagatcaaggacaaggacgcagacgagatcgatgccctgctcaatgcagtggacctgtcctcctacggtctggagcggatcaagctcaaccatgccattgagctggacgactcggaaacccagctcgaccctgccaatccgaatcctcggggcgcgcatggcggcgagcagcagaaagaccccctggatcagatcatccagaccttcaacgaacgctggttccaaggctgggacgtcactcccgaagaacagcgcgtgaaattcctgagcatcctgcaaggcatccagcaacacccggacttcgaggccaaataccagcagagccaggacgaggaccaccggaccctggctttcgagaagatcttcgaggaagtcatgctgaaacgccggcgtcaggaccttgagctgtatcggctgctggccagcgatgctgccttcaagtcctccatgcaacagagcatgcggggcttgctgcggtaa

SEQ ID NO: 329791 - DNA, 1092 bp, Pseudomonas aeruginosa
atgtctgcgctgttccaacccttcacgcttaaagacgtcacgcttcgcaaccgtattgcgattccccctatgtgcatgtactcgtcaaacgatggcctgatcaacgagtggcacagtgttcactacgcctcccttgcgcgtggcggggcggggttggtgattgtcgaagcaaccgctgtagcgccagaagggcggatcactcctggctgtgcgggtatttggaacgatgagctggcccaggccttcgtaccggtggtgcagtcgatcaaggcagccggctcggtccccggcctgcagatcgcccacgccggtcgcaaggcaagcgcaaaccgtccatgggaaggcgatgaccacatcgctgaagatgacgcccgtggctggcagaccatcgctccatcggccatagcttttggcggtcacctggccaagcagccgcaagccatgacgctggaagacattgcccgtgtgcgtgaggatttcgtcgcagccgctcgccgtgcgcgtgacgctggcttcgagtggctggagctgcatttcgcccatggttatctggcccagtcgttcctttccgaacactccaaccatcgcgatgacgcctacggcggcagtttcgacaaccgtagccgcttcctgcttgaaacgctggcggctgttcgtgaggtttggccggagcacctgccgctaaccgctcgtctaggggttatcgaatacgacggccgggacgaacagacgctgaccgaggctatcgaactgacacgtcgcttcaaagatggtggcctggatctgctgagcgtcagcattggtttcaccatcgctgaaaccaacattccctgggcgcctggcttcatgggcgaagttgcccagcgcgtgaagcgtgaggcggggataccagtggcttcggcatggggcttcggcacgccaagcgttgccgaagaagcggtcaagagcggtcacctggacttggcgatgattgggcgagcacatctggccaatccaaattggtcctatcttgccgcccaagagctgggcgtagagcgtgcgtcctggaccttgccggctccctatgcccactggcttgaacgctacaagtga

SEQ ID NO: 329792 - DNA, 990 bp, Pseudomonas aeruginosa
atgtctcgcgtcatacgctttcatcgcaccggtggaccggaggttctccagatcgacgagatcgacgtgccggctcccggcgcgaacgaggttcaaatcaacgtcagggcgctcggcatcaaccgggctgaagtgatgtaccgcacaggccagtacgtcatcgaaccgacgtttcccgccatgctgggctatgaagcggctgggaccgtatctgcagtgggtcccggtgtggtcggcttcgctgttggcgatgcggtcagcgtagtgcccgcgttctcctttgacgaatacggcttgtacggtgaattggtcaacgcgccggctcacgcggtggtcaaacacccggaagcgctttctttcacggaagcagcggcgacctggatgaagtttgtcactgcctatggcgcactgatcgagcttggtgggctgcaggccggcgagacggtgctaatccgtgcggcgtccagcagcgtggggcttgccgctatccagattgcgaacatggtgggcgccgttcctgtcgcgctgacccgcaccagcgacaagcgcgaggccttacttcaggccggggcggcggcagtcattgcgacgcaggagcaggacatggtggccgaggtcatgacgatgactcatggcaaaggcgctcgcatggccttcgatcccgttggcgggcccgaagtggccttggtgctcaaggcactggcgaaccacggcatcttcttccagtacggcgctttggacactcgggatatccctgtgtcggtcatggacctgctcggcaagcatctgacgctgcgtggttatcagctgttcgagatcacccaggatcgagaaaaactcgaacgggccaagcacttcatcaacgaagggctcgcctctgggcagctgcagccggtaatcgaccgtacattcagcttcgacgagatggccgaggctcaccggtacatggaatcgaatgcccaggtgggcaagattgttgtaacgctttaa

SEQ ID NO: 329793 - DNA, 294 bp, Pseudomonas aeruginosa
atgaccaccccactcacactggttgccacattggtcgccaaggccggctccgaagatgagctccagcagacgctgcaggatctgcaaggcgcaagtcgcgccgaagcagactgcatccaatacgactttcataaagatgcagaacagcctcgcaccttccatatggttgagcagtggcgagacgaagcggcgctgactgcgcacgaggccaccccgcatttccaggcagcgctgcccgtcatcgaacgcgccgccgaaaaattctccgtcatgaaaatgtaccgcgtctcctga

SEQ ID NO: 329794 - DNA, 1020 bp, Pseudomonas aeruginosa
atgaaagccattgcacacttcaaatgtctgcctgttgagaaccctgacgccctcgtggagatcgatctacccgagccagtgccggggccgcgcgacctgctggtagaagtcaaggccgtatcggtcaacccggtcgataccaaagtccgccagggctacgtgccgcatacagacgaaacacagccgcgcatcctcggttgggacgctgccggcgtggtcaagtcggtcggttccgacgtaacgctgttcaagcccggtgacaaggtgtggtacgccgggtcgctgatccgcccgggcagcaacactgagttgcagctggtagacgagcgcattgtcggatcgatgccacagtcgctggagttcgcccaggccgcggcgcttcccctgacgtctctgaccgcttgggaattgctatttgatcgcctcggcgtagcgcgcgacaccaccgaccgtggcgaaacgctgctgatcattggcgctgcaggcggggtgggttcaatcatgactcagctggcgcgtcagttgaccggcctgaccgtcattggtacggcttcgcgccctgaaacccaggcctgggtcaccgaactcggcgcccattacgtgatcgatcacaccaagccactgagcgaagagctcaagcgcatcggccttccgcaggtcagctacgtcgcaagcctgacgcagaccgatcggcattacgagcagatcatcgagtcactgaagccacagggcaggttgggcctgatcgatgacccggccacgctggacgtcgtaccgctcaaacgcaagagcctgtcgctgcactgggagctgatgtacacgcgctcgctgtacgagaccgaggacatgcaggagcagcacaacatcctcaatgaagtggcccgccagatcgatgcgggtgtgttgcgcaccaccgttggcgaaaactacgggcgtatcagcgccgaaaacctacgtcgcgcccatgccttgctggagagcggcaaggcaaagggcaagatcgttctggagggcttctga

SEQ ID NO: 329795 - DNA, 1866 bp, Pseudomonas aeruginosa
atgccagcctcttctttcggtgagtcctcggcgcatatcagacggagacgcgttgcccactatctacgcacggagtctggcgctgcggtgctgctggtgatcgtcacggttgtggcgctcgtgtgggcgaactcgccgctatctaacgcctatttcgagttgtggcacctagacgtcgggttcaacttcgggccactgcgcctacacatggatctgcatcactgggtcaacgacggcctgatggtcgtcttcttcttcctgatcggactggaggtgcgtcaggagttcgcccacggatcgctccgtgaccgcagccgtgcccgcctcgccctgatcgcgggggtcacgggagtcgtgcttcccgcgctggtgtatgtcctgatcgtgaaactagccggaagtgagggcctgcacgggtggggtgcggtggtcggcaccgatacggcgttcatgctgggcaccttggcgatcgtcggcccgcggctatcgggtcagttgcgcgtgttcctgctcaccctgaccgtggtcgatgacttcctcgcagtgtccatcatcggcatcgtctatagcgaggagatccggatcgtcccgttgcttatcgccctcgccagcctcgttggattgtggttgttggggcgcacccgccagtggcgggcgacgccgtatgtgttgatcgtgatcgtgctgtggttcgcgaccgtgtactccggcatccatgcctccctggccgggatggctgcggggctcctgatccccgcctacgcgacgcagcgtcacaaagtcgtcgcggcaagacaactgttccgtgacttctggcagtctccgagtgccgcatcggcccacgcggtggaccgcggactatcccgcggtatctctgtgaacgagcggctgcacgagttcctgcggctgccggcggcactgctgatcgtgccggtgttcgccttggcgaacgccggggtggatctgcgtggcgggttgctcgctgaggccttcggctcgcccgtgacctggggcgtcatctcgggactcgtgctcggtaagcttctaggcatcgggctcatcactctagccgcagtccgcctcggactggggcgcctgccggtgggcgtcgggatggggagcgtgttcggtggtgcggcgctgtccgggatcggtttcaccgtgtcgctgctcatcatcgggctcgcgttcggtacgacctctgacctgggccgccaggcgacggtcggggtgctcgtgtcgatggtactcgccacgttgctggggtggctcatattcaaggtcgccgctctcaagtggggggaggagactgccgatttgccgatggtacttgagccaccagtcgatccggagctcgatcacatccgcggtccggaggacgcccagctcacactcgtcgagtacgtggacttcgagtgcgcgtactgtgcgcacgccaccggttcgtgggacgatcttcgcgcccacttcggtgacgacctgcggtatgtggtgcgccatctgccgcaccacccgcacgggccgattgccgcgagggcgtccgaggcagcggcgaaccaggggatgttctggccgtggctggacttcgtgttcacccgtcagcacgcgctggagcgcgaggatctgatcggctacgccgtagagcttgggctcgacgtcgatcggttcatcgcggatctcgacagccctgcggtgatcgagcgtgtcgagcgcgacctcgccagtgcggtcgccagcggtgcgcatgtcacgccgacgttcttcgtcgagggtcgccgcctgcgcggcagctacgacgcccgcactgtcaccgcagcgctcgaagccagtcgccgcggcccccggactcaggaagtcccgtcctga

SEQ ID NO: 329796 - DNA, 2628 bp, Pseudomonas aeruginosa
atgccaaacaattctttcggtgaatcctcttgtaccgctgcggccagcggcctcgtgcaggtgcgtggcgcgcgcgagaacaacctcaaggaggtggacgtctccatcccgcgtaacgcgctggtggtgttctcgggtgtctccggctccgggaagtcctcgctggcctttggcaccatctatgcggaggcccagcggcgctacttcgagtcggtggccccctatgcgcggcgactgatcgaacaggccggcgtgccggacgtcgatgcgatcgacggcctgccgccggcggtggcgctgcaacagcagcggggctccagcaacgcgcgttcctctgtgggcagtgtgaccaccttgtccagcctggtgcggatgatgtattcgcgcgctggcgcctacccagccaaccagcccatgctgtacgccgaggatttttcgcccaacacgccgcagggagcgtgcccgacctgccacggcctgggccatgtgtacgaggtgactgaggccatcatggtgcccgatccctccctgagcatccgcgagcgggcgatcgcctcctggccccccgcctggcaaggccagaacctgcgcgacatcctggtcagcatgggctacgacgttgaccgaccgtggaaggacctgccgaagaaggaccgcgactggattctgttcaccgaggaaacaccgacggtgccggtgtacgcgggcttcacgccggccgaaacccgcgccgcgctcaagcgcaagatggagccgagctacatgggcaccttcaccggcgcccgacggtatgtgctgcacacctttgccaacacccaaagcgcgctgatgagaaagcgcgtgtcccggttcatggagggcaaaccgtgccccacctgccacggcaagcggctcaagccagaggcactgtcggtcaccttcgccggcgtggacatcggcgcgttcatgcagatgccgctggaccagttggcggccttgctcgaacccatcgcccagggcgatttccgcgcccatgcagcgggggcggctacggacaaggaagcgccccgacgcgaccgcgccgtccatgcggtatcgcccgacgtgcgccgtacctccgcgctgtcggaagaaaagcgcctcgccgcacagcgcctggctggaggcgtgatggcgcgcctgcgccaactgcgcgagctaggcctgggctacctgacgctggaccgggccacgccgacgctttcggccggcgagttgcaacgcttgcggttggccacgcaattaagttccctgctgttcggcgtcgtgtacgtacttgacgaaccctcggcgggcctgcatccctccgacagccaggccctgtacgatgcactcgaccggctgcgcgacgcgggcaactcggtgtttgtggtggagcacgacctggacctgatgcgccgcgcgcaatggctcgtggatgtcgggccggatgccggcgagcgtggcggccgcgtgctctacagcggcgagccggatggcctgcgcaagattgccgaatcgcgtactgcacgttacctgttcgacgaaattcccgcacccggaagccgagcacgcgaagcgaccggctggttggagctgcagggcatccaccgccataacctgcatggcgtggatgcgcgcattccgctgggcgtgctgacagccgttaccggcatctctggctccggcaaatccagcctcgtcgcgcaggccctgccggaattggtgctgctgcacctgggccacgagcctgaagacgatgccgccgaaagcgccaccagcgaagggccggcagtggtcgaagcgaccggcggccatctggcgggcgacgtggacgccatacagcgcctggtgcaggtggaccagaagccgatcgggcgcacgccgcggtcgaacctggctacctacacgggtctgttcgaccatgtgcgcaagctgttcgccgccacgcccgatgctcgacgccgccgctatgatgccggacggttctcgttcaacgtcgccaaggggcgctgcgagacttgcgagggcgagggtttcgttagcgtggaactgctgttcatgcccagcgtgtacgcgccgtgcccgacctgccatggcgcgcgctacaacgaggccacgctgaaggtgcagtggaacgggcgcaacatcgccgaggtgctgcagatgaccgtggacgatgccagcgaattcttcgcgggtgaagacgcggtggcaaggcccctgcaactgctgcgcgacatcggactgggctatctgcgcctggggcaaccggccactgagctttccggtggcgaggcgcagcgcatcaagctggcgaccgagcttcagcgcagccagcgcggccgaagcctgtacgtgctcgacgagccgaccaccgggctgcacgcgtcggatgccgaccggctgctggtgcagttgcagcgcctggtcgatgccggcaataccgtagtgatgatcgagcacgacatgcgtgcggtggcccaagccgactgggtgattgacgtagggccaggcgcgggcgctgccggcggcagcatcgtggtggcgggttcccctcagcaggtggcccgaaagtctggcagccgaaccgctccgttccttgcacgggagttggcgcgggccgagtag

SEQ ID NO: 329797 - DNA, 1860 bp, Pseudomonas aeruginosa
atgctctccctgttccagcgaaaacggcctccggtcactgccccatcaccagcgcccgccaccgacctccccaaagggctgctacggcccgaatcggccgcatcgctgctggcgacaccgcgccgacagaagctgctggaacacatctggcagcgcacgtcgctgtcgcgccggcagttcgccacgctgtaccgcacgccgctggagcgctacgccgagctggtccagcaattccccgcttccgagagccatcatcacgcttaccccggcggcatgctggatcacgggttggagatcgtcgcctatgcgctcaagctgcggcagtcccatctgttgcccatcggcgccagccccgaagaccaggcggcgcagtcggaagcctggaccgccgccgttgcttacgccgcgctgctgcacgacatcggcaaggtggccgtcgatctgctggtcgagctggcagacggctcgccgtggcatccctggcacggcccgctgcaccagtcgtaccgcttccgctaccgcgaagaccgcgagtaccggttgcacagcgccgcaacagggctgctctaccgccaattgctcgatggtccgctcctagactggctcagcggctatccgtctctgtgggcaccattgctctacgtcttggccgggcagtacgagcacgccggcgtgctgggtgaactggtcgtgcaggctgatcgcgcttctgtggcacaggaactgggcggcgatcccgcgcgcgccatggccgcgcccaggcacgcgctgcaacgcaagctgctggacgggctgcgcttcctgctcaaggaacagttgaagctgaatcagccggaagcctccgatggctggctcactgaggatgggctgtggctggtgagcaagactgtctcggacaagctgcgcgcgcacctgctgtctcaggggatcgacggcattcctgcgaacaacaccgccgtcttcaacgtgctgcaggaccacggcatgctccagcctacctcagacggcaaggcggtctggcgcgcgaccgtgaccagtgcgaccggctggtcctactcgttcaccctgttgcgcctcgcgcccgcgctgatctgggaatccggcgagcggccagcgcttttcgcaggcacggtggcgatcgacacgacgccagcggaaatcaacggcagtgcaccaggcacaccgcccgcggtcgtggggcagccagcacccgaaggtcaggagactcccccttgggaatgccctcgcagcgataccgccttgccgactgcggccccgcccgtgcccgacgtcatggaggacatgctgccgatggttggattggatggcacggccgacatggggaagagtgaagagccagtggagaaagtccctgcccagcctgacgttcctgccccaaccacagccgcagcgtctcccttgccacttacccctgcgcctggacctgcatcaactccaatagtcgcgataccatccggggagcatttcatgacgtggctgcaacagggagtcgccgcgcggcgactcatcatcaacgacgccaaggcgctcgtgcatacggtgagcgacaccgcctacctggtcagtcccggcgtgttccatcgctatgcgcaggaacatccccaggtggatgtgctagccaggcaggacaagcaacaggattggcagtgggtgcaaaagcgctttgagaaactgcagctacaccgcaagcactcaaatggcctgaacatttggacctgtgaagtcacgggcccgaggaagtcccgccgactgcatggctacctcctcgaaaatgggtccttggtattcgccgaaataccgcccaacaatccctatcttgctctgactcaggaaggatga

SEQ ID NO: 329798 - DNA, 501 bp, Pseudomonas aeruginosa
gtgctcttctacggccaaccttctttagggggcagccgccacggcgtcgacatcccacgccagcccctggcgcgttgggtgatccaaagtggcgagcaactgcaaccgttgctcaacctgatgcgcgacaagctgctggactaccccgtgttgcactgcgacgaaacgcgcttgcaggtgctgcatgaaccgggacgcgacccctcggcacaatcctggatgtgggtgcaaagcggtgggccgccggacaagccggtgatccttttcgactacacagccagccgcgcgcaggaggtgccgctacgcctgctcgatggctaccgcggctacctgatgaccgacgactacgccggttacaacgccgtggctgcacgcgacggcatcgaacgcctgggctgctgggcgcatgcgcgacgcaagttcgtcgaagcccaagggcaagactgggcgtgccgacgtggcgctgagcctgatcaacaagctctacagcatcgagcgtga

SEQ ID NO: 329799 - DNA, 306 bp, Pseudomonas aeruginosa
atgactattgacgtcaacgaagccctgaaagcattggcgaacccgacgcgccttgccatcctcaattggctcaaggatcccaggacagtctttcccgagcaggaagtcgacccagaaacggtaggcgtgtgcgtcagtatcatccaagagcgcacgggcctctctcagtcaacgacatcgctttatctcgcagctctacagcgcgcgcaattggttacatcgcagcggatcggcccctggacctactacaaacgccacgatgagaatatcgatgccttcttcaaggcgctgcaagaaagaatctag

SEQ ID NO: 329800 - DNA, 984 bp, Pseudomonas aeruginosa
atgtaccaaccgagcacgactccctaccaagagcataggggattcaaacggaccttcaggcagggtcatctaagccttgggctgttctttcccctggaggctttcgagggtgacacaccgcgcatgctggatcaggtcgcgctggccaaacgtgcagaggcacttggtttttcggcgctctggtttcgcgacgtcccgctcagggacccaagcttcggtgatgtcggccaggttttcgacccttgggtgtatctgggctacatcgcagcccatacaacaaaaatcgcactaggcaccgcctccatcgcccttactttgcgtaatcccttgcacacggcaaaggccgcagcgagcattgatcagttgagcggaggtcgcttgctcctgggagtagcctctggcgatcgtcccgtggagtttcccgcattcagcgttgatccagaaaagcgtggcgagacctttcaggaaaacctcaatgtgatacgccaagcccatcgaacacacttcgagcccattcgctggagtcacggcgagttactgggggccgatctcgttcccaaacctacgactcgggaaataccgctattcgtaaccggacatagtcgccagtcgctcgattggatcgcgcgtgaaagccatggatggatcaactatccacgtccgccaaaaatacagcgactcatcgtggaagattggcgacaggaaacggctaaacaatgtggcactatctacaagccgttcttgcaatcgctgtatatcgacctggacgaacacccatccacgccaccctcgcctatccatctaggattccgactgggacgtaaccacctgcgggccttgctggatacacttcaggaaatcggtgtagatcacgtcatcctgaacctcaagtatggtaaacgccccgcagcagaggttatcgaggaacttggcaaacatatcgtcccgcaattcggcgcacaggtgcccgatagtcctacctga

SEQ ID NO: 329801 - DNA, 1125 bp, Pseudomonas aeruginosa
atggcacaatcagaacttttcaaaaccactcagctgggcccatacaccctcaagaaccgtatcgttctgccgccactgacgcgttcacgcagctcccaacccggcaatattgcgaacgacctgatggccacgtattaccgtcagcgcagcggtgctggcttcatggtgaccgagggcacacagatcgaaccccgaggacagggttatgcctggacacccggcattcatagcccggaacagatacaaggctggcgtaaggtcaccgacgctgttcacgccgaagggggggtcatctttgctcagctttggcatgtgggtcgcgtgtcgcacacatcgctgcaacccggtggtgaagcgcccatcgcgccatcagccatccgcgcggacaacgtcaaggtgttcatcgaaactggccccggcacgggtacactgaccgacccttcgaccccacgagctctgtccaccgcggaggtaaaggaactggttgcgctctacgcccaagcagcccgaaatgctttggacgcaggttttgacggggtggagcttcactgcgcgaacgggtacctggtaaaccagttcatttcggcccataccaaccagcgtgatgatgaatatggcggttcgctgcagaaccgtcttcgcttcctgcgcgaaatcaccctcgccgttgctggtgttgtcggcaaggagcgcgttggcgttcgcttcgccccgctgttcgcgaccacagacgaagaccgcgtctaccttggtctggtcgaagatgatcctcatcaaacctacatcgaggcagtgaagatcctcgaggaagtgggcattgcctacctgtcgctcgccgaagccgattgggaaaacgcacccgagctgcctgagacgttccgggaagctgttcgtaagaccttcagcggcaagattatctatgccggcaagtacaccgctgaacgaggaaatcgcgtgataaaagctggctggggcgacctgatcgcttttggccgtcccttcattgcgaaccccgacctgcccgctcgtatcgccaacaactggccgcttaacccagttgatccaagcagcatgtacggcggtaccgataagggctacaccgactacccgacttacaaatcctaa

SEQ ID NO: 329802 - DNA, 399 bp, Pseudomonas aeruginosa
atgaagcgctttatccagggagtacatcgaggccaaagcacgctgctgcccgagagcctggatgactacgtcgcggacaccaacccggtgcgggtggtcgatgtgttcgtcgatgcaaccagcctccttgatgaaaaaatcaagggagctggctgcataggcaaccctggcgcgaagcacggcgcgctcccagctgatccagaagtgagctgcaagggcgtggaaccatgcgtacgtgccggcatcaatattaatatattgacatatatgaatatcgagaatagcctaccgataaccgcgctagaaaccccaggaggtagtcccatgaaagattccagcgatacccatccgaatcaccttcccgacagcagctacggcctgtttattgacaaccagtga

SEQ ID NO: 329803 - DNA, 915 bp, Pseudomonas aeruginosa
atgcttaaccgcatggagatggtcaggattttttgcacagcagcagaggcaggtagcttccgcgaagcggcaacccgattaggtatctccccgcaaggggttacccgagccattcaagccctggaaacggagcttggcgaatcgctgtttcaccgtaatacccgccaggtgagcatcactgctttcggtcaggattacgccaaagatgccagatcagctctggagcatttcgacacgctattccggtcgcacaggatggaacctgagctgtcagggagggtgggaatcacggctccacatgctattggcaggcgcttcttaataccgtttcttcagcccttggcctcagcacatccagacctgcaattcgatctccgcctggaagatcagatgaccgatgccgttgaggcgcatatcgatattggtatcagggtgggtataattcgcgaccggcgctacgtcgcacgggccttagctcccgtgccgttttacgttgttgcaagcccggcgctaatagagcaaaaaacaacacccagatctctggatgccttggcccagctgccactttcagtcctgatcgaccagaaaaatggccgcccttggccttggctgtttgccgacgggcaaacatttacgcccaggcagccagctcttatctgtgatgatcctgacacggaattggaagccaccctggcaggtatgtgctttggccaaattcctggctatctggctgagccccatctgcggtcaggcaagctggtttctgttttggctgatctcgctccagcgccatgggatctgttcatataccgcccgcagcagggtcctgtatcgaagcgggtgcgattggtgtacgaccatcttaagcaggctttctcaaaccccgagctatttccccaaggcctggggacatag

SEQ ID NO: 329804 - DNA, 780 bp, Pseudomonas aeruginosa
atggcgaagtacaaacccgccgatgaggttctcaacatgagcaataacatttctggaaaagttgtcgttatcaccggcgccagcagtggcttgggtgaagcgactgcacgccaccttgctgcgcttggcgcgcgcgtagtgctggccgcacgccgcaaagataaactcgacgcattggtgactgagctgaccaatgcaggtggtcaggcaatcgcgtatcagaccgatgtcacctctcaggaagaggtcaaaacgctcattcaaggtgccgtggacacctacgggcgcattgatgtactggtcaacaatgccgggctgatggcgattgcaccgctcagtgatggtcgcactgacgagtgggatcgcatgatcgacatcaacatcaaggggctgctgtacggagtcgcggctgcattgccggtcttccagaaacaaaacagtggccacttcatcaacatcgcatcggttgcaggcctgaaggtgtttagcccaggtggcaccgtgtacagcggcaccaagtttgctgtgcgggctatctccgaaggactgcgtcacgaagtcggtggcagcatccgcaccacgactatcgaaccgggcgccgtggactccgaactgaaattcggcagcacccaccaacagagccgcgatttcgtggtggacttctacaagcatgcaattcccgccgaatcggtcgctcgagctatcgccttcgcaattgagcagcctgctgacgtggatattaacgagatcgttctgcgcccaaccgtgcaggaattctaa

SEQ ID NO: 329805 - DNA, 1110 bp, Pseudomonas aeruginosa
atgaaatcacgtgcagcagttgccttcgggcctggaaagccactggaaatcgtcgagatcgacgtcgagccgccgcgcaagggcgaggtgcttgtcaggatcacgaataccggcgtttgccataccgacgccttcaccctgtcgggcgaggacccggaaggcgtgttcccggcggtgctgggtcatgagggcgccggcatcgtggtcgaggtcggcgagggcgtgacctcggtcaagccgggtgaccacgtgatcccgctgtacaccgccgagtgcggtgagtgcctgttctgcaagagcggcaagaccaacctgtgcgtggcggtgcgcgccacccagggcaagggcgtgatgcccgatggcactacccgcttcagctacaacggccagccgatctaccactacatgggctgctcgaccttcagcgaatacacggtggtggccgaagtctcgctggccaagatcaacccggacgccaatcccgagcatgtctgcctgctgggttgcggtgtgaccaccggcatcggcgctgttcacaacacggccaaggttcagccgggtgactctgtggccatcttcggcctcggcggcatcgggctcgctgcgattcagggggcacgccaggccaaggcaggtcgcatcatcgccatcgacaccaatccagcgaagtacgagctggctcgtaccttcggcgcgaccgaatgcctcaacccgaaggacttcgacaagccgattcacgaggttctcatcgagatgaccggttggggtgtcgatcacaccttcgagtgcatcggcaacgtcaacgtgatgcgctcggcactggaagcagcacatcgtggctggggccagtcgatcgtcatcggcgtggctggtgcaggcaaggaaatttcgacgcgcccgttccagttgatcaccggtcgcacctggaagggctcggctttcggcggggtcaagggccgcactcaacttcccggcatggtggaggacgccatgaaaggcgagatcgatctcgccccgttcgtcacccacaccatgggcctcgacgacatcaacaaggccttcgacctgatgcatgaaggcaagtcgattcgcacggtgatccactactga

SEQ ID NO: 329806 - DNA, 399 bp, Pseudomonas aeruginosa
atgtccactcctgtcatttctggcgatggcatcttttcgcacatctttatcggcgctgccgaccttcagaagtcggtcgcgttctacgacgccgctctgggtgctcttggcatcaagaacctcggtcctttcaacaacggatgggtacttttcggtcgcgaaaagccggctttcatcatcgcccgcccgggcaatggtgaagcgccttccagtaacggcgtgacgatcggctttgcggccgccactcccgctgaagtggatgccttccacgccgccggccttgccgcaggcggcactgacgagggccaacctggcgcacgtggtcacctgccgggtgcctatgcggcctacctgcgtgatccggcgggcaacaaggtctgctcgtacaccttcgtctga

SEQ ID NO: 329807 - DNA, 282 bp, Pseudomonas aeruginosa
atgaaagagccggccaatatcaatacgacgaccgtacaacccaccccgaccgccaccgtgtacggcatgccggcctatgccgatcgtgctgcagccgtgggtgaagtgcatgcgcgcccgcatctgttgcttcaggccccccgcggtatattgcagctctctttcatgaccgaaggcgaccaggccagggatcagatggcgatgagcgagttatctcatcgcttcggcgttgccgagcccgaccacgctacgccgctacacggcgtgacatgggatgagtga

SEQ ID NO: 329808 - DNA, 633 bp, Pseudomonas aeruginosa
atggagtcgcgccttgcagcgatcactgacgagatgtgtacgagtttggtagaacgccgcgatagcgacgtgctgctttccgaattgaccggtctggccgccgaactggaagctggcgtcgcggcaaatctctatcgcttcggcgccagccgtgcctactacgagatcgtcgaggaaaggctggctgcgctttcagaagtggccgtatccggatacagcacctgggcggacttcctgcagcgtcgcatcgctccagccatgcggacgtgccaatccgtaaaggagcgccaggccaagctctccgacaaactgacccgagccatcgcgttgctgcgttcgtggatcgacgtcgaacttgaacgccagaaccgcgatctgctggcttcgatgaacaaccgggccaagttgcaattgcgccttcagcaaaccgtcgaaggcctgtcggtcgcggcaatttcttattacgtcgtgagtcttctcggctacctgctcaagggcattccgatcgttcacgacagcgtggcgccggtgatggcggttctggtacctgcggtgatgctgacgatctggtggatcgtccgcaggataagacacgcccacagcgacacggcggcggaagagaaatcttcctga

SEQ ID NO: 329809 - DNA, 540 bp, Pseudomonas aeruginosa
atgtttcggcagcgctatccgaacgtcacgctggacgagtcacgcatgatcgtgaactcgacacgcttcactaccgcgggtgccgctttggcccacgtcgacctggccttgcgcatcatccgggggcgcagtccggcgctggcggccctagtagcacgctatctgctggtcgaggcacgcagttcgcaagccgagttcgtgattcctgaccaccttgcgcatgccgacccgatggtggagcgcttcgagtgctgggccagaagtcagctcgcgaaggggttctcgctggccgaggcggccagcgccgcgggcacaagcgagcgcaccttggcgcggcggctgcaaagcgttttgggcaagacaccgttgtcgtatttccaggacctgcgcgtggagcatgccgtccatctcttgcgcaccggaaacgcgagcgtcgaccaagtcgccgcacaggtcgggtactcggatggggtgaccctgcgggccctgttgcgccgcaagctgggccggggtgtcagggagttgcgacgcggtggatga

SEQ ID NO: 329810 - DNA, 303 bp, Pseudomonas aeruginosa
atgaccaagctcgccctgtttgttcgcctcgaagccaaacccggccaggaggctgcgcttgccgacttcctggccagcgcactgccgctcgccaacgccgagtccggcaccactgcctggttcgcattgaagtttggcccttcgacgttcggtgtgttcgatgcctttgccgatgaggcaggtcgccaggcacatctgaacggccagatcgccgcggccttgatggccaacgccgcgaccttgctcagttctccgcccaatatcgagaaggtcgaactgcttgcagccaaactgcctgcatga

SEQ ID NO: 329811 - DNA, 198 bp, Pseudomonas aeruginosa
gtgctggaccgcctgatccaggagcgggttctgaatcccgaccgggtgattgccggcatgctgcacccctccggaaactgcacctaccggatcaactacctcatcggcgacagaagcgcgctggtcccgcacgccaccagccctgtgccttacgaccaggtccggcgagcatttcgggagcggttcgtcaccgcctga

SEQ ID NO: 329812 - DNA, 897 bp, Pseudomonas aeruginosa
atggatcgcctgacccagatggccacgttcgtcaaaacagttgagctgggttcattcagcgccgctgcggacgacctgaatctgtcccctcaattggtagggaaacaggtgaaaatgctcgaacaacatctgggtgtttccctgctgcaccggactacgcgcaggcaaagcctcaccgacttcggcagggcgttctacccgcgagcaaaactgatccttgcagacatgcagtctgccgagagcctggctgccctcactcggggcacaccaagcggccgccttcgcatcaacgcgccggtcacgttcggaatccgcacgctttcgccacgcctgctggaatacatggttcggtatcctcaggtgtctgttgacctaacgttatcgaacgaactggtcgatatcgttgatgatggttacgacgtggtatttcgcatcggcgagctggcgagcagtgggttgaaggcattgccactggagccctatcagatggttttatgcgctgcgccgtcctatcttgcacgtcgccctcccatcatcaatccgtgggatctacagcagcaggaatgtctggggtttacctattctgatggccgctcacactggagcttcgacagcccggaggggcgtatagatgttcctattacaagcaaattaacgatcaatcaaggtgatccactgctggcagcggctgtagctggtctaggcgtggttctacagccgatagagttggttagcgatgcactgcgcgatgggacactggtgcgtctgttgccgcagtacccggtgccgaataccgcaatgcacatcctctatgcccctgaccgaagaatgactccaaagctgcgcagcttcttggagtttgcgcgtgaggcttttgggcagcgaggccctctctaa

SEQ ID NO: 329813 - DNA, 990 bp, Pseudomonas aeruginosa
atggcacgcattgtcagaattcatgaatacggtgacgccagcgttctgaagctggaagatctggaagtatcggcaccagcagcaaacgaggtgcaaattagtgttaaagccattggcttgaaccgagccgaagtgatgttccgcaatcacgcatacctacaagaagcggagttccccagccgcttaggctacgaggccgcaggcatcgtaacggcagttgggagcgacgtaaccgagatcacgattggtgactcggtcgctctgatcccacctctggatattgctcgctggggcacctacggcgagttggccaacgtaccggcccacctggtggtaaagagccctgagaacttgtcctttgaagaggctgcggcgtcttggatgcagtacgtcaccgcctggggggcattgattgaacaggcgaagctacggcagggcgattttgtcatcgttaccgccgcgtcaagcagcgttggcttggccgccttccaaatggctcgtatggtcggcgccacatcgattgcgatcactcgaactcacgcgaagaagcaagccctacttgatgcaggcgctgcgcatgtcatcgttagcgatgaagaggatatcgtcgagcgtgttatgacgataactgccggtcaaggcgctcgcgttgtattcgatcctgtaggcgggccgtcctttgaacctctcacgcagagcatggcgcggggcggaattttgctggagtacggcgcacttagctctgaaccgacaccattcccactgtttaccgtgctgggcaaaagcctgactttgaagggctatctctacgcagagattgtggccgaccctgaagccctagagagagcaaaggcttttattctgcaagggttggagtccggtgcgttgcgcccgatcatcgccaagacattcacacttagcgacatccaggatgcccatcgtttccttgaagccaatcagcagatcggcaagatcgtggtaactgtctga

SEQ ID NO: 329814 - DNA, 3015 bp, Pseudomonas aeruginosa
atggcatccctcgaacgtaccgcctaccctgtattgtcgcgctcctattcgagggccgagcttcagcgtgaattcagcttctccgaggaagaagtcacgtgggtcaaaagtcgctctaatgcagcattccgactgaatctcgctgttctgttcaagacttttcaggtactccgatactttccagaaatcgctgaagtgccggagccagttgtcgatttcatccgcacacaaataggtctacgcagcaaggttgcgctatcaccctacaagtggatgcagctttaccgccatatgagtgccgttcgggaaaaacttggggttcgaccgttctacggctcggatggtcaagacatagcatccacgcatgcacagttgatggctcccctcctcgaacagcgcgctgacattattaatgcgatcattgacgagttgctgcgccaaaactacgagctgcccgcctattcgaccttgaatgacctagcagaagccgctcgtgcagaagcacaagagaaaatcttcaaccttgtggtagccagagctccaatcaaggtgatctataagctaagggatcttctcgacacggacttcgggcgtcggcagagtgacttcaacacactcaaacaggcacccaagaaaccctcgcgcaagcatctggaggtactgatcgaccacctagcctggctagagagtttcgggaaactggatgccatttttgatgggatcgtcgatacgaaaattcgccactttgctgcccaagctgcggcgtcggatgtatctgaactgaaggactgctcgctgccgaagcgttacacgctgatgcttgctttgatctaccgtatgcgggtgcgaacccgagatcacctggccgagatgttcatccgaagaatctccacgatccacaaacgcgccaaggaggagctggagcaaatccaggcacgtcaacgtcagaagttggaacaactggcggccaccctggacggcgtggtgcagattctggttcaagagccggatgaccaggaggctggtagcctgattcgagaatacctctcccccgatggcaacatggatcggttgcgagaggtttgtgctgaagttcaggccacaggaggtaataactacttgccgctgatctggaggcacttcaagtcccatcgttcactgctgtttcgcctcagccaccttctccagttggagcccaccacccaggatcgctcacttatccaggcgcttcagctcattcaggacagtgagaatctgcaccgtgaatggatcgatgagcatgtcgacttgtcgtttgcatcagatcgctgggtgaagatcgtgcgtcgccctaccagtgaagggccgcctaccaaccgacgttatctggaggtctgcgtgttctcctacctggccagtgaactgcgctcgggtgatctgtgcgtgcagggatcggaatccttcgccgactaccgtaaacagttgctgccttgggaagagtgtctccagcggctaccggcatactgcgagaaggtgggccttcctaccacagcgaaggagtttgtcgcctcgctcaagagccagttggaggaaaccgcgcaacagttagatgacaagttcccttcctgtcgaggggatgtgtcgatcaacgatgcaggcgagccggtactgcggcgggtgatggcgcgggacatcccgccttcagccatctcgctacagacggcgcttatgcagcgtatgccagccaggcacgtgctggacattatggccaacattgagcactggattcagttcacgcggcatttcggaccgatgtccggcaacgagccaaagctcaaagagccggccgagcgctacctgatgacgatcttcgccatgggctgcaatctcggtcccagccaggccgcgcggcatctggccggtaatgtcacaccgcatatgctgtcctataccaatcgccgccacctctcgctggagaaactggacaaggctaatcgcgagttggtggagctctatctgcaacttgacctgcccaagctttggggcgatggcaaagcagtggccgcagacggtacccagttcgacttctatgacgacaacctactggccggctaccacttccgctatcgcaagatgggggccgtggcgtaccgacacgtggccaacaactacattgcagtgttccagcacttcatcccgccaggcatctgggaggcgatctatgtgatagagggactgctcaaagtcagccttagcgtcgagcccgatacggtctactccgacacccagggccagtcggccacagtattcgccttcactcatctcctgggtatcaatctgatgccgcgtatccgcaactggcgcgacctagtgatgtgccgaccggatcgaggcgtatcgtacaagcacataaaccgactgttcaccgacactgccgactggcacctgatcgaaactcactggcaggatctgatgcagattgcgctgtcgatccaggccggcaagatttcctcgcccatgctgctacgtaaacttggctcttacagccggcgcaacaagctctacctcgcagcacagacgctgggcagtgttatccgcacgattttcctgctcaattggattggcagccgagagctgcgccaggaggtcactgcgaacaccaacaagatcgagtcctacaacggcttctccaagtggctctctttcggcggcgatgtaattgccgaaaacgatccggacgagcagcagaaacgtctgcgttacaacgacatggtggcttcgtcggtgattctgcagaacaccgtggacatgatgcgcatcttgcagaaactagcccgcgaagggtggcagtttaccgatgaggacgtgtcctttcttagcccctacctgaccagtaacgtcaagcgtttcggcgagttcaaccttaagctcaaccgaccgccggagccctggatcaaggattcggtattccaacaggctgccggctcgttgcgagtcaactcgaccagtaaggccgcggccgaggaggcaatatga

SEQ ID NO: 329815 - DNA, 1317 bp, Pseudomonas aeruginosa
atggccaaggatgacgagaagtaccgctgggactgggcaacccaaacctttcccaccatcgatccacacagcaagatcaagcaccagatcatcgacgactacatccaggcctacatcgatgtcctgatgcggaatcagcaaatgccactgcttggcctatcaattgtcgatggcttcagcggtggaggtatatataacgacagcgcaggcggtcaccacttcggctccccggtgatcgccctggaagcaatccaggagtcggaagtgcgcaacaacgtggggcgcatcaagcatcgaccgatctgctcgcagcatcactttgtggatgtgaagccgaagaatactgcttgcttgcacgccgtcctggccagccgcggacatcaggcccgcattggacaggacattcacctgcataccgccgagttcaccaaagctcttccggccattgcgcaaagcctcaaggcctttggaaaaagcgagcgcgttctgtttctgctcgatcagtacggctacggcgacgtgccattcggccagatcaaatggatcttccagcacctcagcaatgctgaggtcctgctgaccttcaatgtcgactttctaatcacgtacttagcggaccgccacgccaaccgcaaggctattgccagtatcggtctagaacagtatgtcccctgggaacagctacggcacttaaaagcacatagctcccaggattggcagtacctgatccagcgctatctgtcggacgggatcaagcaggaaagcggcgcgcagttcatgacggtgttcttcattcgcccacacggcaccaaccccatggcctactggttcatccacctggcgaacagctaccgcgccaacgacgtgatgaaagccatacactggaagtacggcaacaatttctcccacctgttatcaccgtcctgcttctttggttacgacgctaaccgggatgtgggggtgaccggccagccggacctactctgcgaaggagaacaccagttcgaccaagtgactgatacccggattcgtggggaactgtccgagctgctacccaaacaggtattcgaagtcgagcgtcgtcccttcatccagctcatgacggagctcaccaacttcaccatggcagacgaaagtcgcgtgaagctggccctggatgtcgcggtggccaacggcgatatccaggcagtggacaaggaaggcaagagcaggcggcgcaaaggcacgagcatcaagtccaccgatatcctgatcgcgccgccgcagaagacgtttttcttctttccccaacagaagaagacgtccagggacacatga

SEQ ID NO: 329816 - DNA, 561 bp, Pseudomonas aeruginosa
ttgcagggacaacgcatcggttatgtccgggtcagcagttacgatcagaatccggaacgacaacttgagcaagttgaggtcggcaagctgttcaccgacaaagcctcgggcagggacacccagcgtccccagctggaggccatgctcggcttcgtccgcgagggcgacaccgttgtggtgcacagcatggatcgcctggcccgtaacctcgatgacttgcgacgcctggtgcagaagctgacccagcgcggcgtgcgtatcgagttcctgaaagagggcctggtgttcaccggcgatgactcgccgatggccaacctgatgctgtcggtgatgggggccttcgccgagttcgagcgcgccctgatccgtgagcggcaacgggagggcatcgccctggccaagcagcgcggcgcgtaccggggccgcaagaaggccctgtccgacgagcaggctgctaccctgcgacagcgggcgtcggccggcgagcccaaagcgcagcttgcccgcgagttcaacatcagccgggaaactctctaccagtacctacgcacggacgattga

SEQ ID NO: 329817 - DNA, 537 bp, Pseudomonas aeruginosa; identical to SEQ ID NO: 149246

SEQ ID NO: 329818 - DNA, 396 bp, Pseudomonas aeruginosa; identical to SEQ ID NO: 149247

SEQ ID NO: 329819 - DNA, 252 bp, Pseudomonas aeruginosa; identical to SEQ ID NO: 149248

SEQ ID NO: 329820 - DNA, 567 bp, Pseudomonas aeruginosa
atggcactgatcggctatgcgcgggtatcgacggcggaacaggacaccgccttgcagacggatgcgctacgcaaggcaggctgcgagcgcgttttcgaggacacggcttccggggccaaggccgaccgccccggcttggctgatgcgctggcctacctgcgcgacggcgacgtgctggccgtctggcggctggatcggctcgggcgctctatgccgcacctaatcgaaacgataggcgcgctggaagcgcgaggcgtcggcttccgttctctgacggaagccatcgacaccaccacgccaggcgggcggctcatcttccacgtgttcggcgcgctgggccagttcgagcgcgacttgatccgcgagcgcaccaaggccgggttgactgccgccgccgctcgtgggaggaagggcgggcgaaagccggttgtcaccgccgacaagttgcagcgagcgcgggagcacatcgccaacgggcttaatgtccgagaggccgctacacggctcaaggtgagcaagacggccctgtacaccgcgctgcaatccaccagtgcagccgactcctga

SEQ ID NO: 329821 - DNA, 786 bp, Pseudomonas aeruginosa; identical to SEQ ID NO: 16905

SEQ ID NO: 329822 - DNA, 1515 bp, Pseudomonas aeruginosa; identical to SEQ ID NO: 52478

SEQ ID NO: 329823 - DNA, 852 bp, Pseudomonas aeruginosa
atgacccaagtaattgcctgtatagacgcttccgcctcggctccagccgtgtgcgactacgcggcctgggccagtctgagcctggaagccccgctgaccttcctgcatgtgctggatcagcgccagtacccggttacggccgatctgagtggcaatatcggccttggcagccgcgagcatctgctcgatgagcttgcttccctggatgaacagcgtggcaagttggcccttgaacaagggcggatcatgcttgcggccgcaaaagagcgggccattaaggatggcgtggccgcgccggagtccaagcaacgtcatggcgatctgctggaaagcctgcaagagctgcaaaccgaaacgcgcctgctggtcatcggtcgccagggcgaatctagcggtggtctgagtcagcatgtcggaagccagctggagagcgtgatccgtatcatgcaccgaccgattctggtcaccccggccaacttccaaaagcctgagagcgcgatgctcgccttcgatggcggcgctactacccgcaagggtgtggagatgctggcggccagccccctgctgaaggggctgccgatccacctggtcatggttgggcccgtgagcgacgaatcgtcggcgcagctggactgggcgcagaaagtgctgctcaacgccggattcactgttcgcgccgaggccctgaacggcgagatagagcctaccctccacgcctatcagaaagagcatggcattgatctgctggtgatgggggcctatggccattcacgtatccggcagttcctggtcggtagcaccacgaccagcatgctccgcaccaccaccagtccgttgttactgctgcgttaa

SEQ ID NO: 329824 - DNA, 204 bp, Pseudomonas aeruginosa
atgtccatggacgacgccctggatcttgcccatttcaagaccctgctggaacagcgggctgccgagctggatcaattgctggaagacgctgagtctcgctcgcaatcggtagagctggatcaaagcaaggtagggcgtctgtcgagaattgatgcactccagcagcaagcaatgatggctggtgtaaccaatgcggcgagttga

SEQ ID NO: 329825 - DNA, 963 bp, Pseudomonas aeruginosa
atgtatttgatggctaaaaactggctgagccgaacacggaaagcaagcgcttggatgtgggcactgctgtgccttgtgttgctcaccgtattccaagtccgcacccatcaccttgatgatcgtttgtacttctggataaagaccagctggcacaccgacgattggcaggagcgctctgtgtggctgcctggctatcgggttgaactggatgctaaggcggtccccggtgtggacaacaatctttcgggtctgacctttgaccctgacctaaacctgctgtgggcagtcaccaacggcccaaacgaactattggcccttagtcgtgacggtgatgtggaaaggcgttacaacctggatggcttccacgatgtggaggcggtctcctatgccggcaacggccagctggtaatcgccgaggagcgccggcagagcctggttattgtggatgtccccatcgccgaagacggtaagctttctcccgatcgttcattgagccgggaccagtatccagctctgaccctggcgcttggcaaggaggacaacaaaggccttgaagggctcgcctacgacctgaaaggtgatcgcttgtttgtgaccaaggagcgtgaccctcgccaattgctggaagtgggcggccttcgtgccagcctggcaggaggtttttccctgcacgtgcgcgacctgtccaacttggtaaaggacaaggtatttgccactgacttgtcttcggtcgtcttcgaccaacagagtggccatctcatactgctcagcgacgagtcgaaactgctgattgaaatgaccgatgagggcaaggtggtgagtttccgttccttggcgaggggttttgctggtttgctgaaaggcataccccaggccgaaggcgtaaccatcgatgatgaagggtatttgtacgtggtcagtgagccaaacctgttctatcgctttacccgtgaaccagattga

SEQ ID NO: 329826 - DNA, 228 bp, Pseudomonas aeruginosa
atggtcctgcaccaggcgttgttcctgcgcctgcagttcgcccaggcgggtttgctgcgcgagcagacgctgccggagcgctgccaattcgtgttccaggcgctgctggcgttgctcagtggcctggcgctcgtcgctgcgttgttgcgcgaccgatgcctggtagtgctcaaactgctcccgcgcttgttggggagcccgcagaattcggaaaaaatcgtacgctaa

SEQ ID NO: 329827 - DNA, 270 bp, Pseudomonas aeruginosa
atgcgtaacgccattacctacaccgtccttgctaccttcatagcccttggaactgttgccacgggatttgccgaacaggccaaagcccccgcccaaagcagtgccgagacaaataagggtgaggacatgcacatgatggacggcaaccatatgccgatgatggacatgcaggaaatgtccaagatgatgaaaaactgcaatacaatgatggagaacatgaaccaacacattggaatggagtccccgaagggcgatagcaaggcacaatag

SEQ ID NO: 329828 - DNA, 396 bp, Pseudomonas aeruginosa
atgggcccacggagtcataggccgattcgagtcgggctcggccaggccgaggacaattactccaagctcggcggcgccgtaaagacccgtttcctggacactgaaatcaaagtaggcgatgtcttccctgtcacgcctgtcgtgcagtacggcgattcgcgactgcttccggaaagcttccgcggcgtcaccgcatacaacaccagtgtcgagggcttggtgctacagggcggacgcctgcacgcgatgagccaacccagctccagcagcatgcgggatgattttgcaaccttctacgcaggcgaagtcggctctccgtggatagtcggcggtgattacacacccaacgacaaccttggcttcagcctttacaccagttgtctcaaggatgcctga

SEQ ID NO: 329829 - DNA, 333 bp, Pseudomonas aeruginosa
atgaaacacctaagactgctgctgatagtgagtgcgactctgctgtcatccaccgtatgggccgatggcagttccgatcgcctgtacggtaagatgatccaggccaacgagcaatccatgcgcgaatacgctagcgcccaaggcaagaacccgccagaagtcactcactaccgctatggcatgaagctcgacatcgccaaggtcattcacgtcacgtcgaccaatggcaactgcgatgtgatgcctgcgcaaatgacctacgaggattcgagcggaaacctgcatattctggagtaccgcgtatcaggaacggactgcaggagccagcactga

SEQ ID NO: 329830 - DNA, 216 bp, Pseudomonas aeruginosa
atgaaacacctaagactgctgctggtagtgggtgcgactctgctgtcatccaccgtatgggccgagggcgggagcgaccgagcgattgagcgaattgctgcacgcgagagggctgaagcgaccctggtggcggaaaccgtcaaggagattaagcaactgggccccacggcggcaggccgtagcgaagcgcagcccgcctgtccgcctgcaaagtag

SEQ ID NO: 329831 - DNA, 441 bp, Pseudomonas aeruginosa
atgaaaaacaatttggaaagcctgaccattggcgctttcgccaaggcggccggggtcaacgtggaaaccatccggttctatcaacgcaaggcgctgttacccgaaccggacaagccctacggcagcattcgccgttacggtgaggcggatgtcgcccgggtgaaattcgttaaatccgcgcaacggctgggctttagcctcgatgaagtggccgggctgttgaggctggatgacggtgctcactgcgatgaagcgcgtgtgctcgccgagcagaagcttggggatgtgcgtggcaagctcgcggatctgcgacggatcgagtcagttttggagcaactggttcacgactgttgtgcgagccacgggactgtttcctgtccgctgatcgtttcgctgcatggggacaactcgggcgttaaccgaggatttcccgttgcgtaa

SEQ ID NO: 329832 - DNA, 654 bp, Pseudomonas aeruginosa
atgttttgcgatattagactaacagcacgttgcacccgtgcatgcttaaccattctgttggcgggtactgcagcgtttggcttgtcaaacaatgcgctggcggcctacgacttttctaagctgggagcagcgatcgaaacattggcgccggagaccgtcgacggctgggaaaagaaagcgagggcgggcgatgccatggcgcagaacatcatgggtcttgcctacaaatgcggtatgggcgtaaaacaagaccatgctgcatcgatccagtggtttcgcagggcggccgagcagggtgaagctgatgcgcagttcaacctggggcgcctctacgcaagcgaagtcgacggtatgtataagaaagggcgtgcggctcctgccgacgatgcacaggcgttcaagtggtaccgcctctctgccgagcagggacacacgcaggctcaagtcaggctggctcaactgtttgcgaaggggctcggtgaggtcgcgcgcgaccaggttcaggcctacaagtggatgagtctggcagcagcgtcaggagaaccaacggcagcaaaagtcattgccgactatgcggctcaaatgaagcccgaacaggtgcagcaagcgcaattgctggtccaggaatggaaacgccggcaaagcgcacgctga

SEQ ID NO: 329833 - DNA, 639 bp, Pseudomonas aeruginosa
ttggacaagactatatattccaaaaagattgccgagagcctctcatctggcaatcatccagaagagttcgcaaccctcttcgtcaccctgcttcgtcagcttgtgatgggaaggcctgtgtcacgcgaagcgctcggcaccgcactcggatggtctgggcagagggttgcaactgtacttgagccggcgcccggtaccgaatatgacgagcagggcaatatcattggactgggcctgacgctacgcgaaacccctcacgtttttgaagtggatggccgccgtttatacacctggtgtgcgctcgacaccttgatgtttcccgctttgattggcaaaacagcccgtgtcacgtcgcgctgtgctgccaccggcaggccgattacgctcacagttgcgccagaagcagtgcttcaggttgaaccggcggaaacaatggtgtctctgctaacgccggatgcttcacccgacattcgctgttccttttgctgtcatgtgcatttttttgcatcgccttctgttgcaaatgcatgggcttcgacgcacccggggatagagctcgtgcctgtcgagaatgcattcggtctcggacatctgatcgcgcataagctgttagaagacagcgagcgaaacacggcatga

SEQ ID NO: 329834 - DNA, 342 bp, Pseudomonas aeruginosa
atgaatgcctactcgatttcgaagcttgctgaagatgcaggcgtaagcgtgcatgttgtgcgcgactacttgatgcgcgggttgttgcatcccgcctggcgaaccgaaggtggctacaacgttttcgatgccaaaacactggaacggttgcgtttcctgcgcgtggccttcgagtcgggacccaggctcgacgagttaacgcgactttgcagggcgttggatgcaggcgatagcaagtgcgtacacggatgtgtcgagcaactgcgtcggaagatcgatgtgcgccgaaaagagctgatggtgatcgagacctctttaggcgagttggcgtccagtgcataa

SEQ ID NO: 329835 - DNA, 417 bp, Pseudomonas aeruginosa
atggcaacttcaggcgcagagctagcccaacaggagctggtcgaagagtttgagatgtttgataactggatggaccgttatcagtacattattgatatgggaaagcagctgcctgactttccggaggagcgtcgtacggaagaatataaaatccaaggctgccaatccaacgtgtggacgtgccatgaacaggcaggcgacaaactggtgttcaaggctacatcggatgctgccatcgtatcagggttaattgccgtattgctgcgtatctatagtgagcgcacagccgaagagatcaatcagaccgagccgcatttcttgaaagatctcgggcttgataagcacctttcacccacgcgcagtaacggcctgcacgccatgttagagcgtatctatcaggtggctaagcaaggataa

SEQ ID NO: 329836 - DNA, 819 bp, Pseudomonas aeruginosa
gtgtcgcggctcaagaagcagtgggaggctgagcacgccgagtggcagaagcggggcttatcagagcagcgctacgtctactggtgggcagacggcgtgtacagcaacgtgcgcatggatgaccgtctgtgtctgctggtgatcatcggcgtcactgagcagggccgcaaggagttggtcgtcgtcgaggatgggcagcgtgagtcagaggccagctggaaagagctgctcacggggctacgcgagcgcgggctgacgacggcccccaagctagcggttggcgacggcgccatgggcttctgggcggcgttgagcaaggtctatccagagaccgagcaccagcgctgctgggtccataagactgccaacgtattgaataaactgccgaaatccgtgcagcccaaggtcaaggccgacctccatgagatctggatggccgagacccgcgatgaggcgcacaaggctttcgatcgcacggtgaaacgcttcgaggccaagtaccccagagccatggagtgcctggccaaggatcgggaggagctgctggcgttctatgactacccggcagaacactgggtgcatatccgcaccaccaacccgatcgagtcgaccttcgccacggtccgcctgcggagcaagcgcagccggaactgcggctccagagcgacgaccctggcgatggtcttcaagctgcttcagagcgcccagaagcgctggaagcggatcaaggggttcaacaagctggagctggtcgtgaacaacgtccagttcaaggacggcgaacccttgaccgatcagtcagacaggactgccgcctga

SEQ ID NO: 329837 - DNA, 474 bp, Pseudomonas aeruginosa
atgtacggagtcaagcgatatggaaaaaatttggagaatctgaccattggcgtttttgccaaggcggccggggtcaatgtggagaccatccggttctaccagcgcaagggcctgctgccggagccagacaagccctatggcagcattcgccgctatggcgaggcggatgtaacacgagtgcggttcgtgaaatcgacccagcggctgggctttagcctggacgaaatcgccgagctactgcggctggaggatggcacccattgcgaggaagccagcggcctggccgagcacaagctcaaggatgtgcgcgagaagatggccgacttggcacgcatggaggccgtgctgtctgaactggtgtgcgcctgccatgcgcggaaagggaacgtttcctgcccgctgattgcgtcactgcaagacggaacgaagctcgctgcatcggcgcgggggagtcacggggtgactacgccttag

SEQ ID NO: 329838 - DNA, 351 bp, Pseudomonas aeruginosa
atgtctgaacctcaaaacgggcgcggggcgctcttcactggcgggctagccgccatcctcgcctcggcttgctgcctggggccgctggttctgatcgccctgggattcagcggggcctggatcggtaacctgaccgtgctggaaccgtaccgcccgctcttcatcggcgcggcactggtggcgctgttcttcgcctaccggcgcattttccgccccgctcaagcctgcgcaccgggcgaggtctgcgccatccctcaggtacgtacctcctacaagctgctgtactggctggtggcggccttggtgctggtcgcgctcggcttcccctacatccttcccttgttctactga

SEQ ID NO: 329839 - DNA, 279 bp, Pseudomonas aeruginosa
atgagaaaactgctcgcatccttagccctcgccagcctggtcgccacacccgtctgggcggccacgcagaccgtcaccctggcggtgccgggcatgacctgcgccgcctgcccgattacggtgaagacggcgttgaccaaggtcgatggcgtgaccaaggctgaggtgagtttcgagaaccgcgaggccatcgtcaccttcgacgataccaagaccaatgccctggcgctgactaaggcgaccgaggacgctggctatccgtccagcgtcaagcaatag

SEQ ID NO: 329840 - DNA, 435 bp, Pseudomonas aeruginosa
atggcaaatcctctcaatctgttcacgcggatcggtgacaaagccggctccgtcggcgtgctgatttctgccataggctgcgccatgtgctttcccgcccttgctagtctgggggccgcgttcggtctgggctttttgagccagtgggaaggcctgttcatcaccacgctgctgcctctgtttgctggactggctctgctcgtcaatgccctcggctggctcaatcatcggcagtggcgacggactgcgctcggcctgatcggtcctaccctggtactggcagcggtattttttatgcgggcttatggctggcggagcggttggctgctctatatcggcctggccctcatgtttggggtgtcgatatgggatctcgtgtcgcccgctcatcgccgttgtgggccggatgcctgtccgacgccgccaaaccagtga

SEQ ID NO: 329841 - DNA, 1692 bp, Pseudomonas aeruginosa
atgagtaacgaaatgaccgaactgaaaatcattggtatgacctgcgcctcctgtgtcgtgcatgtgaaagaggccttggagaagattccgggcgtgcatcgggcggatgtttcctacgccagcgggaaggccgaactgaaggtcgacgagggcgcaagccgtgagcagatgcaggccgctgtcgaggccctggggtatcgagcggcgttcgaagacgccatggtacaagcccgtcctggcctgctcgataaggcacggggttggttgagcagcactgacgccgggaaagagggcgacaagctccacgtcgcggtcatcggcagtggtggcgccgccatggcggccgcgctcaaggcggtggaaggcggtgcccgcgtcaccctgatcgagcgcggcatcatcggcggcacctgcgtcaacgtgggctgcgtgccctccaagatcatgattcgtgccgcgcatgtggcccatctgcgccgcgagagcccgttcgacgccgggctttccgccatgacgccgaccgtcctacgcgaacgtctgctcgcgcagcaacaagaccgtgtcgccgaactgcgccacgccaagtacgaaagcatcctggagagcacgccggcgatcagcgtgctgcgcggcaccgcccgtttccaggacggccacacgctcagcgtgaaactggccgagggtggcgagcacatcgtagccttcgaccgctgcctggtcgccaccggcgcaagcgcggccgttccaccgattccaggactgaaagacacgccgtactggacctcagaccaggcactggcgagcgatacaatccctaagcggctcgccgtgatcggcgcctccgtagtggcagtggaactggcgcaggccttcgcccggctgggtagcgaggtcacgatcctggcacgcagtgcgatgttcttccacgaagacccggccatcggcgcggcggtgacggaggccttccgtatggagggcatcgaagtgctggagcaaacgcaagccagccaggtgtcccacgccaacggcgagttcgtactggccaccaaccatggtgagttacgtgccgaccaactgctcgtcgccaccggccgcacgcccaatacccagggcctgaacctggaagcggccgacgtgcagctggacgagcgcggcggcatccagatcgacgagcgcatgcgcaccagcgcagcggatatctatgcggccggcgactgcaccgaccaaccgcagttcgtctacgtcgcggcagcggctggcacccgcgcggcaatcaacatgaccggcggcgaggccaagctcaatctcgacgtcatgccggccgtggtgttcaccgatccgcaagtggccaccgtcggctacagcgaagccgaagcgcagcacgccgggatcgaaaccgacagccgcaccttgaccctggacaacgtgccgcgcgcgttggccaacttcgacacgcggggtttcatcaagttggttgccgaagcgggctccggccgactgctgggagtgcaggctgtggccccggaagcaggagaactgatccagacggcggtactcgccatccgcaaccgtatgaccgtgcaggaattggctgaccagttgttcccctacctgacgatggtcgagggactgaaactcgccgcacagacctttaacaaagacgtcaaacaattgtcctgctgcgcagggtaa

SEQ ID NO: 329842 - DNA, 363 bp, Pseudomonas aeruginosa
atgaatgcctactccatatccagattggccgaggacgcgggcgtcagtgtccatatagtccgagattatatgctgcgcggcttgctgcaccccgcgcggcgcacggaaagcggttacggcattttcgatgagcggtccctggcgcggctgtgcttcgtacgtgccgcctttgagtccggtatcgggctcgacgaattggcgcggctctgtcgagcgctcgatgcagacgatagtaccgatgtgatcgggtgtatcgaccgcttgcttgggcaaatcgcgacccggctggcagctttagacgcagtgaaaacggagttggccgggctgactcatcgtgccatcgaaggtcacacccatgcgtaa

SEQ ID NO: 329843 - DNA, 237 bp, Pseudomonas aeruginosa
atgcgtaataccaaccaatccgaatcaatcaagatgccccgctggcacgcctacacgtggggtgtgctcgccgcgctcacttgcccctgccatctgccggtgctggcattactgctctcggggactgcggccggggccttcgtcagcgagcattggagcctcgcgacgctcgtgctgacggttctcttcgtcctcttcctgagagcggctctacgggcctttcggaagcgggcgtga

SEQ ID NO: 329844 - DNA, 213 bp, Pseudomonas aeruginosa
atgaacgcaaacgacacccccactatcagttgctgcgaatgttgcaaggaaatttcccttgacgccgcactgacgccggaaggtaccgagtacgtcgtgcacttctgtggccttgaatgctatcagcgcttcatatcgcgcgcggataagagagcggcatccgagcctgatcacccctgcacaccagaggtcagtacccgtcacgacgactaa

SEQ ID NO: 329845 - DNA, 363 bp, Pseudomonas aeruginosa
atgcatatcccgccagcttcgttccgcgtgacaccttatggggacgtcgataccaaggtactcgactctctgcgtgcaagctacgacaccgctcagttgctcaacttggtcgaccggctggatgcctgccttgctgaaatcggaggggtcggcagcattcgagaagacttcctacgcctgcatggcatggccatgacggtactggaaggtttccccctcactgtggctaccagtgatgtcgacagtatttgggcgcaggcgatggcccttcaagaggatatttctgctttatgttcatgcttgcaggcgggttctaaacacgttgctcctttggcagcgcttgctcctgactatcaggactag

SEQ ID NO: 329846 - DNA, 3018 bp, Pseudomonas aeruginosa
atggcttcggtggaaaggacagcctacccgctcttgcccagtcagttgccagctaaggagctgcatcgatgctattccctgtctgattcagagatcgaatgggtcaataacaccgctaagagtccagcgctatcgattgggctggcaatccaactaaaggtgtttcagcagctacactattttgttccgttcgaggagcttcctcaggagctcatcagtcatgtccgacaatgccttcgctacggcgcacgaatagctccgcgctacagcaacccccgcaccctttaccgacaccaagcggcggttcggcagtacctgcaggttacacccttctatagcagcgacgggctagcgatcactgaggaaatcgcacgtgactgcgctgtagtgcttgagcagcgagtcgatctcattaatgccatgcttgatgagctgattcagcgtggctatgagcttccggcttattcgacgctcaacaacatcgcagaaaccgctttggcgagtgctcaggaagttaccttcaacctgatcgtgctccgagcgccaatcgaggtgatctacaagctaaaggagctgctcgacacggatttcgggcgtcggcagagtgacttcaacgcactcaagcaggcacccaagaagccttcccgcaagcacctggaggtgttgatcgaccacctggcgtggttagagagcttcggagatctggatgccattcttgagggggtcatcgatgctaagatccgccacttcgccacccaagccgccgcgtcggacgtcgccgagctgaaggactgctcgctgccgaaacgctacacactgatgctggccttgatctatcggatgcgggtgcgaactcgggatcacctggccgagatgttcatccgacggatttcgacgatccacaaacgcgccaaggaggagttggagcaaatccaggcgcggcaacgccagaagctggagcaactggcggccaccctggatggcgtggtgcagattcttgttcaggaaccggatgaccaggaggctggcagtctgatccgggaattcctctctcccgatggcaacctggatcggttgcgcgagacttgcgccgaagtccaggctacgggcggtaacaactacctgccgctgatctggaagcacttcaagtcccatcgctcgctgttgttccgtctgagccaccttcttcaactggaacccacgactcaggatcgctcacttatccaggcgcttcagctcatccaggacagcgaaaatctacaccgcgagtggatcgacgagcatgtcgacttgtcgtttgcgtcggagcgctgggttaaggtcgtgcgtcgtcctgccagtgaagggccacctaccaaccggcgctatctggaagtctgcgtgttctcttacctggccagtgagctgcgctcgggtgatatgtgcgtgctggggtcggaatctttcgccgactaccgtaagcagttgctgccctgggaagaatgtttccatcgtctaccggcctactgcgaaaaggtggggctgcctggcacggcgaaggagtttgtcgcctccctcaagattcagctggaggaaaccgcgcagcatctggatgaaaaattcccttcttgccgaggtgacgtatcgatcaatgaagccggcgaaccggtgctacgccgagtgatagcgcgggacatcccgccttcggccatctcgctacagacggcgcttatgcagcgcatgccggccaggcacgtgctcgacatcatggccaacattgagcattggattcagttcactcggcatttcgggccgatgtccggcaacgagccaaagctcaaagaaccggccgagcgctacctgatgacgatcttcgccatgggctgcaaccttggccccaaccaggccgcacggcatctggccggtaatgtcacgccgcacatgctgtcctatacgaatcgccgccatctctcgcttgagaagttagacaaggctaaccgcgagctggtggaactctatctgcaacttgacctgcccaagctctggggcgatggcaaggcggtggccgcggacggtacgcagttcgacttctatgacgacaatctgctggccggctaccacttccgctatcgcaagatgggggccgtggcgtaccgacacgtggccaataactacatcgcggtgttccagcacttcatcccgcctggtatctgggaggcaatctatgtgattgaggggttgctcaaggtcgacctcagcgtcgaacccgatacggtgtactctgacacccagggccagtcggccacggtgttcgccttcactcatctgctgggcatcaatctgatgccgcgtatccgcaactggcgcgacctggtgatgtgccggccagatcgcggcgtttcgtataaacacatcaaccgtctgttcaccgacaccgccgactggcacctgatcgaaacccactggcaggatctgatgcaggtcgcgttgtcaatccaggccggcaagatttcctcacctatgctgctgcgcaaacttggctcctacagtcggcgcaacaagctctatcatgccgcgcaagcgctgggcagcgtgatccggacgatcttcctactcaactggatcggcagccgcgagttgcgccaggaagtcaccgccaacaccaataagatcgagtcctacaacggcttctctaagtggctgtcctttggcggtgacgtgatcgccgaaaacgatccggacgagcaacagaaacgcctgcgctacaacgacatggtggcctcgtcggtgatcctgcagaacaccgtggacatgatgcgcatcctgcagaagctcgcccgtgatggctggcagttcactgacgacgacgtatcgtttctcagcccctacctaaccagcaatgtcaaacgttttggggagttcaacctgaaactcaaacgcccaccggaaccctggatcaaggattccattttccagcaggctgcgggatcaatgcgtgcgaaacagatgtctgacagcaacgttgaggtgacgaactga

SEQ ID NO: 329847 - DNA, 126 bp, Pseudomonas aeruginosa
atgagcaagcaacgacgtacgttttccgccgagttcaagcgagaggccgcgcccctggtgttggaccaaggctacagccatatcgacgcctgccgttcgctgggtcggccttgcgccgttgggtga

SEQ ID NO: 329848 - DNA, 555 bp, Pseudomonas aeruginosa
atgatcgacccagcagacaagcaaacccaagccctccccctggagcagccgaagcgcgggcgcggtcggccagccaccggcaaagccctgtccgatgcagagcgggcgcggcgctaccgggcgaacaagaaaaagcgtgacgatcaaccgtcacgaaaagacaacgaggacgggaaagaagcgctgcaccggagaacagtgatccagcaagctgagcaaatacgggcgcttgaacagcaactggtgcagcagcgcgaggaatacaacgacctggtgcacaagctcatgactgaacgcgaccagctcaagcgcgacttggctgccaagccaaggcgtcaccgcgatcaacctgccgccgaactgccagagagcgcctacgaggacgaacccggggcgaagacctggacgctccagggacgcagcggaagcggcaagtggcagaacctggccgcaggcctggaccgcaaagaagccagccggcaactggatcgagtgatcgacaacaagatcctaggcgctacgaaaggccgccaataccgcatcgtcgaagaataa

SEQ ID NO: 329849 - DNA, 270 bp, Pseudomonas aeruginosa
atgactactcatctgatcaccctggtcatcaagcagccgagcgacgctcaggcacgccaactcatgtaccaggagttgctcggcctgatctcacgctacggcggtgaggtgacgtccaaggccttggaggacgagtcgaccctctgcgagctgctggaacagatgctgcctgatgatgaggtagagcaagccaggaaacaggtgctggaacttcatgccaagcgccgccaaccgggccgcctggactcgccggcgagcctgaaggtgtaa

SEQ ID NO: 329850 - DNA, 582 bp, Pseudomonas aeruginosa
atggcaacgtctgtaatccgcgccctccaactggccgccctgctggtcctggccaacatcgctcaggccgccgtggatccaccgccggcgtataagcagatcgccctgcccaaaggggttccggccgaggtgctctactcggtcgcgctgaccgagagcaaggtcctgctgcgcggcgaatacgttccctggccttggacattgaacgtcgccgggaaatcctactactacgcgacccgcaccgccgcctgcaccgcgctactcgcggcgatcaacctctacggggccaagagcgtcgattccggcctcggccaggtcaacatcggctggaacggacatcgtttctccagcccctgcgagtccctggatccgtacaagaacctggacgccacctccgacatcctgatcgagcagcgggacgccctgtatgcatccgccccgggaagaccggtggactggatccaagttgccggccgctaccaccgccccgccggcggcgcgcctgccgccaaataccgtaggacggtatcccgccaccttagccaagtcctcggcgtcaacctactggtgaccaatccatga

SEQ ID NO: 329851 - DNA, 180 bp, Pseudomonas aeruginosa
atgggttccgcaaaactttccgcaatcgcagaagatctacgcaagattggaaccacggcggtagccgctggtttgatcggtatttttctcggcgagcatcgcatcctgactgcccttgcgctgtcggtaggtgtggtaatctggtctacaggtatctacctgactcaggaggaatcttga

SEQ ID NO: 329852 - DNA, 294 bp, Pseudomonas aeruginosa
atgaacaagtctgtagagctcgatatcccgctgggaacactggtgaacttcaaattcaaatttgaaggcattgccgacgaaaagcctgtgtcttacagcgcatcggcaactgcaaagctgagtccgaatccaactgacgagcagattgaggaagaggtcaacgctgtgatcggcaaactgctgcagcagcatgcggctgaaaatggctggaaaagcatggctgacggcaagtgtgaagtcgaactcatcgataagaagcacttcggcaccaaggttgatgcaaccttcaagtga

SEQ ID NO: 329853 - DNA, 1224 bp, Pseudomonas aeruginosa
atgccaagctctgatcgcgtattcgccctgatcgactgcaacagcttttacgccagctgtgagcgagtgtttcggctcgacctgcggcacaagccagtcgtcgtcctgagcaacaacgacggctgcgtaatcgctcgctcagctgacgccaagccctggctcaaaatgggcgagcccttttttcagatcaaggacaagctccgcaagcacggcattgtggcgtgctcgtcgaactacgagctctatggtgacctatcggagcgtgtgatgaccgtcatcgagtccatggtgccggcgtcggaggtctacagcatcgacgaggcctttgccgacctgactggcatgcctggcgatcttgagctacttggcagaaacatccgggccgaggtctatcaacgaactggcatacccgtgggtgttggagtcgcttccacaaagaccctggcgaagctggcaaactttgccgcgaaaaaatggcagagtcacacaggtggtgtcgtcgatcttcgtgacaagaccaagcgcgactgggtgctgaagaaatgcgatgcgtctgatgtatgggggattggccggcgaatgtcggctcaccttgaggcgatgggcatccgaactgcctgggagctagcccacgctgacgcgtggacgctgcggaaaaaattcagcgtcgtagtggagaagacagctcgcgagctggccggcatcacatgccttgagctcgacgagcccaacccaccccaaaaggaaatctgctgcagcagaatgttcggccagcgcctgacagatctggcgcccatcaaggaagccgtctcgacatatgcttcacgagccgctgaaaagctgagggcccaagagtcgctatgtaagcgcgtgcgggtgaggatcaggacaggcatgttcaatcccgacgaggcaaagtatgcgaacggcgtgcttgttcagctgccgtatgccaccgatgacactcgcttgctcaccagggccgccctggaaggtgtggagcgtgtttatcgtgagggtttccgatacagcaaagccgaggtattgctgctcgacctgagccagcgcggggaaatcacaggtcacctcttcacagcctcacagcctgaggcgagtgaaaaactcatgggtgtcctggacaccgtgaatgcccggtgggggcgcggcaccatgaggctggccagcgtgcctgccgatccctcttggggcatgcggcgggaatga

SEQ ID NO: 329854 - DNA, 1068 bp, Pseudomonas aeruginosa
atggcattaaatgcagtcaaggagtgggtacgtcgcctggggattggtagctggaataaggtggagattcgaagcgaaggcgcgattccaactgcagggcccaactactgggatctgtctgctccgtcgtacctgtacccactgctggggtcgaacggaatcggcaccaagcccaagccgggctcattcgtgtgtgacgtctacctgggtgggagggtgtcggcgagttcggctaggacattcgtcaaaaagtgcacgaatgtccgtggtttcaagaaggtggcgcctgtcctgcagatgtttcttgcgaacggctttgataaggaggcggtgaacattattcgggccaacggcgcgattgctgccacgctcgactcgctgcttggcactgacgttgctcatggcctaaacgagctggcttccgtgttgaaggcgactgccataaacctgggaacgcccgacaagatcgatgctttgttcagcgccctcggcaaaattgagggggcggaaggtacgctacgtgggtgtttgttcgagtacctgtgcgctcaactggcagaggagacttaccgcaaaccccatatcaccatcaacaagctagttcgcggctcggagagcacccgcgccgaagttgatgtgttcgtcgaggtgggaaacaccgaactcgtttttgttgagtgcaaagggcacttgccaactggccaggtagatgacgctgaagtcgagaaatggttgatgaaacggatacccgtccttcgcgaattcgccaagcatgaagaaggctacgccaagctcaagcagacgttcgagctctggacaaacgccacgattagcgcggagtcgaaagccttgatcaagcaagtaaacgaaaagacgcagcggtactcaatcgcataccgagaaggttccgatctccaggagatgatcaaagagtcgggaaaccagtcgctactcaagacctacaagcaacacttctctaaccacccgcttgccgttgctgctcgaaagaaaaccagccccaagacccactccgatacagaaagcagggtcgagtctaacgctctgtga

SEQ ID NO: 329855 - DNA, 297 bp, Pseudomonas aeruginosa
atgagctatctcgtttattgcacgtttgatctgaagaatgcgtcctcgagagattatgagaaggcgtatgaggatttgaatgcgattggcctagccaaggttgttaaagcagatgctggccaaaacgtggtgattccaacgacttcgacaatgggcttcttcaacggatcgggagtaggtgccgtccgtgattcggttcgcagctctgttcaaaaggcgttcgccaatcgggggttcacctccgaaatcttcattgtcgtgggcgagaattgggcctggggtggcgccactacttaa

SEQ ID NO: 329856 - DNA, 207 bp, Pseudomonas aeruginosa
atggtccagtatttcgtgaaccggaacaagcaggccaatggtgaccatgaagtgcacaccagtgtctgcacctatctgccagctcctcacaaccgtcttgacctgggctaccacattacgtgtgccaccgctgtgcgccaggctcggaatgtctatccccaatccaacggctgcaaatactgctctaccttgtgccatacgcagtag

SEQ ID NO: 329857 - DNA, 255 bp, Pseudomonas aeruginosa
gtgccgaaaaatacgaagcaaacctcctccactgtagccaccctggcttccgaagtccttcgcagcggcagttcgtctgcgatccagaaggagctggccggctcggctatgtcgcaggcatccactggtaagcaaaccagtgccgagatggagaccaaagccagccgggttctggaaagtgacaagtacaacgccactaccaaagcccttgcggggtcggtgctttctcaatcgaacaaagagcgaggcaactga

SEQ ID NO: 329858 - DNA, 1074 bp, Pseudomonas aeruginosa
gtgactgaacgcgactacaaaaacatcaacctcaaacgatgcattatcgaggaaacgactcattgcttcatccgagataatggcctgaagctgcgatcctatggtgacaagcctgggagttccggtcttcgagtagtcttcggaaaagcagggattgaagatgccacgcttgatatttttttcacgaatgtcggtgcgtctaccctgacctacaaggtgggcaagaaccaagctctcggccagcagctagcggatgctctttacgaaacaatccaccccgatgaattcgtaacgatgaaccttggtatcaaaggcgtcgatctggatgatgccgaagcccttatcaaggaactcactgagtcagccaatgcggacattgaggttgcttcgcgcacaagcgctgatcgcaagcatatttggaagctcaagtctaaaaagaacttggatgagttgactgtcactcagcacgagaacacccataaactgcagatccagggtcgtcctctcagctgctatcagcagttgagctacctgctcaccgagctcctagagatcaacgcactcgaatgcatcctgttcaaaaaggaagaaaatcgctcggagttcgtttgtgccgaggtcgcggaaagcgtactcaaggaaaggtttggcgactgctacgccaacctgccacagacctcgcgtaggctgctcctggcaagcctttgcgtgaggcttgccagccccgcgctacccgactactgcatgctggtttatccggaactccgcacccttgaaggcgcgatcaaacagaagcttgcagaaaaaaacctttcaaatcaggaagaaagcttcggtggcttctttaccaagaccaatggtcagttttatctgaagcagcaataccatgctgatgtcggcgatgctaaactacagggtcatctggacaacgcttacaccttcttcaacaagcaacgccacggattgttccacatggaagagatgccatccgttagtcgaatgattagcaacatcacccaagctgtgtcattgtgtgatgaagcatatgatcatatcaagaatttgtatagctaa

SEQ ID NO: 329859 - DNA, 294 bp, Pseudomonas aeruginosa
atgacggtagttaccgctaccagttatgagaaccccttatctcgtctttctattattgctagcgagatgcgcaatacatctcactccagcaaggagatagttctattcgatctactctgctctaacggagaagagtggaatcgtttcgtctccatcaattacaacggcaccgacttcgaaaaaagcacctgtagcattgtctccaagtccgacatccctacagacctcttggaaacacaaactcgcttctttcaaatccatccacaatatctgcttgattcagttttgaattaa

SEQ ID NO: 329860 - DNA, 651 bp, Pseudomonas aeruginosa
gtggtgattggcgcccaggaggatcagtacccctgggggttcatcaacgacaagggacaacccgacggccatgacatcgaggtcgccaagctgatcgccaaggagctgggtgttgaactccagctcgtgagtatcacggcccagaaccgcattccgatgctgctcacgcatcggatcgacttcctggtgccaggcatgtcgatcacgccggagcgagcgaaggtgatccagtacacgttgccctactcgagcaacgaggtcaccgtcttcgctcctgggacatcgaagatttcgaacatggaagacctcgccgacaagacggtgggtgtggcaagggggagcattttcgacacgttgctcacgcagcgggctccatcctctgcaacgatccgacgcttcgacgatgacgcctcgaccgtacaggcgctcgcatcgggtcaggtcgaggccatcctgggtagcttcacctacgggctcgcgctcaacgcaggtgcaaatggtcggtttgaggacaagttctccgtgtccgacaactacctggccatggcggtacgcaaggaagatgcggccatgctcgactggctgaacgccttcgtgcagcgcaagaaggctgatggaacgctcgccggcatctacgccaagtggagatga

SEQ ID NO: 329861 - DNA, 195 bp, Pseudomonas aeruginosa
atgaacgaacaaaacgacatcgacatcagcgatgggaaggagtgggaacgcgatctgcaggtgaactacgtggtgcagagtggctcggccaaaggcctgacattccgtgttcgccaggcaacctaccgcagcgacttcaccgccgatgtgaacgagcttcgcgtcatcacagaaatgccgatcaagatcttctaa

SEQ ID NO: 329862 - DNA, 297 bp, Pseudomonas aeruginosa
atgaaaaatgacggtgctatccaggctgaaatggagtttgaaaacaaacttcgtgctctgcttggtgagtatggttacagcctgcgggaggtgatcaacatccttgatcccaaggctctaactcgcgttgcggccccagtcgcccaggagaaaggcacccgcaagcctcgtgagttgaaggtctacaaaaacccgcacaacggcgagctggttcagactaagggtgggaatcacgcagttctgaaggcatggaaagccgaacacggcgctgaaaccgttgagtcctggcgtcagtaa

SEQ ID NO: 329863 - DNA, 384 bp, Pseudomonas aeruginosa
atgacagaggacaacatggtagcggtcgacttccacgtgaagcgctacagcgatttcgatctgctgcgtattgcccgagctgtgggccaggggtatgacggcgagatcactgcgtttctggtgaatgtccatattcatcgactcagtgccgttggcgtcgtcttcgggcatgtgcggcaagggcctcatggccggtttgctgatgggcatctgatccagacctccgacatcgtggctatcaagaaagaaggtaggttctgggtgatcacgaccatgaactcgaagtacgtcgtggccacttttcgccgtgatggtggacgccggagcctgagggatttttgtcgcctggttggagaccgtttccccaatacacagctgcactga

SEQ ID NO: 329864 - DNA, 471 bp, Pseudomonas aeruginosa
atgttccgcattagcacgcaagaccaagctgggccggtaggcatgtttggagacggtctggctcactttcatgccgtcacacgatctctggccacgcactggtatcacgtcagcctcaagcgcaggcatgaggatcggttcgttgcctacgaggagatgctcaacgatgagatgcgcctcgtcgagttgctggtagcgcaagacgagagcctggtggtgcaggaagtccaggccgtcaccccatcctggatgaacaaagatggtggctggaagatggagaagctcacgtcgctctcgatgggacacaaccaggctggtgtggccgtctgtgttctggaagtggagggtggtgctgtgtacgtcgatacgcatgagcctggtctcggtgcggactccctgaacggcgtcaaagagctgtatcgacgtggtatggctcaggccagtgctgcagcagagccccggagggcgtag

SEQ ID NO: 329865 - DNA, 396 bp, Pseudomonas aeruginosa
atgggtaattctccggagcgtgaagagctcccggaaggtgaggtctcgtctgccggcacgttgctgccgagggcagagatcgaggcgatggtcgctgagcggtttcccaggaaggcctactgcctggttgaggactggatcctcttccacgtggacgagccacctgagtcgttggctagggtgcgatctttaggccttgagccgatcttcatgtacgcccactgcgtcatctatgacgagcagggtcgatttccgccaggagggtgggtgcgctcgacgttgtgcaagacgttcgatggcgtatgcatgtttgaaacgcgcaacacggtctacgtgctcatggggcaaggacgcgagatcactgcgacgctgaaggcaattttcgctctatgttaa

SEQ ID NO: 329866 - DNA, 456 bp, Pseudomonas aeruginosa
atgtccttgcggaaggcatacgcagcaacgttgcagtggcttagaattcggaggggtctatcgcagtccgaccttcaaaaacaggctgatcaggctcacatcagccgtctggaggcatcgacgacctcggccacagtcgacctcacctccgaactagcagatgccctgggcgtcacgccgctgtcgttcttcacgctgctcgccgcagcgaatgaaggtaaaacgcctcggacggccttgatcgagaccctcgccgagttgcagatccagggtctcctggatgagaagctgcccgccgagccgcagaagctccctcccccacgccaggtagctgcggctgagaagctcagggcgatacgagcattgaaggaagccggcctcagtcaggccgaggtctgcaagaagctggggttgccgagcagcacggttgggcgcatgtggcacgttgatgaataa

SEQ ID NO: 329867 - DNA, 213 bp, Pseudomonas aeruginosa
atgatcatcctcgaccgccttgtcgcccggctgttccccgaccgccgttctgagtgggaaaagcaacgtgagcgtgagttcatcgaggcggtgaacagcctcaagacgctcagggtgacgccggagggtggcatggccatcgatcctgaggaaattcgtgagcaggtcatcgagtcgcgggagcggctgaagcaattcgtccgcaagtcatga

SEQ ID NO: 329868 - DNA, 588 bp, Pseudomonas aeruginosa
gtgctcagagataaagaaatccgaaccgctttagttgaccacttaatgaagcggtcgcctaaacctgctcgcgtgctcgaagagctcaccatcgataacggcaacgccattgccgacgtagttgcctgctaccgagagatgcattgctacgaaatcaaaggcgaaacagataacgttagaaggattctgtcgcagtcggagttctactccagatcattcccgaaactgaccttggtgaccaccgagaaccatgtgcgctgggcaatggaaaaaatccctgcctattggggcatcatgctcgccacacctggtaaagatcggacaatgttgcgttacgtccgcaaggccggcaccaatccaatgttctccaagaaagatgcccttctaatgctctggaaagcagagttgacggccattgcgaccgcacatcctgaagtaattttcaaaaagtctttcaaccgtgacgatattgctgagcaaatcagctatcagttgagccgtgacgacgccctggcaggaatccaaggcgccctcatcgaaaggcgctcaaatgttgttaaccacgaaagtgatgtgagcggcggttga

SEQ ID NO: 329869 - DNA, 1077 bp, Pseudomonas aeruginosa
atgattaaatatgttccttttctgaagcttaagcagaatgagatccaaagcgtaggggtgttggacggaggcattcgcgatcaaatcgctccgatgtacgacattccccgaacgcagaaagtgatggatgaagctgaggtcattgaccgcttgaggattgcagataaagaactaggcaatgctcgtgggaaggacatagattacaagtttttcgtcgacaatttcgacgtcgatgacagtgttgatctgggtggtgtcccgcagtaccgggctgtgctgacaatgctgtcgaattatcgagttatgcccgttctggcctttgatcggcacccggatcataacgttgcggcgcttgatttcgtgaagtcgcgacctggcactgatgtcggcatccgcctccagatgatcgacatcgaaagctacaacctcacgaagagtaatcttcaggcgctttgggtggacttggcggtcgccaaacctgacaatgtcatccttctgatcgacctgcgtatcatcgaagatccatccgattccaagaagaaagtggaaaggtttgtagccagcttcctgggtgacttcccaggtgccaaggtggttgtctcggggtcagtagtgcctgcatctatcgcagggctagtcgcgacaaactccaaagcccatatccctcgggaggagtacaggctgtggcgtgctctgaacgctactcctgccttcaagggggtcttgtttggggactacggggtggtcagcccggagtattcggactttgagatggagcctgagtacattagtagtcgagcggcaccgaaggttttctacacctatggtgatagcttcttcattgcacgtgggcgacggttcaaaactcacaagttcacacagtatttcgatatttctgatgtgcttgtggatgagccattttttagactaagtacgccacattattcattcggcgagcagtacattcatgaccggagctacaaggctccggtaagatcgaaaaagacaggtcacccaggaacctggattaaaagctcaaccgccgctcacatcactttcgtggttaacaacatttga

SEQ ID NO: 329870 - DNA, 867 bp, Pseudomonas aeruginosa
atgtctgactctccagaagggcttccaggcgacttcgaggtttatccgtcctcgcgggatgctgcggttgagttcacggcggcgctgtccagcctgaagaaagcgctgaaaccggcggatgccaagacgcatgcgcggcctggtgaggcgtatgacgacttcatcattcggctcgccctcaacgcgaccaacaacaaggcggtgctctaccgcaagaatgactcggcggaagagaccaagatccaggcttggttgtcgctgatcaacgagaagtccaagttcgccgtgctgagccggaggatgcctgatttccaggggctgagcgctcaacacctccggcagatcgcgctcctgagcctcaagcctgaaaacatcacctccctggtagatgttttggctgagtcctatggcgtgcttctggtggtggagccgggcttcaagtcgatgaaaatggatgggtgcaccttcaagttgtcgcagggtacgcccgttgttggcatagcgcttcgatacaaccgctacgataacttctggttcacgcttatgcatgagcttgcccatatccacatgcattacgactatctcgataatccgatcctggatgaccttgaggaagacaacgactctgatcgcgaagtcgaggcgaacatcattgccaaagatagcctggtctctcggcaatactggcggacggcttggaatgccagggccaacaagaaacaacttttggatatttgcgctaaggctgaagtgcatccgtccatcatggcggggatgattcgtcaccaagccaagaactacaagctttaccctgaattgcatcactctatggacgttaaaagcgctttcgggtttgccaatgattaa

SEQ ID NO: 329871 - DNA, 657 bp, Pseudomonas aeruginosa
atgggcgcgttgatgagtgagccaacgctgaagtgccgtcacacggggcaggacgtgccgtaccagattcaccagggtctggcacccatgtacgtgttccagctgaacgagcagtgggatgccgagaagcgccagatcctgaggcagctgatggcggatgtccctgcagccgctgacgaccccaacgtgcttttcgatcaattgccggcgtatggcctgacggatttccattggagctggctcgataaggcattcgccttccgtagcgatgactaccactggttctttctgagtgcccaaggtcggattcaggcgacctgcgtcatctaccatcccaaggaaagccgcctggatggggagcgcattttctacatcgactacgtcgcgtccgcctactggaaccgggatcgaccgaactacgtgaagcagttcggcagcgtcagccggatcctgatcgctcatgcttcccacttcgccatcaaccagctgggctaccgtccaggcttctgcttgcattctctgccgactgcggaggggtactaccgctacctcggcatgattgagtacgacgctgatgccgacaaagagaacctgcgctacttcgaagcgcctcctgatatagctgggaagctggcaggggaggctcagcatgtctga

SEQ ID NO: 329872 - DNA, 687 bp, Pseudomonas aeruginosa
atgagcatcttcgacacagctgacaaacgcgtactgagcaaaagcgaactgggcttagtgatcaagcatctccgcgagcttcgccaatggtcacaggaaaccctggctcagcttgctcacacaacagatcgaaccatccagcgcattgaggccggatcagggacaagcgttcacaccctgcgggctttggcggtcgcgttcggtttccaggatattgatgctttcaccaagcccatggccatccctaccgacgagcaacttcaggcagcctgtgagcagttcgagaaggactacgtggtaaacaaggctcacaagcccgagtcaggacgttgcctggccaagctggcagaggaaagtgtgggtgactacatcgaaccggcatgcgagctgtcgcaagaccaggcgctcacctttgcagagctcacggattatctgcgggactaccgtgaatgtgcagagcactattcgagcactggacgccttgaggtttacgaggaactccagggccttctggatcgcctcggcgaacagggtgtcaccctgcgctacgcaacccgttccctgctagaagctggtgggcaggatcaccccctgggccggctaccggatgggaatgtcctgtacctagtgggcttcctagacggagaggcgccagacgagctcgctctgccacggaaaatgatttag

SEQ ID NO: 329873 - DNA, 453 bp, Pseudomonas aeruginosa
atggctcacctgcagcccacggtgcggacattccagctgggagccagcgaggtcagcgtcgaattcacattcggtcttcactgcttcaccgacagcaaggaaaacggggagctgatcgtccacccaaagaccaaggaagaacgctacttctgcccgaatcggtatgcgctttccaagcaactaatcgactacatcgacaggcgcttcattgattcgaaagtcagggcccacttcgctggcaaaaacaacaggcgttacttctgcctggatgctcacgaatatgcgatctttttcgagatccgcaagccccagaatatggataacttcctccgcctcaatgtggtttcggcctatgaagtcgaaacatgggggcgtggtggaatgcctactaaagggcagctgctgaacgttcgctacgtgctcgaaaagcgaaacgagggtgtcgccatctga

SEQ ID NO: 329874 - DNA, 2523 bp, Pseudomonas aeruginosa
atgatttctctacctattgacctcgtattgccagacctacgagaggctctggccaaccgcaacgaagtgatccttgaagcaccacctggtgcgggcaagaccactcgggtgcccctggcgctgctgaaggaaccttggcttggtgaccagaagatcctgatgctcgaacctcgccggctggctgctcgggcggcggctgagcgtttggcgagtcagctgggtgagaaggttggtgagaccgtcggctaccgcattcgtctcgagagcaaagtaggcccgcgaacccagatcgaggtggtcaccgaaggtatcctggcgcgccggctccaagatgatcctgcgctggacggggtgggcgtggtcattttcgatgagtatcaccttcgaaaccttgactctgaccttgcacttgctctgtgcctgagtgcccgcgaactgctgcgtgatgagcccccgctgaagctgctcctgatgtccgcaacaatggagggtgctcgcctttcaaaggtgctgaatgatgcacctgtggtcaccagtgaagggcggatgtatccggtatcgacggtttggggtagcccctatcagccgggcgagcgaatcgatgcgcgagtcacagatacctgcctggccgccatcaatgagcagtcgggaagcgttctggttttccttcctgggcaggcagagattcggcgggtggtagaagacctcaaggagcagctgagcagccatccagaggtgatcgtatgcccgctgtacggtgacctcgacctgaacgcccagcgtgctgctattgacccagcacccaagggctcccggaagatcgtactggccacgaacatcgccgagaccagcttgaccatcgaaggcgtcagggtcgtggtggacagtggtctcgagcgagtgccgaagttcgatcctcgcagtggcatgacccgactcgacacccagcgtatctcgaaggccagtgctacccagcgtgcggggcgggcagggcgcttggagccaggtgtctgctaccgcctgtggtcggagtcgcagcacgatcagatggccggctacagcaccccagagatcctgcaggcggatctcgcagccctggctctccagctggcccggtggggaatgaagccggaagagatgacctggctcgaccaacctccatcagctcctttcggccaagccagagacctgttgaagcgcctgggcgcactcgacgatgcgggacagctcacaccgcacggctcggccatgagcgagcttccagcgcatccacggatcgctcacatgctcatcaaaggcaatgcgatgggcttggatgacctggcgtgcaacatcgcggcgctgctcggtgagaaggacatcctccgtggagccggtgctgaccttcacaccaggctgagtgctttgtcaggcgagcaacatccacgtcgtagtggtggttccctccagcgggtgaagcagtctgctcggcagtaccgatctctcctacgtgggaaggcctccagccctgtcagcgagcccgatcacccacggtgggtagggtgcctcctggcgtttgcctaccctgaccgaatcggcctgcagaggcgtgcaagtgcattcgaataccgtctctccaacggtcgtgctgcggtgttctcagagcccgatgccctcaccaagcacgagtgggtggtggtggccgacctgggtagccggcaagggcagcgcgaagagcggatctacctggcgagtgacctctatccggccttgttcgatgacgagctggctgaccttgtgaggtctgtcgatgaggtcgactgggacgaaagggaaggtgttctgaaggctgagcggcagttgaaggttgggcagctcatcttgtcgacgaaagctctgccgagtcttgatgagcaaacccgttcgcttgccctggtcaacctggtgaggcgcaagggcatcgaactcctcccgtggagccccgagctacggcagtggcaggcgcgggtcgacctactgcgtcagctggatatccagagtggccaggcacagagcaaatggcctgatctcagcgatgccaaccttctggaaacgctggaagattggctcacgccgtatctgggtaaagtcacgaggctcagtcatttcagccagctggatctgtcttcgatagtcagaaacctcctgccgtggccgcttccacaggagttggagacccaggcgcctcaagcgatccaggtgccgtccggatcgaatatccgcatcgactactcgcagcatccgccaatcctcgcagtacggctgcaggagctgtttggcctggcagaaaccccacgcatagcccagggcaagcagccgctgatgttgcatctcctgtcgccggcccgcaggcctgtgcaggtcacccaggatctcgccaacttctggcgcagcacctatgtcgaggtgaagaaagatctcaaaggtagataccccaagcattattggcccgaaaatccattggtggccgaagccactgctcgtgcgaagcctagagggacgtag

SEQ ID NO: 329875 - DNA, 525 bp, Pseudomonas aeruginosa
atgagttgggagcgagacgtggtcgaggcagtgaatggcatggccgaagagattgcggagattagaaagtttcaagaggcctgtgagagagatagggatattgggacactaatgcagctcaacgaaaagctgatgactcaggcctcaaactacacgaacctaattatggtggcagggtatgcggggctctttgggctatggtcaaccttggttgggcgtctgcctcaatggctgtatgctttgtgcggtttgctggcattgctatctcttctccttttcgtctcttgggaaattatcaagatggtgtggggaagcctgtacgttaaacgcaccaatcggataataacaacggtggctagagggaaaaagccgatggatatgtatcaggcggcaatgtccctctataacgtcaagatgcataaggtttggttgtggtttttcgttccaaccgtagtgttgggagtaggggctgggcttttgcttgtcggttacttcagtcttgaggtgtggtgctcgatcagctga

SEQ ID NO: 329876 - DNA, 420 bp, Pseudomonas aeruginosa
atgaaaatacctaccgatttgatgatcctcagacttatatacaagctctactacgaagaattcaagaatttctcaaaggaaggtgatgttgataatgggcgaaagaccaagattttcgtgccaattgattgcaatctgatagccgatgagttgaatgtcgatgctgatatcgtcttcgggaggctctactactacatgcaagagaggtacggctacacgcgagacgatggcagcaaagtcgccttctacgcaccgatagcgggagagtccaatcgctgtatcaattttcctatgctcgcatcagtgctcgcgggattagaggaggagaacagtaaagctcaaggagccatctacctatccctttttgctacagcgattgcaattgtctctgtcatcgtcacatggctgacaaaaggatga

SEQ ID NO: 329877 - DNA, 375 bp, Pseudomonas aeruginosa
atggcacggcttcttgctatcttagccttcattagttcccccattgcagccgccactatctacaccgaggagcgcgatcccatatacgagagagctagtatcgccctcttttgcatgaatcatttttataaccgtacgacgggctacctcggcatgcaggcaggaatgtcagctcaggcggatctagctaaacgattaccgctcctcccggacggcgagaagcttgctggagagatgcgactagctttgaacgcaatgactaaggatcaaggcaacaaggctgtacctacacattgttggcaatacatcccaaaggatcacggcctgacgtccgacgagatcctgcgctttctgaagcgaagctccttggactga

SEQ ID NO: 329878 - DNA, 309 bp, Pseudomonas aeruginosa
gtgaacgaaaagctgtttctgctgaccagccgtaaaaagaagacaaatcacatcctgcacttgatcctgaccgttttgaccggaggcctatggttggtcgtatgggtgatcacgctatgtagcaacgatagccagaacaagaagattgatagggagatcgaccagatcatgcactataagtctcagggcttgagtgatgctgccacacaccaaaagatgaagatggacaagctgaacactgacgtgcttcaggggagagtgattttcggggctttggttgtggtgttcctgtacttctacctgcggtag

SEQ ID NO: 329879 - DNA, 642 bp, Pseudomonas aeruginosa
atgagtcaagctgtcccttacaccaccatccccaccagcagcaccaacctgctcgccattaacggcattgtcgtagacaagctcaccggtgagattcatggtctcgatgataggccatcgattctttccggcccactagattatcaatcgagccttagagattgccgtagcgtagacgatttcgaaaattacttgagatttgttgatcgacgaaaacttccgccccatagcctgcactcgctaaatgacgaagtggactacgcccatggtgtttggcggcgaggcgagactgactgccgcatcactaagccccagcaacgactattgacgcagctacaaggactcgttcagtaccacaacgtcatcttcatgacgcaagtcgatctagcacaggcgctcaacactgtaaaatcgaacctgatgaagaagctgaaagttctcgaagatgcaaaaatgcttcgtatcaccacatgtaataacggaaacattcgccgtggtgagataaaactcgccatcaatccacgactagtgttcaggggagcagataagatacgcgaacggtatattgagaactggtatcacccgacgggcaccctacattttacagtagaaaaacgtcaacacgcgaatatggctgcgtag

SEQ ID NO: 329880 - DNA, 1293 bp, Pseudomonas aeruginosa
atggcctacatcgtccgccgccaatccgtttactacctcaaccttcgactgccgaagcacctgttccccagccggtacacgcttcggatgtccctgcgagtacgtgagcgtcaggcagccctctttcttgcctgctccttagttcagaaagtgaacacccacctgagcaagcacccgttgacagcccctgagacacttcgtgcgttgtgtgagcagtggcgcgtaatgacaccccagcaatctattacggctgcatcaaagacggctccagtgactacagcgaagccgaaaggtgaagaccccacactagccatgctctccaagctctatatagaagaagggaagcgtggtggcacatggcgacagagcagcgccgatgagattgaacgtgccctagcggatatgttcgagctgataggagatatgcctgcgttagcctttgatgctcagcaggctcgcctgctaaaagaacggctcagccgctgcccccagtacttcggtttacggccagagttcaaggggaagactctgaggcaagtggtcgactcgggcaccacctataagacaatcactgccgtcacggtgaacaaccgtctgcgaaagctcacagccttcatgaactggtgcaaagcaaatagctacgtcactgacaatcccttggctgggatgaaggtaatgaccggctctgctaaggaggcgcggctgtcctttgatcgtcatgatctagtcgccctgctcgaccatgagtctttacggaaagaagcacgcaaacacccatggcgctactggctgccactcctcgggcgaaccactggggcaagactcgaagaactgtgccaactgcgtgtcgataacttcaccgagcaacagggcatcccgtgtattcgcattgatgatagccgtgaagaccagagcctaaaaaacgccaacagccgtcgtgttattcccctacatctctccctgatcgaacatggcttgttgcagtacgctgagtcagtcagggcaaatggggctgaccgcctgttccccgaactggacgctgtgcgggggaagctgggccatgctccctcaaagtggttcagtcgctacaagacgaagctcggaatcaccgacccacgcaaaaccttccacagcttccgccacaccttcattgatgacctgcgtgatgctggcgtgcaggactcactgatcaagcgaatggtgggtcatgaagatagctccgtgacctttggcatctacggcagcaggacgccaatcaaagcgatggtcgaggccatgaagcacatcaaataa

SEQ ID NO: 329881 - DNA, 1860 bp, Pseudomonas aeruginosa
atgggcccgctccagaagagagccatcatgctttatcgtcgtttcgaacgtctgatcgacccgttccgcagtgcttccgaacgcatgccgcccagcgaagtgctgcgtttctatgtctacttcctgcgccaggtctggccggtgttcctggccctgctggtggtcggcctgatcgtcgcgctgatcgaggtggcgctgttcagctacctcggccgcatcgtcgatctcgcccagagcacgcccagcgcggagttcttccgcgtgcacgccaacgaactgatctggatggcggtggtggcgctggtcctgcgcccgctgttcaacgccctgcacgacatgctggtgcaccagagcatcaacccgagcatgaccaacctgatccgctggcagaaccaccgctatgtgctcaagcagagcctcggcttcttccagaacgatttcgccgggcgcatcgcccagcgcatcatgcagaccggcaactcgttgcgcgattcggcggtgcaggtggtggacgccctctggcacgtgctgatctataccgtcagcgccctggtgctgttcgccgaggccgactggcgcctgatgatccctctggtgctgtgggtgttcgcctacgtcggcgccctcgcctacttcgttccccaagtcaagcgccgctcggtggaggcctcggattcgcgctcgaagctgatggggcggatcgtcgacggctacaccaacatcaccacgctgaagctgttcgcccacacccgccaggaagaggactacgcccgcgaagcgatcggcgaccagaccctcaagtcgcaacgcgccgggcgcgtagtgacctccctggacgtgaccatcacggtgatgaacggcgtgctgatcaccggcaccaccggcctggccctgtggctgtggagccaggagctgatctcggtgggcgccatcgccctggccaccgggctggtgatccgcatcaacaacatgtccggctggatcatgtgggtggtcggcggcatcttcgagaacatcggccaggtccaggatggcatgcagaccatcgccctgccgcgcaaggtggtcgaccgcgaggacgcccagccgctgcgggtagagcgcggcgaggtggagttcgagcacatcgccttccactacggcaagggcagcggcgtgatccagggtctcgacctgaaggtccggcccggcgagaagatcggcctggtcggaccttccggcgccggcaagtcgaccctggtcaacctgctgctgcgcctgtacgacctggagagcggacgcatcctggtcgatggccaggacatcgccggggtgacccaggaaagcctgcgcgcgcagatcggcatggtcacccaggacacctcgctgttgcaccgttcgatccgcgacaacctgctctacggccgccccggcgccagcgacgcggaactcatggaagcggtgcgcaaggctcgcgccgacgagttcatcccgctgctcagcgacgccgagggccgccgcggcttcgacgcccatgtcggcgaacgcggagtgaagctctccggcggccagcgccagcgcatcgccatcgcccgggtgctgctcaaggacgcgccgatcctgatcctcgacgaagcgacctcggcgctggactcggaagtcgaatcggcgatccaggaaagcctggagaccctgatgcagggcaagacggtgatcgccatcgcccaccgcctgtcgaccattgcgcgcatggaccgcctggtggtgctggacaagggccacatcgccgaaagcggcacgcatgccgagttgctcgcccatggcggcctctatgcgcgcctctggcaacaccagaccggcggcttcgtcggcgtcgactga

SEQ ID NO: 329882 - DNA, 705 bp, Pseudomonas aeruginosa
atggcgacagccccgatcctgatcaccggcgccagccagcgtgtcggcctgcattgcgcccgccgcctgctggccgacggcgagtcggtgatcgtcagctaccgcagcgaacgcccggcgctggacgaactgcgccaggccggcgcgctgaccctgcacgccgacttcgccagcgaggccggcatcttcgccttcatcggggccctccgacagcataccgacagcctgcgagcgatcgtccacaacgcctcggactgggtcgccgagacgcccggccacgaagccgaggcgttccagcaactgttcagcgtgcacatgctcgcgccctacctgatcaacctgcactgcgccgagctgctggaacgctcgcagcctgccgacatcgtccacctcaccgacgacgtggcgcgcaagggcagcgcccggcgtatcgcctactgcgcgagcaaggccgggctggacaacctgaccctgtcgttcgccgcgcgcttcgcgccgaggatcaaggtcaacgccatttcaccggcactggtgatgttcaacgacggggacgacgccgaataccgcgcccgcaccctggcgaaatccgccctcggcatcgaaccggggccggaagtcatctaccagagccttcgctacctgttggacaacccctacgtcaccgggaccaccctgaccgtgaacggcggccgccacgtcaagtga

SEQ ID NO: 329883 - DNA, 561 bp, Pseudomonas aeruginosa; identical to SEQ ID NO: 319307

SEQ ID NO: 329884 - DNA, 975 bp, Pseudomonas aeruginosa
atggctcagaaaattatcgatacgacaactaataatggtagctatataggtgacccagcgaagaccgccttcggaaagtgtaacgagaacttcacagaaatttatgggcgtgatggggttaatggagttcgcccaatttcaaacggggggacaggtgcgactactgccgcaggcgctcgatcgaatcttgagttaggaactgccgcgatggctaatgtcggtaccgctgatgggaacgtgatgaccgtcggtgccttcgggctgggtagcccgagcggcggtccttccggagctcccgactcgtctttccggccgggtttctatcgctatcccgtcggcgcctccggtgcgccgtacggcgactcagcgggctcgttgctcgtgaatacgctcggcggcaactacgtacagcagatcgcgatcacgccacggcccagcacgacgaatccctgggttggctgccgacatttcgacggagggggcaatcctgggccgtgggtcctgttttatcactcgggaaacacgacgagagcaaccgacgggacgcttcgtgcggcatcgccggtcgtgcgtatcgccaacgttgctgcgagcttgagacccgatctcaatgaactggatttcgagcctgctggcgcgtggggtgtagctaatgcagaggccctcggcgttaccgtccaacgcctcgatgtcggcgtctaccagatatctggctgcctgggccttgcgaaagagggctggcgcgtgatcgatcctgcgtctcccgacggcggtcgcccgctcggcatcaccgatagcgaacaggctgagaatgggacggtcaccatccggctcttcaaacagcgctggatactcagtgacgacggcgaaatggtgctcgggaagggcgccccactggatgtcccgctcaacagttggattgatgtccgattgtcgatgccggcacctcccgagatgcagcccgagactgtgtga

SEQ ID NO: 329885 - DNA, 666 bp, Pseudomonas aeruginosa
atgagttacggagctctcattcgcggtaatagcgggcagacaatcatcgacgatgtaaatccatgcatgcatattgtggagtcggggacttatggggtgcagggagcaacggaacttgttatcagctattcgacccccataaattcgccctatgagccgtatgtgtatgttaggccgaacgggcctcaccagatatatcagttccgtcatctgggagggcccggagcgtggactggcttcgcgttttatcagtctattttccgggacactaaaccgccggtatatggagggcagtggaaggcggccgccgtgatgcttcctcgtaccggtggttggggacttcaagtattcgatggtcagtcacgtgtgatgttcgatagcaatcgtgagatcgttcgcttcgtaggtggggcgcaaacgtggagcaagtatgcattcaacccgaattggccaggggggatgcggctacaaacatgggcgatgccatatccctatgaagcatcgacgtactatatggtgagccatttcaacctaaagccatggttcactcttgagtcccctcgggtcggatttctctatagttctagaaccactattttcgcgtctgctcttgtgccagacgaaacgaatcgtccgttcaattggcctttaattgtgattgcgtga

SEQ ID NO: 329886 - DNA, 3561 bp, Pseudomonas aeruginosa
atgggcgcagttcaccagcacctggccggccgcaagggcggcagtagcaagccgaaacagccggtcgaggcacccgacagtctgcgctcggtcgcgacggccaagatcctactcgccgtgggcgaaggcgagttcgccggcgttccgagcgagcgcgatatctacctcgacaacaccccactgatggacccgagcggtaacctgaacttccccaacgttaagtgggagtggcgcgcgggggcggtggaccaggactacatccctggcatccctgccgttgagaacgaaaccagcgtcaacgtcgagttgcgcagcgatacgccctgggttcgctcgctgagcaatacccagctttccgcagtgcgtctgcgcttcgcctggccagcgctccagcagcaggacaccaacggcaacatcggcgggtaccggatcgaatatgccgtagatctggccaccgacggcggcgcctatcatgaggtgctgcgcgaggccgtcgatggcaagaccaccacccgctacgagcgttcccgccggatcgacctgccggcggccaccaatggctggcaggtgcgcgtccgccgcctgacgccgaaccagaacaacaaccgcatcgccgacaccatgctgatcgccggctacaccgaggtgatcgacgcgaagctgcgctacccgaacacggccctgctgtacgtcgagttcagcgcagagcagttcagcaacattccggctgtcacagtcgactgccgcgggcggaaggtccaagtgccgagcaattacgatccggagacccgggcctacctcggcatctgggacggcacgatgaaacaggcctggaccgacaacccggtctggcacacctacgacatcgtgaccaacgatcgcttcggtgtgggtaaacgcatcaaggcctggatggtagaccgttgggagatgtaccggatttcccagtactgcgaccagttggtgccggacgggaagggcggtcaggagccgcgacacacctgcaacctgaacctgcaaagccgcgccggggcctgggagctgctgcgcgacctaaccgctatctaccgcggcatggcgtactgggcccagggccaactgaagatccaggcggatattccgcgcgccaccgacgtcgatttcgcctacacccgggccaatgtcatcgacggccgcttcagctacggctcggccagtgagcgcactcgctacagccgtgccttggtcagctacgacaatccggcgaacaactacgacaccgacgtggctgtggccaccgataagcgcctgcagcggcgttacggtgacaacccggtcgaggtggcagccattggctgcacccgcgagagtgaggcccagcggcgcggaaaatgggcgatcctgaccaacagccaggatcgcacggtaacgttccgtaccggtatggacggggcgattccgctgccgggatgggtgattccggtggctgacgcgctgttggctggacgggagatcggcgggaggatctcggcggttgctggccgagtgatcaccttggatcgcgatactcaggcgaaggctggcgaccggctgttcctgaacctgcccagcggtaaggctgaggcgcgaaccgtgcagtcggtcgccgggcgcgcggtgaccgtgacgacagcctacagcgagaccccgctaccggaattggtctggaccctcgatgccgacgacctggcggtgccgctctaccgtgtgatgaaagtcagccagccggagcggggtgtcttcgagatcaccgctctgcagtacgagcccgggaagttctcagcgatcgacactggtgccaagttggagagccggccgatcagcgttatcccgatcaccaccgtggcgccgccggcgagcgtcacgctgacctcgcactaccagttcgaacaggggttggcggtcagcacgatgaccatcgcctggcctgctgtagaaggggcggtggcatacgacgtcgagtggaagaaggacagcggcaactggatccgcctgccgcgtgccggcaccaccagcgtcgatgtgaccggcatctacgcaggcggctatctggcgcgggtgcgcgcggtgtcggccttcgacatcacgtcggtctggaagagttcgatcctgacccagctcagcggtaagaccggcgcgccgccggcggttgcctatctccgcacgcaatcgcgggtgttcggcatcggtctggagtggggcttccctgctggcgccgaggatacccagcgcacggaaatatggtacggcaccaccactgatcgagagcaggcgaagaaactgggcgacttcgctttcccacaggcggcccatgaaatgcaggggctggcggctggtgtgtcgttcttcttctgggcacgcttgatagatcgcactggcaacataggggcgtggtatccggctggcgctgggaccaatggccaatcaagcagcgaccagacggaatacgaccggtatttttctgatcgcatcagcgaaagcgcgctgaaccaagggctgaaggacaaaatcggcgagatcgatgatttgagcgagaaggttaccgatctgctcaacaactcgaccgcgtatgacccggcaaaaatctactcgaaaggggatgttgtctatcacaatggtcgcctctaccagtggagcagcaatacctctggcaacatcgcaccaccgagcgaagcatactggaccgacatcggtcagatctcggcagaggtgggcgctctggctgctcgggtcgaacagaacaccaccaacatcggtctgatcgacggcaagcttactgcgcaggcagagagcattaacggcctggtcgcccaggtgacacccgatgctgccggagatacggactggggcgccggagatagcaatgtctatgcgggaacggtaacggttcagtcggtctcggccgacgccgaccttgcaactgcaatccgcgtggactctgtgaaggtttcggttgacgcaaacgcagcagccatcgttacggaacaacaggcgcgcgcctccgccgataacgccctggcttcgaatattcaggcgctcagcgctactgtcggaagcaacactgctgccatccaacaggtcagccaagcgcaaaccagcaccgatggccaactgtcagcgatgtgggcggtgaagatgcaggtcacagcaggcggtcagtacgttgcggctggcatcggtttgggtatcgaaaacgaggctggtgtcttccagtcgcagttccttgttgatgtgaatcgctttgcagtcgtgaataccgccaacggacagttgactgctccgtttgtgatacagaacgggcagaccttcatcagtcaggcgctgataggaactggctggatcaccaacgcgatgatcggcaacgtgattcagtcgaccgcactcggtgccaacggcgagccgctgtggaagcttgataaagcagggagtttgacgatgaacagcgcgacatccgggggcttcatgaggcagacggcggaggccgtcaaggtctacgacgcgaacctcgtgttgcgggtacagatcgggaatctcgacgcatga

SEQ ID NO: 329887 - DNA, 681 bp, Pseudomonas aeruginosa
atgtttgctctggcggtagcttcccgtgcttggatgagaacaggggccgaggaggcaagcggaatggaagacccaagaaccacaaactatagatacgacgcgggcccaaactctgccatgcgggcagaaatcgggcagatcgtggtcaatcacagcctgtgcgatgaaccgctcatgcggatattcggttttctaagcggactaagagcggatacccagtcggtcgtcgtagaatcattaaggctccgctcgacatcattagcagcaacggtcacaaagctgctcgaaacatcgccgttaccgatcgacataccggaaaggctgaatgtcgctctgtccacattcaagaagatgacggcgcagagaaacaagatcgtccattgggcctgggggttatcaccagagggcaaggacgaggcccctatctaccatccaacaaagagaaacagtgacggaacgccctactcagaaacgctaacgttgcttgaacttagaaaaatcgcactcgacttaatgcaggtttactacctgctcggcattgttgctgggctgttggaatgcggtgttcccgatgaaattaaatcggcatcgctatccaagttcgacaagctcattgagaaggtgcgctcgtcaattttggaatatccagaggccgaggctgaagaactgccattatcctga

SEQ ID NO: 329888 - DNA, 294 bp, Pseudomonas aeruginosa
atgccgcggaagagtgtgatggatattcttgacccgagcgtaatgaatgcggacgaactacaagaggccgtccgcgaaccgatcagcggagcccgcttaggagccaccgaagagcaggagcgtgctgagaaggtggtcgtaaccaaagccatgcttgatgtcggatatgagattctggatgaatatctctcatacaatgacggtcttatctctaggggcatcctcgaagaagcttttcgggcgatgtgtctttgttggctgcaagaatctgctgtcgagtcagggtgcctctga

SEQ ID NO: 329889 - DNA, 585 bp, Pseudomonas aeruginosa
atgaccaccgcagcgcaccacactccgatgaccaccatcaaattctacggcgcgctccggcagttcggccgggagtaccgtatgctcgtcgggtcgactgctgaagcgatcaaggccttgtgcgtgcagattcctggcctcgagcgcttcctcgccaatgctcacctgcgaggtatggagttcgctgtattccgtgggaaacggaacatttcccaagatgagctgcagttcgggggcgccgaggaaattcgcattgctccggtcatgcgtggccggaagcgtggcgggttggtgcagacgatagtcggggctgtgctgatcgctgcttcctacgcttttcccgtcatagccccgtatgcgctgcctgcagggatagggatggttgcaggcggcgtcatccaaatgctcagcccccaggcccagggcctgaagcagagcgcggcgccggagaacctgcccagctacgccttcggcagtgcgaagaacactaccgccagcgggaacccggtgccgatctgctatgggaagcgccgctggggcggcgcgattatctcggcttcgatttacgccgaggacaaggtgtaa

SEQ ID NO: 329890 - DNA, 285 bp, Pseudomonas aeruginosa
atggatatctgccacagctacaaggagcattttatggccgaaaagtcgtatctaactgggaagtgggcaattttcaagagcagagcctcgacggaggtgcttggttatatcgtggatggcattggacaaacgacggtgcctggacagccacccttcagcattattgactctgtgctctttgcccctgacggcaccaggctcggctatctggctccattggaaggaagctgggtggtgaacctgggcgactatgagataggacacgtactgcgtgccctgccgtaa

SEQ ID NO: 329891 - DNA, 231 bp, Pseudomonas aeruginosa
atgatcattagaagtctcgtccacaatctgcctaaagacccgagcaatcccggctgggttccaggctgggcggttgcccagagcgcaccttggagattcatggatatttatgcgtccaaggaagcagtggacgctgaggcgttactgcacggcgaaggcttcggcgtcgaatacggctcgcacgaggtgggcactgacaactttgtcggcggactcacgccgccgagctga

SEQ ID NO: 329892 - DNA, 756 bp, Pseudomonas aeruginosa
atgctcaagcacatcctgtctgccgtgcagaagcaggctgcggcagagtatccgcgcgagtgctgcggactgatcatccgttctggccggagccagcgatacgttccctgcgaaaacaccgctaccgacgccggcgaggagttccgcatcgcgccggaggcgtatgcagaggcagaggaccagggagagatcgtcgccgtggtgcacagccaccccgacgccaccagccgaccaagtgccgcagacgtcgctatgtgcaacgcatcgggtctgacttggcacatcctgagctggccggagggcgacctgcgtaccatcgagcccgtcgatcaggtgccgctgctcgggcgcgcgttcgtgcatggggtgcaggactgctggcaggtctgcgccgactggtaccagagggagtggggcatcgagttcccgcacttcgagcgtgccgatggctggtgggagcgggcagacggtccaagcctctacgaacagcggttcgaggctgctggcttcatccgggtggaccggccgcagcgcggcgacatgatcgtgatggcggtggggcgcaccgcgcacccgaaccacgccggaatctacctggcggacgatccatcactacctggcgaggatatgcaacacttcggcgccgggccgttcctgttgcaccacctgtacggcaagcccagcgaaatcatcgtgttcggtgggccgtggctcgaccggatgcgcttggtgctgcggcactggcacgcgaaatga

SEQ ID NO: 329893 - DNA, 750 bp, Pseudomonas aeruginosa
atgacactgatcaccgatatccagaagctggagcccggcggcgaggtcgtgctgttcgaactcgacggcagcgacttcggcgccgacgtggtccggttccacggtcacgctatcccgcacagtccgcaggaactggccgccgccggcgccaacgccgaccagttgccggcgaaatcgatctggtggcagggccacgaatacgcggcctggccggtgcagatcgagggcatcgaggccaacagcgatggtactgcggcgcggccgagcttcaccgccggcaatgtcaatggccggattacggcgctctgcctggcgttcgaggacctgctccagttccgcctcaccatccggacgacgctgacgaaatacctggacgcggcgaacttcccaggcggcaatcccgacgctgatccctcccaggagatcgtcgaaatctggtacttggaccagaaaaccaacgaggacggccagtacgtggcttgggaactggcctcgccaggcgacgttggcggcgagcaggtcggccgacagatgaccaccctttgccactgggcgatgacgggcgggtaccgcgggcccgactgcggctacaccggcccgtacttcgacatcgacggcaaccccaccgatgacccagcccgggacgagtgtgatggctgcctgggcaccggttgcatcccgcgcttcggtgaaggcaaccaactgcccttcggcggcttccctgccgtctcgatcatcgccaggagctga

SEQ ID NO: 329894 - DNA, 288 bp, Pseudomonas aeruginosa
atgagcttttcggtacgcacggcgcagttcggcgacggctaccgtcaggaggtagcggacggaatcaataacctccgccagtcttggccggttacctgcgtgctgaaggcgcaggctgcagtgcaactgatggagttcatggaacgccacgctggggcgaaatcgttcctttggaccaatcctttagggcatctcgggctctatacctgcaagaacccaagtccaatgccgctggctggtggactggtgcgattcacgggtacctttgaacaggcattccatccatga

SEQ ID NO: 329895 - DNA, 3021 bp, Pseudomonas aeruginosa
atgacgaccatagccgagcttggcgtacgggttagctcgcaaggtgctgaccaggcggctcaagacctggaccgcctggccggctccgctgtcagtgcggaaaatgcggtcgactcggtcggagaaacctctgcccaagcatccgcgcgcatctccaacatggttcgcgcctcgctggaagccagtgattaccatcagaggcttgcgagggcggctaccagcagtagcgcagccctcgagaaggcgaatgcctcaaccatcgactggaccaagtaccaggaggagatcaacgcccgcgggcaagccatcatccagtctcagcagcgtattgccgaacaggctaagaagtctgctactgcagtgcaggagcaatctaccagtctcgatgccggcagccagaacctcaccaggttcaacgatcaactgggccgaactggtcttactgccaggcaagcgcaggctgctatgcgggggctccccgcgcagtttacggacatattcaccagcctccaggctggtcagtcgccaatgcaggtatttttgcagcaaggcggtcaaatcaaggactcgtttggcgggattggcccggctctgcgggcggttggtgggtatgcgctgagcttgattaacccaattaccggattggctgctgctgccggcacgcttggctttgctttctacgatgcagagaaaaaggctgcctccttcagcaaagctatctttgctgggaatggcgcggcaggtatgacggggtcggctttggcccaagtcgctaagcaggctgcttcggtttctggatcattggccagcgcgaatcgagctgctattgcgttggcagccagcggaaaggtcggggctagtcaacttcagagcctcacggaaacgaccagcgcaatcgctcaattcaccgggcgggatattgaggatgtggcgaagtctttgtcagagctgggggatgatgcgactagggcagcggcacgagttagcgagcagtatcggctgcttagttacgagcaatatcaggcgatcaaggcgatcgatgagcaaggcgaccatcagcaggctgtcgatcaactgaacgaggatctgcatcgtaacgctcaggagaggctgaaacagtatcgcgagtctctgtctggtgttgagcagggatgggacgcagttaaaacggcgatcggtaatgcctacgctgcaatccgtgcagacttgtttccaaccctcaatgagcaaatacagacgctccaacggacattggatcaacggcaaaacgctccgtttctgtcgaatgctttgcgtggcgcgctaactagcgccgcaactggcttgcctggcgtggctgctaccggagcactatttcagtcctttcgggatcagttcagctccacggaggcattgaaggagcagaacagcctcttgctcgtccgaaaagacttgtccgagcagaatgccaagtcggaggctgagctgggcgaggctgaccagcagctcatcgccattgagaaagagctgggcgaccagttaggcgacgtctccccggcggccaagcgagcgaaagcaattgatgagctgaccaagaggtacgtcgccggctaccgcgcagccgagaagatgatctcggcaggcaagttgagcgcgcttcccgactggctcaagggtgtgaatattgtcggtgatagcgtatcaggcggaaccttcgacaagctggtggctggcatcaatcagcggttcaaggacccgaaggcggccaggtcttctcaatttcgtgatgatgctgctacccagtacctgttgcgtctgcgcgagcagcagggagccctggagcagcaacttggtaccagcgagaagctgtccgcttcgcagcgtgagatggcgaagtgggagcagcagattgcggacctgaaggtgaaagctgtcctgactgccgatcaaaagtctctcttggctagggaggcggaggttcgcgcgcagcttcagaagaacgtgacgctcgaggccgaggcgaggaagaaggaggaaatcgccaggatcgacgcgtaccgcgcaaaccttgaggggcgcctgcgttcagtgcagcaggggtacgaactgcagatcgctggccttgatgcgggcgatgaagagcgccggcgcattcaggaccgtttgaagctggagcaggagtaccagagccagagcgccaaactgcaggagcaacgcaaccgcggcgagaccaacggcggtatcagccagagccagtacgaaaaggaactctctgctctggacgattatcaccgtaaggcgctggccaagcagaacgactacttccatcaagtcgatgaggctcagaaggattggtcgctgggagccagatcggcgttcaagacctatctggaaagtgctcgggacgtggcgggccaaaccaagaacctgttcaccagcgtcttcagcagcatggaggatgcagtcgcggccttcgccacgaccggcaagttgtctttctccgacttcgccaagagtgtgctggccgacatggcacgtatcgcaacgcggcaggccgcaaccgggattttttctgggttggctggaagcgtattgggctcagcggtaagcggctttttcggtggtggtgcgggtggcgccagtgcttccgactataccggcagcgctttcacttcctgggtcgctggtcagcgtgcaagcggggggacggtggctccgaactcgctgtacgaggtgaacgagagagggcctgaactgttgagtcaaggaggccgcacataccttatgactggcgcagaaggtggatcggttgttcctttgggcgccggtcgggcgtcgattgctgcggcgggtggcggctctatgagtatcagcatctacgcgccagtgacacttgagagccaggatcaggaagctggagcaattgatcaagcagctctgcagcgtggacttgaaagtcgcttccgagcggttgcggtggaagagatcggtaaagcgacgcgcgccggtggacagatttggcgctcaatcaatgggaggtag

SEQ ID NO: 329896 - DNA, 879 bp, Pseudomonas aeruginosa
atgcaaaccgctcaagctttgatcccggtcttcactggcgcaattcacgacgagcaagcccagttggtcgatgcgcgcaccctgcatcgcttccttcaggttgacaccgatttccgcaaatggattgctcgtcgcatcgaggaatacgatttccaagaaggtcaggactttcggtcatttttgggcgaaagttctggaggccgcaggagccgtgagtatcacatcaccctggacatggccaaagagctgtccatggtggagcgcaacgagaagggacgccaggcgcgccgttacttcatcgaatgcgagaagcgcctgcagcagatagcgccgcaggaggctgatgacattcgcgccaggttcatgggtgtttctgaactgaccacgctcaaaggcctgatccgcgacaaggcgaaggtggtgccgctggagaagcgccgcagcttccagcagaccatgcacaaccgtctgcacacccgattcaatgtgccgcgaatcgagctgatcccggcggcacagtttgagtcagcctgcaacttcatcgccgcctacgccttagaaggcgagtggcttccgaatgaagagaagaagcccggaaccttcgtgctggacgaataccaagctcagttcgtgcacagcctcatccattacacccattgggtgtgcttccgctgggatcagggtatcggagcagcagtgaaggcgttgaatccgaaattccacacgaagacatgggagttcttccgcgaatctagggtgtgcgcggagatgctcgagagtgcgctgcccgaactagttgcgcacttccgcagccgtggaggtctgcgcccgcatgacggcattgcgacaggccatcccgtaggccatccggcagactga

SEQ ID NO: 329897 - DNA, 318 bp, Pseudomonas aeruginosa
atgagcaaagtcaagttttccctggacccgaagcctactttcattgctccagtaccaatcccattgcatggcggcgggagtgtcgaggtgaagttcaccttcaagcacatgccaaaggatgatctcgacgcattcctgaagggagtgggcgaactgtctgaccgcgaggcgatcatggccgtcgcggcaggctgggaactcgacgacgcgttcaacgacgagaacgtacagcgactgctgcagaactacctcggcgccggcccgacggttgtcagggtgtacatggagcagatcacccaggcccgcctgggaaactga

SEQ ID NO: 329898 - DNA, 657 bp, Pseudomonas aeruginosa
atggccgcacgcttcccgctgcccaatggctccgtgctggaaattgcatccacactgggggccgccgttgctttcacggcaattaccaacgcaaaaccgccgattgccagcgctactggccattccctggagatgggggatgccgttctgatcacctccggctgggccaagatatctgaccgagccagccgcatcggagcggtcacaactgatactttcgcactgggtgggctggataccaccaacactgatatctacaccccaggttccggtgttggttcggtgattccggtggagtcctgggttcagatctcgaaggtcaccggattttcctcttcggggggcgagcagcaatatctgaccgttggctacctggaagaagatgatgatcggcagctcccgaccaatcggaacccgctttccctggagattacggtcgaagaccagccgtccgccgcatatgtcgatgtggtcgagaatcttggggaaacgaaagcactgaccgtcatccggctgaagctgccgagtggtgaccaaatcctgtatcccggctacgtgagcatcaccagttcgccgaccatggagcggaatcagttgatgacccgcactatcagcattggcctgtctggtcgtccgcttcgatacctggcggcgtaa

SEQ ID NO: 329899 - DNA, 723 bp, Pseudomonas aeruginosa
atgaccgatgttattcagcttgtccaatctgccggcgaggctcgcgttgacagccgggtgattgccgagagactcggcgtgaagcacaagaacaccattgctctgatagagaagcatacgaagcactttgctcggttcggggttgttccgtttcaaacggaaaaaccgtcgaagggcactcatggtggacgccctgagaagttttccctgctgaacgaggatcaggcttactttcttctgtcactaaccaagaacacagttcgcgtcgtcgagttgaaggcgaatctggttatggctttccgtgatgcgcgcaatcaggccggcttggacagcgtgatgggcatgattctgctgactgccccggcaccatgggaaaaacgcttcggcgatgactattaccgatctctggccagggtcaccggaacggtcttcgatgggcatgccaagggaacgccagccatcttcggtcagatcaccgaccgctgggtctacgctgccatcctgccaaaagagattcatgccgaactaaaagctcgtcgtggcgaaagcgagaagatgcaccaatggctgaccgatggaggccgtgatcggctcgaccagcaaatccgcatggttacgctgatcgcggatagctcggttgaccgcagggacttcgaagccagatgcatgcaggccttcggcttgccggggcagttgcgactgatctatccgcaggtcgcttga

SEQ ID NO: 329900 - DNA, 657 bp, Pseudomonas aeruginosa
atgcgacagcggtattctggccggcaaggaagctttgccgcggcagttgctgagttccgcgaccaagccttggctgccggcgatgcgatctaccagcggatcatgttggacctgtcggtcaaggtgatcgagaaatctccagtcggtgacccggagcggtgggccgcgaacgtcgcctaccgccagcgagcgagtgctgcggcggaccgctacgacgagaacgttgcgattcgcaacaccctgatcaacctgaatccgagcaacttcaccaggaacgggaagctacgtcgaggcgtgaagcacgcgaagccgctgaccaaggcggagcgtgaccagaacttcgacgtcaacgggatggtggccggacgcgggtatgttggcgggcgctttcgggccaactggcagttcagcattggcacggccgcaccgggggagattgatgacgtcgacccgactggcagcaaggcaatttctgcagtgaccgctggggtccagccgctgaagctcggtgataccgcctacctggtgaacaacctgccgtatgcggtaccgctggagtacgggcactccagccaggcgccggctggcatggtccgggtgaccatcgctgaattccagcagattgtggaggccgccgtcagggcgaaccgcgtgtag

SEQ ID NO: 329901 - DNA, 351 bp, Pseudomonas aeruginosa
atgggccttcgagatgagattcatgcggacattgctgccgcgttcgacaccgaccttgccgacgcagttaagcctttcactggcgtccgcaaggttcagggtgagtacgatcctgaaaccggtggaccttctgagacgaccattacctattccggtcgcggcgtatttggcagatacaaggcgagcgaaattgatggatctctgattcataccttcgataccaaactgcttgttctccaggcagagctttccgagacgccaaaggttggagacctcatcaatgactaccgcgctctgaacatctcggaagaccccgctagcgttacctggagcatccagatgaggagatag

SEQ ID NO: 329902 - DNA, 300 bp, Pseudomonas aeruginosa
ttgatcgccaacgtctggctcaccaatcgaaagctccctgagctgaactccattccggaagagtggaagcttgctggagcagaggtggcgcgagatgcagccaaagggcttgtgtatggaagccgagagactggcgtccaaacaaagagcgtcagtgccgacacggtatcgagcagcaagacttaccgagagggggctcagacattcaccgccggagagtcgctagccatggcgctcctggccccctggctgttgggttccggcggaggtatgagccagttcaagctatccagagggtag

SEQ ID NO: 329903 - DNA, 264 bp, Pseudomonas aeruginosa
atgacgatcgtatacgaaccgcatcccgtcacgccggagcgtaaggccgagctgcgggcgatggggtatcgaatcattgacgctgcttttgctccgccggctagcgatgcagcaagggggcaggagccgcccgcccttggcgacgacctggacggcatggacgctgaacaactgcacgccctggccaaggcgcggggtgtcagtgtccaccgtaacgccgggcctgagaaggtgagaaaagcgttgcgtgaggcttccgaatga

SEQ ID NO: 329904 - DNA, 981 bp, Pseudomonas aeruginosa
atggcactttccgatatggaggtgttcaacacctatttcatgccggccaccgtagagacgctgggccagatggttgagcgattcaatgcggcgtccggtggcgcgatccttctgaccactgacggcttcgacggcgacttcctgcaaaccagtttctatgcaggcctggcaggggctcgccgtcgcgtgaaccgctacggctcgaatgacgcagtaactccggttgatctgacccagctgaagcacaataccgtcaaggtggctggtggcttcggcccggttcgatacgaaccatcccaaatgacctggctgcgcaagccgactgctgaaggtgtcgaagtcgcctcccgctacttcgccgagtctcttctgcaggatcaactgaacacagccgttgccgctctggtagccgctatcagcaaccaaggcgccgctaccactgtcgacgtgtccggagccaagaaggtggactacattgcggtcaacgatagccacgcgctgttcggcgaccactctagccagctcatcgcgcaagtcatggacggtgcgcagttccacaccttcattggccagaatctgaccaacgctcagcaactgttccaatccaacggcgtgcgcgtggtggacatcctcggtcgcctgatcgtggtgaccgatgctccggcgctctacaccccagcggtgtccgatccggctgcccccgccaagcgtcgcgtactctcgctgacccaaggcgccgcaactgtccacgatgcccgagacctgatctcgaacatcgagaccagcaacggaaaagagcgcatcgagaccactctgcagatcgactacagcttcggcgtagggctgcgcgggtatgcctgggatgtagctaatggtggggcatccccggatgatgccgctctgtccaccggagccaactgggacaaggttgcaaccagcgtgaaacacactgctggcgttctggctgtcggccaggcctaa

SEQ ID NO: 329905 - DNA, 786 bp, Pseudomonas aeruginosa
atgaaactcaagctcgacgaaaatggaaatgcagttctgcaagacgggaagcccatctacgtgcacgaagatggcaaggaggctccgtttgatgccgcagcggcggtggcaaagatttcggccctgaatcgtgaggctcaaggccatcgtgaggcaaaagaggcggctgaggcccgcgccaagctgttcgaaggcatcgacgatccggaagctgcagtcagggcgctggaaacagtgaagaacctcaaggacggcgatctcgttacggctggcaaagtcgaagagatcaaaacggccgccaagcgcgctgccgaagagcaggttcaggccgcagcgaaagcctctgctgagcgagagaagcagcttcagggtgatctggagaagctccaggggcaactgcacaacgagttgattggtggcagctttagccgctctaagttcatcgccgacaaattcgctatcccgggtgatctggtgcaggcccgattcggtcaggccttccggatcgaagaaggcaaggtagtggcctacgaccaggcgggaaacaagattttcagccggtcccgcccgggagaggtggctgactttgacgaagcgctcgaaaccttggtcgatcagtacccctacaaagaccagattctgaaaggagccaaccagtctggaagcggcgcccctaacggcggcacgccggcaaacggcggtgggccgaaaggcaacttcggaggcaatcgcgaagaccggctcgccgctatcaagtcgcaattccctgatctggccaaggcctga

SEQ ID NO: 329906 - DNA, 1080 bp, Pseudomonas aeruginosa
atgactcgcttggaaatcttgctggcggagctgtataccgaccatggtatcgacctgattaggaccacggcgggtatgtcgaaggaagttgaggagaagatctccgagttggcagaggagcttatcaagctcctacagggccgccggttgccgctgaagaacgtcaaggaggtcaacgcgatcctcgacgaggcggccaaggcaatcaaggcgcagtacaccgagatcgctgcagcgcatgatgccaatctgcggcaactcgcggtcatcgaaggaggcttcgcgtcgagctcagtcaacagcctggtgagccggccaatcatgctgggcgtcggcaagaaccgactcagcgccgtggttgccaatacgctcatcgagggcgcgcctaccaagcaatggtggctcaagcaggctgcggatgtgtcgttccggttcgctggtgtggtgcgcaatggcttcgtgaacggcgagaccacggaacagatggtcacccagatcgtcggtcgccgggctcggggcgaccaaccgccggtgaagggcttcatggatgtcagcaagcgcgcggctcggaccttggtccacaacagcgcccaagcggtggccaatggcgccaggatggaggtctacaaggccaattctggcgagaatggcccggtgaaagggtatcgccagctcagcaccctggactcgcacaccactgaaatctgcatggtctacgaccagaagacttgggatctgcagttcaggcctgtggggcactcgttgccgtacaagcaaggatgcccgcggcactgggggtgtcgcagtaccactctgccttggctcaagacgatgcgtgagctaggtatcgacgttgacgaggtgaagagcacccgggcgtcgatggacggccaggtgccggccagtttgaacttcgagacatggctcaagggtaagtcgaaggccttccaggacgagaagctggggcccggtcgcgccgacctctggcgccgaggcgttatcacctttaacgacttgctggaccagcgagggaacccgttgagcctggcgcaactccagtcgctctatgcgcctgactga

SEQ ID NO: 329907 - DNA, 1389 bp, Pseudomonas aeruginosa
atgtctagcaacgacagccctgacatcgttctcgatgccgttgagaggatgcgccgagactgggagctggtttcagacctcctgggcggtactaatgcgatgcgaaaggcaggagagaagcacctgccgaagtggccaaaagaggaaaaggaaagctaccaggagagactgcagcgctcgactctgcttccagcgttctctgagacagtcaagaacctggccggtcgcgttctggcgcgcccgatcacactgggagatgaagtccccggtgatatcgctggttggtgtaatgacgacatcgacctcatggggaataacctggatgtgtttgccggagagtggtttagggctgggcttggctacggactgtgccactgcctagttgactacccgccgtcggatggcgtgaaaactatcgcccaggagcgggaagagggtattcgtccttatgccgttctaatccgaccgcagcaagttctgggctatcggtatcgagtcgagcgcggccgccctgtccttacccaatttcggtacatggaggagattgaggaagaagatggggagttcggatccaagaatgtccaacaggttcgcgttcttgagatcaaccgctgggctacctatcgacgcgatggcagtggttgggcgttgcatgatgaaggcaaaaccactctcaacaaaatcccgcttgtgacgttctacaccggccagaccgggatcatgaccgccaggcctcctctgattgagctggcacatctgaatgttactcattggcagagccaaagcgaccagcgcaatctcctgcacgtggcgagagtacctattctggtggcgattaatgctggggatgcggtcgggccagacggatcgccgattccatgggaaatgacggtaggaacatcctcggcaacgcgtattaacggtgacggtgccgaccttaagttcgttgagcatggcggcagggctatggaggccggcaggcaggacttgcaggacctgctggaggagatgcgcattgccggcgctaggctccttcatcgcgatgcccaggcggtaaaaaccgctgcacaagccaacgaagaggctgcggagaagattagcgcccttgaaaccatgggtaatgcgtttgaggacgcaatagaccaaatgctgcaactcttcgcagactggacgaatcaagagagcggtggctttgcgacggttgagggcaactacgacaccgactacgcgcccgaggtgagcctgccagtgctcaagcagatggcagactccaacttcctaagtcaggaaactctcttcaacgaggtgaagcgccgcggcgtcatcagcgactcgttgaagtgggaggacgagcaagagcgcattcttaaccaggctcccacgatatga

SEQ ID NO: 329908 - DNA, 1320 bp, Pseudomonas aeruginosa
atgtccctgctgccccgtacctatgaggcgcccgttcaactgacgccgaagcaggcaaacatctacgtctggggcttccagcgtaatgcccgcttcagggatgcggtctgtggtcggcggtttggcaagacgttcctcggcaaggcagagatgcgccgcgcggccagattggctgctgagtggggcgtgagcatcgaggacgagatctggtacgcggctccgacgcagaagcaggctcgtcgagtgttctggcgcaggctaaagcaagccatccctcgagagtggcgggagtgcaagccgaacgagtcggacatgctgatcacgctcaagagtggtcacctgattcgctgtgtgggcctggagaactacgacgacctgcgcggctctggcctgttcttcgttctggtagatgagtgggcggactgcaaatgggcagcatgggaagaggtgctccgcccgatgttgtctacgtgtgagtacgtcataccaggtatcggcacgtgcaagggtggccatgcgctgcgaattggcactccaaaaggcttcaaccactgcttcgacacctaccgcgacggccaagccggcggcgagccagaccacaagagctggctctatacatcgctgcagggtggcaacgtcccggctgaggaactggaggcggcgcgccggaagatggatccgcgcacgttccgccaggaatatgaagccagcttcgagaactactccggggttgtctactacacctttagccgtagcgagaacagcacaagcgagcgaatcaagccgggagaggctctgcacatcggcatggacttcaacgtcatgaagatggctgcggtggtctacgtcgtgcgcaatggcttgcccctggccctggatgagtttcactcggtgcgcgatacgcctgagatgatagagagaatcaaggcgcgattcccgggccacggcatagctgtctatcccgatgccagtggccagaacaccagtagcaagaacgctagcgagtcggacctgtctctgctgcgcaaggctggattcacagtgatcgtggacagccagaacccgagcgtcaaagaccgggtgaactcggtcaacgccatgttgctgaacacctacggcgagcgccggctcaaggtaaacatcgaccagtgcccgcaactgacgctgtgcctggagcggcagacctacaacgacaagggcgagccagacaagaacccgaagaatggttacgaccacatgaacgacgccgccggctacttcatcgccaagcggtatccgataaacgctcgcccagtccaatcgacaccactcaggatgtaa

SEQ ID NO: 329909 - DNA, 468 bp, Pseudomonas aeruginosa
atggcagtcctgagcagcgaggtgaaagccttcatcgttcaggccctggcctgtttcgatactcccgcacaggtggcggcatctgtccgagaagaattcggcatagaggtgagccgccaacagtgcgagtctcatgatccgaccaagagcgcaggccgcgatctggctaagcgctggcggactctgttcgaggacacccgcaagcgtttccgcgaagaaacctccgagatccccatcgccaaccgggcgttccggcttcgagcgctggggcggatggccgaaaaggccgagtccatgaagaacctagcactgaccgcccagttgttggaacaggcggccaaggagtgcggtgacgtctatgtgaaccgaaaggttgagcctgtgggcacccagccggaccaccagcaggcgaaaactgagtacaccttgagacctgacgaagatgtccctgctgccccgtacctatga

SEQ ID NO: 329910 - DNA, 429 bp, Pseudomonas aeruginosa
atgaccaccatcgcctacaaggatggcgtgatcgcatacgactctcgtatcacccgtggcaacctcatcactgatgacgactacgacaaatgcattgagcgcgacggcgtgaagttcttcttgtctggccctacgtgcgactacgacactttggtgggagcctatttcggtgccctcccatctgggaaggtttgcgcattcgcaatcgtgctcgatgccgacagactgatgttgattgctgtcgacgacgataccggcctgtggaggtcgccaatcaaggctgatcgtccttacgccattggcagcggcgcgccatacgctttcgctgcgatggacatgggggcatccgctgagatggccgtcgagatggccgcaaggcgcgataccagcactggcggaaaggtacggacgcttcggatatacggatag

SEQ ID NO: 329911 - DNA, 198 bp, Pseudomonas aeruginosa
atgactccagagcaatttgcatactggctgcaaggcttcgttgaattgaacgggtctctgccaagcgaaactcagtggttgcagatcaaggaccacctgaagctcgtcttcgaaaagcggactccgtattacccggcttatcaatcgccccccattggcatcgcccaggatttcaagcaatccgtggttacgtgctaa

SEQ ID NO: 329912 - DNA, 234 bp, Pseudomonas aeruginosa
atggatgctccgcttctgctgaagaacactggcacatgcctgattttgtgtgacagcaacgggaagccgctccctggacagctttcgttgagcgtcagcaacgacggccctatcccaaccgtcacggtcacgttcgcactcgttaacaagcgggtgaggctctgcggcgaagagatggagtcgcgcatctcatacgatgcgtatcttgaggcaattaagggaaggcgcagctga

SEQ ID NO: 329913 - DNA, 483 bp, Pseudomonas aeruginosa
atggcccgttccggcgtcctctacctgcatgttgcccaggcggccacccaactggtggctgcgggccacaaccccaccattgacagcatccgcgtcgccctgggtgggacgggcagcaaaagcacgattgctccgttgttaaagcgttggaaagccgcgcatcccggcacgctggcccaggccgaactgggattgcccgcggagctggtcctggcgctgaaaggactgtacgaaaaagttcaggcggaggcggccgtccaactccagcaggccgtagcggctcaccaggcagaggccgacgcgttgcaggaacagttgcagcaggcattcgtcgagcgcgacgcgcaactcagcgttcaggagcagcaggcccaggcacttgccgtagccactacgcgcagccaggggctggctgacaccctgcagcgtcaggagatggggtcatgccgagataaggggaaaattcattcatttggaatgtaa

SEQ ID NO: 329914 - DNA, 1011 bp, Pseudomonas aeruginosa
atgacagccggcaataatgacgaaaacctccccaccaggcggcacgaagagccgacagtacttgcgcgtacccccggtacgctcaccacccccgaacaattggctgagcaacatcagcgttttctcgccgccgcgacaaccgacaacacccggcgcacctaccgctcggccattcgccactttctcgcctggggcggcgtgctgccgtgcgatgaagccgcgctgattcgttatctattgtcttttgcggaagtattgaacccgcgcaccctggccctgcgcctcacggcgctgtcgcaatggcaccgttatcagggttttcctgaccctaccgccagcgccaccgtgggcaaaaccttgcgcggtattgagcgggtgaacgggcggcctcgacaaaaagccaaggccctggtcctagaggatctcgaacgcatcgtggtgcacctgaacacgctcgacggactggcgacactgcgggacagtgcactgctccaggtcgggtattttggtgcgttccggcgcagcgaattggtcacgctggagatgcaatacctcgagtgggagcaggaaggtctacggatcacgctgccccgttccaagaccgatcaggagggcgagggactcgacaaggcgatcccatacggcgacagcatctgctgccccgcgacagcgctacgccggtggttggacgcggctcagatcgttcaggggccactgttccggcgcatcagccgctggggcgtactcggcgaggtggcactgcacgagggcagcgtgaataccatcctgacggcacgtgccgaagccgcagggctgttgtatgtgcccgaactgagcagccacagtctgcgtcggggactggctaccagtgcgcatcgggctggggcggatttccttgagatcaaacgacagggtggctggcggcacgatggcaccgtacacggctatatcgaggaagctggagctttcgaggagaatgcggctggctcgttattacgacgcaaaccgtag

SEQ ID NO: 329915 - DNA, 2034 bp, Pseudomonas aeruginosa
atgagttcaagcccaaattcacaagcagaacaaaaatatttaatacacccaaaatataggcctgatatagatggaatgaggactatagctgttatttctgtagtcctatatcacgcatttcctagatggatgcctggaggattcataggagttgacgtatttttcataatatcaggatatttgatctcaactattctctacggaagtctgtcaacaaacacatttagatttactgagttttacgcacgaagaataaaaagaatttttcctgctctaatattggttcttgttagctgctacgtttttggatggttcactttattcgcagacgagtacaagcagctaggaaagcatatagcatccggatctgcattcatatctaacttcattctttgggatgaaagcggttatttcgatacatccgcagaagtaaaaccattattacacctttggtcgctagggatagaagagcagttctatataatatggccttttgttctttgggctgcatggaaaatcaggctgaacttactaacaatgacgacagcatttatggctttgtcattctcaattaacattcttaatatctcagaatacccaacatatacttttttcatgcctcacgctagagcatgggagcttttccttggatcgattctcgcatacctttcatataatttatcagaatatctcagcgtaatcagactaagaattgacaagatagcgacgcttgtgttcatgcggcctggaacggaaagcaatggatcggtactatcgacatttcaatctattataggtatttcgatcctggctttcggtttctatgcggtaaacaattcagaatttccgggttggaaagcaatcatcccatgctctggcgcaatgctgctgatctctgccggaaatacttcgtgggtgaacagaaatatactatccagcagaccgttcgtgtttataggacttatcagcttccctttatacctttggcactggccgatattatcttttgccagaataatagaaggagacgttccatccagattgatacggatatcagcagttgcattatctattattttggcgtgggcaacctatagattcattgagactccgctgaagaaatcgacatggaatttaaaaacatttgtcatatctatgacaatgttactagttggaacttctggatacttaacatatatactagatgggattccaacaagatctaatgtagtcaaagctgctgaagtaaacgctcagttcacaggtccaatttggaactacgcaactaacgacgtctgcttgaaaagatacggatatgagtctgcgaaaagctatccgtggtggttctgcatgacgaacaaagatcagaatccaacagttattcttttaggtaacagttatgcaaaccatctatacccgggcctttctacagagaaagatctttctaaacaaacatttttatctattggcgcatgcgatacttatcttgcatattcaaagcagcctgacgaacctgcaactccatgctctgggaatagacctaaagaacagttagacaatgtaaaatatattatagagtcaacgaaaacagtaagatatataattatctctggaataccaaaagacgtatcaggcgattacatagccaggcttgacgaaactataggataccttgaggggcagggagtcaaagtaataatctcaactccgcacataagagaaaaaatagatattaagtcttgcttctcaaggcctctaaaaaacagcgtagattgtacatttgcgatctccgaaaaatcagaaattgacaaagcaatggaaccattgaaatcccaaataaaagcaacgcacccatctgtcaaattctttgacccaaatacaattttctgtgatggaggtaaatgctctctcgtagtcgatggaatgccaatgtatcgtgatgaatacatgcacttttcagtattcgccagcgaactgtatgcgaagaaattcgtgcagtgggcagagaaaaacgggatagatatagctgattga

SEQ ID NO: 329916 - DNA, 1848 bp, Pseudomonas aeruginosa
atgactacgtatgccaccggcaatcagcttggctccaaagacccgcgtgatctgtccgacaacgccgagaacttcgacgcggcgatgaacgggctatctctgtcttggcttgaccggcttggccgaatgagaaagtcttggaggggaattgagaacgagtggaatacctttcttgccactactgggttcgaacttcccccactaatttatgcagacggtgcacctctggttgttgagagatcaacccaactggtgcagcgaaacggatcgctctacagcatcaggcttcctgcagactttccggttgcgctttcgggaaactgggatgatgatcagccccttatggtctatcgcaatgaccaaccgcttcgccaggacctagctgaccaagatggcggaaagctggttggatggacgcgtactgagctctcggagcagataaaagatgtaaactctgccttggacggcagtagtatcaatgtctgggagtacgcatcgcttgtatccagtaagcctaaccctgaagacccgactacgtgggactgggcgccagccgtgcaggccgcagtcgatttctgcaatgcggagtttcccgcgaaagagcttgttgttccaacgatgattcgcctagctagccctatatctattgaccggcctgtcgatggtgtatctactagggatacattttctataagaggaataaatggtggtggtttttatgttgactcagaaatagcaatgttcaccacaacaatttctcaaaatattgacccgactggcatgagaatgccgtcttctcagaacgtaaagtttgagaatctaaagtttacatgctctaatgctgcactcaatgcatatatactagatgataataaattcctcagaatttattttgaatcgtgctctattagctatttgaagttgcttaaaactccaagttatattcaatcaatatatataggtccaaacaacaatattagatattggtctggtacttttattgaatcaaatggcggagctttcgatatcagagcaactggctctcagattgagcatggtggaaatttctggagcactattgataacaccggtaacaaatcagttagtggttgttatatagacaattgcttaattgaaggtctttccggttttggaattctttactctcatgtcagaggaatagccgttacatcttgctatttcgagggtaatggcggccctgatattattggcgatagcttcccttccacggcaaaccttggcgtgtaccatgctggtaatatgcacgctaatagcgcagctaataatgagaaccctgcattctatgcggttaggtggggatacacgttcggtggaacgagtcttggtaatttctgctctggtaggctgaactatgttcgctctgatactcagatcactatgaacgatgccgccattcttgggatgtctaatacccaagataggctaatcctgaatgatattgagttgggtaatgtaaggcctagtgatgacccatctgcatatgggaatagggcatggcgagttggatctgttgttattaacaaggaccattcttctaaaggatatgctggatgggtttgtgttatccctggaacacctggagtttggtatccatttggaaatacctgcgatggtgaaagctggaactttacaaatgtcgatggatcggcaactatggcaaaaataggaataaatgagccatcatcagggcaaactgtgctgtctcttcgatatagcaacggaactacagtacaattaggtagagtcctagtgggagcagccgactctgctggccctggatacagaatgctcaggatcgcaaactga

SEQ ID NO: 329917 - DNA, 2730 bp, Pseudomonas aeruginosa
gtgatcgaaatctacccatcgctccttgacggagaaccgctggagcggcatccgatcggccgcaggatgacgattcattcctggctgaccgcgaattcgcctgggtaccgctgccacgacgtccacccgttctctatcggtgttgtccccgctgaggttgcgctctgcgatgacctcaccgacaagcagaaaaaggcccatgaggagttcatccatcccggtgagtgggctgagcgcatcatcgaccgcggcgacattgtgaggatctacaagctcccgcgcgggactgatccgttcacgattactgcggcccttttcaagggggcgcaatcggtttttcggatgctcatgcctcaattgcccggcatgccgacgaaccccgggcagggcgcgtcgctctctgaaaccagcgcgcgcgggaacaaagtcaagctcggcgatgcgatccgcgaagtcgctggccgtcgtctgatttatccagactacatcctgccgccccggaagtatttcgccggtccgcgtgagcagtggaccgaaatgctcctgtgtattggccgtggtcggttccagatcgccgaaggggcagcgaaaatcggtgacacgtcgttcctggcgcttggcgctgacgcctcgttccagattttcgaaccagggcagaacgtcagcgggcacccggcatcggtctggtggcatctggttgaggaagttggtgcgagctcaactggtaatgccggcctggacctgaccgagagttccaatctcaccccgaacccgtcggcaactacgttcacgttttccggaacgaacatcatcatttctgccggagccggttcgttcccctctgactgggttgcggggacgatcctgcgggttgaggcgatgtatccctattcggtgaatgatggcggtgggacggatcgcgacgtcgtgacgggggatatcgctcagctcgggctggatgttggcgatgagatcgaggtggtcggcaccaacggcggcctttacctggtgaacgacatcacctcgacgtcgatgacgctcaactacagcaacggttcgccggccaatgcgttgcagaccggctccggcaatgcagcaatcggcccgcgcggcctgcgctatcggatcacggcgtacagcgcgcagcaactcaccgtcgagcggctgaccagtgcgggcggcgtcgatgttgactggccaggattcaccgctctcaactcgtctacgtccagagtcaccatcgatccgaccagcctggaagggggctggcgcggtcccttcccggcgtgccctgtgtcggagaagaccaacttcgtcgagatcgacgtgttttgcccggaaggcctgtgcggcgtaggcagggaagggcagatctaccagatccgcacctattacgacatccagtggcgagacatggccgtcggcggcgcatggacgacggtcagcaagaaccatgctggcagttctctcgaccagcagggttttacggacggcatcccgcttccgtacatgatgcggcccgagtttcgcatcagaaaagtgttcgtcaaccaggggggcaactcaacatccgagtaccgagaccgcacccagtggtacgggatgcgcgcgcgcctccaggctccatcgtcctacgccggcgtcacggtaatggctgtccggtatcggtcgtctgaccgtatcgcggcgcagaccgaaagccgcgtctcggtagaggctacccgcatgctaccgactcggcagaacggagcatggacacccgagatcgctacgcgagacatcgtcccgttcctctgctacatcgccaaagagcgcggctacacagacgccgacctcgacctagaagagctcgatcggcttgacgccatctggaaggcccgcggtgacacgttcgacatgatctacgaggacggtaaggtcacggtggcgcagatcatggacgatgttcttgcggccgggtatgccgagaagaccatcaagcgcggcgtgatctctgcggccagagacgagcccaggacaacgttcgggcacatgtactcgccgcagaacatggacggcccactgaggatcagcatcagcgcgccgtctgaggacgactatgacggtatagatgtcaagttcgtgaatgccaatggatgggtcgacgatactgtgccatgccgcatagatggtgatattgggcgcaaggtggagacgataaccgccgttggtgtaacggaccgcgaccgagcctggcgctatgggatgcgccgcaggatggcacagcgataccggagaaccgagtattcgttcgataccggcctagacgcgcttaacagcgagttctgggattatgtggcccttgccggcgatgttcccggccctggcctggcgcagagcgcatacctgaaatcgttcgtgacctcgggaaactcggttctgatcgagtccagcgagccgctcgactggtcgctgctgaactcgccagcgctttacctgcgtcgcccagacgggacagtttccggtggctacccagcaacccggatcgacgactaccggttgagcattcccagtatcgatttcgtccctgatgtttcttgggagatcgaacctccacacctgctgcttgggaacccatacccggccctgatcagttccatcgatcccaacggcaatacctcggcatccgttcgtgcggtgaactacgaccccagggtctacacctacgacaacgccagcgcccccaactga

SEQ ID NO: 329918 - DNA, 2505 bp, Pseudomonas aeruginosa
atggcatcacgcagcctagggacgcttacgctcgatctcatcgccaaggttggcgggttcgtggccggcatggacgccgctgagcgccggtctgagaaatggcgcaaggaagtcgagaagaatgcggccaaggttggggccgcaattggcgctgctactgcggcaggtatcaccgcgcttgccgctctcactgtctcgacagttcgcaatgccaatgaaatcgcaaacttggcgagtgttgcgaacgcaagcacgaccgaatttcagaagtatgccgccggcgcaaagctggttggcattgaacaagagaagctcgctgacatcttcaaggatgtgaacgacaaggtaggcgacttcctcaataccggcggcggagcgcttgctgacttctttgagaatgtagcgccaaaaattggcgtgaccgcagaccagttccggaatcttagtggtcctcaagcccttggcttatacgtctcaagcctggaaaaggccaaggtcagccagtcggacatgaccttctatctggaagctatcgcgagcgatgcgactgctctgctcccgttgcttcgcaataacgctgagggattcaagacctttggcgacgccgcccaggccgctggcgcgattctcgacgagaagacgatcaagtcggcgaatgagcttaaagcagccacgtggcttgtagagcaaagcactacgggcctcaagaatcaacttacgtctgcgctgattccagtgctgagcgacttcgccacgaagctccttgatgtttcagaggatggaacatcgatggtcgccgttggtgagtttcttgtaaccacgctgaagctcgttgccggagcagcggtggccactgttggagccttccagcttgtagggaaatcgattgctggtgccgcggcagtcgcctcttctgcatttgaggggattacctggcttgagattgcttcgggaccagctggatgggcaaaaaggttcgtccagaatctcgacggagtgaaagctagcacttcggtttttgccgaagacatggttggatctggcaagaagatcgtcgaagttctggagttcattggtaacgccggcactggcgacgttaatggccgagtgaaagaactcgccaagctccttgatgagcttaggaaaaagaacaagaccgggacattcgaggccccggggaaagaagccgcggctgctgctaagaaactgcaaagcgcctacgaaacggttgagcagtcgtatcagcgacagatagcgctgatcaacacggaagtcgacaagcgcaaggatgccaccgaggtagcaaagcttcagttcgagattgagtcgggcaagctggttggaatcaacgccgagcagcagaaacgcttgaatagcctggcagaagagcttgatcgcctgaagcagctaaagcaggcgaacgaggatgcggcgaaggctcaggctttccgtgcaacgctcaatgaatcgaacgcaactgctcgggcaggatttgcgattgaactggcaggatcgggaagcggcgacaagctgagagagcgactgcgggcagacctggagatccagcaggactataacaaacagcttgccgatctccagaagcagctgaactccggtgacatcggtcagtcgctgtacgacaaagaaacggacatgctgcgccaggctctggccgagcgcctggaaatccagcatgagtactacgcagcccaggatgaggctcagagcaactggttggatggcgtcacgtctgcctgggagaactatcgcgacacagccacggactatcaacagcaagctgccgacttcaccacgcagacgctggacgggctcacctctgctgtaggagacggcatcgcttcgatgatcatggacggcgagagtcttgccgatgttttcaagaacatcgcgcagacgatggccacaagcatcatcaacgccctcgcgcagatggccgcccaatggctggtttatcaggcggtccaattggtgacaggcaaagctgctcaggctagcgcagcatccactcttgtcgccaacgcgcaggctaccgccttccaggcccaactagcggcgtttgctagcaccgctgcgatcccaatcgttggtccggttctggccccggccgctgcggcttctgctgctattgctactgccccaatggttgccggagttgctgcgtccgcccttgctggcatggctcacgatggcattgatgctgttccggaaaccggcacatggttactccagaagggcgagagggtgacgacggcagagacgagcgcaaagctcgacaggacgctcgatgacgttcgcgcaaatcagagcagcggcggagcgccgatcatcaacctgatcgaggatcgtagtcgtgcagggcaagttaatactcgccgccaggacgaccaatacatcatcgatgttgttgtggccgacctattcggcgatggccgtacatctaaggctatcggtagttcgttcggcatgcgcaggagcgggacatga

SEQ ID NO: 329919 - DNA, 255 bp, Pseudomonas aeruginosa
atgtgcgggattggcggaagaaccattgcggaagccaagtcccgcctcagctaccgggagttccttagctggtgcaagttccgggacaagcgggggagtctccatgttggcatgagagtagaacgcggatcggcattgctcgccgcgctctacgccaactcgcatagcaaggagacgtacaagttgtacgacttcatgccgcatgaagaagagcccgtcatcagtctagatcaggcccttgagacctgggcctag

SEQ ID NO: 329920 - DNA, 366 bp, Pseudomonas aeruginosa
atgtacccgccaatctacaaggtctgctcgagcagccccgctgttacctcgatccttggcgcgtccccgctgaggatctatcagtttggcctagccccccagctcgtcgtcaaaccatacgcaacatggcagaccatatcggggtcgccagagaactacctgtggggccgtcctgacgccgatggtttcaccatccaggtggacattttctcagccaccgctgcggaagccagagatgcagcaaaggccatcagggacgctattgagctttcagcttatgtagtccgctggggaggggagtctgttgaccctgataccaagacctaccgagtcagctttgacgtcgactggatagtccagcgatag

SEQ ID NO: 329921 - DNA, 483 bp, Pseudomonas aeruginosa
atggctgataccgtcgaattcagcatgaccgggatggatgaggtcatcgagaagctgaaccagatgtcgccgatggtgaagaagaaaggcggtcgtcgtgcactggcaagagcagcctcaatagttcgtgctcaggcgcgtcagaatgcgagagggattgacgatagaaccactcgcgagatgatcgctaagaacattgcgatgcagtggatgaccaggatgaatcgccagacgggcgaccttggctatcgaataggagtccgcggcggcgctcgggatatgagcgaatacggagaactcagcggggaaggtaggaacaaccccgggggtgatacttggtactggcggctggttgagtttggcacagaaagaactcgggcgaagccgttcatgcgaccagcacttgagaccaccgttcaggaagcgacgaatgcgtttgctatcgagctagaaaagcaaatagacaaaattctggaggggtga

SEQ ID NO: 329922 - DNA, 621 bp, Pseudomonas aeruginosa
atgacgcacgctttgccgcctgggctgaccgactgcctgctctggtctgaagagcttggaatgggtttccaccctcgtcctccgatggactatagcgggccgtatttcgagaagtaccagctgcttgacgctaccccgatgggcgctgcgcttacccaggcccgtattgatctggtgcgcaagcacttcgccggcggcgtggtggacatcggcatcggtggcggccggtttgtactggagtgcgagggatcggccggtttcgacgttaatcccgaggccgtcgcctggctggattcgcgcggcctactctacgacatcaacgcgcttcccttgcgagcgatcacctgctgggacagcctggagcacatcccagaccccgaggcgctggtggccaaggtcagcgagtgggtattcgtctccatgcccgtctacaaggaccaggtcgattgcctgaggtcgaagcacttcaaacctggtgagcacctgcactattggagcgttcggggtctagtcgggtggtttgcaaagatgaacttcggctgcgtcgagatcaacgagcgagaatcagaactcggtcgtgagggtatcactagctttgcgttccggagagtccatggctga

SEQ ID NO: 329923 - DNA, 813 bp, Pseudomonas aeruginosa
atgctcggcctcggcgactcgatctattccagggcattcctgaggaagtaccccggcgcattcctcgaaacaccctggccagagctttacctcgacctcgacgtgaagtgcgttcgcccggcgacgcagttgagaacccaggccaagaacatccagcgcgagcacgactggcaccgccctgtcggcagcggacaaatgcgcatcgcctacggtcagatgccgatcatccagggattgcgccaagcgttccggtgcgagcccggtgcgtttgatctgccagacttaggcccatcaccggtcgaagggcgctatgtcctggttcgcccggcgacggttcgcgctgagtggcgtgcagacacgcgcaacccacttcctgagtacatcgctagcgctgccgcagagatgcgccgcaggggctggaaagtggtttccgtggcggacttggagcctggtaaggagtgggcgatcgatccacttcctccggcagacatccagttccataagggtgaactgccggtagagcaactgctggccctgctgcaacacgccgatgcggtgatcggtggcatcggctggatcgtgccggcggccatcgccgccaaggtgccggcctggatcatctgcggcgggcagggcggctacaactcgccggaacacatcactgacaaatgtatggacctgtcccgcattaccttcgcggttcccgacaggttctgccgctgcacgttgaaacagcacaactgtgacaaaaggatcgccgatcatgacgcacgctttgccgcctgggctgaccgactgcctgctctggtctga

SEQ ID NO: 329924 - DNA, 501 bp, Pseudomonas aeruginosa
atgagcagcaacgtcattccatttcactaccaaggcaaaccggtgcgtttcaatagcgagggatggattaacgcaaccgacatcgcagcagctcacggcatgcgactggacaactggctgcgcaacaaggaaaccgaagcctacatcgaggcgcttgctcgccatctaaatacctcggattcgagggatttgattcgcggccaacgtgggcgcggcggtggcacctggcttcacccaaagctggccgtggcattcgctcgctggatatcgcccgactttgctgtctgggcagacctacacattgacgcactgctgcgcggtgagctgaccgagaaacaggcgttcgaccgggcgtgcaagcagcttgaggatgggcgccaattggccagccttcacggtaaagggcttgcggattggaagttcaaaaaaactatgttggaacatcgcgtggacgaaatgcgcgaccgcctgcagatggtgctcgggctagaagccgcctaa

SEQ ID NO: 329925 - DNA, 735 bp, Pseudomonas aeruginosa
atgctgcacatcccggcgttcacgctggatggtcgaattggtctttctgcaatccggtacggcgttgatgtcttcggttcggtcatgtcggcggaggatgcagccaacggcacattcaaaaacggacttctacccacggtcgccttcaaggttgaccgcattctccagcctgcgcagcgggaggagttcagggagtatgtgaagtccgtatcgggcgcgatgaactccggaagatcgccggttctggaacaggggattacacctgaaaccatcggcatcaatccggtcgatgctcagttgctggagacgcgagagcatggcgtgatcgagatttgcagatggttcggggtgccgccctggatgattggccagaccgacaaggggagcaactggggaacgggcctggaacagcagatgctggccttcctgaccttctgcatcagctccttcaccagccagatccagcagtgtgtgaataagcgcctgctcactgcggctgagcggcagcggtactacgccgaattctcgctggaggcattcctccgcgccgacagttcggctagagcacagctctacagccagatgacccagaacgggatctacacccgcgacgattgccgggtgaaggaaaacctgcctcgcaagggcgggaatgccgatgtgctcaccgtccaatccaacctggtccccctagatcaactggggggggcaacgaaagaaagctctccgccgtag

SEQ ID NO: 329926 - DNA, 234 bp, Pseudomonas aeruginosa
atggatgctccgcttctactgaagaacaccggcacatccctgattttgtgtgacagcaacgggaagccgctccctggccagctttcgttgagcgtcagcaacgatggtcctgttccaaccgtcacggtcacgttcgcactcgttaacaagcgggtgaggctctgcggcgaagagatggagtcgcgcatctcatacgatgcgtatcttgagacaattaagggaaggcgcagctga

SEQ ID NO: 329927 - DNA, 285 bp, Pseudomonas aeruginosa
atggttgacccttggactctggtagccgcgatgatttgcggcgccatctgcatgcggctggcgacataccgccggcaaggcgcgaggtatcgccggggagtgtcctggctcgcatacctgctgtgcgttggtagtgggtgttttgccctgagcgtgatgctcgatgcactccacggctacagactgaatcctgtctccccttggctgaccctggtcctggcaatcctgctcggccttgtgtgtcgtgcgcgggggaatcttgcccacattctgagggtgtactga

SEQ ID NO: 329928 - DNA, 201 bp, Pseudomonas aeruginosa
gtggcggagcaggtccggcaggttgccgcgctgcgcctggccgacgagcagcgcgcccgggatgccgcgcaggctgtggatcggggacggcagcaggccgcggagcagtatgccgaagcccagcgcctggtacgtgagcgaaccgccggcgggcagtgtgcggccgccgaggcggtcattgatcaggagctgggtctatga

SEQ ID NO: 329929 - DNA, 264 bp, Pseudomonas aeruginosa
atgagggtggtgctgatgctgatgattgtcgcgctggtgggatgcgccggccggcaggaagccgagccgcgcacggtgcgcgtagaagttccggtggcggtgccgtgccgagcgcccgcggtcgaggtgccggcctgggcagcggctgggctgaagaagagcgacgacctacagaccaaggtccgcgcgctgctggcagagcgtcggcagcggatcggttacgaggcgcagctcctggctgcgaatcaggcctgtcaggattag

SEQ ID NO: 329930 - DNA, 264 bp, Pseudomonas aeruginosa
atgctggtcattcgattcaagggctggtcggtgaaactcgaccaccaggtgggtggagcagggaagttcggcatctggtcattccacggctcggagagcagctacgtaccggacatggagacgattctccggcatgcagctatccgccctgcggagccgaaagaaggtggggaggtcgaggtattcatctgtgatgcacggatggcgcaggatgaatggcgggcggtagggactggcgtcgcggcttatgagtcggaccgctga

SEQ ID NO: 329931 - DNA, 1254 bp, Pseudomonas aeruginosa
atggaactctcccccgccgaacgccaactcctgctggcccatcgcctggccgtgttcgacggctgcgtggtgtacgacgcccaaccgccggtgtccgccgaacacgtccagcgtcttgccgaaggcctggccggaccgattccagaagacctgctacgcctctggcgcacctgtttcggcgggcgcctcggctatgacctggaagtcgactacgacggccaccgccacccgttctctttcagcgaactgttctatccggacagcgacggctaccacgacctctggggctggatcgaacacgagcgcgagctggcggcggaagccgcgacagaagaaggccgcgactggaacggcaagctggcctacctgccgttcggtggcttcgagtacctggagcgcctctacgtctgcgtcgaacccggccccgagcatggcgcggtaatcgcctggagccacggcctgccgccggcctgggccggacgcctgcaccaggattcggtgacgcgcctggccgacgatgtcggcgggctgttccgcctgctgtccttcgaacaggatccgttcgatgccgagaacgcctgcggcgtggccgacgagctactggaagcgctggacgccctggaggccgccggggagcccggcaaggcgctgaagggccgcctggaagtcctgctgcgccagcgcatcctcgactggcggccggccctcgccgacggcagcctggccgccgagccaaggctgcgtcaactggccctggccgaagctgcgcaagacggcgacatcgacctgctgcaacgcctgcgcgatgccggctgcgacttcgccgaaaccttgcgcggacgcggcggtgtgctggaggcctgcctagcccgcgggcgcctggaggccgccagatggctgctcgaccagggcgtcgcggtgcaccaggacagcctgcagattggcgccgcgcacctcgatgcgctcctggccgaacgcctgttgcggctcggcgcgatctccgacccgaatacggtgctcctcgccctgcaatacggcgacgccgacgccgcgcggatcatggcgcgaccgctgctggaggagtcgccggcgagggccagcgccctgcgtctggccctcgccagccgcgccgagcgcgagcgcagcgacgccaggcgggtcaggtcgggaaagatgggcagcaaccgcagtcccgacgactacctggccctggccgagcgcctggagcgcttcctcgccgagctgccaggctga

SEQ ID NO: 329932 - DNA, 618 bp, Pseudomonas aeruginosa; identical to SEQ ID NO: 323341

SEQ ID NO: 329933 - DNA, 1347 bp, Pseudomonas aeruginosa
atgcaaggggatggaaagaaacgactgtggacgcttccactgctgctgggcgccggactgatggcctcggccgtcgccgaggagaacgccgagcggagcaaggaaggtttcatcgagggcagcgaggtcaacctgctgctgcgcaacttctacttcaaccgcgacttccgcaagggccaatcgagcccggcgggcggcggctacaccgaggagtgggtgcagggcttcatggccaacttttcctcgggcttcacccagggcacgctgggcgtcggcatcgacgccttcgcccagctcggcgtgcgcctggacagcggcggcgggcgttccggcgccggcggtagcgtcgacctgctgccctatgacgaccaggggcggccgcaggacgactattcgcgagccggcggcgcggtcaagctgcgctggtacggcaccgtgctgcgggtcggcgacgtgttcccggaaaccccggtgatccagtacggcaacagccggctgttcccctccagcttccgtggcttcaccctggtcaacgacagcctggcgaagggcctgaccctgcaggccggcaagctgaactcgatgacccagccgaacagcaccagcggcagcgacgacttctacagcttctacaccggccggcgcatcgactcgccgtgggtcgcctacgccggcggcgactaccaggccaccgagcactggagcgtcagcctctacggcagccgccagaaggacgcctgggaccagtactacgccggcaccagcttcaactatccgctggacgacaagctgtccctgctcggcggcgccaactactacaaggtcaaggaccagggcaggcaggtgatgggcgaactcgacaacgacatctggagcgtgcgcggcggcttcgcctacggtccgcaccaggtgctgctgtcgtaccagcgcaacaacggcgacgacgacttcgactacctgcgccagaccgactccatctacctggacaactcgatccagtacagcgacttcaactcgcccaaggaacgctcgctgatgctccgctacgacctcgacatggccgccttcggcgtgccggggctgagcttcatgacccgctatggcaagggctgggacgccgattattcgaatgccaacagcgtctacatgcgcaccgacgccaacggcaacccgctgaccaaccagggccgctgggaacgcgacgtggaggtcaagtacgtggtgcagggtggcgcggccaaggacctggcgttccgcgtgcgccaggccaccgtgcgctccgatagcttcgagtcggacctcgacgaagtccgcctgatcgtcgaatacccgctgcaagtcctctga

SEQ ID NO: 329934 - DNA, 237 bp, Pseudomonas aeruginosa
atgaagaaggatcacggtggacaagcgtttccgtcagaatcgatgtacacgtccgaagctggaatgaccctgcgcgactacttcgcggccaaggcgatgcaggccttgcttcatccgacgtacatagagtcaagcgtaagcaagccccatagcaatcctcttgctgacataccgagggttgcttatcgatacgccgacgccatgctaaaggccaggaaggaaggaggtggggagtga

SEQ ID NO: 329935 - DNA, 330 bp, Pseudomonas aeruginosa
atgaacgaccgcgagctactcgaactggcggcgcgggcggcggggattgatccagtcttggctgaaccgatcaatttcagtactggggttgaatattactggaacccgcgtgatgacgacggcgatgcattgcgcttagcggtgcgactgaacctggatatccgctacgaaagctatgacgcaggcgtcgccgtcatagtgggcggcgcttgggacggcgcgccggaagcggtacacgaaatattcgaacgtgacggcccgcgtgcaactcggcgagcaatcgtccgcgcagccgcagagatcggcaagtctatgggaggtggggaatga

SEQ ID NO: 329936 - DNA, 555 bp, Pseudomonas aeruginosa
atgaccgaccacgcagagctgcggaggctggctaaggcggcaacgcctggaccgtggcgtgttcaaaccgggtgcagttggcgccgcatcggaaccgacagcggtgatggagatgtacttcgtccatgcacgcacccgcatgatggctggcctgacatagtagcgcccgcagagaatttgaaatacatcgcatccgccaaccccaagaccatcctcgccctgctggacgagatcgaccggctcaaggcggagaactgcgcccacaaggacacgcagaaacactgcgagttgttggagcagtacttgaaggagtgcgcaagcgccctgcctggcacctactacatggaccctccagacggcggcaatgtcagcataccagagcagattcggcgcatggcgaaggatgccgctcgctaccggtggctgcgagagcgagacctcgaaacgatcagacaaggcggcgtattcgccgggatgaccccggagaacatcgtactcaaccaggaagacctagacgctgaaatcgacgcagccctggaaggagaaacgcaatga

SEQ ID NO: 329937 - DNA, 210 bp, Pseudomonas aeruginosa
atgaagacatttttgaagatgctcgcatattgcgtgcttgggacatccattggcattgccatcagccaatggttcatcttcgtcctagagatgaggcttggcgccgtgctcgggtacatcgttggccttggccctgtgctgcttgtgctttgcattttgggcagcttcctccaatggctgattcataagaacttggagaaaaagccatga

SEQ ID NO: 329938 - DNA, 168 bp, Pseudomonas aeruginosa
atggagcaagagttgaagccgtgcccctattgccgaggctatgacctagagcggcgctggtgtcgcgtttgcaatggccgtggcgtcgttgatgtcaaggctcaacagcgagagcgcgcagagattgtaaaggcgctgcgcgaaggcggaattgaagtgagggactga

SEQ ID NO: 329939 - DNA, 147 bp, Pseudomonas aeruginosa
gtggacaacgaaaacgaaaccctggtcgcgctgctggtcatcgcgctgattgtcttcggcatcttccggatagtcggggacttccagaacctatacgagcagacagaacagaaaggacaggagttgagcagatggagcaagagttga

SEQ ID NO: 329940 - DNA, 291 bp, Pseudomonas aeruginosa
atgcgcacgaaacccttccgcccgcctcagcggcatgagatcgccggcctccgctactaccgcactgcctcggcctataactggctcggcatcaccatggcgcacccgacccgagcaatccagttgctgctcgagcagtgcgagccagacgtgctctcgccgatgttcgagattgagatcgacgcgatcctgcgccaggccgacgagtacgcgaaaaccggacaggtgctagagcgcgagcaactgcgcgaaatgctcatgcacctgatctccaaagcagcgggcgaataa

SEQ ID NO: 329941 - DNA, 384 bp, Pseudomonas aeruginosa
gtgaagctgacgaagaagcagcgcgctgagcttcgggagaagtttggagggcggtgcgcatattgcggcgtcgaccttccagagcgatggcatgccgaccactacgaagcagttcagcgtggagtgagcagctacgtcaccggaagagacgcgctgcatcccgagaaccatcgcatggaaaacatgatgccgtcttgtccgccgtgcaacatcagcaaaggaagcatgtcgcttgaggtgtggcgtgaatggctagctgggcacgtcaacagtctgaatgcctatcaccctatctaccgcctggccaaggcatacggcctgatccaggagacaggtgagccggtcgtcttctacttcgagaagttcgggcatcgacaggcatag

SEQ ID NO: 329942 - DNA, 354 bp, Pseudomonas aeruginosa
atggctgaagaactgaaaccgtgtccgttctgcggatgttcgatgcgcctggtgagcaaccacgactggcaccggatcgtaggcgatcactcagccgagtgcgtgttcctcgacagcgaaaccatgatggtcccaggcatagaagatcagcgtgaaatcgccatcgctgactggaacgcccgagccgtccccgcaggccatgtggtgatcagcgaggggttgttgcggcgagtatgcgcggaaccgccagccacgtgctgcatggacgacgagatgacctggcggcgggatctcgactcagcgctgctcgaactccgcgccctgctgagcgagcaggagggagggaagccgtga

SEQ ID NO: 329943 - DNA, 495 bp, Pseudomonas aeruginosa
atgagtgaggtggagcggttcaacgaatacacctggggggttactgaggatgagcacggggagtacgtcagatatgcagactacgacgccctagccgccgaggcccaggcgctaaggcaggaagtcgcagcactgcgcgcaagggcggatgttgtgccggaggtgttcgggcttgagcggtaccgcgtagaaaaaactgggaagggtttctggccatactgcgtgcgtgcgggggatggaacgcgtgaactgttcgtcggccacttgaagcagtgtcagcgggtagcgaccgaattggctacggcgtttgaagatgggaagtttatcgccgcgcccggcagctcggctcagcacagcgtgctgaaggttactggcgaaatgatcgtggctgcccttgacactttccgaccgggcgagtccccgttcaaatcgatggaaagagcattgaacgccgcacttcggaaggccgccgcgcccggcaaggagggggtgtga

SEQ ID NO: 329944 - DNA, 270 bp, Pseudomonas aeruginosa
atgaccagccaatacgaaaacatcatcggcatgcgcaagaagatagacgcccaggctgatcacatacgccgccttgaaatccgaattcatgagttgcgtacagcccaggctcagcacagcgtgccggaggtgtcagggatcggacgagacttcgcctatccgcgctccgtagttctgtacctgcgcacagagccgaccgacgacgacctgcgagccatccatgatggtctgcgatctctcgccgccgcgcccggcaaggagggggtgtga

SEQ ID NO: 329945 - DNA, 522 bp, Pseudomonas aeruginosa
atgaatgaggcggtcgcgatacctggctttgatcctttcatggcgaccaacgatggctgcatcttcaacggcgagactgggaaaaagctgaccactcagctagacaagaaaggctacgagaagatcacattccggctgcatggccagaagaaaaacatgtttgttcatcgtctcgttgcacttgcgttcatcccaaaccctgactgcaagacgcaaataaaccacatcaacggcgtaaagacagacaactcagcagcgaatcttgaatggtgcacaccgtccgagaacatcaagcatgcctatcaacaaggactgctccaccaagacggaattccaatcatcgccgagtcagaagaagttgccggcttcggcatatggttcccatcttcgaaatctatccgtcgtcatggattcgacaggcgtggcgtctatcgctgcctgaatggacatgtccaaaagtacaaaggcttccgatggaagcgagcagaacaaactcacaaccgagcctctgaggagccgtga

SEQ ID NO: 329946 - DNA, 1065 bp, Pseudomonas aeruginosa
atgtccgcagaaacccaactggtcgaagtgccggccaaagaaaccgccctccaagtctactcggcagccaatggccttgacccgttcctggccaagattcgcgaggaaatcgacggcttcgtgccggacgtttcaacccgcaagggccgcgatgccatcgcttccatcgcctacaaggtcgcccgctccaagacggcgctggacaacgtgggcaaggaattggtcgctgagctgaaggaagttccgaagaagatcgatgccgagcgtaagcgcatgcgtgacctgctggactcctggcaggcagaggtacgccagcccctaacggagtgggagcagcgcgaggaaatgcgcaaggccaaacaccaggccggcatcgatcagatcaacctgcgcctggaatgccgcgacctagattcgaccgagttgaaagccaacattgaatggctggaaggcctatccattggcgcagactgggaagagttcgaaaccgaggccgcccgcaccaaggataaggccctggccgcgctgcgcgaagccctcgttgcacgcgagaggtatgaagccgagcaggccgaactggagcgactgcgcgccgaagctgctgctcgcgagcagaaagagcgcgaggagcgcattgcccgcgaagcagccgaggccgagcgcctggcagcggaacgacgcgcccaggaagaacgcgaagccgccgctcgccgcgaaaccgaggcaaaggctgccgccgagcgccgggaactggaactgcgactcgctgccgagaaggcggagcgcgagaagttggaagcacagcaacgcgccgagcaggctgagcgtgatgcacagcggcgcgccgaagaagccgctgccgcagagcgccaacggcaggcagacgagcaagccaggatcgagcgcgaggcagcagcccgagaagccgacaaggcccacaagaaagccatcaacaacgaagccctggcggctcttatcgccggtggcatgcccgaggaatgcgccaagcaggcgatcaccctgatcgctcagcgcaaggttcctcacatcacgatcaactattga

SEQ ID NO: 329947 - DNA, 396 bp, Pseudomonas aeruginosa
atgactcccgaacagttcatcaaactcgccatcctccaaaccactgcacgctgggacaacgccgaactccagagcgatctttcgcctgatgaggttgaagcgcgctatgacgccctcgtcgaacaagacgcccactgggatgccagaagcgaagttcgtgtgggtgacgtcgagacgaacatcgagcctgattactcgcgtcactacgagtcgaaatcagtcgccactcaggtcaatggccaatgggtcggctggacctactggtatggtggcggaaagcacggcgagccagaggccatcgactggatggataaggcttacttccttgactgcgttgaggaacagaagaccgtgactatccgcaccttcagcaagccagaaacaccaaccgcctaa

SEQ ID NO: 329948 - DNA, 165 bp, Pseudomonas aeruginosa
atgaatcgccacttcaagcgaatcatgctctacaccaagcgcaccctgctcggcgcgatggttgcgatcctgatcgtgttcaaggcaatcgatctcggcggcgcaatcactggcgaagcgacggctgagcagcccattacgcacctgtccgcagcaggccggtaa

SEQ ID NO: 329949 - DNA, 390 bp, Pseudomonas aeruginosa
atgacaacccctatcgtgcaatcgatcagtgatgagcaattggcggagttggaagagtactgccacaagagggcattcgtctgttgtggcaatttcaaatccggggccgaatacatgagcgcgcgcgaggaagtctgctgtaacgagccagtgttgacggatgtaaatatcaacactccagcagaggagatacttggcctgatcgctcgcctgcgcgctgctgaggctgatgctaagcgctatcggtggttgcgggacaagtcggcggacgcagacggggtctatccgatggtgtcgcttaccgatgactgtggcgatcaggtgtctaactggcttttcgggaaggccgtagacaaagctgttgatgaagcaatggagagcacgccatga

SEQ ID NO: 329950 - DNA, 414 bp, Pseudomonas aeruginosa
atgtcatacggacagccgctggagtacgtttgccagcaatacggagtgccagcgcacattggccgcatggtgatcgcctgcggtcagcccgggatcattcttgaggatcgcggcaattacatcggcgttgcgctggactccgacccaaccaaggcagtaaacaactaccacccaactcatgatgttgagtacctggggatggctcgccagatgccgctcaaagaatgggaggttctgactggtgacttcgactggtttcaggtcgattacctgatcggagacgcacgccactacgtacacagggtttacgccgaaacccggagcaaggccaagtacaaggtgttcaaggatcttgaagaggtctttgacagcgctgaggcaatgctgtgcttcaaggttcgcagagcccgctga

SEQ ID NO: 329951 - DNA, 645 bp, Pseudomonas aeruginosa
atgccaaattgggtaaccaacaaggttaaggctccgcaggaagtcatccaggcaatggtcagcgaagaaggccgcatcgatttcggaaaaatcatcaagttcggcggcgagtttccatggaacggtgtttcggtcgatgcagaaaccgctgctgagcgcgtactgaacctgccactgaattcgcatcccttggtcggcagcatgcagaaatccagtcgtgaccgcgttgacgtttcaaagctgagcgatgagagcttcgagcagttcatccagatgctgcgcaatcaccgccagaccggctacttgcacgacatggactttgccagatcggcctggggcaccaagtggaatgcctatgagtccagggttgacggacctgagtccgcaagctttgaaacagcatggtctttccctgagccgatcttcctcaagctgagctcgatgttccctgaggcaaccatcgaactcaactacgcagacgaagacatcggcagtaactgcggcacggtcaggttcaagggtggagaggtaatttatcgcgacgagtctgcgggctggaacagcatgtccggggccgaccgcgagaggtggaccagctttgcctacgaggtcaagggctgggagcgcgaccaagaagacgactga

SEQ ID NO: 329952 - DNA, 264 bp, Pseudomonas aeruginosa
atgtcgctagagcagctggctgtgcttaccgactcgagcaagagctacctatgggagctagaaaatcgcgataaaccgaacccgtccttggataaggtgaccaaaatcgcaacggcgctaaatctcacaccagaggcactgctaggaacagcgtcccccgatttagcagctgaagcggacaaagcgtttttccgcaaataccaagagctggacgataaggacaaggaacggcttaggaaaatggtcgacgattggtggagctga

SEQ ID NO: 329953 - DNA, 1104 bp, Pseudomonas aeruginosa
atgactaccgaccttcctcttaccccatctcatcagccgaacgctggccactccgctgttgtgaaaatcaatggcgagatggtagatgtccgtgactgggctcctaccgcacgccagattctggctgccgccggcctgcaaccagttacagagtacgtgcttctgagctggcctgaacacgggccgaccgaagagctcggcctggacgaaactatttcattgcctcgcaatggttcggttgcggaattcctggcgatgcaagcggatgcagtcttctacttcatgctgaacgatctgcgctttgcgtgggctggccttctgaccacagaggatgttcgcaaagtaggacgtgtaccgaacactatggaggtgtggctggagtaccgtgacgagcctgacatggagctggaagaaggagctgttgttaaccttctggcccctggagttgagcgcatgtacagccgccggcgcaaatggaagctggatgtgcatggggtgctcgtcgagtcgcttgagccagagatagtcgttcgcgatgcactgctcttggcaggcatcgatccagatcaaggctggatcattcgcttaaaggtacgaggcgaacccaaacgcgaagttggtttggcagacagcatcgacttgacgaaaccgggcatcgagcgccttcagctcatttctgacacgattaacaacggcgaaatcccctgctccgtccggcgggactttgccttgctggcaaaagacgagacctacttggacgctcgggggctgttctgggaaaccgttgatgatggcaggcgttggctgttgatccgggactacccggtaccaaagggatatctccaaacaagcacctgcttagccatagaaatcccccagaactaccctgtcgcagaaatcgacatgttctactgcaacccgccgctcgtcttggcaagcggcgtccagattcctcaaaccgaataccgtcaggtggtaaacggaatcgagttccagcgctggtctcgccacaggaatcaagggcagtggtcgcccacgcgagactctgtgctttcgcacatcgggctggtggaagagtcgattgcccgggagctagggcaatga

SEQ ID NO: 329954 - DNA, 1401 bp, Pseudomonas aeruginosa
atgagcgccggcacaaccttggtgctaacaggcgcgctgcatgcgcgccttcaacaacaccttcttccaccagatggccttgaggcggtggcaatcttgctctgcaagcgcatgcgaacagagaacagactgaagctgctttgcaaggacgctgtgttggttccttatggcgagtgcactcgagttcgtgattaccttgagtggcctggaagaagactcttggaggcagtggttctagcggagcctgatgagctatcgcttgtgctgatccactcccacccaggagggctctacgatttctcccaatcggactcggaatctgatgcccaggtcattccccaagtgtttgccaatctcgagtcagctgatcaatcggatgtggttcatgggagcgcaatcatggtgccgggcggggcaatcagagcccgggtttatgactacaagcatcagatggcaccgataaatctggtagcggtatacggagacgatatccgtctcttctggaacgatgacaaccaacccttgcaccacgcaattgccttttcagacgagatgcgttcggagttaggcaggcttaccgtggcagtaattggctactcaggcactggcagcattgctgcagagcagctcgcccgtattggcttcgggggcatggtagtcgtggattacgaccaggttgaaaaccggaacctgaataggatcatcaactccaccgttgctgatgcggctgaaagtcagttgaaggtgaatgttttccgtagagccgcggccgcctttcgccctggaatatctcttaaatgcgtaccgacttcgatcgctacaagggaggcggttcttgcggtagcagaggccgacatccttttctgctgcgtagatagtgaagaaggccgcttcatctgcgacgcaataagcgctgccttcatgatgccgctctttgatgtcggggtagtcattccggtgcgccgggatagagacgacaggctcgcgattctcgatatccacgggcgagtcgactatgtgcaaccaggtggatcgactctcttcgaccgcaaggtctacacctcggcttctctgagagctgaagagttagccaagcgggatcctgaggcttatgcagaacaggtgaaagttggctatatgcctggcagtctagagcaatcaccgtccgtgatcacagtgaatatgcatgctgccagcatggtcgttcaggagctaattgctagactctacccctatcgtttggatggaaacagcagctgtgctcgaaccatgtttagtctggccgaaaaggagtacgagtacctctcggaagctgactttaccccgcaagagtcgccgaagctgggaacaggtttgaacgaacctctacttgggctgcccttgctgagggccaagcaatga

SEQ ID NO: 329955 - DNA, 474 bp, Pseudomonas aeruginosa
atggacggacacaatttcgaaaggttaaaagcacacatcttgatgcattctgtttcggacgacttcgaggtagcgcgtcgagaatggagcctggtagctatcgaggtaaccgaggaattcgatcaatgcccctgtggccaggacatcaaagagcactgctatatcaggaacagcctaaacggcaatcaaacgtatgtcggcaacgtttgcatcaaccgcttcctccagatcaataccggcaatctgtttgagggcctcaagcggatagctagtgacctcaaggcaaatgccaatcatgacttgatcgagcatgcgtggaagatgggctatctatatggagaaaaggagtacagcttcctccttcaaaccatgcgaagccgaaagctgtcgcccagccaattggcatggaaagagaagattaatcgccggatagtccagcaaacggtggtcaagagtcgcactcatcgcacatga

SEQ ID NO: 329956 - DNA, 3864 bp, Pseudomonas aeruginosa
gtgcaggcactgccttcggccgttagggctcagggcagcctgcctcgcctcgaagagcggagtgcccttcttgccgagcctccggttgggcagccagcgctgcaaaccctgccgtcggttgcgcgcgttgagggcgtgcccagcaataccataccgagcaacagccacaagtatctgatcgagaccaacccggcgctcaccgagctgaagcagttcctcaactcggactacctgctcggtggcctgggtatcaatccggatgacagcaagaagcgcctgggcgacggtctatacgagcagcgcctggtacgcgaagcgatcgtccagcgtacggggcagcgcttcatcgccggattgaacagcgacgaagcgatgttccgctatctgatggacaacgccatcgccagcaaggacgtattgggactgacccctggcgtcaccctcagcgccgcccaggtggccgcgctgacccacgacatcgtttggctggaagaagtcgaggtgaatggcgagaaggtcctcgcccccgtggtctacctggcccaggccgaggggcggttgggcccgaacggcgcgctgatccaggggcgcgacgtgaacctgatcaccggcggggacctgaggaacgccggtaccctgcgcgcgcagaacgacctcagcgcgacagccggcaacatcgacaacagcggcctgatcgaggccggcaaccgcctcgacctgctggccagcggctccatccgcaatgaccagggcggcatcattgccgggcgcgaggtaagcctctccgcccttaccggagacgtcatcaatgaacggacggtgacccagcaccagtcctcctacaggggaaccggtaccactgaggcatttgccgatagcgccgcgcgtatcgaggctgcgcagaagctgaccgtttcggcaggtcgcgatgtagccaatattggcggtgtcatcgacagcaagggcgacctcgccttgcaaggcggcagggatgtcctggtttcggctgcggtagcggagcggggctggacggcaggaagccaggcataccagacccagacgacccagatgggcgccgaagtcgtggcggggcgcgatatcagcgtcagcgccggacgcgatatcagcgtcgtgggcagccgcatcgacgctcgtcgcgacgtgacattcgaggcgggtcgcgatgtgggcctggtcgcggctgccaacgaagagcatgcctatggcaagaccaagaaggtcactttccaggacgacaagatcacccagcaggccactcgcgtggacgctggcggcgatctggcgatcaatgccggacaggacctgcggctggtcgcgagccaggccagcgccggcgacgaagcctacctggtggccggcgacaagctggagctgctggccgccaacgacagcagttactacctgtacgacaagaagagcaaaggcagcttcggtagcaagaagacccggcgcgacgaaatcaccgatgtgacggcagtgggcagccaaatatccagcggcggcgacctcaccctgctcagtggcggcgaccagacttaccagggcgcgaagctggaatcgggcaacgacctggccatcgtcagcggcggcgcggtgaccttcgacgcggtgaaggacctgcaccaggagagccacgagaagagcaagggcgacctggcgtggcagtcgtcgaagggcaagggccagaccgacgaaaccgtacgccagagccagctcgtcgcccagggcaacctggcgatcaaggccgtggaaggcctgaagatcgacctcaagcacatcgaccagaagaccgtgagccagaccatcgacgcgatggtgcaggcggatccgcaactggcctggttgaagcagatggagcagcgcggcgatgtggattggcggcgcgtgcaggaactgcatgacagctggaagtacagcaactccgggctgggcgtcggcgcgcagttggcgatagcgattgtcgtgacttacttcacggcgggtgcggcgagtgcggcattgggatcgatggcgggtgtgggggcgggctcaggaagcatgatggctgctgccggtagcactgcaatggtccaggccggtacagcagtaggaacagctgccgccggctgggcgaatgccgctggaactgccgtggctatgggcatggccagcaatggagcgatcagcaccatcaacaaccggggaaacctgggggatgtcgtcaaggacgtgacctccagcgatgcgctgaggggctatgtagtcgctggcacgactgcggggctgactgccggcgtctacgacaaatggacctcgacccagaccggcacctcgaccgctctaccgaacaccggggccgtggcgcccgccgcagggttgggcacctggcaaggcgtgggccagttcacctcgaaccagttgctgcagaatggtacttcggtgctgttggaccgggcgctgggcggcaagggcagcctgggcgatgcgttgcaaaacagcctggcaaatgcctttgcggcctacggcttcaagctgattggcgacaccacccatggcgtgctggacgacggcagcctcggcaagatcggcttgcacgccctgatgggaggtctggccgccgaagcggtcggtggcgatttccgtaccggagccctggctgcgggagtcaacgaggcgctggtggatagcctcgccaagcaatacgccagcctgcccatcgatgacaagaagggcctgctgatcatgagttcgcagttgatcggcgtgctggcggcttcgacgcagggcgatgcggacgccaagagcttgcagacgggggcctgggtggcggggaatgccacccaacacaactacctcagtcattggcaggaggagaagaagcggcaggaggtcgatggctgcaaggacaaacagctctgcaaaaccggaatagaagccaaatgggcaattatttcggcccagcaggatgtcggtatcgtcgtaggtgttggaggaggcatcggtctttcgacagctgaaaccgcagtgggtgtttatgagctggtcaagaactggagggaaacctacgcagctctggagcagttggccacttcgccagagttccggcagcagtttggcgataactacctgaaggggctggaggagcgcgccgcattcttgacccaggcttacgaggatgccggttggcaaggttcggtcacagctggtgtcgagggcggtaggttcgctgcggaacttgttggcgttctgacggcagtaaaaggtggcgcgcagataaccgccaagctgccaacagcagccaagaacctggtcaacgcgattgcggagtcacctgtttccggtagtatgagttcgcagctcggggcagtgggggacttgggtaggctgggtgggggtgcaaaagcgactgcgacggtgatcgataccgctccgatggcccagcgggtcatggatgttcgagctggattgccgtctaatttaaggcgcagtggtaatgtagctatcgcagaaatagatattcccggaatacctaggcagatggctgcgcacagccaagtctctgatgccggtaaagggcttattggctctggaagtggaaattttgtggctcaatctgtacccaacaaggccggagatatggtttatcggggaatagatacggaatacaaaatactagacaatattgctgatcaattaggaagcaacacctccgcaagagggactgtaaatattctaacggagaaagcagcttgcgcaagttgtctaaacgtggctgagcagtttaaggcgaagtatcccaatatcacagttaatattcttgataatcagggcgttatgctccgtccgccgaggaagacgccgtaa

SEQ ID NO: 329957 - DNA, 351 bp, Pseudomonas aeruginosa
atgactcagagctatatcggcaccaagcagatcctggcgtgggagcaagacagagacggacagccgggctatacggtgaaatatgccgatggctatatgagctggagcccgaaggatgtctttgaggctgcctatcttcggatggggcatattggccacctccttccgcaccagcaacgaatagtcggcgagaaggtgcagctagacgataaggtcgacaagctttccagattcctcggcggcgaattcttcaggtccctggaatccggcgagcaggagcgtctgactgcccagctcggcgccatgcgtgaatatcagcaaattctggctgagcgcattgccgccttctga

SEQ ID NO: 329958 - DNA, 582 bp, Pseudomonas aeruginosa
atgatgatctacaccagcattctgtctgcggtcgtctccgccctggcggcggaaaccatcgacaacactgctaagcaagcttggcagaagctctaccagccgggttacgccgacagtgaggggttggccgggctgatcagggcctctaacagttcgggaatcaagcgcatcgatgccgattgctgggtgcatgccaggctacacagccagctcaagcctcggcactggaacgcacttgtggcgaagtacagcactcaccgcgagaagaagaaggccgcaatcgaggcgcttatccccctgatcgccaccccggcgccacgcaggttccttgggatggctgtctatacctgggctatccccaagctgaagggggcagaaggaaagcgctctaccgacatgatcattctcgatgccgtgttctacgacatgaacaactgggagtctgagggtcgtccagagcagaccaggcgccggtggcgctctggaattcatagcgtcctgaatgaaatgctcaaagaggcagaggttgcggctggtgaaatcctgatggcggagggaatcatcttcggcgaagcagcatag

SEQ ID NO: 329959 - DNA, 336 bp, Pseudomonas aeruginosa
atgaccaaagaaactctgaccatcgttctcttcagcatagggagcggtctcatcggttatgcgatcggtattgctgccgcctggctgggaaactggttcgccgacggttatcacccgctgctgctgtcgaacatggtcagcacgccaggtgctgaggatggtgagcgcgccaacgaataccccgattatctggagcctccgagaggatgtttcggcatgtgctgtgccggatgtgatgctcgctcgcaggtcaactccaggagcaaaacagtcagcgaacagacagaccaatcttacgttttaaacgccgtgctcagcgctcaagggggcgaatga

SEQ ID NO: 329960 - DNA, 642 bp, Pseudomonas aeruginosa
gtgagcattcctgccagccagcccaagccccgcaagtgccagaacaccgaatgcggcgccaagttcatcccgcagcgccttggccagcgtgtgtgctctcctgcctgcgccctggccatcaaggacaagcacgccaagccggcgcggaaggccatcgctgaccgagagcggagggagatcaaggttcggaaggagcggttgaagacgcacagcgaccacatcaaagatgcagagaaagccgttcgggactaccggcgaacctacgaactttccatcggcagcggctgcataagctgcggcaagtctcaggccgaggtactggccgaacaaggctggaagactggaggagcattcgacgcagggcatttcctcggcaagggggcaaggcccgagcaccgcctggagccatccaacatatggcttcaatgcaaggcatgtaacgccggctccagcaagtacgccaggaaggggcttaccgtttcccagggcttccgtgagggcttgatcgaacgcatcggcctggaggctgtagaggctctggaaaccgatcaccgtccccgcaagtacaccaacgacgaactgaaggcgatcaccgccaagtaccgcgccaagctgcgcgaactgaagagggcaacggcatga

SEQ ID NO: 329961 - DNA, 249 bp, Pseudomonas aeruginosa
atgagcatcgcgaaagtaaccgtcatccccgccagcgaactgcctagccatatcgaaggcatgaacgattcgatgcgccaatggaccgacagcgctgcgcggggcgaatgcggttgggtttgctctgactgttgctgctcagatccgagggggatgcccgatgagtgcttccacggccacgcggcctgcacggcgatcatcaagcgggacaagatgcgcgcaatgcgtgctgggagcgagcctcagtga

SEQ ID NO: 329962 - DNA, 588 bp, Pseudomonas aeruginosa
gtggctgaactcgcccttatccgtaccgcccagggattggttccggccaccgaggctgaccgtgaaactgtccagaagtggaaggccggccaggtcgtccatggaaaattcactcggatgcgcaacgccaaattccacgggaagttcttcgcgatgctggatttggcgtgggagtactgggagccgaaaggcgggctggtgccgcgccaggagatgcgcggtatccgcgggcttgccaagtacttcgaggatctgaatggccgccctggccagttgcagaacgccgtcgctgcgtatatcgccaagcttgaggctgatcgcgccgaccgcttccccgcagtcgagaagagccgagaggctttccgggagtggatcaccatcgaggccgggcacttccacctgatccacacgcctgacggcgttcgcaaggaagccaagtcgatcagttgggcgagcatggacgacacagcttttgagccgctttaccgcgacgtgtttgctgcctgctggaggctggtcctttcctctcacttcgaaaccgaggctgacgccatggcggcggctgatcagatggggactttcgcatga

SEQ ID NO: 329963 - DNA, 252 bp, Pseudomonas aeruginosa
atgccgaactatcgcaagccggacatgtactcggacgccgattgggaaatggttcagggctacatggccggcaaggacggcctgcgcgcccagcgctcgacggctgcctacatgcatggctatcgcaacggggtttctgatcggaccggagtcccgcatgagcgggcagaagttcttcgccgtcgcgcagagatgatccctggcatcacgcccgataaagtttggttccaggggagggtaggccgtggctga

SEQ ID NO: 329964 - DNA, 198 bp, Pseudomonas aeruginosa
atgagcgagaaaactcactattgctcgttctgcggagagtccgagcacgacctcaaggctctcatcaaaggcccatcggcgcttatctgcgatgcgtgcgtcgcgctgtgcgtggacctgctcgaggacaaggggcactggccgccagctgcttgcagttctgaggttcccggcgccaagccggaggaggtcgagtga

SEQ ID NO: 329965 - DNA, 483 bp, Pseudomonas aeruginosa
atgcagggccagaccggaatcgcgaagaaggtctacgagtgcgtaccgatctctgagccctggcgttcgttccaggtgctcaccgcacttcgcaacatgaccggaagcacgccggacgttcggattgtccagggctgcctgcgcgatctagtcgattccggactgatccgccgcactggtactgaccactaccaacgaatccaagtcgagaaaaagaccaagcatcaggagccgaagatggcggagcccgcgaagaagatcgaaacccagtccgagccgaagcgctccgcctccccgctggagatgctaggcgaactggcaaacgagctcgccggcatggccgagcacatgaagcgcctgtctgatcgcatcgaggacgtcgcgctggcagtcgagcaggagcgcgaatcgagcgccaagtcgatggaaagctatcgccaactcaaggcactgctgaagagcctgcaaggggagggcgagtga

SEQ ID NO: 329966 - DNA, 123 bp, Pseudomonas aeruginosa
atgaagcgctgctggaaggtagttctgccgggtcgcccggcgttcacgatgatcttgatggaagactgcgacccggttgatgtcgtgaagagcatttggccggaggggagggttgaacagtga

SEQ ID NO: 329967 - DNA, 1830 bp, Pseudomonas aeruginosa
atgaccccctctgagattgctcagcgcctcgctgatcgcgtgatcgacgttgcgcaccacttgctgcccagcggaaagcgcgagggagccgagtggcgtgtcggcagcgtgaacggcgaaaagggccagagcctgggcgtccacctcaagggcgagaaagccggcgtctggtgcgacttctcgaccggcgaaacaggcgacctgttggacctgtggcgcgctgttcgcggttgtgacatgggcaccgcactggccgaggcgaagtcctacttgggcatcgctgatccgaaactcgaagcgccctctcgcaagacctacgttcgccctgagcgccccaagtgcaaggctccggtcgatgagtctccggtcatggcctaccttgttgggcgcggtctgaagccagaaaccattgccgagttcaagatcggcgagtctggccgagacatcgtgttcccgtacctgcgggacggcgctctgatcttctggaagaagctcggagttgatcgccccaacgggaagaaacggatttccgcctcggctgacgcagagccttgcctgttcggctggcaggccattcccgatggcgctcgcgaggtgacgatcaccgagggcgagatcgacgccatgactgcctggcagtacggtcgtccggcgctgtcggttccgttcggtggtggtaagggcgagaaacaggcgtggatcgaacacgaatattcgcgcctgtcccggttcgacgtgatctacctcgccatggatgacgacgagcccggcaagcaggcgaccgaagaaatcatcaagcgccttgggcgcgagcgctgccgcatcctggacctaggctgcaaggacttcaacgaagccctggatgccctgttctacacccgcgacgacatcgacgactgctacgccaaggccaagacccttgatccggagaaactggtaggagccgaaaccttcgccgatgacgtttgtgccgagttctttgagcgcaacccggtagtaatggggatggcgaccccgtgggagaagtctcacgacaccattcggttccgcgacagtgaggtcactatctggaccggctggagcggtcacgggaaatcccagcttctgaactacctggccttccacggaatgaggcagggggagaaattctgcatcgcctcaatggagatgccggccaagcgcaccttgcaacgcatggttcgccaggcggcaggaatgaacctgccatcccgcggatacatccacgcgatcctggattttctggggggccggttgtggatctacaaccagatgggttcggccaataccgccgagatgatcgacaccttccgctacgccgcgcggcggtacggagtgaagcaattcgtagtcgacagcttggcgaagcttggcatggccgaggacgactacaacggccagaagcaggccatggaagccatcgttggctttgcccatgaaatgggcgtccacgtccatctggttgcccacccgcgcaaggctgacgacgagaccaagttgccggggaaactcgacgttcgaggtggcgcaatcctcaccgacctggccgacaacgtgatcaccgtttggcgcaacaagaagaaagaggtcgcgatgaaggacggaagcgaagaggaccgcgcgtactacgcatctcactccgacgtgaagatggtcatcacaaagcagcgcctcaccggcatcgaggaaaccattccgctctggtttgacccagcgtcagctcagtacatggagcgcgaagggcacaagcctcgccagtggattgaattttccggaatcacccaacaacaagccgatcaggaggccgcatga

SEQ ID NO: 329968 - DNA, 900 bp, Pseudomonas aeruginosa
atgtcgaatagctggctgcggctttggcatgacatgccgaatgatccgaaatggagaacgattgctcgcgtatccgggcaacccgttgcgttggtccaggcggtgtatttgcatcttctggtcgatgcgtcacgaaatgtcacgcgcggtcacgtgactgtcacgacggaagatttggctagcgcgcttgacgtgacagacgaacagatcgtgaatgttatcgacgcgatgcaagggcgcgttctggatggtgatgccctcactggatgggataaccgtcagccgaagcgcgaggacgccggtaaccctgaaagaggcgcaaaatctgctgctcagcgtaaaagggagcagcgcgaacgtgagcgggaggcatctaaagttgatgatgtcacgcaatgtcacgcagagtcacgcaatgtcacgctagataaagatacagaagaagagaaagagcataaccccccttacccccctgagggggtagagccggctgtgccgtctccgaagttcaacccgctggatgcttgcccggaaaacgtcacgccatcggtgtgggctgaatgggtcaagtgccggagcgagttgcgcaagccgctgaaggagaccacctgcaaggcgcaagcgaagcagcttgcaggccatcccaacccggatgcagtgatccaggcttcgatcagcgcagggtggatggggttgttccctgaccgcgtgaagtcgaacgtccacccgatccgcaagggcgctgtcgtgaacgggaaaacatacccgttcgaagcgccgcgtggttatgtgaccgagtcccacgagttctggcacgaccaccttccgaacacagtcctgtcgatctacacgcacgactacacctgcaagcgcctgccggctgccggggaggcgcaatga

SEQ ID NO: 329969 - DNA, 1200 bp, Pseudomonas aeruginosa
atgagctttccgggcaggaccggcgagctgctcgacctgcgcgagctggagcaactggtcgaccagttgagccgcctgccgtcgcgccaggcgcaactggagctggtgcccggcagcgaggtcggcggcagccgggtgcgtctcaagggcgagcgcgacaagccctggcgggtctccgccacgcgcaacaacgacggcgacgttagcaccggcgagcagcagatgggcctgggcctggactgggacagcccgctgggcctggccgaccagctcaacctgcgggccaaccgcgacgcggtgaccgaccgctggcgccattccgacagccagagcctgttctacagcctgccctggggctggtggaccttcacctacggctacagccagagcgactaccgcacgcgcaacgaggccagcggcttccccttcaagctcgatggcgacagccgcagccaccagttccgcgccgaacgcgtgctgcaccgagacggtgtgagcaagaccgccatgagcctggggctcagccaccagcgcaccaacaactatgtcgaagacacccgcctggaagaccagagcacgcggatcaccgagacccagctcggcttcaaccatggccggcggatcggcagtggcttcgtcaacctagacctcggctggcagcagggcatcggcgcccttggcgcgcagggtcgcggccacccgcaggcgggcgatccgaatgcgcgctacgacaagtacagcctgaccctcagctacctgcagccgttccagctatggggcgagcgcttcagcttcgacagcctggccaccgggcagaggagcgaggacgtgctgttcagcccgcagcgcatcagcctcggcggcaacagctcggtgcgcggcttcaaggaccagaccctgaccggcgacagcggcggctactggcgcaaccagttgcgctggcggcgcgcggtggagtgggcgccgctgcggccctggctgcaggaatacggcgtggccttcgcctacgacgtcggcgtgatccgccacgaccgctacaacgacggcgccagcgggcgcatgagcggcaacgccatcgaactggatgcccgcggccgctatttcgccgccagcgtcggcttcgcccgctcgctggagcggcccagcgccatcgagcggcgcgagcacccgatctatttccgggtcgacgcgttcttctga

SEQ ID NO: 329970 - DNA, 738 bp, Pseudomonas aeruginosa
atgcttgatgcaactcgtccagacccaactaaactcttagataaaatgcccttttcaaattctatagagccatctttttccacgcccttatatactaaatacaacatatcgtcgctttccccaacaatgcacgcagcaacgacatctgtatttttcaatcttatctcagcaacattacagtcacgaacttctttaaatgcggccctctccgcacttccaactgagtcagagacaacaacggcccataatccatacaaagccactgaaaaggccgtcattgcaagagcaacaacaataaagtcctttgcatgtctcagcctcagccaaaaccatccatcaggattaacctcaaagtcctttctttgcctcttagggttctcgaagaacatcatcacagaggtgaaaacaaacaccccggcaaacgcaatcattagcgccgtaaatataacaagcaggcttacgccaccgtacacagcatacaactgtccatcaaaaccaagtctatttaccgggacacccaacctagaattcaatgtttctaagtacacatacccttttgtgaaaaacagagcaaacattatcgctatgaaggacaaactctcgaacttaattgcgcgccacaagccaagcccacttacgcgaccaggagcgcatttggcttcatctttcatttccatacagaaactccatttcctaaatgcaatagagggcactcgccccatagccctacgaggctga

SEQ ID NO: 329971 - DNA, 777 bp, Pseudomonas aeruginosa
atgcaggctaccattggcggcgatacgccccttggaactgttcgcctcatcggctaccagcttcaggccgcgttcggcgatcagtgtgccagcgtcgttttccaggcgggccacaccgatatcgatggcgcccttgctgccgatggagccactacggttgtccaggacgaatgcctggatatccagacctccggcgccggagacaatcccctcgaggctgttgtccagggcctgcgcgatacgcaaggtcagggctccaccgctgagcaggcgtcccccctggttgttcaacgcggaggtggcaagagtgaacgcgcggtcgctggagatttccccaccgctgttgtccaccacgccgagttggcgcaggagcaaagtgccaggcgtggcgatcaggccttgagcgcgattgaccaggcttcccttgttcagatcgagcgtaatgccggtatcgctgaccagattgcccctgtcatgctggtccaacccttggagatccgcatcgatcgcacccttggcagcgatccggcccgcctggctgttgtctacccgagcggcgaccagggtgagtcccgcatcgctgccgatactggctttccggctgttgttcaggttgccggtacgaatttccacggcccccttgccactgatcgcaccggtctggctgttgtcgaggctggcgctgctcaagctaagtccggcgtcgctcgccagtctgccgccctgattgttcagggcgccctggctggtcactgccaatgcccctgcgctggatag

SEQ ID NO: 329972 - DNA, 1140 bp, Pseudomonas aeruginosa
atgtctctgactgctgagcagtccggcattgccattgaacaattcggtaccactcaggcgcagcccatcgcggctggcgattactcccttgtcctggttgagcacgcgtggcgcggtgatgcccagaccactgtcagcaacgactttgccgccacggttgtccagttgctcagtgagattcagcgtcgccacgccctggctggcaatctcgccggcacggttgtccacctgccgggcatcgatgaccacacctcggttgccggcgatgcgaccagcgccgttgtcgactttgtcggcgtcgagggccagcgcgccctgagtcgtcagctctcccccgttctgcaccagcgcaccgagtttggcacgcagttcatccttggcgacgatacgccccttggaattgttcgcctcatcggccgccagcttcaggccgcgttcggcgatcagcgtgccagcgtcgttttccaggcgggtcacaccgatatcgatggcgcccttgctgccgatggagccactacggttgtccaggacgaatgcctggatatccagacctccggcaccggagacaatcccctcgaggctgttgtccagggcctgcgcgatacgcaaggtcagggctccgccgctgagcaggcgtcccccctggttgttcaacgcggaggtggcaagagtgaacgcgcggtcgctggagatttccccaccgctgttgtccaccacgccgagttggcgcaggagcaaggtgccaggcgtggcgatcaggccttgagcgcgattgaccaggcttcccttgttcagatcgagcgtgatgccggtatcgctgaccaggttgcccctgtcatgctggtccagcccttggagatccgcatcgatcgcacccttggcagcgatccggcccgcctggctgttgtctacccgagcggcgaccagcgtgagtcccgcatcgctgccgatactggctttccggctgttgttcaggttgccggtacgaatctccacggcccccttgccactgatcgcaccggcctggctgttgtcgaggctggcgctgctcaagctaagtccggcgtcgctcgccagtctgccgccctgattgttcagggcgccctggctggtcacggccaatgcccctgcgctggatag

SEQ ID NO: 329973 - DNA, 1497 bp, Pseudomonas aeruginosa
atgtccaatgacaacgaagtacctggttccatggtaattgtcgcacaaggtccagacgatcaatacgcatacgaggttccccctatcgatagcgcggccgttgccgggaatatgtttggcgacttaattcaaagagacatatatctacagaaaaacatttattatccagtccgatctatttttgaacaaggaacaaaagaaaagaaggagatcaacaagaaagtatctgttcaagtcgatggcttgctaaagcagatcactcaaggaaaaagggaggccacaaggcaagagcgagtcgatgtcatgtcggcagtcctgcacaagatggaatctgatcttgaaggatacaaaaagacctttaccaaaggcccattcattgactacgaaaagcagtcaagcctctccatctatgaggcctgggtcaagatctgggagaagaactcttgggaagaaagaaagaagtacccttttcagcagcttgttagagatgaactggagcgggcggttgcctactacaaacaagattcactctctgaagcggtaaaagtgctaagacaggagctcaacaagcaaaaagcgctaaaggaaaaagaggacctctctcaactggagcgggactacagaacccgaaaggcgaatctcgagatgaaagtacaatccgagcttgatcaagcgggaagtgctttgcctccattggtcagtccaacgccagagcaatggcttgaacgtgccacaagactggttacgcaagcaattgctgataaaaagcagctgcagaccacaaacaatactcttatcaagaattccccaacccctctagaaaagcagaaagccatctacaatggtgagctacttgtggatgagatagccagtctacaggcccgcttagttaagctgaacgccgaaacgacacgacgcaggacagaagcagaacgcaaggcggccgaggaacaagcgttgcaagatgctattaaatttactgccgacttttataaggaagtaactgagaaatttggcgcacgaacatcggagatggcgcgccaactggccgaaggcgccagggggaaaaatatcaggagttcggcggaagcaatcaagtcgtttgaaaagcacaaggatgcgttaaataaaaaacttagccttaaagataggcaagccattgccaaagcctttgattctctagacaagcagatgatggcgaagagccttgagaaatttagcaaaggctttggagttgtaggcaaagctattgacgccgccagcctgtaccaagagttcaagatatctacggaaaccggggactggaaaccattctttgtaaaaattgaaacactaactgctggtgcggccgccagttggcttgtgggtattgcatttgccacggcaacagccactcctataggcattctggggttcgcactggtaatggcagttaccggggcgatgattgacgaagaccttctagaaaaagcaaacaatcttgtaatatccatttaa

SEQ ID NO: 329974 - DNA, 288 bp, Pseudomonas aeruginosa
atgagcatccagcgattcaccccggagttcaaggccgaagccgttaggcaggtcatcgagcgcggatactcagtcgcggaaatcgccgcgcgcttcggcgtctctactcacagcctctacaaatgggtaaaggctgtgacccccgacaagtcggagaaacaggccagcgaactgttggaagccaagagcgaaatcctgcggctgcgggcccaaatgcgtcgccttgaagaagaacgggacatcttaaaaaaaccgagcggctcatcacatactgcatggcgtccttga

SEQ ID NO: 329975 - DNA, 549 bp, Pseudomonas aeruginosa
atgtctatcgtaccgggggtagtccacagcctctacggcgacgcgaaagcgcgctggacgatcaatgaatacgccgacctggagtgccccttctgcaaggtctacaccccgcggcttaagcgctgggtagacagccacacggacgtgaacctggtttggcgccatcttcccctgcagatgcatggcgaggcggcccgccaccaggctcgcctggtggagtgcgcggggatccaaggcggcgctaaagcattctggagcgctatcgatgcgatcttcgctcagtcggccggcaacgggggcgggctgcctggcggcacattggactttcctgatctggaccaggctcgactggagaaatgtgcgaaagacatgcacctggtggaccagttgatcaagacggacatcgacactgcacggtcgaacggcattacagcgaccccgaccctcgtcatccaggacaaccagacgggacgaagcgtgaagcttgaaggcatggccgacgagaccacgttgctgtcggcgatagactggctagccaaggatctctag

SEQ ID NO: 329976 - DNA, 219 bp, Pseudomonas aeruginosa
atggaacgcttgctcgagagcatttacatcaatgcccggccggcgatggagttgaggcttagcctcaccagctccggccgcaagagaattgtaaaggttgtggatggggaggaggtcgaggttctgtcaggtgaagtgcagggcatcctggaggcccaaaagagggatgttggaatcctcgccgatttcttagccaagagtctcttggcgcgacgctag

SEQ ID NO: 329977 - DNA, 1044 bp, Pseudomonas aeruginosa
ttgggcgcgggcaaaggcatccagccgtcgggtctgctccgcgtcgaacagttgatagtgatcgccgtaaccatcagccactggtttgacctgaccagcaagcgcctgcatcagccgcgtaggtgcatcgagctcggcgagttgctccttccagaaacgcccggcggcatcctgatcctgacgttgcagccaggcgatatagtcgcgatagcgacccgccagcgacgccggcaagcgacccgcataccgctccagcacctcgccgagcaagcgcgagccactccagccgtccatcagaatgtgatggttcgtatagaccagatgatgtcgaccttcgcccacgcgaataaccgcgatccgcaacaacggctccctggtcaggtcgaaccccttgcgccgcacgtcttgcgcatacgactccagcgcctgctcaaggtcctctcgcgcactccagtcgaaaacctcgaagggcagccgcacctgcttgtggatcagttgcagcggccgctccaggtccgtcagtatgttggcccgcagcacctcgtgactggcgacggtcgccaaccaggcctggtggaaagccccgacgtccagtccttccacgtccactcgcatctggttgacgtagtcgcttcctccctgctcgtacagggagtggaaaagcatcccctgctgcattggcgacagcggatagaggtcggcgatctcgcctgccggaactggcaaagcgtcaagtccggcctggtcgaggttcgccaagggaaagtccgatggtgtcacgccacgattgcgctcctggcagcaatgttccacaagagtctggagctcccgtccgtactcatccgcgagcgcctgtatggtctgctcgtcgaacacttcccggctgaaggtccagcccaggctcagctcgccgtcgtagacccgcccgtcgacgctcagcaatgcgcccagaggcgcctgctcgtccatgaccgcaccaccatcctcccgggccggcgcgaacaatccgcgttgctcatcgaagctgccatcgaactggcctag

SEQ ID NO: 329978 - DNA, 837 bp, Pseudomonas aeruginosa
atgcacagatatgtcgtgatagacgccttcgccagcgaaccgctgcaaggcaacccggtggcggtgttcttcgactgcgacgacctcagcggcgagcgcatgcagcgcatggcgcgggagatgaacctgtcggagagcaccttcgtgctccgcccgcaacaggacggcgacgcgcgcatccgcatcttcaccccggtcaacgaactgccgttcgccggccacccgctgctgggcaccgccatcgccctgggcgccgagaccgacaaggacaggctgttcctggagaccaggatgggcaccgtgcccttcgccctggagcgccaggacggcaaggtggtggcttgcagcatgcagcagccgatccccacctgggagcacttcagccgaccggccgagctgctcgccgccctcggcctgaagggctcgacctttcccatcgaggtctaccgcaacggcccgcgccacgtgttcgtcggcctggagagcgtcgccgcgctgtccgcgctgcaccccgaccaccgcgcgctgtgcgacttcccggacctggcggtgaactgcttcgccggcgccgggcggcactggcgcagccgcatgttctcgccggcctacggcgtggtcgaggacgccgccaccggttccgccgccgggccgctggcgatccacctggcgcgccaccggcagattccctacgggcagcagatcgagatcctccagggcgtcgagatcggccggccgtcgcgcatgtacgcccgcgccgagggcgccggcgagcgggtctcggcggtggaagtgtcgggcaacggcgcggccttcgccgaaggccgggcctacctgtga

SEQ ID NO: 329979 - DNA, 315 bp, Pseudomonas aeruginosa
atgcacggcaacaccatcgtcgcgccctgcggcaacaagacccgcctggtgcgcagcatcgccgaggaggtggcggcgttccgcctggcggtgtccggctccggcggcgtggccgccgggctgcacctggagaccaccccggacgacgtcaccgagtgcgtcgccgattccagcggcctgcaccaggtcagccggcactacaccagcctctgcgatccgcgtctgaacccctggcaggcgctcagcgcggtgatggcctggtccggcgcagaagcgatcccgagcgcaaccttccccctggagaccgtggcatga

SEQ ID NO: 329980 - DNA, 399 bp, Pseudomonas aeruginosa
atgatggcttgtttgtcttggcttgaaaagctcaaggaatcattcgcttccactggtctggactatgaagacctatacgagctaatagaggcatctataacgaggaagaggactaacttccctgcgtttataaatgaggcttcgaagggggttggcttctctgtgggtgagggacatttctactctcttgatcaggattgggatgatcctgaagagtttaatgaggtcagtttctttttgggggaagtggagacctcaagtattccagtgctcgactatgtttttttgatgaagattgcagccgatgtttattctgatttcttccccgaggagagggatagtgttctaagttcggctaaaaaattggaggagcgttactcaaagagattcccggtctag

SEQ ID NO: 329981 - DNA, 237 bp, Pseudomonas aeruginosa; identical to SEQ ID NO: 329934

SEQ ID NO: 329982 - DNA, 330 bp, Pseudomonas aeruginosa; identical to SEQ ID NO: 329935

SEQ ID NO: 329983 - DNA, 555 bp, Pseudomonas aeruginosa; identical to SEQ ID NO: 329936

SEQ ID NO: 329984 - DNA, 210 bp, Pseudomonas aeruginosa; identical to SEQ ID NO: 329937

SEQ ID NO: 329985 - DNA, 168 bp, Pseudomonas aeruginosa; identical to SEQ ID NO: 329938

SEQ ID NO: 329986 - DNA, 147 bp, Pseudomonas aeruginosa; identical to SEQ ID NO: 329939

SEQ ID NO: 329987 - DNA, 291 bp, Pseudomonas aeruginosa; identical to SEQ ID NO: 329940

SEQ ID NO: 329988 - DNA, 384 bp, Pseudomonas aeruginosa; identical to SEQ ID NO: 329941

SEQ ID NO: 329989 - DNA, 354 bp, Pseudomonas aeruginosa; identical to SEQ ID NO: 329942

SEQ ID NO: 329990 - DNA, 366 bp, Pseudomonas aeruginosa
atggagatcgaggagcttcgcgccgaactcgcgacactgcgcgcaagggtggtggttgtgccggagcggaagcttctaaatgccggcgtcccagggctaaatcgtaatagcggctggaacgactgcctcgacgaactggcgcgcctcaacggcaagacggtcagcgaggggttgttgcgaaaatggctggaattgatggagcacggcgactaccgcgaaggccattgcatgtgcggatcgcccgttgattcccacggtatcggagatggtcatgctccgatagatgctggtgagtactacgcaggccaagtgatggaagagcttcgcgccctgctcaaccaggacaaggagaacggcaatggctga

SEQ ID NO: 329991 - DNA, 579 bp, Pseudomonas aeruginosa
atgaagtccgcagtcattcttgcagccattctcgcatcatgctcggcctttgccgcaaagccagccgccaaggcctggacccaagagccatcaagctttcttggcctgaccttcgaaagcagcagcgtcatggcgctccctcagtgtgcgccaggcgtgatcggtttccagcagacacggctttgccgagaaaaaccatatggcaatctctacacgattgagggaaagccctcgatcggtcttcgatacaactatcacttgtccgccaagctgaacgaaggccaggtggaatacttcatgcttacgggtaataccgatgatttcgataaagtgaccgaactcttcaccgagaaatacggaaagcctacatcccgcgctgctccatcagtgaaaaccaaggccggggcatccttcgtcaacgacactctggtatgggatggcgcgcgcgtcagcattacgcttgagcgattctcgacagacataaataccttcggcgcaatagtgctcaacaagccgatcgcagaggcaaattctcgggccgccgctgaaaaaaccaagagtgatgcctccaagctctag

SEQ ID NO: 329992 - DNA, 312 bp, Pseudomonas aeruginosa
atgagaagccagaagaaggcgcagcagcgtcgcgacgaactcacagcaacagaccgtctcgggctgagagtggcggcgatgatcagttccccgaaggctcagctagagcgtgccgtgactgttcatcagctagacactgatcctgatgaggcgtgggagagcgtgatggggttgatctcggaggaggacggggtcgagctgattttcaatgatgacggatcggtgaccctgcggtggtcgattcggaacgatggagagcaccaagataactgttccgagatggagcccgtggaggagaagcctccattctga

SEQ ID NO: 329993 - DNA, 207 bp, Pseudomonas aeruginosa
atgaatgaaaaggccttactggctttacgtcagtctcttcgaatcatccgcagggagaacgacgtacaccgagcgcgcatcgagtactacgaaacggtcgggatgttgcgcggattgcactacggcggagcgatcgattcctggcagctattagctctaaccgagctagcaggaagcgcatacatcaacgccggtaaaccctggtaa

SEQ ID NO: 329994 - DNA, 207 bp, Pseudomonas aeruginosa
atggctcaattcaacatcgattcccacctgagcgacggaaagagcctgcaatggcttgctctgccggacgctggtgaacagcctctggacgttgaggtgaaggttcgccaggcggccatgaagaagttcggacagtccgtcttcttcaattgctgggagcacgtagttgcaagcaacggctacatcaccgtgcggatgcacgcgtga

SEQ ID NO: 329995 - DNA, 183 bp, Pseudomonas aeruginosa
atggaagaacaaaagccgcgacgcgtaaaggccaagataacgcgtgttgtaacagagatagcgatcatcaccctggaccgacagggcggcgtcgatgagtacatcgagcatgttgaggaactggagtgcgttgatatctgcgaagtgcacagcattcacacagtgctcagctatcacgactaa

SEQ ID NO: 329996 - DNA, 1821 bp, Pseudomonas aeruginosa
gtgaaggacctgcaccaggagagccatgagaagagcaagggcgacctggcgtggaacagcgccaaggggaaggggcagaccgatgaaacgcttcggcagacccagatcgtcgctcagggaaatctggcgatcaaagcagcggacgggctgaagatcgatgtgaagcatatcgaccagaagaccgtttccgagaccatcgatgtcatggtcaaggccgatccgagcctcgcctggttgcgggaggccgaaaaacagggtgacgtcgattggcgcaaagtccgggaagtacatgacagcttcaagtacagccattcggggttgggcgctggcgcggcattggccatcgccattgtggttacctacctgacctggggtgcgggtagttcgatggcaggcgtcgcggccaaaagcgcaacaggtgtcgctgccaactccgtcgccagtgccgtagccaccaacgcggcgatcagcacggtgaataaccgcggcaaccttggcgcggtggcgaaagacgtgacctccagcgacagcctgaagggctacgcggtcgccggtatcagcggcggcttcatgcccagcagtctgggtgcccagcttgccgttcgctccgcgctgaacaccgtggtgaacggtggcaagttcagggacaacgtcgcgcaagctgccatcagtatggcggcggacgcgctaagcggcgcgatcttcgacaaggtcggagatgcgttggtcggcagcggccttcccaagaaggtagcggtccatgcgattgtcggcgggttgatcggcgaggctgccggcggcgatttccgtaccgcagccctggctgctggcgccaacgaggcattggtaagcctcgtcggtgaaaagatcttccctggcgaggctcatgagcgcgtgctggcgatgacctcgcagttgatagggatgacagtggctgcggcggccggaggcgataccaaggcccaagagaaagccgcctgggtggctcagcaggccacggtgtacaacaacctgaatcacgcggcggcggagagcctgctcaaggagatcaaggattgtcgcgcggcaggcggctgtggcgaggagaagttgcaaggcatcctcggcaagtacgaaaagctgtcggccgagcgttcaaacgctatcggccagtgtgcttcgcgccagtgtgtggacgacatcgtcgacagttcgatccggatggacgatccggtttccaaagagctgctcagcctactgcggcaaaccacctacgatacacccggcttgttgcagggcaatcctgatgcgatcgtgtcgcagacgccgaatccaagtggctggggagatctctttgccctggacaagcaactggcgttcgccaagaacctcaaggaaggctggctgacaccggaggaaacggctgatctggatcgctggaatgcgtccacttcctggctggatcgcactgctggccgacaactggatcccaaggagaaggcttacctgctctcggagctggggggcgcggcggctatggcgcttcttggggggagggggagtgttgggagtggagcaggtggaataaggaacacatattcttcaataaaagaggctcctaaatacccccagggatttaaagatattaagaatggtacgcagaaatataagattaacaatcaagatgttttggaaagtttgagaggtgtagagccaggtaagtgggttaaggtgtatagggatggtttcgattctgctgggaataaaatttctgtacactactttcaaagtcaaagtggcaaagtttttgatgtgaaggttaaatcgggttggagtaactga

SEQ ID NO: 329997 - DNA, 360 bp, Pseudomonas aeruginosa
gtggccctgcgcgtgcccaccggcagcccggacgcggtacgcctggaacaccgcgtggccggcgccgacgccaacccctacctgctactggcagcggtgctggcaggcgttcatcacgggctgaccaacaaggtcgagccgggcgcgccgatcgaaggcaactcctacgagcagatggagccgagcctgccgaacaacctgcgcgacgccctgcgcgagctggacgaaagcgagatcatggcgaagtacatcgacccgaagtacatcgacatcttcgtcgcctgcaaggaaagcgagctggaggagttcgagcactcgatctccgacctcgagtacaactggtacctgcataccgtctga

SEQ ID NO: 329998 - DNA, 432 bp, Pseudomonas aeruginosa
atgctttcagatggtgtgttagacgctgatgagtctgccgaactgcttgagattcttagagggtttggtggcctctctgcttccaagccgaaaccaagcgacaatgcctttactccatcgaacgctcttccgctcaacaatccagctcccaagcttgagtggtcgggccatctctacgttttcactggcgtcatggtctacggccccagaaagcattgcgaagagatcgtcgtcaaccgcggcgggggaatagcctcaggcatcagcaaaaaggtgcattacctggttgtcggcgagataggcaacgagcagtggcttcacagcacctacggaaccaagatcaagcgagctgtcgagttgcgtgaggaaggccatcccatcgcgatcatcagcgagaagcactggcaagcctcgatgttcaacctggtctag

SEQ ID NO: 329999 - DNA, 519 bp, Pseudomonas aeruginosa
atggcgaagcagaagaccatcccctatgaagaggccaggcaggccattgccgcactgaaggtgtggccagcaaatgcccaattcgtctggaagaagccggcgaccaagaagctcccggcaccgtacagttttcgcacatcgctggcgttggatatcgaacagaccacgttcgccgaggattggttcgtcgaactgtactataagaagagcccggtgcccggcgtgcgagacacgctgtcaatcacgctgatagtgaacaagtcgcgcgtcgtggctatcgacgacaacggacccagttcgcatatgaacaaggttggagtcggccttccattctaccaacaagtagtcgaccacccacatttgcatatgccaatcgccgaagcgtcctatggctatgcggaacccctggatagtactactgtccaggcactgtgggagctattcttagcgaaggcaaacatcactggcgccccacgcttcgaactgccggaattcggccaaatgggatttgacgtatga

SEQ ID NO: 330000 - DNA, 756 bp, Pseudomonas aeruginosa
atgaactgcactctgatcggcgcccagctcgggttcaagtgtaagccggtggctgaggggctgttttacctcgaatccccgctgacgctgccctttgacggcaacctgatcggtgcctacatccaggacctgggtaatgggcaggtgcgcatcagcgacaacgcagacacactgtttgtggccatgacgcatggcgtcaagccgacggccgagcgaggtcgaaagatggctgaactagtcgcagccagcggcctggagctatccgaccaaggcgaaattttcaaggcatgcccggagagtcaactgggcttctacctcgcccggttcattgaggccgctgagcatgtcggtttcgcctgcaataagatgcgcccatcgcccatctcgcggtttgaccaggtggttggctccgccctgaaggcggcctacccgaaagcactcaggactgactacaagattgtcggcgcaagcgggcaccagttgacactccccttcgccatcgagaccgagagcggccaaacgacgctaatccagactgtctccaccaaggatggcaaggttgattggagcctggtctaccgcgctgtcggcaagatgctggacatcaagaatgcccacgaggataccctacggcgcgtaatcctggagcccggcgatgaggaggacaaccgaagggccgctaccgctctggccgacgcagcctcagtgatcatttataccgggcccaagcatctgacagccgcgctcgccgcataa

SEQ ID NO: 330001 - DNA, 462 bp, Pseudomonas aeruginosa
atggggttcggccagccactcgagcacggcgtggcagagcaccaggtcgtagggctcggtgagctggccgagcagttcctgccagggcgcctggatgaattcggcggcctgcccggcttcggcgaagcgctggcgggcgccgtcgagcatgggttgcgctggctcggcgagggttacgcggtggccgcgagcggccagccagagcgacatgtggccgagcccggcgccgatgtcgaggacccgcagaggtcgctccgggagggcctcggcgaggtcggcctggagtaccgcgaggcggatcgcacccttggcgccgccatagatcttttcggcgaagcgcgtcgccagttcgtcgaaatggcggtcgctcatggcaggaagcgccgttcgcagtcggccagcttggcgcgcaccacctgttccaggtcgaggccggtttccccgcagaacagcagcagataa

SEQ ID NO: 330002 - DNA, 174 bp, Pseudomonas aeruginosa
atgcctaggcaagggcgagtggttttaccgaattatccgcttcacatggtccagcggggacacagtcgccaagtggtattcgccgaggacgaggactaccagcgttacctctccgatcgacggaacctcgaggatgcctttgataacaagctccatgcattttgccgagcataa

SEQ ID NO: 330003 - DNA, 996 bp, Pseudomonas aeruginosa
atgctcgagcgcctcgccagcgagatgatgctcctggtcgtaggtcgggcgcttgaagctgtagtcccgctgggtctgtcgagccgtacgaacattttcgctgtagcggaaagaatgaagcaccggctgcgggttgtcgccctccggctgggcgctgaacagtaccgggccgccggcgatacgctcctggacgtagagccggtcgctgcagaccagggtgtggcggtgttcgtcgaagcggaagtagtagaccaggccttcctcgaaggccagccggtcgtgcaggtagtgatcgctgtcgccggcctgcacgcagtattcgcgtggcaggtgctcgtggtagatgcgctgttcgtagtcgagcacccggtgctccttgagcagcgcctggagaatctccggaacactcttctcctggaagatccgccagttgcagcacagctccaggcgcgccaactgcggttccagcagcagttcgtagcgggtccggcgaaaacccgagctgccctgggtgaagtggctgacgatgccatggacgtagcgggccggacggccgtcctgccagagggtgaaggtgcccggctggtcgagtacctgcctgaaatcgatggcgttcttgtcgctggccagcttcaggttcaggcggaaaggctcgcagagcgcttcttccagttcgaactcgacgacatcgaacgcgagtttcccttcgccgacgacgaaggtgaatttcaggtccctttgacgcatggatcgttccttgttcctggcgggcggttcctcccccatccgttggagaagcgagccccacgttactcttgctcagccgctgccgaaagtcttggctcggtgtctatttcgcgaagtagcggacattttcggctcgacggagaaccggccgtacaggtgtacgaccggtgtgcctgtcaactcaccctgcgaccggcgagcgccagtcgtcggagccggaggtgccggagacttcgtgggtccaggtga

SEQ ID NO: 330004 - DNA, 1017 bp, Pseudomonas aeruginosa
atgaaccttagtcgcattggtctggatctggcaaaacaagtattccaggtgcacggcgttgatcgtcacgagcatgtggtatgtcgtcgccaactcaagcgggcacaggtgcgggatttctttcgccaactgccgccgtgcctggtggcgatggaggcctgcggcagtgcgcactactgggcgcgcgagttgcgggagctgggccacacggtacgcctgatcgcaccgcagttcgtaaaaccctacgtcaagggtgacaagcacgatgcacacgacgccgaggcgatctgcgaagccgccagtcgtccgagcatgcgctatgtcccggtgaagagcgcagagcagcaggccgtgcagtcgatgcatcgggtgcgcagtcgtctagtgcgggcccgcacggcgttgtgcaatgaggtgcgtggcttgctgggcgagttcgggctgatcgcgacgcgacgtgggcgagcggcgacgatggccttgctcgaaacggtcatggctaccgaaccggcgtccttgccggccccgatgggcgagctgttgcgtgaattgaaagatgaattgcagacgctggaggcgcgcatcgctcgactggagcgacagattcaggctcacgtacgtggcgatgcccgcatccagcgcctgctggcggtggaaggtatcggcccgatcagcgccagcgccgtggcggcatccgccggtgatgcacggcaattccgcacgggccgccagtttgcggcctggctgggcctggtgccacggcagcactccacgggcgggcagcagcgcttgggcaacatcagcaagcgcggcgatacctacttgcggaccttgctcatccatggcgcccgtgcagtcgtgcgctgttgcgccaacaagaccgatgcccgcagccgctggctgcaaggtctgctgcaacggcgtcctgccaatgtcgtcgccgttgccctggccaacaagaatgcccggatcctttgggccttactcagccgggagacatgctaccggcccggttga

SEQ ID NO: 330005 - DNA, 594 bp, Pseudomonas aeruginosa
atgcgccgtcaccgcggggtgcggggtgggcgccggttcggcgaaggcaggcgccgatccggcggcctgccggctcatcagggcgtcgaagctggtgaacggatcggtctgcggattgccgctgccgggcagggcgatgtcatggccgagctggacgaggatgtcgtattcgccgaggcggacggtctcgccgtcctgcagcggctcgctgttgccgcggcgcaggcggtgcccggcattgaccagcagcacgccgttggtgctggtgtcggtgaggtagtacaccccgtcgcggttgaggatggtgcagtggcggctggagaccaggcgctccgggtccggcaggacccagtcgttgtccgggccccgaccgatggtcagctgtccctggtccagtaccttttccgaacactgaccgggggtcagcttgtggtagctggtgatggtcaatcgcagcggcattgctactccttgcattgccagcgcccggctcttccaggcgctcacccccgtgcccgagggatttcggttcgcatccaggctggcccgacggctttccggcgtttcgtcgcctcgggaagacacatcgggtga

SEQ ID NO: 330006 - DNA, 384 bp, Pseudomonas aeruginosa
atgggcaacggaaaggttgtgcaagacttcccagagatgttcagagatgtcgcggtcagccagcagcatctgcgtgagctaggggtcaaatacaaggacccatctcacctaaagctcattacaggcgacgggcaatcgatggccccgaccatccaggataaggacccgatgatcggtgacgtgagcatccgagagttcactggagacggtatctatgcctttatttggcagggcctgttctacatcaagcgacttcaagttgcggatgaggagcatttcgatatgatttccgacaacccatcacataccaatcgagagattcgcatcgacgacacctatatccaggcaagaatactgcttgtctggaacgcgcaaagagtctga

SEQ ID NO: 330007 - DNA, 180 bp, Pseudomonas aeruginosa
atgaccaagacccaagtgatcagccacttccgcggcgtttcgaaggtagccaaagccctcggcattacctatgaggcggtgcgccagtggccagaagaaattccaaaactccgccagtacgagattgagcgcattacgaaaggcgccctgaaggtcgctactgagcagtccgccgcctaa

SEQ ID NO: 330008 - DNA, 435 bp, Pseudomonas aeruginosa
atgcgtacttcccaacgaggcatagacctcatcaaatcgttcgagggcctgcgcttgtccgcctatcaggactcggtgggtgtctggaccatcggctatggcactacgcggggcgtgacccgctacatgacgatcaccgttgagcaggccgagcggatgttggccaatgacattcagcgcttcgagcctgaactggacaagctggtgaaagtgccgctgaaccagaatcagtgggatgccctgatgagcttcgtctacaacctgggatcggccaatcttgcgtcgtccacgctgctcaagctactgaacaagggtgactaccggggtgcggcggaccagttcccgcgctgggtgaatgcgggaggtaagcgcctggagggactggttaagcgtcgaacggcggaacgggcgctgttcctggagccgctgtcgtga

SEQ ID NO: 330009 - DNA, 315 bp, Pseudomonas aeruginosa
atgtacgacctgcagtgtctcgtcgccttcctggcggaaggtggtgcgcaatacctcatgacgctccaccagtgcggcgaagctacgtttcaaggcttcggtgtcgagttcaccatgcagacgcaggaccgccggaatgtggtaggccgcgctgcccggttccagttgccagagaaaccattgccgttgctgggcgtaggacagctgcaacggctcctccggagagcgcttgagtacaggggttattccatacaggttcactccttgacgcttgagcaaggccgccagggccttgcgttctttctgagagagtga

SEQ ID NO: 330010 - DNA, 669 bp, Pseudomonas aeruginosa
atgggcgccgtcgacctggcgggtgcgctcgccgatccacggccagtgggtcgaaccgagatagacccggcgctgctcgtcctcgcgcagcatcgacagctcgtagtcgagcagcagcatctcgtggctggtccagaccggcgaggcattcgcctcctgcccggacgcggcgtcccagcccaggtggcgcatgatgttgcgcgccgccgcgtagcccttgaggatccgctgcgggtcggcccggcgctgctcggcatgggcctcgcggccgttgaccatgtcgccgcgatagaccggcagggtctgctcgccgacctgctcgtgcggcttggaacgcggcttggcgtactgcccggcgatgcgcccgacgcggatcaccggccgccggccggccaggcgcagggcgccggccagcagttccagcacggcggccttgcgcgccacgttctcggcatggtggtcgtccatgtcctcggcgcagtcgccgcactgcaccaccagcgcctcgccgcgggcgacccgcgccagggtcgcgcgcagggccaggatgtcgccggcgcggatcagcgccggactgccgcgcaggtacgcctgcacgtcgcgcaggcgcgacggatcgccccattcgggttgctgcagcgcttcgcagcgccgtacgcgttgcaatag

SEQ ID NO: 330011 - DNA, 219 bp, Pseudomonas aeruginosa
atggccgacaacttcttcgagctcggcgggcattcgttgctggcgactcaggtcacggcgcgcatccatgccgagctggacatgaatgcccccctggtcttgctgttccaggccgagactttacaggcctatgcgacttcgcttgaaggctacaaacctaccgacgcagcggacttcgacgagctgcgggaattcatgagcgaactcgaggccgtctga

SEQ ID NO: 330012 - DNA, 267 bp, Pseudomonas aeruginosa
ttgaagtgctttcccgattgggagtggtacaacataaatatattcggaaccgacgaccccaatcatttctgggtcgaatgcgacggtcacggcaagattcttttccccggatatcccgaaggttattacgaaaaccacttcctgcattccttcgaacttgaagacggcaagatcaagcgcaaccgcgaattcatgaacgtcttccaacaattgcgcgccttgagcattccggtcccggaaataaaacgcgaaggcattcccacttga

SEQ ID NO: 330013 - DNA, 207 bp, Pseudomonas aeruginosa
gtggatgtgatcgaccaagccaacgaacgagccgagaacatggtccaggccgccctggcccagcggacaaacacccgcctggcgcccagcgccctctggtgcgaggactgcggagagcagatacccgaggcccgccgccaggctgctccgggctgcgagtgctgcatcagttgccaggaactgcgcgagcaccccgcgcggcgctga

SEQ ID NO: 330014 - DNA, 2721 bp, Pseudomonas aeruginosa
atgaaggaaatggaccgcgaactcaaggccgacgtgctgcgccgcctgcaggatcagtacggactgacgccgatcaagggcacaaagtacatgcgcaagggcgagtgcccgacgtgcggcaaaaaggagctctacaccctggtcgacagcccctggttcatccgctgcgggcgcggcaagtgcggcgacacctggcacatcaaggaaatctacccggagctcttcgacgactggagcaagcgagcgccggccaccgacaaggaacccgccgcctcggcccgggcgtacctggcccatgcccgcggcttcgacctgacgctgatcgatggctggtacagccaggaaaactactgggaccgtgaccttgagatcggtagcgccacagtccgtttcccattgaagaaagggggctactgggaacgcctgatcgatcgcccgagccgcttcggcaagaagaaggcccgcttcaagccgggcgacagcccgcgcggcgtctggtggtgcccacccagcgtcgacctgcaggaggtgaaggagctgtggatcgtcgaaggtatcttcgacgccatcgcgctgctgcaccacggcatcgacgccgtgtcggccatgagctccaacgccttccccgagcagtctttgcgcgaactcgcgatagcccgtggcggcaagctgccgaaactgatctgggcgctggacaacgaacctggtgcccacaagtacacccggcgctgggtgaccgaggcgcgtgccctgggctacgtctgcgaagcggcccaactaccgcagcgcaacaaccgcaaattcgactggaacgacctgcaccagcgctggatgttcatcgatgacgcgaccgagcgcgccgcgcagatcgagaaggacctcaagaccgcgcgtcatgagggcgcgctgctgatcgccgagagtgccgccgagaaggccctgctgatgtacgactggggcaagcgcggtgaattccacttccgcttcgccaaccgcctctactggttcaagctggatatcgagaagttcaacaaggccatgcagagcctggaggacagcgacaaccacgacgaccaattgctgaaccagaaacagatgcgcgacaaggccctgcagcaagccggcggcgtcgtggaaatcgccaactgcttcccccaggccctgtacttccagcgcaacgaggtcacagacgagagctggtactacttccgcatcgatcgccccgacgacgagagcgtgaagaacaccttcaccagcgcccaagtcgcggcggccagcgagttcaagaagcgcctgctcggcgtggcagcgggggcgatcttcaccggcagcggcgcgcagctcgaccagatcatgaagctgcaactcaccggcctgaagacggtggccaccatcgattacctgggctacagccgggagcatgcctgctacgtcctgggcgacgtggcggtgcgcggcggcgtgatcgagaaggccaacgccgaagacttcttcgaattccaaaagctgcgcctgaagaccctgcagcgttcgatcaagctgcagatcgccaccgacgccaaggactaccgcccggagtggctggactggctgtggacctgcttcggcgccaagggcctggtggcgctggcattctggttcggctcgctgttcgcggagcagatccgcgccgagttccagtcctttccgttcctcgaggccaccggcgaggccggtgccggcaagtccacgctgatcaccttcctgtggaagctgctcggccgggcggacgaggaaggccaggacccgtcgaagatgaccaaggcgggcctgcgccgctggctgacccaactgtcgaacatgcccatggtcatgctcgaggccgaccgcagcgacaacagccgcgccggcggcgccgccaagtccttcgactgggacgagttcaagccgctgttcaacggccgcgcgttgggcgtgaccggccagaagaccgccggcaacgagacctacgagccccccttccgcggcaccctggtgatgagccagaacgccacggtgcaggcctccgaagcgatcatgacccgtatcgtgaagctgcacttcattcgcccagagatcacccgcgagagccaggccgcggccgacaacctcaaccacctgggcgtgcttgaggtcagccacttcctgctgatggccatccgcgccgaggcccgcgtgctggagtgcttccgcgagcggctgaaggttcacagcgcgacgctgcgcggtctgaagcagattcgtatcgagcggctgatcctcaaccacgcgcagatgatggccctggtcgacgcgctgcgcctggtggtgccgctgtccgagcaccagctcgcctgcgctcagcagaccctgatgacgatggccctggagcgccaggacgccgtcaacgccgacgcacccgaggtggccgagttctgggaggtctacgactacctcgaaaacctcagcgaagagccggtgctcaaccacagcaagaaccccggaaccatcgccatcaacctcaacgagttcgtgaagctcgccgccgaccaccgccagaaggtggccgacgcggcaaccctgcgcgacctgctgaaagaatcccgcaggcacaaattcatcgaatacaaggccgtcgacagcgcagtgcgcacggcacacgcccgccagaaccctttcaccaaccgacccagcaccgtcaagtgctggattttccaagcctga

SEQ ID NO: 330015 - DNA, 294 bp, Pseudomonas aeruginosa
gtgagcgtctacaagctcgtctgcccctgctgccacagccggatgcggatccgctcctccgagggccaaaccccgtgcttccgctcgatgtacgcgcaatgcacaaacgcgctctgcggcgccaccttcaccggctccctgagctgggactaccagctcagcccctcgggcctcgagcggccactgctggtactccccatggcgccttcgaaaacccgtcaactggcacgccgcgacctcgcggccgcaaccaaccaactggacctgctggatcatgtggagtgcatgcaatga

SEQ ID NO: 330016 - DNA, 501 bp, Pseudomonas aeruginosa
atgaccaccgccctggggagacaccagaagatgaaacgcccgctcctagaaacgcggcgccaggtggtcagcgcgatcatcggcgcctaccccggcggtcgcgaatgcgccgctgcccgcctgggcctcgacctgaagaagttcgacaaccacgcctacgagaacgccggcagcaagccgctcagcgacgaccagttgctcttgctcgagcaggaaaccggcaccagccacttccccgagtacgtcgcacacctgtatggcggcatgtttgtgcagatgcccgacccggcccagctggataatcttgatctgtacgcccggggcgtcgccaccgccatcaggcgcggcgaggtcgaccgcatcatcgccgaggcgctacgcgacggagagatcgacgaggccgaactcgccgaaatcatcgtcgcccaccgccaacacctggccgcacgacatgccgaagtcggcgcagtgatcaccctgcaccggagggtcaaggcgtga

SEQ ID NO: 330017 - DNA, 363 bp, Pseudomonas aeruginosa
atggacgaagagttccgctgtgaaatcttcaagaacgccaagcagctgcacggcgtgttttatctgggtcggtatggctatgtagtagaggatgtgctcgaaatggagcgcttcctccatgcgttagcctctgagaagcgcgaacgcaacgtgctcagcctgttgcaccatgaccctaatgcatctttctacgataacgagaccgtcgaaggcctctcggctgaaggccccgatggtgtgtgcctgaaccgcgttgccgccgatcatcttttccagtttcacttgtttggggccgctgggcagatggttcctttcgctgatgtaccacttaaatcttgcggcgactttgccggtacgccatag

SEQ ID NO: 330018 - DNA, 1014 bp, Pseudomonas aeruginosa
atggcacctaaagaaaaaacgaagaaacgcccgttctactatcgtcgagctaaatgggatgagatgaataaagaaccttcccttgagaaaatacttacgatttgccacgaagaactaagcactgttggtgatcgtacatttctctctggcgaaggagaaattcgtggcgctgatgcggatcctcgcccgggagaagggctttttctgcatatagccagttatgtgccggacgaacagaccaccacaattgaaaagagtaagcgtgtaaagcgttcaaagctacatgccgaagctgcatcggccggacgcgattttctcagcggcgacatttttgcactagtgaaagataatcatctcattttgtgcccgtctggcgtacgtgagagtgttgttcattcttatatttacaatgtgttaaaaaaatgcaagtactccaagatgctggcttcgtttgacttggagaaaatcgctaaggcaagcaagttggctatggttgctacggagggagtgaagtcaatagagctaggagcatctctttacgatgctagtatttctgaaatgaatgtatctaagaggaaggcttctcagaaaaagattgacgagctgctcaaaaaagcggcggaactatttgaggatatgtttgccaaagaccccaatctgaaggagatcaaagaacaggaaaatcttaatataaagatatcgctcaactttgacggtcgtgaggccagacgtaagggcaagccggtaggctttggtgaaatcggcaagagccgtctgaagaagacatcggaagaaataatcaaagagtacgaggataaggaatacctcgggtttgatgaagatggattcaaaattgtaactatggctgggaatgtaattacccctaccgaaattcgcgtatctgacagctatcatgttaaagtttttggtaagtcgattgataagtcggatacgtttgataagctgaaggggtactacgataggcttaaaagtagtggtgtgctggctcagtga

SEQ ID NO: 330019 - DNA, 465 bp, Pseudomonas aeruginosa
atgagcgctagctatgttttctcgccgtccgcgagggtcttctaccccgtgtccttgcgcgaggtctacgaggccgggatcggctggccggatgacggcgtccccgtcagcgatgaagtacacgcccgcattctgctagaacaggagtctggccgtgtgatctgcgcggacgccggtggacagccagcaacgaaagaaccaccgccgcccacagaggaggtgcaagccgcgattgagcgcaactggcgcgaccgccagctcgtcgacaccgacgccctggtcgcccgtcaccgcgacgagctcgaggttggtaccacgacgctcaacgcggagcagtaccaggcgctgcaggcctaccgccgccaactgcgcgactggccggagtccggtgagtttccgctcgcagaacaccggccgaccgcaccggactggctcgacgccctcttcgcagatggcgtcttgtag

SEQ ID NO: 330020 - DNA, 1053 bp, Pseudomonas aeruginosa
atgagcaaacgtcgcagccaccgccgtcagcagccggttacagtccaatccgcccaggaaggcgagttcatcccgcgtcagggcggccgtgccgagaccttcaccttcggtgacccgatgccggtgctcgacggccgaggcatcctcgactatctcgagtgctggtcgaacgggcggtggtacgagccgccgctgtccatggaggggctggccaaggcggtggggtcgagcgtctacctgcagtcgggcctgaagttcaagcgcaacatgctggccaagaccttcatcccgcaccgcctgctcagccgggcgacgttcgagcagttctccctggactggctgacattcggctcggcctacctcgagcagcctcgttctcgcctgggtacgcggatgccgctgcaggcgccgctggccaagtacatgcgccgcggcaccgatctggagacgttctaccaggtgcgcagctggacggatgagcacgaattcgagaagggcagcgtgatccagctgcgcgaggccgacatcaatcaggaaatctacggagtgccggagtggttctgcgccctgcagagtgccctgctgaacgagtcggccacgctgttccggcgcaagtactacaacaacggcagccacgccggattcatcctctacatgaccgacgccgcgcagaacgaagaggacgtggatgcgctccgcacggcgctgaagaccgcgaaagggcccggcaacttccgcaacctgttcgtttacgcaccgaacgggaagaaagagggcctgcagatcattccagtcagcgaggttgcggccaaggacgaattcggctcgatcaagaatatcagccgcgacgaccagcttgccgggctgcgggtctatccgcaactgatgggggtggtgccgcagaacgccggtgggttcggatccatcagcgacgcagcagcggtctgggccagcctggaactggagccaatgcaggcgcgcttgcagcaggtcaatgagttgatcggggaagagatcgtgaggttcgcgccgttcgacgctccaggcttgtaa

SEQ ID NO: 330021 - DNA, 861 bp, Pseudomonas aeruginosa
atgaacgatatcgacacgatcaccaatgcgtgggggcgttggaaaaccgctcaatacggaaccacctgctggttcactgaaagtacccagtacgggcggaacaaggacactcgcggctatatgcaatatcagaccaacgtttccgcgccgaaggacttggtttattccaactttgtgcagcaggacggcggtagcgccctgttggggcagtacgacacgatcaacgatggcagccaggtgattgaacatgtcgtcaacttgcaacaagggttagtggacacctttacctggagcgtcactgagcagttgaaggtcggtgtggaagtcaaggtgaaggcgggcattcccctagtgggtggcgctgagaccaccagtacggtggaagtgtcactgtcctctactcaaggggcgagtaccagcaagtcttccaactatggcgcctctaccaaggtgcctatttccccacatagccacggctggggagaggttgacttgagctttactgagctgcgcactcagtgggtcggtaatgtcgggcttcaaggatgtgtggccatttggttcaacaacaaagtcgcattgaacaacgatggcgattaccactacctatggttcattcccgtggagcaggtattttgggagtgcatccagcacaacatagtcaatacctcgggctatgtcgtacaaggcaatggagtgttggcgcaagccacaggcaccttccatagcagcatgggcttgaacttgaagaccatcgcgcacgagcggccttatccggaaacctcggaggcggtcagaacattctataattatgccagtctggttccggacctagaaacccgagtccgctcggcagagtag

SEQ ID NO: 330022 - DNA, 741 bp, Pseudomonas aeruginosa
ttgtcaaactctagaaatgaactttgtacctgcggaagcggaaggaaatttaaaaaatgctgcttatccgctggcaacattactgcacccattatcttctcagaaactttacaagccaagcttgacacgccctgctggcaccatggaacgccccataaatttaattcgtggtcattccctccaccacctaaacccggcgaaagtcttctagtccctcatacggccgtgttctttactagcaatatggaatttgccaaaggcgccggcaataacattgctagggtctcgttatcctccaaggctaagatacttgacacaactgaaaaccacgaagcttcagaaaagttacgcaaagaggtagccaaacacgagattgcttccagaacattaaatacagagcatgattattggcatgaaggctggaggactggcgacgtccttaaagttgcatacagcgacccactactggagcttcacttcatcaagctgagcgctaatctttcaaaaagcaccaagttgcccctagaagcggcaaccgcagtaattcaacataatagtgctcgcggcctaattgaactaatctgcgttactgccaagaagctcggcttcgacgcaatctatggtcacgaggtagaccggcactcatttgctggaaagaaaatcgctcagccatggcttgcagttctttcgaacggaattatttccgagcccgagtggttacactgcaacgattcagagtga

SEQ ID NO: 330023 - DNA, 1047 bp, Pseudomonas aeruginosa
atgaaggcccaggaagagattttcgagatcgtaagaacagctcgccaacggataaagcagctgccgtccagaagccgatctaagactaccgatgatgattatgttcgcgaatacaatcgtatggttggcgatgaaggagccgatccagaaaaactatggtcagcaatctgcgcaaccaaaagtaagtccacatatcggagaagagtggccgcaacaatgcactgttgtcgtgttcagctgcaggaagcgttgcggagccaggatgcggcccagcgttcgggcaatatgagtgacttcagatatcaaatttcagtgatcgaaggaacgatcggaatcctgaatattattgaaaggcacaaagggcagtgccctctggaaaacacggtaaggcggaagtcaaagagatctgacttgaaatacctgcctgccgattggcgggatcaattgcataagcagcttgtgggcagcaagtacgaactggcttatctagtggaggccgtctcgggttgtcggccaggtgagctcgaaaaaggcgtaaaagtggttttctccaaagaaagcgggctgttgactgtcagggtcgacaacggggtgaaggtcaccgaacagaaaggtcagccctggcgggaaatcacctatcgagtcgatcaaagtccgttggttaaggctctctatgaggcctgcagaaaggttgcgacggacacgcaaactacagagacggttgtcgagatcgagaaaagtaccaactggcgtgcagcgctgtcgtcggctgggcagaagctatggccaagactgaaattcagggtctgcccgtaccacctccgaaacgctgcagctagcgactggaaacgggctgggcttagcgaagaggatgtctcggccgctctgggtcattgcgtaagcaagacctccagtaactatgggcagttccagatcggagcgagggctggcggcttgatgcctgtcggagtcagagctgcgcgtcatatcttggacacccggaccctgtctgcccacatcggtgggcgcttgctaagagctgaatga

SEQ ID NO: 330024 - DNA, 1005 bp, Pseudomonas aeruginosa
atggcgagggccgacttacttgttagcctagtgcagtcaggaatgaggggcgataaggcgaagttcagaaaaattactgaagccattatcgttgaggaaagatctaagcaacataaggttttggcggatcgattagagtcggctctttcaaggtcttttgagcctcccgcgcaaacctttaatgctgcgagcgttgttccttctgttacggcggcgcgtgaccttataacagaaattacgtcgccacagaaaagaatgcaagatttaatcttgccgaatcagatccaggaaatagttggcgagataattcaagagcatcaccgggtagatttattaagatcctataatctagagccaagaaataggttgcttttgatcggccctccaggaaatggcaaaacatcgctagctgaaggtgttgcagaagcgctgatggtgcctcttctcgttgtaaggtatgagagtattgttggtacatatcttggagaaacagctgttcgtctaaaaaagctatttgaatatgcatcatcgagaagatgcgttcttttttttgatgagtttgagacgttggggaaagagcgcggagatactcacgaaacgggggaaataaagagggttgttagctctctgcttcttcagatagatagcttgcctagtcacgtcgttgtaattggagcaacgaatcatgcggagcttttagatagggcggtttggagaagatttcaagtaagaattgaagtgccgcaaccaactcgggatcgtttagcagaatggtttgagcgcttccagaaaaaacataatttagattttggttattcgtcatcggctctggcaaagcgtttgtatggttgtaatttttcggaggctgaagaattttgcctcaatgtacttaggcggtacatactggagctccccaatccagatataaagccacttgttaccaaagagctacagctttggtctactcagacagcaaaaactaagcatcaggacgagcaggagtaa

SEQ ID NO: 330025 - DNA, 2607 bp, Pseudomonas aeruginosa
atgaccgaccgccccctactgtggtttccccagccacaaccagcttcgcgttcaaagcttcaatctgcgcctgggagagtgagcacgccctcgcatgagcggcaaggagcaagggtctccataaagttaagccagttgcaagaggcttttgaagctcggagggcagagctggttagggctgctgccggggttgatcctgagcaagtcttggttatcgaaacggttggtgctgtagaagactttgctaaagcggttaagaagattgaaggtctagagtggctaggtgagatcgaggttgatgagctacccccggatgaagactttcatgacttaaaagatccagagaagcctctgaaaggaaggctttatctagtgctaacgaatcagcaggcgctaaacgagcttttgtcactttggcgtcactacaaggatcaagatgatccgaagttgaagtttgatactggcctcacaaagtttagagatgtcttttgtcatctcttggacattagacgctgggggccagctgacagacttttagagacaggggtgctagacgtctggcgggaagagctaaatgatcccgatctgcaaaatcgtccagtccggtttgaggctgagctctggtaccgtgactcggttgataaaagagccgagagtgagagtgtagtccgaggattggttaactctctacaggggcaggtaataactagtggggttattcctggtattcgctatcacgccgttttggctgagcttccggcaagtcgcatacaagagataatggatgctccagaaacggagcttgttaagtgcgacaacattatgttcttccgcccggtagggcagatgacttcgggtgagactccagtagatgactatgctgaggctcttcctccgagaagtgaagagtttccaggtggtgctccggtgctcgctatactcgatggcatgccatatgtaagtcatcagcatttgaatggcagaatagtacttgaggatcccgacggttgggcagaggactatcctgcgtcggaacgagtgcacggaactacgatggcatctctagcaattcatggagacctaggcgaaaactctgctgcgcttactcgcccagtttatatgcgcccgattatgcgcccggacgctagagatttccgccgccctagacgggaagtcatccctacagactcgctcccagttgatttagtgcaccgctcagttaagcgaatgctagagggtgagggtgagcaacctgcaacagctccgtcggtcaagatagttaatctatcaattggcgactatagtagagctttcatgcaaagcattagtcctcttgcgcgacttttggactggctaagttctaaatatggtgttctcttcatagtaagcgcgggtaatcagctggaagctgtcccgttagatatgactttagatgagcttgaacagctatcgcaaagtgatcttgagagaaaaacaattacagccctgttaatgaatgcccggtcgcgctcgatcttgtctccagccgagagcataaacggaattactgtaggctcaattcatttcgatgcttgtgtggatgcgggggtagctaatcgtttcgacccttattcgagcgctctccctagtcccgtatcctcctttggaagtggatatagaaggtcaataaagccagatattgtctttcctggggggcggcagtggtatcaaaagccatacattgggcgacaggcggttagtttgtccgtcagcggatcgatggcgcctccagggaataaagtggctatacctgggcagacagcatctacagactcaacgggttatacacgaggaaccagtaatgctacagcgctaattagtcgtgcggctgtacattgttatgagacgctttcaggtgtgatcgatgcaaccgcaactgcgggttacgatgattcatatacagcgcctctaattaaggcaatgctagcccatgggtgtagttggggaagcattggaagtcgtctggttgatataattagcgagcagcagagcataaaaaatcctgtaagctttgcgagtcggtggatcggatacggtttgcctgatataggtcgggtcttggagtgtactgagcagcgggcgacaattttaggtttcggcgaactgtctgatgcacaagcccatctcttcagaatgcccctaccgccgtcgttaagctcggttcgggagtggcgtcggttaactgtaacccttgcctggttttcgcctattcaaccgagcaatcaaaaatatagatgcgcaagtatgtggttcgaggcgaacaatcctgttgccaatcagaggcgtgaagctgcaagcggaaattctggttggcaggcagtaagaaggggaacgcttcagcatgaaatatttgagggcgattgggctcagcctttcgtcgatggagatagcttggttttaaaaataaactgccgaaaggaagcggcagctatagattcccctgttccctatgggctagtagtgtctttcgaggtccgtgagggggttcaactgccgatttaccaagaaatcagagataaaatccgcattcagccagctgtgccggtcaggcaagggccgattatttaa

SEQ ID NO: 330026 - DNA, 393 bp, Pseudomonas aeruginosa
atgacagagcagtcagagaattcgataaccgcgctgattactttggccagggcacccttgggccaggcttcgcctgagacgctgatcgaggtcgcattgttcgtctggtacgccccagaccctctcccctcactgaaacgcgccctggaggccctggagggcacccagcagcgccgcgccaggttcgccctggatgtgatccgtcgctacccctgcatagagctcgaacgccagcgggcgctacgtaacctggtagacctgaaagttagttttgagggagggtcgatggcggatctgctcaatgcctgggagctggacgagaccgaaaccccaaacaccaaggcaatcctgccctaccagaccagacactacgccgcagaacggcgcaagtga

SEQ ID NO: 330027 - DNA, 843 bp, Pseudomonas aeruginosa
atgtccgacttccagcatgcccagctcgactgggacgaaaacggccagccgctatcccgcgccttcggcgacgtatatttttcccggcattccgggctcaacgagacgcgccatgtgttcctcgccaccaaccgcctggccgagcgcttcgccgcgctgggcgacggcgaggtgctgtgcattggcgagaccggcttcggcaccggactgaacttcctctgcgcctggcagctgttcgagcgggtcgcgccggccggcgcgcgcctggagttcgtcagcgtggagaaattccccctcgccgccgccgacctgcgccgcgccctggcgctatggccggaactggcgccctggagcgaggccctgctgggccagtaccttgccgtgcacccgggcttccagcgcctggcgttcgcgggcggaagggtcggcctgaccctactgctgggcgatgccctggagtgcctgccgcagctcgacgcgcgggtcgacgcctggttcctcgatggcttcgccccggcgaagaacccggacatgtggtcgcccgtactgttcgccgaactggcgcgactgtcggcgccgcaggcgaccctgggcaccttcaccagcgccggtttcgtccgccgcgggctggtcgaggccggtttcgccatgcaacgggtaccaggctacggacagaagcgcgagatgctcagcggcacctaccaggggccgccggcgaacgccggcaagccctggtacgccgccccgcgccccacgccgggcgccgcgcggcactggtggtcggcggcggcctggccggctgcgccagcgccgccagcctcgccgcgcgcggctggcaggtga

SEQ ID NO: 330028 - DNA, 1482 bp, Pseudomonas aeruginosa; identical to SEQ ID NO: 324400

SEQ ID NO: 330029 - DNA, 1110 bp, Pseudomonas aeruginosa; identical to SEQ ID NO: 324399

SEQ ID NO: 330030 - DNA, 822 bp, Pseudomonas aeruginosa
gtggtctgttcagctttcgatgtggcgcggtcttgctactacgtccaccgtcttcgacggcggcgtgtcgatgctcgccgcgtggcgctacgcagccaggtcaaccagttgttcagccagagtcggggctcggccggcagccgcagcattctgggcatgctgcgcgaagagggcgtgaccatcggccgtttccgagtgcgtcggttgatgcgtgagctgggcctggtcagcaagcaaccgggctcgcacgcctacaaacaggccacggttgagcgtccggatatcccgaatcggctgaaccgcgaattcgcgaccgagcatcccaatcaggtgtggtgtggcgacatcacctacgtctgggcgcaaggccgttggcactacctggccgcggtgctggatctgcatatccggcgggtgatcggctgggcgttctcggccaagccggatgccgaactggtgatcaaggccctggacatggcctacgaacagcgcggcaagccacagcaggtgctgttccattcagaccagggcagccagtacgccagccgcctgtttcgacaacggctctggcgctatcggatgcagcagagcatgagccgtcgggggaattgctgggataattcgccgatggagcgcctgttccgcagtctgaagtcggagtgggtcccgtcaacgggttacctgacggcgcaggaggcccaacgggacatcagtcattacctgatgcaccgctataactggatcaggccgcatcaattcaacgacgggctaccgcctgcggtggccgaagaaaaactcaacccactgtccgggatgggttga

SEQ ID NO: 330031 - DNA, 702 bp, Pseudomonas aeruginosa
atgagcgaccagcccagcctgtcccggggaggcatgagccccgaaggcaggaccaaccccgtcggcaccctggaatccaggctcgatccgcaggacaagaaggtgctgtgctcggcggtctgccattgcagcagcacgcccaacctcagccaggatggcaaaagcctcaagcaggcgtgcgtggcacagcggctgggagagttggacgaagttctccagggacgcagcccctacaagcccgaggtcagctacgacatgaccaaaaacccaccgcagccgattctcgatagccagaccggtaacagtccacatggctggataccgggatggatcagcaagtattgggatgaagatccggagcatccgccgttcaagccagggaaaggaatgattcgcaggcccgacgtgatcatcgttcagaatcccaacaggccgccaacccaggacaatatcaaacaggtggtggagatgaagtttccgcctgacccacataatagggaacaacttgaggattatgcagcgattgccggcaacaagaacaagattgttgaaatgaaaccctccgactgcgactgtggccaggaaaatcaacgatccaaggtgccagtagagcaagcagggtgggccgtcgccatcgcaggtggagtgatgttcgtcttgacccgaggccgttcccctcgcccgatgattcccgcctattga

SEQ ID NO: 330032 - DNA, 735 bp, Pseudomonas aeruginosa
ttgagcgttgaagctgcaaagaatgcccgagaattgctgctcaaggaataccgtgcggtcctttccacccactcgaagaaatggccgggctttcctttcggctcggtggttccctattgcctggatgccgaaggccggccgctgatcctgatcagccggatcgcccagcacacccacaacctgcaggcggacccgcgctgctcgatgctggtaggcgagcgcggcgccgaggatatccaggctgtcggccgcctcaccctgctggccgaggcgcggcaattggcggaggaggaggtcgccgcggcggccgagcgttactaccgctatttccccgagtccgccgactaccatcgggtccacgatttcgacttctgggtgctgcagccggtccagtggcgtttcatcggcggtttcggcgcgatccactggctggccgccgagcgcgtgccgctggccaatccgttcgccggagaagccgagcgcggcatggtcgagcacatgaacagcgaccacgccgccgccatcgcccactatgtggaactggccggactgccggcgcatgccgcggcgcagctggcgggaattgatacagaaggtttccacctgcgcatcggccagggcctgcactggctgccgttccccgccgcctgcggcaaccccggggccgtgcgccaggcgctggtgcaattggccagggccgagcgctggcctaccgtcgagccggagcagggttga

SEQ ID NO: 330033 - DNA, 225 bp, Pseudomonas aeruginosa
atggacgaggtactgaggcaaaggttgcgggctgaactactggaagtggggtttctcaaccagtgctgccttgatctcatggaaagcatggaggctgagttcagtctcactaaggaccagcgcgagtgcatcgagcagctcagccgattcttacgggagggcatcggcaagctgaccgctctgtctgaacgggtagccgacggcgatatcgtcgtcctgtgctga

SEQ ID NO: 330034 - DNA, 285 bp, Pseudomonas aeruginosa
atgacgaaacgagttctactgaaaggtgagttcttcgcagagtggtccggctcgctggacgaggccgccgcactcgctggcgtcccggtcggcgacctggcgttccatcccgacgacctcctcgccgaggtccaggagcagcgccgccaagcctatcgcaccgagtccgacccgctgcgcctggaggccgagtttgacgccatagccgctggcaccgagccggacctggcggcatgggtcgcagctgtccaagcgatcaaagcgcggtatccactacctgaatag

SEQ ID NO: 330035 - DNA, 1152 bp, Pseudomonas aeruginosa
atgactctttatatgggaccgaataccggcctgctgatcaatggcttgccgggagaagggcattacaacgatctgattcggatgtggcgctgggacgacttcctccggcagccggtcgtcaaggggcgcgtctcctcgttgcccacaggcggccaggccgagggcgacacctacatcttcaccggtagcggtgcgaaccagaaccgcattgcacgctggtgggcaacgggtgcgacaactcccatttgggagtacatgccgccacggctgggctggcgagttcaggttgcgaacgagacaaccccggcaggccaggtcaagacctacgagtattccggcagcgcctgggtcgagctggtgggtggtatgtcggacgcgcccagcgacggcagcaactacgcacgcaacaacggggcgtggggcaagcttgggaccgctgccggggccgacctcaacggcatgccatttctcaatctgatgcctgacagcgggcgttatgcgggcagtatcaacccgctaatcctgcgcttcactgaagcattttcgagttcgttcctgacgccgtggaatggcgcgtcgatcgctgacggcggaaagtacatctacgacaacactacaaacggcgggacggctggcaacctgaaccaacgtgtccaggacttgctggtggcgatggggcggtcaagtggcagcctggcccgctatggcgtggagttctatacggctttgctgaccgctggccccaacgcaacgaccggctctacgggcgccgacggcacgacccgttatctccagatgacgaactcgtcgagggcgctcttcatcgccaacggctggtgtactgcggttctttggatacgcacggaggccggatcgcttcacttcatgccgtcaacggccccgacgactgactacaagatttggctgaatggtgcgtctgtactgccgggacaggtactgaccccgagcgatggatggaagcacgtcaggatttccaaaaagagcgcgcaggggtacgacaacggcttcccgttcctctatatggcgctgggttccgttgcggctatggcctgtccggcattcttcggcggattggtcgatcccggcatccacgtcgcgcctatcgcgaccgtcaactcacagagcgcatga

SEQ ID NO: 330036 - DNA, 237 bp, Pseudomonas aeruginosa
gtgacgctccaggtctacagcggcacgacgctgaagcgcacctacgccggcctcacatccagtagctggtcctatccactggccgaggacatggcggatggtccgctccaggacgtgcgccttgtcctgcgcagtgtccgcgacggcatcaactcttggcagcagcatgacatcacaatcgaacgacacggccttggcttccgcctcggcgaggaacttggaggcgtagcacaatga

SEQ ID NO: 330037 - DNA, 252 bp, Pseudomonas aeruginosa
gtgagggacgaggccccgctttttccaaggagcccgtccacgtcccagcaagcctctttcggccagttggccttgatccattgcggcaagttcctgccgctcgaaatcctgcatagcgccgccggccactacatcggcacgcgcgatacagaaggtcccgtttcgcgggaatcctgccagtacttccgcagctatgccgcggctcaacgtgccctcgaaagaggcggcgggtcccagctcgccacaccctga

SEQ ID NO: 330038 - DNA, 408 bp, Pseudomonas aeruginosa
atggagaacgctcaagagaatctgaccatcggggccttcgccaaggcagcccgggtcaacgtggagacgatccgcttctatcagctcaagggcttgctaccccagccggagcggccctacggtcgcatccgccgctacgggcaggcggacgtggcgcgggtgaagttcgtgaagtcagcccagcgcctgggattcagcctggatgaagtcggccagctcctgaaactggaggacggcacccattgcagcgaggcggccgaactggctgctcaccggctggccgatgtgcgcgcacgcatggcggacctcacgcggatggaagaggccctgtcgacgctagtgagagagtgcaacgcgcaccatggcaatgtttcctgcccgttgatcgcagctttgcattgctgctaa

SEQ ID NO: 330039 - DNA, 351 bp, Pseudomonas aeruginosa
atgtcggaacccaagaacggccgcggcgcactggcgaccggcggcgtcgcggccgtcctcgcctcggcctgctgcctcggcccccttgtcctggtcgcgctcggcttctctagcgcgtggatcggcaacctgaccgtgctggagccgtatcggccgatcttcatcggcgcagcgctcatcgcgctgttcttcgcctggcgcagcatcttccgaccagcccatgcctgcaagcccggcgacgtttgcgccgtgccccaagtgcggactgcctacaaggtgatcttctggatcgtggccgccctggttctggttgccctcgcgtttccctacgtcctgccgctgttctactga

SEQ ID NO: 330040 - DNA, 306 bp, Pseudomonas aeruginosa
atgaagaaactcaccaccctcaccaccctcaccaccctcaccaccctcatcgccctggccgccgctctaagcgcgcccgcctgggctgccaccaagaccgtcaccctgtcggtgcccggcatgacctgcgccgcgtgcccgatcacggtcaagacggctctgtccaaggtcgccggcgtcgagaaggccgaagtcagcttcgagaagcgggaggccgtcgtcaccttcgacgaggccaagaccaatgccgacgccttgaccaaggccaccgcaaacgcgggttacccgtccagcgtcaagcagtga

SEQ ID NO: 330041 - DNA, 1689 bp, Pseudomonas aeruginosa
atggccgaggcgatcaccctccacatcgaaggcatgacctgcacgtcgtgcgccgagcacgtccagcaggctttgacgaacgtgcccggcgtgcgcgcggcctcggtgtcctatccgcagcggcaggccgaaatcgaggcggatgcaggcgtgagcgtggccccgctggttgccgcagtggccacgctcggctatcgcgcacggcttaccgacacgccgaacaagcctgccggcctgctagacaaggcgctgggctggctcggtggcgaaacgaagcatgttggcggtgaacaagcgctgcacgtggctgtgataggcagcggcggcgcggcgatggcggctgccttgaaggccgtggagcaaggcgcccgcgtcacgctgatcgagcgcggcaccatcggcggcacctgcgtcaatgtcggctgcgtgccgtccaagatcatgatccgcgccgcgcacatcgtccacctgcgccgcgaaagcccgttcgatgctggcctgccggccgcagcgcccgctgtactgcgcgagcggctgctggcccagcaacaaggccgcgtcgaggagctgcgccatgccaagtacgaaggcatcctggcaagcactccggccatcaccgtgctgcgcggcgaggcccggttcagggacacgcgcacgctgaccgtggcgaccgctgacggcggcacgcacgaggtgaacttcgaccgctgcctgattgccaccggcgcgagcccggcgcttccgccaatcccgggccttgcggacacaccccactggacctccaccgaggcgctggaaagcagctcgctccccgagcggctggccgtgattggttcctccgtggtggcggtcgagttggcgcaagccttcgcccggctgggcagccaggtcacgatcctggcgcgcagcacgctgttcttccgagaagacccggccatcggggaagccgtaacagacgccttccgcgccgagggcatcgaggtgctggaccacacccaggcgagccacgttgcctatgcgggcggggaattcgtgctcaccaccgggcagggggaagtgcgcgccgacaagctgctggtcgccaccggtcgcgcgccgaacacgcgcagcctgaaccttgaagcggcaggcgtcgaagtcaatgcgcagggagccatcgtcatcgaccgcgccatgcgcacgagcgcaccgcacatctttgctgccggcgactgcaccgaccagccgcagttcgtctatgtggcggcggcggccggcacgcgcgccgcgatcaacatgaccggcggcgacgcggcgctggacctgacggcgatgccggcggtggtgttcaccgatccgcaggtggcgaccgtgggctacagcgaggcggaagcgcaccacgacggcatcgagaccgacagccggctgctgacgctcgacaacgtgccgagggcgctcgccaacttcgacacgcgcggcttcatcaagctggtggcggaagctggctcagggcggctgatcggcgtacaggcggtcgcgccggaagcgggcgaactgatccagacggccgcgctggcgatccgccaccggatgaccgtgcaggagctggccgaccagttgttcccctacctgaccatggtcgagggactgaagctcgcggcgcagaccttcaacaaggacgtgaagcaactgtcctgttgcgccggatga

SEQ ID NO: 330042 - DNA, 642 bp, Pseudomonas aeruginosa
atggccaccgtcaccgacgaaatcatcgacctgcacgaccgcatcctgggcaagctgttcaacgctgccaagcacaagcatcagcagcagttccaggcgtccggcaaggcgatcaacgccaaggtgcggctggccacctcgatcaagcagggcacggtgacggcctcgctgatgctcaggaaactcggcagctacccgcgccagaacggcctggccgtggcgctgcgcgagctgggccgcatcgagcgaacgctgttcatcctggactggctgcaaagcgtcgagctgcgccgccgcgtgcatgccggactgaacaagggcgaagcccgcaacgcgctagcccgcgccgtgttcttcaaccggctgggcgaaatccgcgaccgcagtttcgagcagcagcgctaccgggccagcggcctcaacctggtgacggcggccatagtgttgtggaacacggtctatctggaacgggcctcaaacgccttacgcggtcacggccagactgtcgatgacgccctgttgcagtacctgtcgccgctgggctgggagcacatcaacctgaccggcgattacctctggcgcagcagcgccaagatcggcgcgggcaagttcaggccgctacgaccgctgcaaccggcttag

SEQ ID NO: 330043 - DNA, 261 bp, Pseudomonas aeruginosa
gtgtacttcctcgccgagcgtggggagcgtcgcccggatgggcgccaggcactgctcgcctacgccgtcggatgcaacccggacaccgacccgttcgatgactggtggcacctcgccggccgcgagctgggcggcgatgacttcgcggagtatttcgacccgaaggacggcctgttcacgcgcctccagcactcggcggacgatctcgtgctttccgccaccgccacgcacctgtccttagcagtggtgcctcccgcctga

SEQ ID NO: 330044 - DNA, 765 bp, Pseudomonas aeruginosa
atgaacacgccatcgacctcgccgaggctgcacctcctaccggtgtcgctgcgcacggccaatgcattcgttctgtcgcaccatcgccaccaccgcccggtccagggcgcgaagttcgccctggccgtcacgctgagcgacagcgacctgatccacggcgtggccattgtcggccgcccggtcgcgcggcacctggacgctggaagtcacgcggctgtgcaccgacggcacacccagcgcctgcagcaagctctacggcgcggcctggcaggcggcaagggcgctgggctacatacgcctgctcacctacaccatgcccgacgaaggtggcgccagcctgcgcgccgccggctggcggctgatcggcgcgcgcggtggcggcgcctggagccgtcccggccgtccgcgcgccgatacccccgagcacctgcgcggcgccaagtgcctgtgacaggcgccgggtggcgcggacaaagggaagcgcccgggtgccgattgattgctgccgcgcgcgcgaggccccgccatgctggccccatgcctgctgacgtcgtcagcgacatgccaggcaaccatcggtcttcgaggttgcggcgcagttcccactgcgtgaccgagccagctcgcaccgcatccttccgcgagcggccaccagcctctggtggcggatgctttcgccttatcaacccaccgcggggtcacgcaccttccccgcatgcgtgggccggtgtgtctccgcttcatcccaatggagattcaccatga

SEQ ID NO: 330045 - DNA, 906 bp, Pseudomonas aeruginosa
atgaacaccacgtccaacgagaaatcgtatttcgacctccacacctcgggcatcggctacatccagcgtgtccgtgaagtgcccgtccggggcggccgccgtgcgcagcctttcctggcatgcaccatcgccgcgctggtcggccccgcccgggaccccagctaccgctacttcgacgtcaaggtctcgggtgccgaggccaagaagctcgttcagcgctacatcggcgttgacgatcccaagcagcgcccgctggtgcgctttcgcctcggtgacctgtggggcgatgtgtacatccgcgacaagggtgagcagaagggtcaggccgccgcgtccctcaaggcgcgactgctcaaggccgaactgatcgaccgggccgaactggcttcgatcgagcagcacgagttgatcacccgcggcatcggctatctcaatcgtgtgaaggacgtcaccccaaaagctggcgactcgttcctctcttgcaccgtcgcggcactggccgggcctgtcgatgaaccggagtatcggtacttcgacaccatcgtcgccaccccggaagccgagcacctggttcgccggtgcgttcaggccatcgagggtgaccgcaaggtgctgatcgccttccgtctgaacgacatgaagatcgatccgtacatccgcaccaagggtgagcacgccggggaaccggccgccagcctggaatcgacgctggtccacatcggtctcatcaagatcgacggcacccaggtctatccgacgagccaggcgcaagccgaggcgccgccggccgaagacgcatccgcgtccgaagccgacgatgccatcgacacggccaccgagcccgccgagcgcgagcccgaggcgcaagtccaggagcaggagccggcattggctgcttcgttctga

SEQ ID NO: 330046 - DNA, 828 bp, Pseudomonas aeruginosa
atgtctctggtatcccgctttgctccgcaatccccgatcctgcgctctgatcgcccactctcggacgaccgcattcgtgccgtcgttccgtcgatcttcgccgacgctccacatgggagccggtccgatcggtatgcctacataccgacctcgaccgtgctgaccaagctgcgccaggagggcttcgagcccttcatggtgtgtcagacgcgcgtgcgcaacgaagaccggcgcgagtacacgaagcacctcatccgacttcgccatgcaagccagatcaacggcgacgaggcgaacgagatcatcctgctcaacagccatgacggcacgagcagctatcagatgctcgccggcatgttccggttcgtctgccacaacggcctggtttgcggtgacaccaccgccgacatccgcgttccccacaagggcgacgtggtcagccaggtgatcgaaggtgcctacggagtcctcgacggcttcgagcgcgtgcagaacgcgcgcgatgcgatgcgcaccatcaccctcgatgagggcgaagcggaggtctttgcaaactccgcgctcgcactcaagtacgacgatccagccaagtccacgcctgtcacggagtgccaactgctggcaccccggcgatgggacgaccgcaagaacgacctgtgggccgtcttcaaccgcgtccaggagaacctcgtcaaagggggcctgaacggacgcacggccaacggccgcaatcagcgcacccgtccggtgcaaggcatcgaccagaacctgcgcctgaaccgggcgttgtggctgctggccgaaggcatgcgccagctcaaggcgtga

SEQ ID NO: 330047 - DNA, 210 bp, Pseudomonas aeruginosa
atgtccaccatcgcttgcgatatcccccgctccgcgctggatgaacccgcgtggcgggctctctgcgagacggcagccgcacaagccaccaagggttgcggactgtctcacgactactacgtcgaacgcttcagttcggcgatcgacgcgcaactcggtcgattgcccgaagaacagcgcgcacaggcgctgaagatcgcacaggaatga

SEQ ID NO: 330048 - DNA, 1110 bp, Pseudomonas aeruginosa
atggctctcatgttcccgcggctcgcccgcaatttcgccaaaaatgggtactacccgaccgacgaacccacgctcgaaagagccctcaacgcactgatgcccagcgacgggccgatgtgcatcctcgatccctgcgccggtgaaggcgtggcaatcgccgaagcctctcatgccctcgggcgcgaacagaccaaggcgttcgccgtcgaattcgacgccgagcgggcgcgccatgcccgcggcctggtcgatcactgcctgcacgcggacctgatggacacgatgatctccaagcagtccttcggactactgtggctgaatccaccgtatggcgacctgtccaaggacgtcaacggcaacatcggctatcagggccagggccgtgcccgcctcgaaaagctgttctatcagcgttcgctgtcgctgttgcaatacggcggcgtgctggtcttcatcgtccccggctacgtgctcgacgcggagctggtcggctggttgacgcgccactacaccgatctgcgtatctaccgagcggtggaaacgcagttcaagcaggtggtgatcttcggccgccgggtccgtcagcgggagctggcacccgatggcgtcaaggccgtgcgcaatctgctgctgcaggttgggcttggcgaagtcgaagccgaggaactgccgagcgaatggccgttcctgccgtacatcgtccccgccagtccggccgagccggagcatttcttccgcgtgacgatggagcccgaacagttcgccgacgaggttggccggctgcaaggcctttggccgtcgctggacacgcacttggggaccgcgcagcagtcgctgcgtccaccggcgcgggccttgtcccactggcatctcgccctggctctggccgcgggcgcgatctccggcgtcgtgcgctcccagacggggcgcgtgctcgtcgtcaaaggtgacacccacaaggacaagacgctccagcgggaattcaccgaacgcgaagacggctccatcgccgagacacgcatcctcaccgacaagtttgtgcccgttatccgcgcgtgggacatgacgcctggctccccgacaaggggcgaggtgctgaccattcgctga

SEQ ID NO: 330049 - DNA, 2280 bp, Pseudomonas aeruginosa
atgtccttcgatctcgaaaccactgccgctgacgccgcgcccgtacagggcgaactgctcgacgcggaatcatcccctctgaccctgagccttcaggatttcgtcggcgagttcggcgacgaactgctcgacgccctcaacagcgccaacccgcctgtctataccggccaaccgcaggcgcaccggcagctcatcgtcgccagcctcaaacgcaagctgttcccggcccaggccgaagtcgtccacgccgccgccgagctgctgatcgaccgtggcgaacgcgccgcgatcgtcaatggcgagatgggctgtggtaagacgaccgttggcatcgccgcggccgccgtgctcaacgccgaaggctaccgccgcactctggtcctgtcgccaccgcacttggtttacaagtggcggcgggagatccaggagacggtggccggcgccaaggtatgggtgctcaatgggccggatacgctcgtcaagctcctcaagctgcgtgagcagttgggcgtgcagcccacgggccaggagttcttcgtcctggggcgcgtcaggatgcggatgggtttccactggaagcccgtcttcacccagcggcgcacccgccacggcgacgtggcggcctgcccggactgcggcacggtcatcaccgacctcgacggcgagccggtcaacccggtcgcgctcgaagccgaggagtaccgcaggaagtgcagccattgcgctgcgcccctgtggacgctgatccgcccgcgcagcctgtccggcagcgaccagtcctcggccgtcctcaaagccctgaagcgcatcccgaccatcggggaagtcactgcgcagaagctgatgcagaagttcggtgacggcttcctggcctcgatgctgggcgacaacatccacgagttcatcaacctcatggatggcaacggcgagctggtgttttccgaccgtcaagccacgcgcatggaacgtgcgatggccaacatggagttcggctttggcgagggcggttatcaaccctcggagttcatcaagaggtacttgccgcaaggtacgttcgacctgctcatcgctgatgaagcgcatgagtacaagaacgggggcagtgcccagggccaggccatgggcgtgctggcggcgaaggctcgcaagaccttgctgctgactggcacgctgatgggcggctacggtgatgatctttttcacctgctgttccgagcccttccggggcggatgatcgaagacggctaccgcccgaccacgagcggcagcatgacctcggctgcgatggcgttcatgcgcgatcacggggtgttgaaggacatctactccgagagcaccggcacggcgcacaagacggccaagggcaccaaggtatcggtgcgcacggtcaaggccccgggcttcggccccaagggcgtcttgcgctgcatcctgccattcacgatcttcctcaagctcaaggacatcggcggcaacgtcctgccgccgtatgacgaggagttccgtgaagtcgcgatggacacggcgcaagccgcggcctaccgcgatctggcgggtcggctgaccgccgagctgaaacaggctctggcgcgacgcgatacgaccttgctgggtgtggtcctcaacgtgctgctggcctggccggattgctgcttccggtcggagaccgtggtgcatccgcgcacgcgcaacaccttggcgtttgtcccggctcagttcaacgagttcgagatcagccccaaggagcgtgagctgatcgacatctgcaaagaggagaaggcgcagggccgcaaggtcctggcctacacggtctataccggcacgcgcgacaccacgtcgcgcctgaaggtgttgctggagcaggaaggcttcaaggtggcggtgctgcgcgcgagcgtggatgccagccgccgcgaagactggatcgccgagcaactggaccgtggcatcgacgtgctcatcaccaaccccgagttggtcaagacggggctggacctgttggagttcccgacgatcgtgttcatgcagtcgggctacaacgtgtactcgctccagcaggcggcacgccgctcctggcgcatcgggcagaagcagcccgtgcgtgtgatctacctcggctacgccggttcctcgcagatgacctgcctggagctgatggccaagaagatcatggtctcgcagtccacctcgggcgacgtgcccgaatccgggctcgatgtcctgaaccaggacggtgattccgtcgaggtcgcactggcccggcagcttgtcgccgcatga

SEQ ID NO: 330050 - DNA, 600 bp, Pseudomonas aeruginosa
atgtgcccctctccaccgtggtttcactatcccgaacgccgccttctggcgggatttctcggcctgctgtggtcggtgctggccggtggctgcgcgacgacgactgcgccggtcgcgcccgacaccatcgcggaagtcttggccgcgcctgaacccgaggcttccgagtacatcccggtcgtgcgctacgcccgctacacactggtcgaactggcacccatggcggcgcagcgcgacctgttgttgcagaccatcgacgtgtccatgcccgaggatgcccgcgccacggtcggggatgggcttcggcacgtgctcaaacgcagcggctatggcctgtgccagaccgcgcatgccgtgatcgagctgtacgcgctgccgttgccggcggtacacctgcacctcggccccatgaccttgcgcgatgcgctgctcacgctggctggcccggcctgggaactgcacgcggatgaccgcgcacggcaaatctgcttcgagcggcccggcgatcgcgcggtcgccgagtccccatccgagccacccgccaccgaggcggtgcagacgttcccgctggcacccatggtttcgggaggccagccatga

SEQ ID NO: 330051 - DNA, 645 bp, Pseudomonas aeruginosa
atgaacgccccgcaacctgcccagcgatcgaccgccgccgtggtggtgcagagcctgatgtggctctggttgatcttcctcagcgtcttggcggccctgggctaccaggccctcagcgaccaggccgaccaggagcggctggattcccgcctgcaacgcctggaagcgcaggcaactggcttggccgagacgatcgaggccatccagcagcgcccggccgtcgcgacggacgctgacctcaaagacacccgccagattctggaagcacgcgcggcccaggtcgagaaatctctcagtggctacgcagcggccgacgacctccaggcgctgcgcgcggaggtcgagcagatcaaggcgcgccaagccgccgcgcgtgccaccgcacccgcccagcggcgcgcatcgcgcacgtccgccgcctccaagaccgagctgccgccgctgccattccgcgtcgtcggcgccgaactgcgcgccggccagcgcagcgtgtccgtcgcgccgagcatcggggacttcacgcccgcccaacttcaggtgctgctgcccggggatgcggtcggcccgtggcgcctgcaggcgatcgagggcaacaccgcagtgttccaggccggcaaccagacccgccgcgtggcgattccctga

SEQ ID NO: 330052 - DNA, 570 bp, Pseudomonas aeruginosa
atgcccctgcgcgcactggtgctcactgccggcctgtatgccgttgccgccctggcccaggaggttccgccaccggcttaccagcttgccgcccagcgcgcaggcatcccctcgaccgtgctctacgccgtggccttgcaggagagcggcatccggcgcaacgggcgcctggtgccgtggccgtggtccctcaacgtcgccggccagtcgcgccgcttcgccacgcgcgccgacgcctgcgctggcctgcagcaggcgatgcgcgccacgccgcacacgcgcattgatgcgggcctgggccagatcaacctcggctaccacaagcaccgctttaccggcgcgtgcgacctgctggatccgtatcgcaacctggccgttgccgccgagatcctgaaggagcagcacacccccggcgaggactggctgctggcgatcggccgctaccaccgccccgcaggcggcgagcccgccgcccgctatcggcgcagcgtgtcgcgccaccttgcccgcgtgcagggcacgcgaccagccgccgcggtcctcgcggcgcgccaggagacctccccatga

SEQ ID NO: 330053 - DNA, 1521 bp, Pseudomonas aeruginosa; identical to SEQ ID NO: 324106

SEQ ID NO: 330054 - DNA, 1848 bp, Pseudomonas aeruginosa
atgctctccctgttccagcgaaaacggcccccggtcgctgccccgtcgccagcgcccgccaccgacctcccgaaagggttgctgcggcccgaatcggccgcatcgctgctggcaacaccgcgccggcagaagctgctggaacacatctggcagcgcacgtcgctgtcgcggcggcagttcgccaccctataccgcacgccgctggagcactacgccgagttggtccaacaattccccgcatcggaaagccatcaccacgcttaccccggcggcatgctggatcacgggttggagatcgtcgcctatgcgctcaagctgcggcagtcccatctgctgcccattggcggcagtcccgaagaccaggcggcgcagtctgaagcctggactgccgcagtcgcttatgccgcgctgctgcacgacatcggcaagatcgccgtcgatctgcacgtcgaactgtccgacggctcgctgtggcacccctggcacggcccgctgcaccagccataccgcttccgctaccgcgacgatcgggaatatcggctccacagcgccgcgacaggtttactctaccgtcaactgctcgaccgtgatgccctggactggctcagtggctatcccgacctgtggggaccgctgctctacgtcctggccggccagtacgagcgcgccggcgtgctgggcgaacttgtcgtgcaggccgaccgggcttcggtggcccaggaactgggcggcgatccggcccgcgccatggctgcacacaagcatgcgctgcagcgcaagttgctcgacgggctgcgctacctgctcaaggaacagttgaagctgaaccagccggaagcctccgatggctggatcaccgaggatgccttgtggctggtaagcaagacggtctcggacaagctgcgtgcgcacctgctgtcactaggcgtcgacggcatccccgcgagcaacaccgccgtcttcaacgtgctgcaggatcacggcatgttgcaaccgacgccggacggcaaggcggtctggcgcgcgaccgtgaccagcacgactggctggtcccactcattcaccctgctgcgtctcgctcccgcgctgatttgggagtctggagagcggccagcgcccttcgcaggggcagtggcaatcgacgggacaccggcacccaacaatgccgatgccttggtgccctcgccggcaatgacggcaaagccagccaccgacgatcaagagtcccttccatgggagggcgtcgacgccgcgactccggttcacttgcctgccgcacaagccgcacccgatgtcatggaggacctgctggcgatggtaggaatcggcgatttgcttgttccccaacaggatgcggaagccgtctcgggcgacgcacccgccgctggccctcaaacgccaccgccaacctcgatggtgcccgtgccgtcatcagcgccggtgcccacgtcctcgtcggcgcagccatcgggcgagcacttcatggcgtggctgaaacaaggtatcgctacccgccggctggtcatcaacgacgcgaaggcgctcgtgcatacggtgggcgacacggcctacctggtcagccccggggtattccaacgctacgcacaagaacacccccaggtcgggactctcgccaagcaggagaaccagcaggattggcaatgggtacaaaagcgcttcgagcgcctgcaactgcatcgcaaaaagcccaggggcctgaacatctggacgtgcgatgtcacaggccccaggaagtcccgccgcctgtatggctatctattgcacgatgttcggctcctgttcgcagagccaccaccgaacaatccttacttgtcacttctcgcgtaa

SEQ ID NO: 330055 - DNA, 969 bp, Pseudomonas aeruginosa
gtgtctggctacgtcgagcgggtcgcctatcgcgaaggagacgaggtcaagaagggcgatgtgctcttcatgatcgatgcccgaagctaccgcgcggaactggcccgggcccaggcgcaattgacccgggcgcgcagcgaagccggccgcagcagaagcgaggcgcaacgtgccaaggtgctggtcgagcagcaggctgtctccaccgaggcctgggagcagcgccgcgccgctgacgagtccgcgcaggctgaggtgcaggccgcgcaggctgcggtggagacggcgcagttgaacctggagaggacccaagtgcgctcgcccatcaacgggcgcgccagccgtgcccgccttaccgcaggcaacctggtggccgccagcgatgcagccagtgtgctaaccaccatcgtgttccaggacagggtctatacctactttgaggccgatgagaaggcgttcctgcgctactcgcgcatggcgcgcaagggagagcgccccagcgagcgaggcggccagctgccggtccagatcgccctggcggacaaggcggacttctctcacaccggcacggtggacttcctcgacaaccaggtggaccggggcagcggcacgatcgccgtgcgcgcggtgctggacaacaaggatcgcgttttcacgccgggcctctatacccgcgtgcgactggtcggcagcggcgaattctcggccgtgttgatcgacgacaaggcggtgctgaccgaccacgaccgtaactacgtctacatcgtagacaaggatggactggcgcagcgacgtgatgtgaaactgggtggcagttcccattggctgcgcatcgtgcgaggggggctggcggcgggcgaccgcgtgatcgtcaacggcgcgcagaaggtgttcttgccgggcatgcctgtgcaggccacggcggtgcccatggtggctgctgcggcgcccgcgtccgccaccaaatga

SEQ ID NO: 330056 - DNA, 402 bp, Pseudomonas aeruginosa
atggacctctccaagttcttcatggacaggccgatcttcgcggctgtgctgtcgatcgtcatcttcgtctcgggcctgctcgcgatcccggcgctgccgatcagcgaatatcccaaggtcgtggtgcgcgccgtgtatccgggcgccaaccccaaggtgattgccgagaccgtggcgacacccctggaggagcagatcaacggcgtcgaaggcatgatgtacatcaagtctgtcgccggctccgacggcgtgctggtgaccacggtcaccttccgttctggcatcaacgccgatgacgcgacggtgcgggtacaaaaccgcgtcgcccaggctcaggcccggctgcccgcgatgtggtgcgccagggcatcaccgtccaaaagcagtcccccgccttcctga

SEQ ID NO: 330057 - DNA, 192 bp, Pseudomonas aeruginosa
atgaatgccaaggagcctgaagcagccaaactcaaggcgctgcaggaagcagcttgcatgggctgggccgacatcaccgccggccgccatgccgatgtcgccgacggccaactcgaaggtttcattgcacagttgggacagcaggcggcgcttgccgtcgctacccgccgcgaggctatccccaggggatag

SEQ ID NO: 330058 - DNA, 288 bp, Pseudomonas aeruginosa
gtgcgcgtacttgagtggcgggaagctgcccgcgccgacctgctggcgattgttgactacatctcggacgacaaccccgatgccgcgcagcggttgaaggacgacatcgaggccaaggccgcgaagctgccggagcgcccgaagctctaccggcctggccgcgtggccggcacgcgggagatggtcgtgcgtgcgaactacgtggtggtctacatggaggacacccgcgcggtgtccatcctgcgcgtgttgcacgccgcgcagcagtggccgccggcacgggagtga

SEQ ID NO: 330059 - DNA, 300 bp, Pseudomonas aeruginosa
atggccgcacagacttcgatgctgcacatccgtgtggacgataagctcaaggccgatgccgccgagaagctcgccggggtcggcctcaccgtttcggacgccgtgcgcatcctgctgacccgtgtggtcaaggaaggcgcgctgccggctggcctcacggccgacccggaggcctacgatgcctggttccgggcgaaggtccaggaggcgctggccgacacacggccgccggtgccgcaccagcaggtcatggacgaggcgcaggccctgatcgacaggaagcggcgtgcgcgtacttga

SEQ ID NO: 330060 - DNA, 153 bp, Pseudomonas aeruginosa; identical to SEQ ID NO: 324480

SEQ ID NO: 330061 - DNA, 177 bp, Pseudomonas aeruginosa
atgcctaagcgcaccgccttgccggcggacctgccgcgcgtggactgccaccacgagcccgagaacacccgctgcgcgtgcggctgtgcgctcaagcgcatcagcgagaagctggactacacgccgggcgtgttcacggtcgagtgccacatccgcagcaagtggacctgcgcatag

SEQ ID NO: 330062 - DNA, 879 bp, Pseudomonas aeruginosa
atgaactccatcactatcgttctccgctcgggcatgggcatgcagatcgactcggtacgcccatacctgcggaatggaatgcccatagcaatcgggcgcgcaggtgcggttatctcgcactttgctgacggggacgcacacctggcgctccgcaccatcgccgagttcccctgtcccgaacaagacaacctgccggcggcgaacatgcgacagatcgcactggcggcgctgagcggggctggagcgagttcggagccgggcaatcctggcggcgaacctgtatccggaccgggtaatgccggcgagcgaccccaccccgcgccgggatcgggcgacagcaaactggccgaaagcctccaaactctggtgcgctggcttgatcgcgtggcaatcgaggacggctacgtcggcgtgccggtgatcgaggccgtcgaggtggtggtcaccgagatgaagcgccagcaacaaccagtcgatccggccttctgccgctgcaaccactggttcgccggggacagcgtcgaagcggccttcattcgccagcatggccagtgccaggactgcgtcgagatggaccagatactggagcgggaagtgcaggccgagaacgccaagcgctacctgtggctgcgcaacacggctctctacgcatcggacctggccctcgaggtcaaccgcatggacaagagcgtcgtcaacctgctcccacgggacaaggacggcaacctcctggcagaggctgatctggacgaggccatcgatgctgccatggcgaaatggtgggccgaggttctgtgcgcaggcgttgacgtcgctaccgaccgcgtggaactgaccattcacaattggaccgcgccgccggaaggcggtgacgcatga

SEQ ID NO: 330063 - DNA, 231 bp, Pseudomonas aeruginosa
atgaaacgagcagccgttgtaaccgaactgccggccagcaccagccgggacatggacaagttcgttgtccgactgccggacggactgagggccgaggtggaagctgaagccaagcgagactcgcgcagcatgaactccctgatcgtcgttgccctgcgcgagtacctgcatggtcagcaacagaagcgggctctgctcaatgcgttgaccaaggcagcagggagcaactga

SEQ ID NO: 330064 - DNA, 501 bp, Pseudomonas aeruginosa
gtgaacaacgtcattccgttccgctaccgcggcgagcttgtgagcttcaatagcgctggctggatcaatgccactgaggtggcgaggcgcttcggcaaaagacccatcaagtggttggagctgccgagcacgaagagctacatggccgccctcgaaaggcatctctgcaatgaagtccgaaaatcggacttcaaactcgttgagacagtacgcgggcgcggtgccgcgacctggctccatccgaagctcgccgtcgcgtttgcccgctggctcgatgatgacttcgctgtctggtgcgacctccagatagatgcgctgctgcgcggcgaggagtcggcgctggcgcaattcaatcgggtctgcttggcctatgaccagggcgccgcgttagccagcgctcacggtaccggcctttccctctggaagcatgaaaagcctcggctgcttggcgctgtcgagcgcgttcggtcgcttctgcaaatgaccttggccttggagtag

SEQ ID NO: 330065 - DNA, 351 bp, Pseudomonas aeruginosa
atgcaacagaaaactcaacgcgcgcaagtcccctgcgccgttaccaccgaccaccaggtttgcttcgatcctctcaacggggatgagttcttgttctccattgttgccgaccggccggttgacgcggatctggccgccgccgaggacatcagcgaggcggttcacctgattctattgagaatgacccgggcgatggacgatgccgacgagccgctgctctctcaggaactcaatactctcgccctgctgggggccatgtctggcgcattgctcagagcttgccgggccggtgtcgcgacccaatccggaaatcctgaaagcgtgtcgcgacacgcaggcggtgcagcatga

SEQ ID NO: 330066 - DNA, 279 bp, Pseudomonas aeruginosa
atgagcgcggtctggaacaagccccagtcgtctgcactgaaggctccgatatctcagcttccgccgcggagattcgcagcgattaacccgaccacgacggtcgaagaggcgttgagcgaggccatcgcgctgacgctaagtgtttctagcattctcggagcactgaccacctccgatgaagagcacgcgtgcttgtatgccctggagattgctgcagagatggctggcgacttggttgacgccgcgctcgactccctgcgtgaggagggccagcaatga

SEQ ID NO: 330067 - DNA, 234 bp, Pseudomonas aeruginosa; identical to SEQ ID NO: 327137

SEQ ID NO: 330068 - DNA, 492 bp, Pseudomonas aeruginosa; identical to SEQ ID NO: 328607

SEQ ID NO: 330069 - DNA, 621 bp, Pseudomonas aeruginosa
atgaagatcaccgcagatcaactcgaccgcgctaccggctgcggtgcttctactgccggcctctgggtcgagcacatcaacggctccatggcccgcttcgagatcaacacgcccgagcgtgtggcgatgttccttgctcaggtcggacacgaaagccagagcctcaagcgcctggtggagaatctgaactactccgccgaaggcctgctcaagacctggccgacgcgttttacggcggttgaggcgaagcagtacgcccgacagcctgagcgcattgccaaccgcgtctacgcaaaccggatgggcaacgggtcgccagactcgggcgatgggtatcgataccgtggccgcggcctgatcatgattacgggccacgacaactacgccgaagccgcccgcgccctggcgctgccgctggtggcgcagcctgaactgctggagcaacggacctgggcagcaattgccgcgggttggttctggcagtcgcggggtttaaacgacctggctgaccaaggccgattcgagcggatcactctgaagatcaacggcggctacaacggtgctgaggatcgagtggcgcgtctcgaatgggcgcgcgcagcgctggcgggttcgttatga

SEQ ID NO: 330070 - DNA, 744 bp, Pseudomonas aeruginosa
atgatcagcatcaagccagaagggttccagcagcagctcgccgccctgactgagcttgagcagcggcagattccttacgcgacagccactgcgcttacgcggacagcgcaaggcctgatggatcgattgcgcgatgagatgcgtgtcgtgttcgaccgcccgaccccgtacaccatgaacagcctgcgcatggtgccagccaggaaagaccggctcgaagcgcgggtttggttcaaggacgaggcggacggtgcgcaggctgcatcggtgtggattgcccccgaggtctacggtgggccgcgtcgaaacaagccggccgagcttcagctcagggccaaggggatcctgcccgaaggtaagtacgtgttacccggcgccggtgctgatcttgatcgctacgggaatatcaagcggggtcaagtgaccagagcgctgagcggtattcggggcttcactcaggccgggtacaacgcgaacgcgaccgatagcagacggagcagggcgaagggtaatgctcgccgctacttcgtgatgacccgcaagggccagcccattggcattgctgagcgcacaggccgaggccgggatgccgtctcgatcatcatggccttcgtgtctcgtccttcgtatcgccgccggctgagcttcttcgagatcgcgcagcagtacgccgacgagaacctgtcgcgtgagttcgaggcggcgatgcgcggcgttgctgctcggttcgccgcgaggcgctga

SEQ ID NO: 330071 - DNA, 1368 bp, Pseudomonas aeruginosa
atgaaccagtcagtatcctcgctgccagaaaaagacattcagtatcaactgcacccctacaccaatgctcgccttcatcaggagcttggcccgctgatcatcgagcgcggggagggtatctatgtttatgacgatcagggcaagggttatatcgaggcgatggctgggttgtggagcgccgcgcttggctttagcaatcaacgtctgatcaaggcagctgagcagcaattcaacaccctgccgttttatcacctgttcagtcacaaatcgcatcgcccgagtatcgagttagccgaaaagctgatcgagatggcgccggtgcctatgagtaaggtgttcttcaccaactccggttccgaggctaacgatactgtagtgaagatggtctggtacctcaataacgctctaggcaaaccagccaagaagaagttcatcagtcgggtcaacggctaccacggcatcaccgtcgccagcgcaagcttgactggccttccaggcaaccagcgcggtttcgacctgccgcttccaggcttcctgcatgtcggctgcccgcaccattatcgtttcgcccttgccggtgaaagtgaagagcatttcgctgaccgccttgccgtcgagctcgagcagaagattctcgccgaaggcccggagactatcgcagcgttcattggcgagccattgatgggcgctggcggtgtcatagtgccgcctcgtacctactgggagaagatccagaaagtttgccgtaagtacgacatcctggttatcgccgatgaggtaatctgtggatttgggcgtaccgggcagatgtttggcagccagacctttggtatccagccggacatcatggtgttatccaagcaactgtcatcttcttatcagccgatagcggcgattctgatcaatgccccagtatttgagggcatcgctgatcagagccaagcgcttggcgcgcttgggcatgggttcaccggcagcggtcatccggtagctactgccgtggccttggagaacctgaagattattgaagaggagagcctggtcgagcatgcggcgcaaatgggccagttgttgcgcagcggcctacagcatttcatcgatcatcccttggtgggcgaaattcgcggttgtggactgatcgctgcggtagaactagttggcgatcgcgtgagcaaggcgccgtatcaggcgctaggcaccctcggacgctacatggccggcagagcccaggaacacggcatgattactcgcgccatgggtgatgccgtggccttctgcccgccgttaatcgtcaacgaacaggaagtcggaatgattgtagagcgctttgccagggcgctggacgacaccactcagtgggttggttag

SEQ ID NO: 330072 - DNA, 1452 bp, Pseudomonas aeruginosa
atgcaactcaaagatacccaattgttccgccaacaggcttatatcgacggaacctggttggacgcggacagcggccagaccattcaggtcaccaatccggccaccaacgaagttatgggtagtgtgccgaagatgggggcagcggaaacccgtcgagccatcgaagcagcagatcatgccctgccagcctggcgtgcactgacagctaaagaccgcgccaacaaactgcgccgctggtttgaactgatgattgaaaaccaggacgacctgggtcgtctcatgaccatggagcaaggtaagccacttgccgaagccaagggcgaaattgctttcgcggcgtccttccttgagtggttcgccgaagaagccaagcgcgtgtatggcgacgtaattcccggccaccaaccggacaaacgcctgatcgtgatcaaacagcccatcggcgtaacggcagcgattacaccctggaacttcccggcagccatgatcacccgtaaagccggcccggccctggccgccggttgtaccatggtgctcaagccagcgtcgcaaacgccttattcggcgctggcgttggcagtgctggccgagcgtgccgggatccccaaaggcgtgttcagtgtaatcactggcagtgctggcgaagtcggcagcgaactgactagcaacccgatcgtgcgcaagttgagctttactggctccaccgaaattggtcgccagctaatggccgaatgtgccaaggacattaaaaaggtgtcgctagaactgggcggaaacgcgccgttcatcgtattcgatgatgccgaccttgataaggcagtggaaggcgcactgatctccaaataccgcaacaatggccagacctgcgtgtgcgccaaccgcctgtatatccaagacggcgtatacgatgccttcgccgagaagctgaaaatcgcggtagctaagttgcagattggtaacggtttggacgaaggtatcaccaccggccctctgatcgatgccaaggcggtggccaaggtccaggagcacattgccgacgccattagcaagggtgccaagctactcgctggtggtaagccgcacgccctcggtggcactttcttcgagccgagcatcctcattgacgtaccgaataacgccgccgtagccaaggaagaaaccttcggtccgctggcgccgctgttccgttttaaggacgaggccgacgtgatcgcgatgtccaatgacaccgagttcggcctggcctcgtacttctatgcccgcgatatggggcgcgtgttccgtgtggccgaagccctagaatacggtatggtcggcgtcaatactgggctgatctccaatgaagttgcgcctttcggtggtatcaaggcatccggcctgggtcgcgaaggatccaagtacggcattgaggattacctggagatcaagtacctctgcctgggtggtatctaa

SEQ ID NO: 330073 - DNA, 909 bp, Pseudomonas aeruginosa
atgattctcgccctggtcgctctcagcctcgacctgttggtgggcgtgaccggcatggtcagcctggcccaggcggccttcttcggcatcgccggctacagcctggtgttgttcgccccggagttcgaggcggtgaacttctggctggcgctgctgctgtgcctgggcgtcagcgccgcagctgcgctgctgatgggcctgctgatcatccgcacctcgggcatcttcttcatcatggcgaccatcgccttctcgcagatgctctattacctgttccacgactcggccttcgccggcggctcggacggcatctacctgttcctcaagcccgaggtggccatcgccggggtgcatctgctcgacctggagaacccgcgcagcctgttctacctggtgctcggctccctggtgctggtctatctgctgctgcgcaccttcctgcgcgcgccgttcggccgggtgctgctgggcatcaagcacaacgaggaacgggtccgttccatgggctacaacccgctgttctacaagctggcggccttcgtcattgccggcaccatcgccggctacgccggcatgctctcggccacccaatacggtttcgtcagccccgaccaggtcggctggcagctctcggcccacgccctggtgatggtcatcctcggtggcatgggcagcctgttcggcgccatcttcggcgccttcgccttcgagggcctgcaccatctgttcgccggcctgaccccgcactgggagctgcccatggggctggtggtcatcgccatggttctgttgctgccgcgcggtctcgccgggttgctgctgcagctctgcgaccggcgcacagccacggcctgcgacgcaagtacggtatccacccccgacgcgatgaagaaggaggccggcgtatga

SEQ ID NO: 330074 - DNA, 759 bp, Pseudomonas aeruginosa
atgaccgcccatgttctagaaacccgcggactgagcaaggccttcggcggcctgcgtgcggtcaacgacatttccctgagcgtggcgccctgcgaggtacacgcgatcatcggccccaacggcgccggcaagagcaccatggtcaatctgctgtccggccatcttcagcccagcgccgggcagatcctctttcacggccgcgacatcaccggcttggcgcccaaccgggtgtcgcacctgggcatcggccgcagcttccagcgcaccaacatctttcccagcttcacctgcctggaaaactgctggctggcggcgcagtcgcggctgaagaactcctttcgtttcttccgccgctgcgaggcctatgtcgaggtacgcgagcgcgccgaacgggcgctggagctttgcggcctggccgcccaccgcgacaccctggccgatgccctgagttatggcgagcaacgccaactggagatcggcatggtactggccaccgagccgagcttcctgctgctcgacgaacccatggccggcatgggcaaggacgaatcggcgcgggtggtcgaactgctcgccagactgtcgcagcagtacgccatggtcctggtcgagcacgacatggatgcggtgttcagcatcgcccaccgtctcaccgtgatggtcaacggcgagctgctggccagtggcccgctggaccaggtgcgcaacgatccggcggtacagcaggcctatctgggcgacggcgaggagcaattctga

SEQ ID NO: 330075 - DNA, 717 bp, Pseudomonas aeruginosa
atgagcgcacaagccctggtgcaggccaccggcctgcacacctattacggcaacagtcatgtgctgcatggcgtcgacctgcagatccagccgggcgagaccctggcgctgatgggccgcaacggcatgggcaagagcaccaccattcgctcgttgctcggcctgacgccggcgcgccgcggcgaggtgctgatccgcggcgagcgctgcagcggccgcgccacccaccagatcatccgccgcggtatcggctatgtgccagagggccgcggcatgttccccaacctgagcgtgcgcgagagcctgatcatggccgcccgcccgggcctggacgggcgccgcgactggaacctggagcgggtgctggcgaccttcccgcgcctggccgagcgcttctcccacctgagcggcaacctttccggcggcgagcagcagatggtcgccatcggccgcgcgttgctgaccaaccccgaactgatgatcctcgacgaggccaccgagggcctggcgcccttgatccgcaaggagatctgggacgtgatccgcctgatcaaggccagcggtatcgccactctggtggtggacaagaacgtcaacgtgctgctcgacctgaccgaccgcagcatgatcatggtcaagggacgggtggtgttcgacgggcccagcgtcgagctgaagtgccagccgcagatcctccaggaacatattggcctgtga

SEQ ID NO: 330076 - DNA, 915 bp, Pseudomonas aeruginosa
atgaacgagaagaccgacgcccctgcccgaaactggcagaagccgctggcggcgttgctgcaagcgacggcggcgctggccgcagccggcctgctgctgttggacagcggcctgcacggcccactggcggccctggcgctggccggcgtcgccctggccggcctgctctaccacaggttgccgccgatcctggtcgagttgccgccaccagcgccagcgccagcgccgccaccggcgcctgagcctgaaccgccggtgctgctggcggcgcctgctcccgagccgccttccgaccctggcctgccgctacgcgcacccctggcgaagttgctcgagagcatcctgcgcaccgagcaggacatgctcttcgccactgaactggcgcgcgcgggcggagaaaaggtgcagttcagcgccgccagcatccaggcctgcgaggcggcgatccgcgagctggccggctacatgggcaccatcgatcaggtattcgacgaactgtcgcaacagtcgatgcgcatcggcgccatcgtcggcagcatccaggacatcgccaagcagaccaacctgctggcgctcaacgcggccatcgaggcggcccgcgccggtgagcatggccgcggcttcgccgtagtcgccgacgaagtgcgtcacctggcccagcgcgccaacgagtccagcggcgagatccagcagatcgccggcagcctgcagaagtcggcgcaggaggcgcggacgggagtcgaacacatcggccagtccaccagcaccggcctggagaagtccgccgcggccctgggcgccatggcagagatgcgtgccggcgccgcggtgcggctggagacggtcgagcgcatcgttcggcgcctgaatgagcagcgcaccttgacccaggacatggtcgagctgctgggttag

SEQ ID NO: 330077 - DNA, 1452 bp, Pseudomonas aeruginosa
atgagtgcacaactggtaatcgacaatatcaagctggacgctaccggaggcaagacgatccaacggcttgaccctgtgtccgccaaactggtcagcactgcggctgcctgcaccctggaagacgcaaaacggctcgcggcctcatccgagcgagcattccgcaaatggtccaagaccggaccgaccgagcggcgtcgtctcctgctcgcagcagcggatgtcctcgaggccaagatgtcggaattctgccggatcatggctgaggaaattggcgcatcgcagctctgggcgcagttcaacgtaggtgcatcggcgaatctgctgcgcgaggctgcagcgctcactactcaaatcaagggtgagacgattccaaccgataagcttggcgctttctcgttgacgcttcgccagccggtgggcaccgtgctgagcattgtgccgtggaatgggccggtgatcctgggggctcgcgctatcgcgtatccgctggcgtgcggcaataccgtgatcttcaaaggctcggaaaacagtcctcgcactcatgcccttgtggccgatgccttcattgaggcaggcctgccggcgggtgtgctcaatttcctgattaccgcgcccgaagacgcatcggctgtcaccgaagcgttggtggcccacgataccgtgcgccgggtcaacttcacgggctccaccaaggtcggccgcatgatcgccgaaacctgtgcgtcccatctcaagcgctgtttgttggagttgggtggcaaggctcctttcgtagtgctggaggatgccgatatcgacggcgcagtgaatgccgcagtattcggctcgttcctgtatcaagggcaaatctgcatgtcgaccgagcgtttcgtggtcgatcagcgtgttgccgacgaattcgtgagtaagttttccgagcgaatcggcaaactggagcttggcgaccccaccgcatctccgacctgcgtagtcggaccggtcatcgcccagggctcggtaaagcggatcaaccatctgatcgaagatgcgctcggcaaaggggctgtcatcgccgcgggcggtatcgccgacagtgccttgatgcagcccacgctagtcgaccgcgtgaccaaggacatggaaatctacgacgaggaaacctttggtcctattaccacgatcgttcgtgtcgacggggcagaggaggcgttggaagtggccaatgacacggcttatggcctctcatctgcaattttcagcgccaatgtctccaaagcgcttgagctggcaagtcggttggatgcaggttgtgtccacatcaacggcgccaccgtacaaaacgaagcgcaggccccctatggtggtatgaagcagagtggatacggccgtttcgatggaagcgctgtgattgacgagttcacagaaatcaagtgggtcactgttgagccatctgatcagccttatcccttctga

SEQ ID NO: 330078 - DNA, 1077 bp, Pseudomonas aeruginosa
atgtctactgaaccctccgcggcggcacacacacttgccgaaagggccacagcgccccgtttgtcactgggcaagaacgacctgcgccagtgtctgcgcatcgccactggcggcagtctggcctttgtcctgtgcaagctgttcgacctgcagtacggtgccttcttctgcgtctatccgatgctactgctcggcctggtgccgcgcctgactgcccacctgatgcgccagttcttcacccagggactggtcgtcagcctggaggtcgcgttgctctacggtctgttcggcggccgaccgctgctgatgattccgctggtgttcttgctgtttctctaccgtttcgcgctgatggccagcggcccgaacttcctgttcggcgccctcggcgcagtatttctgtcgatccagctgaacttcgccagctacccgcacaccgacgtcatcgccatgcttgggagcaatggcctggccatcgtgctggccgcagcgatcgccgtgctgatgttctacctgtttcccgactgcgagccgcgccccgcacgcacgccgccgcccaaagaccgcgccagtcggcgccacgaggcactgctcggggcaacggtggcgacgctgtcgttcagcgtattccagtgcctggatctgcaggactcgctgtcggctcaggtcgccagcatcctgctgttgtttcccatgcactggaacggctcacgcttcgccggccgtacccgtgcgcatggcaccctgctcggctgcgtgattgccctgctgatcatgctgctgctctatgatcaccacgacctactgccgctggtcgccctgctgctatggatcgccgccatggtctgcgcgcgctggcacatgctggaaaagggggtgcccggcgtcggcttcggcgctttgaccaccctggccatcctgttcggccagtcgcttacgcccagccacgacatcatatttgcgaccctctaccggctgagttcggtgtgtgtctcggtgctgttgaccctgttcgtcgtgttcatggtgcaccgcttgctcaaccgctttgtcactactcgccacagcagccattga

SEQ ID NO: 330079 - DNA, 1062 bp, Pseudomonas aeruginosa
atgactcccgatcaacgatttgcccgctgggttcaaatcgctatctcggccctagcctgttgcttcatctacttcctaaccgccgacctgagcatgccgttgacaccacaggcgcagttgacccgaccggtactgaaggtcgcgccgcgggtcgcaggccaggtcagtgagctggcggtgagcaataaccagtacgtacaacctggccagttactgtttcgcctcgatccgcagccattcgagctggaggtgcagcgggccgagttggcgctcgaacaggcacaccaggacaacactgaactcgatgccctgctggccgccgcccgtgccgaggtcagcgcggcccaagccaagtcgaacgagtcgggcgctcaggccctacgcctgtcgcgcctgctcgaacgccagcatgtctcgcgccaggcctacgatgcggccgaagcgcagcatctgatggcccaggcccaactgcgtacggcgcaggccagagtccgtgaactgcaggcccgtcgcggcggcgccgacggtgccaatctacggctacgccaagcccgcaatgcactgctccgggcgcacctgcagcgggactacagcgaggttcgcgccgaacgtggcggcgtgctcagcaacctgcagctcacccccggcaccttcgtcgcggcaggaacgccggtggccgctctggtcgaggaccgcctggacatcatcgccgacttccgcgagaagtccctgcgctacatcggcgtcgacaccccagccgtggtcgtattcgacgcccgtccaggcgagctgttcagcgcccgggtcagtcatttcgacgccggagtccgggaaggccagatcgatgccaacggcgagctggcaacgcccgcgcaatccgagcgctgggttcgcgacgcgcaacgacaacgcgtgcacctggcactcgatgaagagctgccgttcctgctgcccaccggggctaaggccacggttcagctgaagcccttcgacaacccgctggtgaacctcgccgctacgctgcagatccgcctgatcagttggttgcactatgtctactga

SEQ ID NO: 330080 - DNA, 936 bp, Pseudomonas aeruginosa
atggatgtttttcaggcaatgcgggtgtttactcgcgtggtggacgcgggcaccttcacggctgctgcacagacgctgggcttgtccaccgcgcaggtgtcgcggcaggtgtccgaactcgaaagtcatctgcaggcacgcctactgcaacgtaccacccgccggctggggctgaccgaggtaggcagccgttacctggagcgctgtcggcatattctcagcgagctggaagacgctggcgccgaggccggtggtgcctacctgatgcccagggggcgcctgcgggtgcacgcgatcaccggtttgggcacccatctacttgcacccttggccgcccgctatagcgagctctacccggaagtgaaccttgagctgacgctctcccagcgccaccctgacctgctcgaggaggggcaggatgtggtcattactctggcccgggagttgcccgactccgaactggtcgctcaactgctcggcactacctacagcgtggtctgtgcggcgccgagctacctggggcagcacggtattccgatgactctcgacgagctgagccagcatcgctgcctgcgcctgctcgacccggtttttggcgacagctggacctttaccgacaacggcgtcgagcgggcgatccgtctgggagaaacatttcaggtcaacgtcgccgaggcgatggcccaggcggcaggagagggtatgggtatttgcgtactgccggacctgatagcggccaaggccttcgcacagggccgactggtacgcctgctggccgaacatcgcctgcacgagcggggtatctatgcgctgtacccgtcgcggcgctttctcgatgccaaggtgagaacctgggtggagttcctcaaggagcaattacccctggtattccgcggtaatcgaaccctggtggaaaaccccacctattgggcgtga

SEQ ID NO: 330081 - DNA, 228 bp, Pseudomonas aeruginosa
atgaaagcaagatactggatgatcggcgtgacacttgtcgctcagtgggcagtcgccgacgatgcgcagccataccattatggccaggccatggatgtcgccagggtcatttcgatcgagatgcctcagggctgtgaggtgggcgaggcgaccatggtctatgaggattcacacggcgagatccataccctggtgtatctgcgccagggcgagagctgcgtgtattga

SEQ ID NO: 330082 - DNA, 903 bp, Pseudomonas aeruginosa
atggacctgcgcgacctggatctgaacctgctagtggtgttcaaccagttgctgatcgaccgccgcgtctccaccgccgcggaaagcctgggtctgacccagcccaccgtgagcaacgccctcaggcgcctgcgtacagccctgcaggacgacctgttcgtgcgtacctatcagggtatggagcctaccccctacgcccagcaacttgctgagccagtgtcgctggccatccataccctgcgcgaggcgctgagtcgccaagacagtttcgacccgctaaccagcgaacgcaccttcaccatcgcgatgaccgatatcggtgaaatctacttcaccccgcgcctgatggatgccctctcccgcctggcaccaggctgccgcatcagtaccgtgcgcaacacctccgtatccctgatcgaggcgctgcagagcggcaccgtcgacctcgccgtaggcctgctgccacacctgcaggcaggcttcttcactcgccgtctgttccatcatcgttacgtatgcatgtgtcgcaaggaccaccccgtcaccagcgagccgctcacgctggagcgcttctgcgctcacggtcatgtgcgggtcatcgccgccaccaccggccacggcgaagtggacgcacacatggcgcgtctggggatagagcgggacatccgtctcgaagtgccgcacttcgtcgctgtgggccatattctccagcgcaccgatctgctggccacggtacccgagcgctttgccgagtgctgcgtccagcccttcggtttggtggccctgccccaccccgtgcagctaccggaaatcgatatcaacctgttctggcacgccaagtatcaccgagactccgccaaccgctggctcaggcaactgatgttcgagctatttgcggactga

SEQ ID NO: 330083 - DNA, 1290 bp, Pseudomonas aeruginosa
atgatcaccaagcctgccctgcgtatcggcatcatcggcggcggtatttccggcgtcgccctggcactggatctgtgccgccattcccatctcgacgtccagctcttcgaatccgcaccggccttcggtgaggtgggagcgggcgtttccttcggtgctaacgcggtgcgagccattgccggtctcggcattgcagagccttacgcccaggttgccgatcgcacccccgagccctggcaggacgtgtggttcgaatggcgccgcagcgtcgacgccggttacattggcgcgagcgtggctcctggcgtggggcagtcttcggtgcaccgggcggatttcctcgacgtgctcgccagccgactgccggagggcattgcccgattcaataagcgcgccgtgggcgtggagcagcacggcgatgaggcctgtgtgcgctttaccgacggtagtgaatatcgcggtgacttgctgatcgccgccgatggcatcaaatcggctattcgtggccatgtcctcgagggtatcggggccccgcccgccgtgccgcgcttcagtggtacctgcgcctaccgtggcatgatcgatagcctgcacctgcgcgaggcctaccgtgccgctggcgttgacgagcacttggtggacgtgccgcagatgtacctgggcctggatggccacatccttacctttccggttaagcgggggcgcatcatcaacgtggtggccttcgtatctgaccgcagtcagcccgcgcccacctggcccgagaattcgccctgggttcgtcaggccagccagcgtgagatgctcgacgccttcgtcggctggggcgatgctgcgcgaatcctgctggagtgcattccctcgccaacctactgggctctgcacgacctcgccgagctacctggttatgtccacggccgtgtggcgctgatcggcgatgccgcccacgcgatgctgccgcaccagggcgccggggcagggcaggggctcgaggacgcctacttcctcgcccgcctgctgggagatgttcaggtgagtcgcggcaacctcgatgagttgctggctgcctacgacgccttgcgccgcccgcgtgcctgccgcgtgcagcgtacctcctgggaagccggtgaactttacgaactgcgtgacccggcagtgggtgatgacaaacaggcgctgggagctaccttggctagccgcttcgactggttgtggaaccacgacctcgacgctgacgtgcgagatgcccgcgctcgactaggttggacagccctgagccactgcgcctag

SEQ ID NO: 330084 - DNA, 1347 bp, Pseudomonas aeruginosa
atgcgtgatatcgacgtttccgccctgcttgacggggcccgcttcaatacctttcacgggcgcgtgctgttctggtgcgcgctgatcattatcttcgatggctatgatctggttatctacggcgtggtgctgccgtcgctgatgcaagcctggaacctctctgcgctgcaggccggtctgctaggcagctgcgcattggtgggcatgatgctcggtgcactgttcttcggcccactgtcggaccggatcgggcgccgcaagaccatcatgacctgtgtggtcctgttcagcggttttaccgtgatcaacggattcgcgcgcactcccgaggagtttgccatttgccgctttttcgccgggcttggtatcggtggggtgatgcccaatgtggtggcgctgatgaacgagtacgcgccgaagaaaatccgcagcaccctggtggcgatcatgttcagcggttactcggtggggggcatgctctctgcgggtctgggcatggcgttgatgcccagctggggctggcaatcggtgttcttcgtggcggttgtaccgctgctggtgctgccgttgctggtgcgccagctgccggagtcgttgaacttcctgctgcgccagggggaggtcgaacgcgccaaagagctgctggccagggcagagcccgactacgtgcccaaaatgcacgaccggctcaatctggcaaaggggcaggcgggcaaggtggccatctcccagttgttccaggatggtcgcgcactgaaaacgctgatgctctgggtggccttcttctgctgcctgctgatggtctacgccctgagttcctggctgccgaagcttatgaacgctgccggctacggcctcaactccagcctggcgttcctgctggtgctgaacttcggcgccatcttcggggcaatcggcggcggctggctgggagatcgcataggcctgggtcgggtactcctggcgttcttcgccaccggtgcgctgtcgctgagtctattggcgctgaagtcaccgctgccggtgctctacctgctgatcggcgtggccggggcctgcactatcggtacgcagatcctcgccaatgcctgcgccgtgcaattttaccccgcgcatatccgctccactggtctgggctgggcgatgggaattggccgtattggcgccatcatcggcccgttgctgggcggagctttgcacgccgcgcaactgccgttgcaggcgagctttctggcgttcgcgctgccggggctggtgggcgccgccgccattatgggttttctctggcaccggccgggtcaggtctgcacgctgatggagaaacctctggaatcgactgccggctga

SEQ ID NO: 330085 - DNA, 1293 bp, Pseudomonas aeruginosa
atgtcgcagcatccccagccgcttttcgagacctttgatcgcttccacgaactcaactttcttcacctcaatggcgagcttccagcggttcgggacttcctccatggttgtgccgatgagctccaggccgtcgagggctatcgcgccgttcggggatttctgaagtcctacgccggcaacgaagccacgttcaactcctatcgaacccacgtcgagcggctgctgctctggtccctactggtggctgtcaagccccttgttgaactgcgtcgccgggacgccgaggccttcatggagttctgcctcaacccgcccgccgactggataggtccggtcgtaaagtcccgcttcctgcgcgtgggtggtcgcaagaagctcgacacggacacctacatcgtcaatttgcaatggcgacctttcagtcacactgtggccaagcgcgaacgcaagattgccgaagaggccgttgccgcccttccctcccgtccctaccgcttgtcccagggatcggtggctcaggtattcgcagtctgcggcagcttcttccaacacgcgattgatgagggtctcaccgaggtgaaccccttccgggcggtaaaacagaaatccatctacaagcaacgcaacaccttggatgtggcgtcacgttccctgactccgctgcagtggagctacgtgatcgagactgccgagcagatggccgcgaccgacccgacacacgaacgcactctgttcatcgttgcgactctgttctccatgtacctgcgagtctccgatctggtcgggcgtgacaactggacgcctaccatgggcgacatccgccgcgatagcatgggcaactggtggtttcatgtggtgggcaaaggcaacaaggccgccaagatcagcatccgcgacgaatacatccagaactacctgatacgctatcgccagcatttacagctctccccccagccatctgcccacgagaaaacaccgttgatcagttccctgaaggggcgtggtgggctatctgatcgacatattcgcctgctgctccaagggctatttgatcgcgctatggggcgtatggctgaggaaggctggagcgatgacgaaatagaccagttgcgttcagcttcactgcattggttacgccacacctccgcaacctttgatgcaccatatcgagagatgaaggacctccaggctgaccttcgtcacaatagtctcagcactacccaaaatacgtactacaactcgctggacgaacaacgggcacactcggtgaaaagccttccaatcagacgttag

SEQ ID NO: 330086 - DNA, 1176 bp, Pseudomonas aeruginosa
atgtcaaaagtcatagaccctcggcctgtccttgctggtcccgaaagtatgtctctcgatctcgggctgtactacgctcgctacccctgcatcgaagccttcctcagtagtctctccgctaatcttgatgtagaaacggacttaaaatgcgctatccgctttcttgcatatcatagtcacccgcttggaacctttaataattaccgaacattcgttgaacgtttgctcctatggagctggattgtcgccgaaaaaactgtactgacactagataaagagacgtttacgaattttattactttttgcaagatgccaccttcaaattgggttggattttctacaaccgctagattcgctcaagtcgatggtaattcggttttcaatgaatcatggcggcctttcaatattcgagcatctaaagatgtaggggcgcgcagccctaaagtggaaaccttgcgtttcattcgtagcgtttgtagttcattttatggttttctctgcgaggaagatgtgatagcgataaatccagctatatcatcacgaactttctatggaagaggaatgcgcgctacttaccctgtggaacgatatttaacttccgagcaattaggtcaggttctgcaagcgctagaatttcatgcgctgggtgatcctgctggtgagcgtgctctttttataatagcagcaacgactcttatgtgtttgcatgctgcagaccttgcaaatgctgataactactgcccatgcatgaattgctttgttctagacgatgccagatggtggttgatactagaggcgccaggtcggctgctaaggaaagttgaagtcactccagagttcctgccctacttgagacgctatcgaaaaagccgaggactacccccgttcccagagcagaacgaagaaatccctatcttggaggctagtcacgggcgccccggtctttccgtgcgacaaatacgaagcattgttaaagaagcgcttatgaaagctcatgcaagcattacttctacagacaaaggcggtgagcactggaatatcctgcttggtggcagtatgcgttttttgaaagaaagcggcgcaaagattcgtgcgcaaagcttccgccctgccgagttgcagaaatatctaggcattttcagcttggcttatacctatggaaggtattatggttga

SEQ ID NO: 330087 - DNA, 420 bp, Pseudomonas aeruginosa
gtgatcgaaagcgccgaactgaagctgttcttcagcggagacagcggttacttcgatggtttcgccgaaatcggccgccgctacggaccgttcgatctgaccatgctggaaaccggcgcctacaacgaacattggccgtacgtgcacatgcacccgcagcagaccctccaggctcaccgggatcttggcgggcgctggctgctgccgatccacaacggcaccttcgacctggccatgcatgcctggtacgagccgttcgaacggatactcgaactggccaccgaacacggcgtacgggtttccacgccgatgatgggcgagcggatcgacctgcaagcaccgcatgccggccgacgctggtggcgcgaagtggtcgacagcgaaacgcaggtgcagggttacggctgttgcagaagctag

SEQ ID NO: 330088 - DNA, 1098 bp, Pseudomonas aeruginosa
atggcactcaacacgatcgacgaactgatcgaagacatccgccaaggcaagatggtcatcctgatggatgacgaggaccgcgagaacgaaggcgacctgatcatggccgccgaatgcgtccgcaccgaagacatcaacttcatggtcaagcatgcccgcggcctggtctgcatgccgatgacccgcgagcgttgcgagcgcctcggcctgccgctgatggtgcagcgcaacggctccggcttcggcaccaagttcactgtctccatcgaggccgccgagggcgtcaccaccggcatctccgccgcggaccgcgcccgcaccgtgcaggctgcggcggcgaagaacgccgtggccgccgacatcgtcagccccggccacatcttcccgctgatggcccagccgggcggtaccctggctcgcgccgggcacaccgaggcggcctgcgacctggcgcggatggccgggttcgagccgtccggggtgatctgcgaggtgatgaacgacgacggcagcatggctcgccggcccgaactggaggcgttcgccgccgagcacgggatcaagatcggcaccatcgccgacctgatccactaccggctgatccacgagcgcaccgtcgagcgcatcgccgagcagccgctggacagcgaactgggccacttcaacctgatcacctaccgcgactcggtggagggcgacgtgcacctggcgctgaccctcggcaaggtctgcgcggaagagccgaccttggtccgcgtgcataacatggacccgctgcgcgacctgctgcaggtcaaccaaccgggccgctggagcctgcgcgcggcgatgaccaaggtcgccgaggcgggcagcggcgtggtgctgctgctcggtcaccagatcggcggcgacgacctgctcgcccatgtccgcgagatcgcttcggcgccggctccggcgcccaaggccaccaccacctacagcaccgtcggtgccggttcgcagatcctgcgcgacctcggcgtgcgcaagatgcgcctgctgagtgcgccgatgcgcttcaatgcgatatccggtttcgacctggaagttgtagaatacctgcccgccgaataa

SEQ ID NO: 330089 - DNA, 1305 bp, Pseudomonas aeruginosa
atgcaagcgctgtacatgctggccctgtctcccatcgccgaaacccgaggcgatccgaatagctacggcttcaggatcgaacgttgtacggcagatgcgatggcgcaattgttcgtatgcctatcccagaaagcctcggcccaatgggtgctggacgcagacatcgaagggttcttcgacaacatcaaccacgaatggctgctaaggagtgctcctacggatacacggatgcttcagcaatggttaaaagctggggtcgtccacaaggggcagttacacgcaacggacgcaggtacgccacaagggggaattatctcccccgtgttagcgaatctggcactggatggtctggaaacactcctcaagcaacacctaggagtgacaagggcgaagaagctgaaggtgaatgtggtgcgatacgcggacgactttgtgattacaggtacctccccggaggtcctggaaaacgaggtgaaaccttgggtagaacagttcctcgctacacgggggctgcagttgtctgccaagaaaacacgtgtcgcccatatcgatgaaggcttcgacttcctgggatggaatttccggaaatacgaaggaacgttactgatcaagccgagcaagaaaaacgtcaaggcgttctacagcaagatcagagaggcaatcgacacccacaggacgagtaagcaagaggatctaatccgactgctgaatccgatgctgaggggttgggcgctataccaccagcccgtagtagccaagcaagcgtatagctggatggaccacagggtctttgtaaaactctggcgttgggcgaaaaggcggcaccccaacaaatcgttgcagtgggttcgacagaagtattttcggaccattgcagggaaaagttggatgttcgccaccacggttctggaggagaacggcaagaaaagggaggtcgtgctgtattccctcgcggatacaccgatcgagcggcacaagaaggtgagtggggaatacaacccctacgatcctgccatggaggcgctaggtgaaaagctgcggatggaccggatgctgaataagctgaagtaccggaaacaaatcggcagtctttacgcaagtcaaaaaggtctgtgtctgctgtgtaagcaagctatcaccagagagacgggatggcatgaccatcacataatcttccgcactcagggcggtagtgactcaatggagaatcgggtactcttgcaccccaactgccaccatcagctccacacccgtggtctgcacgtggataaaccggctcccactgggggcttaatgacggcttga

SEQ ID NO: 330090 - DNA, 957 bp, Pseudomonas aeruginosa
atggccaccgaattcggcaccgccacgaaccaccagaacctggtcgagcgcctcgtccagttcctcaccgcgaacccagacctggtcgcagctgggcaggcctacgagaaggttttcgacaacacccttcccgcgtcgggcacggccatcgccgtgcgccaggtgaccctgcgcgcccccggcctgggcggcaccgacagcatcttcatgggcatccagtcctacggcgataccgccctggactactacaacgtccggctcatgggtggcacggcgttcaatcctggagcgatcccgcccggtggcgactactggaccgcgtttgccaactacagcccgcgggtgcaactgctggcctggaaccagccgatgccttattggttcttcgctaacggccgacgcttctggatcgtcgtgaaagtctcgacgatctacgagtcggccggcgccggcttcatcctgccaccctgtccgccgtcgcagtatccgtacccgctcgctgtggttgggtcgtatcgcggggacgtcgctgtgcgctggtcagacgtcagcgaccggcaccgaggcatcagcagcccctacgagcgaagctgctatctccgcgatcccgccgggcgctggctcggtttcactgtagacggaggggctgccaacgagtccgactacaacaatcggacgctcctcccgctgggctgcggccgttatgcgggcagcagtgacaccgtggtcaaacaactgcgggattcattcgggaagttcccgctcaaggcgctgtcgttcgtcacccgcgaaaccgagggtcgccgaaacctgggcgacttcgacggcgctttctacgtgccaacgctcaactccggcgccgaggacgtgattgtcgaggacggagtggaccacgttgttttccaaaccgcctggcgctcgggcaacccctggctctacgcgatcaggaaggactga

SEQ ID NO: 330091 - DNA, 630 bp, Pseudomonas aeruginosa
atgaccgtcgatacctacgtcttgtccgatcaggtcgttttgaagaacggcaacatcatgacccagccagaagtggttgccgagctgaacagccaagcccgcgccgccctggccagggtcgcggagctgcgcaatgcactgaacaacatcgtccacgctagcgagtacacgacctccgcaacgcatcaagcagaagtggagaggatcgcgttcgccgcgctaaatggggcacaaccggccgcccaggctcagcacagcgtgccgggaaatgctgccgctctgttccgtgcagccgagctgctcgccgccgcgcccggcacggaagtgccgcaagcatggctcgacgtccaggccgagcgtcgccggcagatcaccgccgagggctggacaccggaccatgacgacctctattgcgccgccgagcttccgcgagccgcagcggcgtacatcctcagcggagccaatgacgaagctccagctatctggccgttcgtggcgaagtggtggaagccccgcgacgcgcgtgccaactacgtgcgggcagccgccctgatcctggccgagatcgagcgcctggaccgtgcggcctcactgctgagccaggaggtgccgccatgcgccgagcactga

SEQ ID NO: 330092 - DNA, 636 bp, Pseudomonas aeruginosa
atgagcctcggcaagaacccggctcacctctgcatggtcgggggcaagagcccccgccagcagatgtgggaagtcatccgggccaaccgcgaagagttcaccgtctaccgcgtggcgcgccgctccaaccagcacgacaagaccgtcgagaagtatgtcgcctgcctgcgcctgggcggctacgtcgaggcgatccgtggattcaagcgcggcgaagaagtcgttttccaactggtccgcgacaacggcgtcgaggcaccgaacctgaacgccgatggcaagccatcccagcagggctacaccaccgaggcggtctggcggacgttgcgcatcctcggtccagcgaccccggagcagatcgccgcatcggtggcggcctctggcgcgaccgtgtcgcccagcaccgttcagcgctacttcatcgatctgcagaacgccggatacctgacccgcaacggccgccactacgccctcaagccgggccgctacaccggtccacggccacccatcgttcagcgcgagacgcgccgccaggtctacgacccgaaccttgaccaggtcatgtggagttcgcacggcgagtaccagcacaaccggagccgttccaggaaaccagagcaggaggatggactatga

SEQ ID NO: 330093 - DNA, 705 bp, Pseudomonas aeruginosa
atgagcaagaaaggcgaagccacgctttcagagtcggccggcgaccttgaaagcgcaaaatttagcgagcgacttcgccaggccatcggggatcagtcggtgctggctttcgccaaaaagtgcgggatcagcgatagcctgatccgcaaatacttgagtgactcgctccctggtatggataacctagttactctggcccaagtcgccggagtctctatcgcgtggctggccactggagaagggcaaatggccccctctgcgagcgacgtcgctagcaggagcaatgacgactacgcacaggtccccctatacgacgctcgtatcagtgcggggcatggagtgtggagtgagggggctagggtgctgactcaccttgccttcactcgttacagcttgcagaagaaaggcctggatttatcgaagctgtcggccgtgcgtatacgtggggactcaatggaacccctgttagccgatggtgacgcggtggtgatcgatcatcgcttccagaaggttcaggacgaggcaatctatgtcatccgcctagacgatcatctctttgccaagcgtctacaacgccagtttgacggctcgatagcgatcatcagcgagaataaggcctataacgacatggtcgttccgaagggccagctttccgacctggacatcattgggcgcgtcatctggctgggtcgatggatggcttag

SEQ ID NO: 330094 - DNA, 231 bp, Pseudomonas aeruginosa
atgtgggtgcaaatcgcgattctggtcgcgtcgtatctgatcagcagcgctacttctgcgaaagcgccgaagccgaaaccggaggcgctgacttccgaagatcttccgcagaccgaggacggcaccggccactacgtgatcttcggcgatgtgtggatcgaggactggatcgtcctcgggaccggtcacgagcggatgcaggcagtcaaatcgaaggggtcgaagaagtga

SEQ ID NO: 330095 - DNA, 2211 bp, Pseudomonas aeruginosa
atgggcggccgtagcaaagcgcaaactgtcggctttcgctacctcatgggtattctcatgggttttgccagggggccgttggatgagctggtcgagatcaaggcaggtgatcgcactgcatggaaaggatcggtcaagagcaaccagaccatccagatcaatgccggcgaattgttcgggggagacaaggccgagggcggcatcgttgggccgctggacgtcatgttcggcgccccggaccaaccggtgaatcctcgactggcggcgatggtgggcggcctggtacctgcgttccgcggggtcaccactgctttcttcgacgggcagctctgcgcgatgaacaagtacccgaaagcctggatgagccggtggcgacgagcgctcaacggatgggacggtggaacctggtatcccgagaaagcagtgatcagcctggccggcgaccaggtgaaggcgatgaaccccgctcacatcttgttcgagtgccagaccaaccgcgactggggccgtggcaaggatcgcggcctgctggaccaggcgtcatatcgcaaggccgcagatacgttgttcgccgagggctttggtctgtgcctcaagtttcgcgtggcagacgagttggacaacttcgagcagaccgtcctcgatcacattggcgccactcagttcctttcccgctcgaccggactctggacgctgcggctgatccgtgacgactacgacgtcgcgacgctgcccgtattcgacgaggacagcgggctgctcgggatcgacgaagacagcatcacatcgctcgacggcacggcgaaccagttcgtcgtcgtgtggcacgacccgatcaccaacaccgaccggcgtgcccgtgcgaagaatgccggcgcgatccgcgcggccggcggcgtgatcacgacgacgaaggagtatccgggcctaccgaccggcgagttggccggcagggtggcggcgcgcgactgcaacgtgtcgacgtcggctatccgcaagctccagttgcggctcgatcggcgcgcctatgcgctgaaccctggcgacgtgttctgcgttcgcagccggaagcgcgggatcgaactgatcgtcctgcgggccggcaagatcgactatggcaccctcacgaagggcaccatcgccatcaccgcgctggaagacgtgttcggactgccggcagccgggacgtccgcagtccagccgccgaactggaccccgcccgaccgcaccccgcgggtcattgcgacccgccggctcatcgaggcgccgtaccgcgacctcgcggcggcactgagcgatgcggatctcgcccaactgcagcccgagacgggtgtcctcgccgtggtgggcatgcggccgtccggcctgcagatgaactacgcgctgctcagccgcgtggggtctgcaccattcgacgagcggacgtccggcgacttctgcccggtcgcgacgatctcagcagatatcggccggggcctgaccagcgtcagcgtcacgcttgtccaaggggttgaccttgacctcgtcgaggtgggctcggccgcgatgatcgatgacgagatcttccgcgtcgacgcgatcaacgccgcggccggcaccgcggtgctcgcgcggggatgtgtcgatacggtgccagcgccgcatgaggccggcgcgctgatctggttctacgaagattgggcgaccgaggacacgcgtgagtacgtgaccggcgagacagtgaacgtgaagctgctgagccgcaccagctctgcgacgctcgcagagagcctcgcgccggtcgactcgctgcgaatgaaccagcgccaggcgcggccttatgcgcctggccgggtgctggtgtgtggtgtggcgtatccgacgaagacctacggtgtgctgaccgtgtcgtgggcgcaccgcaaccggctgctgcaggccgatcagctggttgactcgtctgcgagcagcatatcgctggaagctggcacgacatacacgctgagcatctacagcggtaccagcctgaagaagtcgtacaccggcttgaccggcacgacctggacctacccgctggaggacgacatagcgcatgggctgctgccggtgctgcgcatcgtgctgttcagcgttcgcgacggtctgcagagctggcagcaacacgacatcacaatcgaacgacacggccttggcttccggctgggcgaagaactaggaggcgtttccgcatga

SEQ ID NO: 330096 - DNA, 1149 bp, Pseudomonas aeruginosa
atgagtcttacgatggggccgaacactggcctgctgatcaacggcgcccccggtgaggggcattacagcgaactgatccgcatgttgcgctgggatgacttcctgcgccaaccggtcgtcaaggggcgcgtcgccacgctgcccacaaccggccaggccgagggggacacgtacattttcaccggctcgggtgccagccagaaccgccttgccagatggtgggtggtaggcgccacggctggcacctgggagtacctcactccgaagctgggctggcgggttcaggttgcgaacgaggccacgcctgctggccaggtcaagacgtatgagttcggggccagtggctggactgagctggtgggcggaatggccgacgcgccgagcgacggcagcaactacgcgcgcaacaatggggcgtggggcaagcttgggaccgctgccggggcagatatcaacggcatgccgtttctcaatctgatgccggacagcggccgctttgcgggcaatatcaatccgctgatcttgcgcttcactggagcattttctagttcgttcctggcgccgtggaacggcgcgtcaatcgctgacggcggaaagtacatctacgacaacaccacgttcggggggacggctggcgacctgaaccagcgcgtccaagaccttatggcggccatgggccggtcgggcagcgtggcgcgctacggcgttgagttctataccgttgtgctgaccgctggccccaacgcaacgaccggctctacgggtgccgacggcacgacccgttatcttcagatgacgaactcgtcgagggcgctcttcatcgccaacggctggtgtacagctgttttctggatacgagctgaagccggatcgctacatctcatcccggcaggatttccgacaactgactacaagttgtggctgaacggggctccagtactgccgggacaggttctgaccccgagcgatggatggaagcacgtcaggatttccaaaaagagcgcgcaggggtacgacaacggtttcccgtacctctatgcggccctgggctccatcgcagctatggcttgccccgctttcttcggcggcctggtcgatcccggcatccacgtcgcgcctatcgcgaccgtcaactcacagagcgcatga

SEQ ID NO: 330097 - DNA, 225 bp, Pseudomonas aeruginosa
atgaacgagatgcttagacggagactgcgggcggagctgctagaggtcggtttcctaaaccagtgctgccttgacctgatggataccatggcgtccgaattcagcctctcgcaggatcagcaggaatgcttcgaacagctgagccgattcctgcgggagggcatcggcaagctgaccgctctgtctgagcgggtagccgatggcgatatcgtcgtgctgtgctga

SEQ ID NO: 330098 - DNA, 1683 bp, Pseudomonas aeruginosa
atgaatatgggtgaacaggctctcgtcagcatcgtcatgccgacctacaagctggagtacttcgaggacgccctcgacagcgtgctcgggcagacctatctggccctggagctgatcatctgcgacgacagcagcgacgagcggatcgccacgctggtcgagcagaagcgcgcctccgcggcattcccgatccgctacttccgcaacgagacgcgcctcggcgagctgggcagcacggcgaaaggcatccgcctggcggagggcgagtacgtcaagtttctccacgacgacgacgtgttgcttcccgaatgcgtcgaggcgttggtgggagcgatggagcgcgagccgaacgtggtcctggcctcgtcgcggcggttgcgtatcgacgaggaagggcagccgctgccggacatcctggcgacctgcttcccgttcgccggcgacgtcctgatcgacggtcgcgagctggtctcgttcctcgccgaccacaccatcaacttcatcggcgaacccagttgtctgatggcccggcgcgatgcgctgctgcagatctgcgaacgcctgatgatgctcaacggccgggccatcgactggatcggcgacctggccatgtgtgcgcagttgctacagcgtggcgacctggcgttcctgtcgcggccgctgacccgtttccgcgtctcccgccagcagttcagccaggtcgggcgcgaccagcccggtatcggcgagcagggccatgccgacttccgcctggctatccgcgaactgggttggtatcgccaggccggcgacaaccgtttcgtccgggtggcaccgatcacccgcctggacgcccgtgtcttcaagccggtcaacctgctcgccgcgctgaggcgggcggcgggcttcggtagcgtcacgctgtcgacctggctggaggcgcggcggccggatgcggtgcagaaggcgctgatcgatcgattcctgcaggagcagggcggtgggccgcgcttcgcggtactggtgctcgacacccacggcgataccgaggccgtggagcgcaccctgcagagcctggagcacgtcaattcgtatccacatgtcgagagccacctgttcgcgccgctgggcgcgagtccgcggaacggagcgatgctcttcgatcctgccgcggggccgataccgacgatcaaccaggcgcttgcccggcttgataccgactggttgctcctggtcgaagcgggcgtcgaattcactgtcagcggcctgctggtggcggcgctggacctgctggcggcaccggagagctgccaggcggtgtacgccgacgaactcatgcgcctggatgacggcgagctgggcgcggcgttgcgcccggacctgaatctcgaccttctgctcagtttccccgccggcctgtcccggcactggttgttccgccgcgagccgctgcttgccacgggcggattcgacgagaccgccggcgaggctttcgagctggcctaccagttgcgtctcgtcgagcagcggggcctgggctgtatcggacacatcagcgagccactgctgtctggcccagcgctgcgcctgcaggacagcaccgccgagcgtgcggcgatcgaaggccacctgcgtgcccgtggctacgcgcaggcgacagtcggaagccggctgccggggcgctacgagctggactacgtgtag

SEQ ID NO: 330099 - DNA, 1257 bp, Pseudomonas aeruginosa
atgtacgcgatgctcaccggggtaaccctgctcattttttcagtggttgcgaggcttctagcgcgtagcgccatacatccttcggtcgctatgccggtcacctgggggttaggccttctcggggtcagcctagcatctatgataggtttctaccctgtcgagtccgacgctctgcttattttcctcgctggtgtcctttcgttttcgctctcgtccgcgattttctctttcatctacaattcatacacttctccatatagctacaatattcttttcgatagagatcttcgagctaaatctctagtttttttcttctgtgtagcacacctattttttctcacagtaatctacagggatttgtcctctattgctcccacgcttcgtgaggcggcatatatggttcgcgcgcaatcagtttcaggggagccactacttagttctttgtctctgaactatctccagcttggtcaaacagtaatacctcttgtggtcttgctttatctgcgcggtaagtgtggggctataggtatgctttctgtttctgccccatggatggctgtaatccttctggcaagcggaaggtcgtctcttatgcagatgcttgttgggttgttctttatctatgttctggtaaagggtcgtccatccatcaagagcatttttgtaataggtatggcaatgttcttggtcattgctgttggcgcagttgcaacatctaagatccagtttcacgaaggtgatggaatctctactttgctagttgagctttaccgccacgtggctgggtatgctctgcaagggcccgttttatttgataggtactatcagggactgattcaggttgaaccgcattggtcgccttttaacgggctttgcagtatgggttatatattgggcttgtgtgagaagccgattcagcacctagatttttacgcttatgctcctggtgagcttgggaacgtatactcagtattcttctctatgtaccctcactatggtgctttaggtgttgttttcttcatggctgcttatgggatggtttgctcgtatgcatactgtaaagccaagaagggcagtctgtatttcacaattctttcctcgtacttcttttctgcaatcgtgttttccctgttcagtgaccagatatccacgtcatggtggttctacgtcaagatgacgatcatcctgggaattctgtgcttcgtattcaagcgagatcggatgttcgtgatccggattccacagaaagccaactga

SEQ ID NO: 330100 - DNA, 1608 bp, Pseudomonas aeruginosa
atgacccaactgttgcccaacggcaagcagcactttgtcgacaacaacgggcatccgctcgttggtggtcgggtctatcattactacgctgggaccaacacgccaaaagacacgtatcaggatagcgggcagacgataccaaacacaaaccccatcgttctggacgctcgaggcgaggcatcaatttatgggtctgggccatatcgccaggtattgaccacatcatctggcgttacgatttgggatcaagtcatcctagacccttcatctgctgttggtggtgacctagacgcgttcaaggctgatcttgccaacagcactgatcctctgaaaggggctggtctcgtaggattttccaacagcgctgtttacgcagacggtacggttggcgctggtattcgcgaaataaacgccaaaattggcgtgatagttaccgattacggtgcgaaaggcgatggcgttacggacgacacggcatctatccagagtgcgattgccgcagcaggggaatatagtgatgtaatattccctgagggcacatacctaatcacctctacactcacgtcgttgactggccagcgctggcttggaaggggtggtcaaagagggactaccctcaagaagggcgccaacatcgacatggtggtagtaggtacgctttccaccattcttgatatcaacctggaaggtgttggtgctacctatacaggtaaggggttccgtatcgtctctggatttagccaaacgatcactcggtgccgtgcggtaaacatgggcggtaaccccatgtggttcgatgtcgacgcaggaggcggggctaatgtgacatgctttgagggttatcccgtagatccagatgcctatgcaggaatccagattgctggtgataccggggctcatcctcgatttttccgtgggatttggctgagcggtgcaaactttgcgcttggtccaggcggtggcaatggtggaagcttgtcggagttctatattaggactttcatatttgatccgacatctacgcttttccatatttcaaatggtaggtgttccactccatctacaaccattagggggtttgaccattccatcgacggggtggcattctctgggccgttgactcttgactccgctcagggaattaactttgggccatcctgcgggataaataacaatttcaccgaagtcaactcacaatacaacgctgtctatatccagcgtaggacttacactcctacgtggagtcagtctactgctacgccatctataggaaatggcactcttaccggaaatttcgtcaggtctggtcatatgtgccacctccagcttgagcttattgcagggtcaacgaccaactttggtgatagcgcctcggcttataggttctcgctcccgtttccagcgcatctttctttcaaccagcgcggcttccctgttcgtattttcgatacgagcgctggtgcagatttcactgggtgggtgagtattgctgccggatctacagagtttacgatctctttcggcgcgcaatcagttagggcatcttcgcccatgacgtgggcaaatggggacaccttgcagtgctcattttcgtacatggttaggtag

SEQ ID NO: 330101 - DNA, 2598 bp, Pseudomonas aeruginosa
atggcgaactacgatgcttggatcgaagaggcaagcagagcgcacaacgtagaccctggccttgttcgcctgcttattgggcaggagagccgcggcgatccaaatgccgtcagcccgaagggtgcgcgggggttgggtcaactgatgccggcgacggcagcagagctaggcgttgaccctactgacccgcgtcagaacatctttggtactgcgcgctacctgtcccagcagctggacagattcggctctgtgcccctcgccctggcagcctataacgcgggtcccggaacagttgagcgagttggcggaatccctaactaccctgagactcagaactacgtgaaggacatcatggccaaataccaaggtgcgcaacctgcgtacgagccgtctagtgcttctgtgtctgaggcccttgcgcggctgaacggagcgcctgaggccggccctagtggtgagggttaccagccatctagccaagccgtcgccgatgccctgtcgatgctgagtgctcccgtggatgaaaaagtcagcgaacctgtcgcacagacgcttccggaaaagggcctgggagatcgtctgaaggatttgaacactgcgatcaatgctccggctgttggtttcttccgaggtgtgcgggagattgctgatgcgccgagcgagtggcttgcgaaaggctcagaggctgccgggatcacggatgccttgaaatcgctaggcatagacatgctgactggcgatgagcagttggcagcaaacaaggcgcgccgcgcaggttatgccaacgaaagcggctcggaacttgccggtcgcgttcttggaaacatcgcgggtgtgatggtccctatggctggagcggaatccgctcttgctggtggtggaaatgctctacttggggcgctgtcgaattctcctcgagctgcatcggccctcaagggcgtcgggaacttcctgtcgggccagggaggggcgctctccaaagcggcatatggtgcagcgcagggggctggatctgccgcgcttatgtctggcgcgagtgactcgccattggagaatcaggtgggcgccggggcggctattggtgcagtagccggtcccatcgtttcggcgctagctaatccagtttcgcgccttgtatcgcgagcgaggggagcagttactcctaactctgccattcagaacaacgctgatgaggtcatggagcgcgtcagggtgactctggagggtggcggcaccgacttgtcccagatcccccaaggcattcttcggggcgtcaggacgcaggttgaggacgccttgcgcgctggccggcagattgatcctgcggctctcgccaggcaagcggagttcgaggcgctgggaattcagccaacccttgggcaattgaccagggatgcagggcagttcaccgccgaacgaaatatgcgcggtatcgcaggtgccggagaaccactggcccagcgatttgccgagcagaacaaccagcttatgcaggtcctggggcggatgggtggcgccgatgctgttgaagccgatgctgccgggaatgctctggttaaccgcctacaagccttggacatgccccgccgtgaagctgtcaatcaggcgtatcaatctgcccgggattctgccggtcgctatgccaatatcgacgttcctacgtttagtcaggctgcaaatcaggcgctcgacgaaaacatgttggggcgctggttgccggggcaggtacgggacatgctgaatgacatcagtagcggtcgcattcccctcaacgtcaatactgctgtccaagtcgatagcgtcatgagcgaagcgcaacgcgctgccacgcgggcgggtgacactgctgctgcacgggcggttggtgttgttcgcgacgcactccaggccgcgcccgtggaagagggtgcaggagccgcagcaagggcacagttcgatgctgccagagggttggcacgagccaggttcgccgagattgagggcatacctgcgctgcgcgccgcgctggatgacgcccgcccggatacgttcgtgaagaactacatcctgaatggggatccgcgcggcgttaccgcccttggtcggtatatcgcagaagaccccgcggctatgcagaccgcccgttcgcagatcgcagcgcatcttcaagaaaaggcgttcgggcgcaataccgcgggtgatgcaacgttccgccaagatgcatataacaaggcgctccaacagatcggaaccaacaagctgtcggcgttcttctctccagaagaagttcagcagctacggcttgtcgggcgagttggcgcgaatatcaacgcccagccggtcgggtcggcagtcaacaactcgaacaccgccgctgctgctatgaatctgctctctgagatgggcggatttagcagctacccgggcatcaacgtggtcagggagagttttagaaccttctcgaacgaaagggctgcgcgcaacgcgttgctaccgcgtcttgagagggttcagaccgatccagcagatgcaaatgctctgattcgtttgctcacctctggaacaaactcccgcatcacttccgagcaaccgcctcggcaacgacagcaacagaaataa

SEQ ID NO: 330102 - DNA, 1476 bp, Pseudomonas aeruginosa
atggctatcgatccgagcatcccgcttcaggcatcagccggtggcgcccagaaccctcttgccatgctgtccgctgcaatgcagttgcgcggggcgaacctgaaccagagcgctcttaatcagcagatccaggcaaaccaggcggcctctgcggcgtaccagcaagcgaccgatccgactacggggcagatcgattacaacaagctgaccgctctgttggcgaactcgcctgccgcctacaacctgccgcagatacaagcgcagatcgcgcagcagaagaacgcgcagcttgagagccaatcgaagcagttcgagcttgctcgaaagcaagtgaattggctgaagggtggcctcggctcattgctaaacaaccccggggttagcggagcggacgtgatgaagcttgctgctggagggatcgcgcaaggcttccttacgccagagcaggccgccgaagagcttcgctccatgccttccgatccccagcaattgcagggatggctgcgcaatctctatgttcagtcgctcgacagtgatgctcagctgcaggcaatccagcctcaattccagactattgatactggctctgcaattggcttggtcaataccaacccgttggcgggcggccagcaagttggccaggtcgccgcgtcgttccagaagggactttcgccagagaccgcaacgactccaaccgagatcttcaatccgcaaactggagcgcctgaactagtgactcgggctcagttcgccggcatggcaggtggcgcgccgagcggtcgatatccgggaacgcctgggatcaatcccataggtgggggtgtacaagctgctccaggaatcggccagactgcaggcgctgaggttgcagcgcgcggagccgcggagcgcttcaacaaccttgcctctgatgccggcaatgtgaggaataccgttcagggatacgatgcggcgctgggcgcgttggagaatctcggtcgttcaggacctgctgtcgacaagacgatgctgatcagttctacgcttgagagcctggggcttccgtccgacaaggatgcgaacgcgaactggcaatctctgaacaagtacctgcaaaacgcaggggcgagtgcagcagcgcaggccggctatggcggcacggatgctgggcgcgccgtctttggtgaggggcagccatcagctaaatcgatgaaccctgaggcgcttcgtgaggccatccagtatgtgaaggcacagaaccttggcgtcctggcaaagcaaggggctgcccagcgattcattgatcagaatggtggtgactacacgaagtacagccagtttgaaacccgctggaacaagacctataaccccgacgccatgttctacatgagcctgcctcctgaacagcaaacgggctatatcaaaggtctgtctgcggataagcgcaagaagctggccgagagcatccagaaaatggacatgctgggggccttctaa

SEQ ID NO: 330103 - DNA, 909 bp, Pseudomonas aeruginosa
atgggcagcgtcaagaagatcgtaggcagtatcaccggtagcactggagcagatgccgccaaggatgcggcaaatgcgcaagcggcagctgctaacaacgctgcacggctaactcaacaacagttcgatcagctgcgcaaagacctggctccatttgtatcgctggggactggttcgcagaacgcgcttttgcaggcgatgggctatacgccaacattcaaggatgggcagctatctggcttggcagtgaatcctaaggctgcgttgcagcagcaattcagctttaccgggaaagacctccagaacactcctggctaccaattcgccttgaatcaagggctccgcgcagttcagaacagcgcctcggcacaggggcttgggttgtccggcgctcaactcaaaggggctacgcagtacgcgaccggacttgccgatcagacctatggtgaccaatacaaccgcgccctgagcacctacaacaccaattatcagactgctgcgaacaacgtgaacaacctgatgcagcttcttaacatcgggcagtcgtccgctgctcagactggcgttgcaggccttaacgctgcgaacactgccggtggctacctaacccagggcgctaatgccatcgcatccggcaagatcggggcggccaacgcgtatggaaacgccttgcagagtggtattggtaccggtcttgggctgttcgctctcatgtccgaccggcgaatgaaggtcgacatcaagcgtgtcggacagactgattcggggctgccgatctacacctatcgctacaagggccaccccaccgttcacatgggcgtcatggcccaggagcttcaggcagttaacccggacgcggttgttgagcgcgatggaatcctgttcgtgaactatgccgaggtggcgtaa

SEQ ID NO: 330104 - DNA, 408 bp, Pseudomonas aeruginosa
atgatcgcatcgcctgatttcgtcaggtcgatcattacccatccggacgtgtggccgcatctctcggaagatggggatgatccggccgagtttgaacccgcggacgcggtctacttccgctatggagacttcggtttcgtcgagttcagagcgtgcggccggcattggtatcaggcgcatatcgcgatgcttaggggtactccacgcgtgcagtcgttcgcacggctgtgtatggagatcatgcgccgagatcacggggccctggcattcaccggcttcatcccggcgactaaccgggcggcactgatcaatgccctgcgctgcgggtttagcgaagagggcaggatgaaaaacgttttcctcaagaacggccagctggtcgatatggttgtcatgggagccagataa

SEQ ID NO: 330105 - DNA, 333 bp, Pseudomonas aeruginosa
atgagtctcacctacagcgaaatgatccgcgggcagttgctcacggcaactcctacctcatactacagcgccccgttgaattcctccgcatccatacaagccgtgacggcaaacaaccctaccggatctgcggtgattgtcgacctctacaaggtgccctctggatctgccgccgatgcctccacaaagatcgcctcgcgcactgttccggctggcacgactgtaaccctgttcgatgcactgaaccataagctccagtcgggtacggctctgttcgcagctgggaacggatgcggcctcaacgtctctggcgtcgagtacatcccggaatga

SEQ ID NO: 330106 - DNA, 870 bp, Pseudomonas aeruginosa
atggacgtaaaggccaacattccagaattcaacacgccgttcattgggcaggatggccgggttaactacatctggtggcaatttctgctcaagcttttcgccaggactggaggcacctctggtaatgacggagacgcttcgcttgagttgatccgatcactcgagggcagctcttctgccatggtcgcgttccaggctatttcgggtgattccccgggtgctgatgcgcagattgggcgtatgcctaggccagccgtgttggttcccgaccagatggcctatcagcatgggattcacgatgcaggggatctgcacgcagtagttacagcagcaaagaatggcttcatggcgtcggcggacaagtccaagctggacggttttccgaacatcacacctgtggcattgaccgccgatgccaccatcgtcaacagcacggctgatgggaacattctgcaactgactgcgccggccagcagcctggccgttggttcgactatcggtgggcgcctctatgcccttgttagctcggctgctgcaacaggaacgctgagcgtatggctcaagattggcgcgacaaaggtaatcacgcagacattcatgatgcctgccttgggtcagaccaatacaggtatgtcgtactacttcacggcttctgtgcgtaccaccggtgcctcagggacgatccagctatctgcgctaatgacctcgaacggtaacgctctgaatgccggccccgttgtgtcgacagctagcgcgaccatcaacacaactatttccaatacgttcaccctcggctggaactggagcgtcgccaacgctgcaaacagtgccaccgcgaagaacgctgtcctgagccaggagaagctatga

SEQ ID NO: 330107 - DNA, 1422 bp, Pseudomonas aeruginosa
gtgaaatttcctctcacgcaaggggcgtatcaatcgcgtagcgtcatcgcgaacgcccagcggtgcctgaacctgttcccggagtcgaatactgaggacgcgccgttcccggtcactcactacacgactccaggccttcagttgcgcggaactgctccaaacaacgagccctggcgctgcctctacgctgcgtctaatggagttctatatggggtaactggagggaaggtctatgcgattgatgatgcatttgccttcgaagagattggagatgtcaacttcgcccctgggcttgtgtacgccgtagataacggcgtccatgtgtttctcgtagatggcacggcagacgggtatacgatcaagctgaagacgaacgagctatcgaaggtaactgacggctcgttttatggatcatcgcgtattgatatctgcgacgacttcttcttgttcaaccgccccgggacaaaccagtggtacatctccaatttccaagatgtgaccttcgattcactggatttcgcggcgaaaactggtttttctgacaacgttgtagctgtggccgcggtaaagcgtcaggtgtttgtattcggagaactgactacagaggtatggttcaacgaaggaaatgccactttcccgttcagtcgtatgcctggagcattcatacagcatggttgcgcctcggtcggcagcatccagcaaatggatgggtcgctttactggcttagtcgaagtcctcagggacactgtgtattcgtcagatctgtcaactacgaagccgctcgtatttccactcatgcaatcgagcaggagataagcaagtacgcgcgtgtcgatgatgcgattgcatacacataccagcaggacggccactacttctatgtggtgaatttccccactgcggacaaaacgtgggtatatgacctggctacccagatgtggcatgagcgggcttggctcgactcagatggcatagagcaccgtcaccgcagtaactgtcatgcgttctggaagggaatgactctggttggcgattgggagaatggaaagctctaccagatgcggacggatgtgtatcaagacaacggtgcagctatccgccgagtgcgctcattcccgcacatgttgagtgattcgaaccggataatgtaccgcgaattagtggcctccatggaggttggtgacggtaggcctgatagcttcgaatctggggaattgcgcctgcgctggagcgacacgggaggcgctagctgggggagttctgtcagcagtgaactaggtccgcgtggcgatcacatcaggtcattgcaattccagcgcctcggatatgcgcgagaccgagtgttcgaactgtcgtggatggccaacacgaaaaccgcgctgaacggcgtatttctgcgcgtggaagaggccaacgagtga

SEQ ID NO: 330108 - DNA, 258 bp, Pseudomonas aeruginosa
atggagccattgcaggtcttctcgacggtctatgacgaaatcgaactgccgcctgagtatcaagaagcgatcatgtacaacctggcgcttcggatttacccaatgtacggccttcccgttaacgatgcggtagtgcaacttgccaaggctgccatgaacatcctggaggcttcgaatgtgcaagtgcctaggctgaaagtcccgggttcgctcacccgtggcggcgtctataacccatatgcggatcgcgtccggtga

SEQ ID NO: 330109 - DNA, 792 bp, Pseudomonas aeruginosa
atgtcgacgcctgacctgccgctgcgcatgcagcagctcaagctgcacggcatggccagccagtggcccgaactgctggccaagatgcgcctgcacaccatggagcccgaacactggatggccgaactgctgcaggccgagtccgccgaacggcaggttcgtgtccaggccaaccagatgaaggccgcacgtttccccgtccatcgtgacctgctcgggttcgacttcgcggccagtcccgttgatcgcgcactggtcgaacgactccaccagggtgacttcatccacacccccgagaacgtcgtccttgtcggtggaccgggcaccggcaagacccacctggccaccgccatcggcatccaggccgtgcgccagcatcgcctgcgcgtgcgcttcttctccaccatcgaactggtcaatgcgctggagaaggaacaggcccagggcaaggccgggcagatcgccctgcgcctgacctatgccgacctggtcatcctcgatgaactgggctacctgccgttcaccccctcaggcggcgcgctgctgttccacctgatcagcaagctctacgagcgcaccagcctcgccatcaccaccaacttggccttctccgaatggggtcaggtgttcggcgacgccaagatgaccaccgcgctgctggatcgcatcacccaccactgccacatcctggagaccggcaacgactcctggcggctgcgcaacagcaccgccgccaacaagaccaaagccagaatcagggcaaaggaggccaccacccagaccaccaactga

SEQ ID NO: 330110 - DNA, 1500 bp, Pseudomonas aeruginosa
atggtcatgttggccaagatccggcggatgcatttccgcgatggcctgccgctgcgcgagatcgccaagcgcacgggcctatcccgcaataccatccggcgatggctgcgcagcggccagtccgagccggtctatcccaggcgagcctcgccctcccggctcgatccctaccggtcccagttggagacgtggctgcgtgccgacagccatcgtccccggcgggaacaacgcaccgccaaggtgctgttctcgcagttgcaggcgatcggctatccgggcacctacacccgggtgacggccttcatccgccagtggaaggcggccggcggcgccagccgccgcccggccttcgtgccgttgcactttcctccgggtgaagccttccagttcgactggagccgcgagtacgccttcgtcggcagccacgccaagatgccgctggatctcgcccacgtgaagctggcctgcagccgcgccttctggttggtggcctatcccacccagagccacgagatgctgttcgatgctcatacccaggcgtttaccgccttcggtggcgtgccgcgccgcggcatctacgacaacatgaagacggcggtggacgggatcggccagcaccgggaacggcgggtcaacgcccgcttccacgccatgaccagccactacctgttcgccgcggagttctgcaaccgcgccgcgggttgggagaaggggcgggtcgagaagaacgtgcaggaccggcgccgacagatctggatcgaggccggggcccgccactggccagatctggacaccctcaatgcctggctcgccagcgagtgccgcgccgcttggccgatgcaggcgcatccggatgcctccgacatcaccgtggccgaagctctggaggacgaacagccccacctgatgccgatgcccgcgcccttcgacggctacatcgagcggccggtgcgggtcagttcgaccgcgctggtcagcttccagcgcaaccgctacagcgtgccgtgcgaacacgcccacgccgtcgccagcctgcgcgtgtatcccttcgaactggccgtggtggtcggcgaggccgaggtcgcccgccaccggcgcagcttcgagcgtgatcgggtccactacgactggcagcactacatcgccctggtccagcgcaagccgggggcactgcgtgacggcgcgccgttcctgtccatgcccgatccgctgcgcaagctgcagcaggtgttgctgcgccagcctcacggcgaccgcgccatggcccaggtgctggccgccgtacccgtgcacgggctcgaagcggtactggtggcggtggaactggcactcgagtccggcctggtgcgcgccgaccacgtgctcaacgtgctggggcgattgcagcatccggaccgcacgatcgagacggtcgcctcgcgagtgacgctgcgtcatccgccggtgtccgatccggcccgctacgacgccctgcgggaggcagatcatgtcgacgcctga

SEQ ID NO: 330111 - DNA, 645 bp, Pseudomonas aeruginosa; identical to SEQ ID NO: 323384

SEQ ID NO: 330112 - DNA, 174 bp, Pseudomonas aeruginosa
atgctggtgattcgattggcgtcctcaaacgacctccggcgtactgcggcaatcctgcctgccgagcccaaggaaggccagacggtggacgtatcgatctgcgacaccgcgcactcgccagatggatggatcgccgtcggcgcaggcgtagcagcctacgaagcggagcgctga

SEQ ID NO: 330113 - DNA, 1932 bp, Pseudomonas aeruginosa
atgcatagcaagagcctgaaatacaggcctgacatagacggactacgcgccatcgcagttattcttgttctcctattccacttcgaccttggcgtcagcggtggatttataggggttgacgtattctttgtaatatcaggatatttgataactgaagtaatccggaaaggcgttttacaaggtgcattttccttcacatctttctttgcaagacgattacttaggctgcatcctgcgctaatagttacggtggctgcttgcctagccattggatatcttctatttgacccggcgtcattttcaaaccttgcaaagtcagggcagtacgcgctattttcagcatcgaacatttatttctggattaatcaggattattttgacccgtcagctcatacgcaaccattattgcacacatggtccctagctgctgaatggcaattttatttggtgtggccattcatcgtatgggcctccctgaaagtatcagagcgtttctttgttgtcgttctttcattacttacagcaggatccctggtagcatcgcagatttggctaagtcacgactcttcggcagcatattttctaattccttttagggttttcgaactttccgcaggggcgcttgtcgtctacttggagcaccataaaaaaaccggattgcaagcatctgttatattcttcatcggactcgctttaataataatgccggcgctgttgctcgactcttcctcaccattccctgggttcagggctgctctgccgtgccttggagctattatctgcatatattcaggagattcgacggctgccgcaattctgcgcatgcgacctgtggtatacgtagggctaatatcttactctgtatacctagtccactggcctttaaatgttttctataaatattacatattcagagacatagtgatctctgaaaaagtctcacttcttgtagcttcgctaataattggcgcacttcttcaccacttaatagagaagagattcataacaaagaccagatcacttagaattgcgggatatggagcaatagcttttacagttgccgggtgtttttatggtgcaaaagcggtaatcaataataacggacttcctcagagaataccagaatcataccggtcgcttatggaaaacccggccgaataccacaagttaaactatggtggatacggatttccgctagaggcttttctgggtgacaaaaaaggtgaagcagtagcgataataactggggatagtttcgctctacagtacgccactggtctagacaaggctcttcgaaaagacggctcatacatgcttgggttctttaggcatggatgcgtgatctctggggagtacacacgtatcctcaatggaaccccaagagaagactgcaaagccacatacaataacgcgatcaaggctcttcaaggaaacaatctaccactaattattgctcaatcctggggtggatatagcggtcagatatcaaatagaaatggggaaaatgtcgaattaaaaggagcctcgagaagagatataataattgactggcttgaaaaaatcagagaagacataggagaccgagacttatatatcgttggcggtcagccatttaagtcaaacagcttagacacagcttcatgcctaatgcgcccgtcctatatacatcagagatgcgaaagcattatctcgtatagaaagtcagactcgaaatcagaagaaacaaattcaatattgattgagtttgcaagaaaacacaacaaaacgcactttgtagatgtatccccctctctctgcagcaacggttcatgcactccgttcagggacgggaaaatactatactcagaccctacccacttatcgaaggaagggtctgacatagcgagtctagagataataaaaagcctaaacaagaaaacatggccgcgatag

SEQ ID NO: 330114 - DNA, 1680 bp, Pseudomonas aeruginosa
atgactacgtatgccaccggcaatccgcttggctccaaagacccgcgcgacttgtacgacaacgccgagaacttcgacgcggcaatgaacgaccgcgtgaacgtggcgtggagtgaccgattcggcgtctctagaaaaacctggtttggagtcgaacagcaggtcaacgacttcctcgccaacgccggcttcgagccggtgccgctggagtacgtcgatggcactccgcttaccgttgatcggccaacacaactgattgagcgcgatgggaacttatacagcgtcaagcttccagcatcgttccctgtaaaccttactgggaactgggccaccgacgagagtctgctggttgcccaggtcgaccgctcgctgcgtcagcagttgagagctccgggtggcgccggaatgatgggttacgatccggcggaaacgtacccatcagatacggttgggtacgaactgcaggcgctacgttctgctcggcgcattgcgataagttcgttctggccagccggcggaggagatgacggtacttccgcatgcgaggccgcgattgttgcggctggggctggcggagaggtgttctttgacgtccctgacttcatcatcactcgaaagctggtgcagctttcgaaccagaagtggtacgggcgcggagggcagcgagggacgacgattcgtaagggggcggacattgatatgatcgatgttgcctctcttggcacaatcattgacatcaacctagagggggacggccaaaacttcagcggtaagggattccgaattcccgcgggcttcagccaaacgatcgagcgctgccgagcggtcaacatgggtggagaacccatgtattttgagccgaacgccggcggtggagcgaacatatacacgtttgagggatatcctactgatacgtcactatatgctggtatcgcgatcgctggggacaccgctcctcacccgaggttcttccgcgggatttggctctccggcgctaatttcgcgctcgggccaggagcaggaaatggcagttcaatgactggcttttatatacgggaactgcgatttgatccgacgtcgacgctattccatctctcgaatggtcgatgtgcgacgttaggagaaacaacaacactccgaggtttcgatcacaccctcgatggtgtcgcgttcgctggaccggtagcccttgagaatgctcagggcatcaatattggatcgtcgtgcactgttcccagtttgattgagaatccgaataacagtagatacaactctgtccatgttcagcggagaacatacactccagtctggacccaggctacagctgcaccatcgatcgggaatggaacaatcactgggaactatacacgcgctggacatgagtgtttcgtaaacattcagttcgtttctggatcaacaacaacatatggagacggttcgtctgcatatagattttccttgccatttcctggtcatattgagtatacgcagtcagggttcccagtgagagtttctgatgttagttccggtgttgacttcacagtgtgggggcaaattggtgcaggtcttaactatattactctgtttgggggtggtggccagcaggtaaggaacggattcccgatggcttgggctgctggggatatcatatggatgcgcttcgcttatgatgttaggtag

SEQ ID NO: 330115 - DNA, 450 bp, Pseudomonas aeruginosa
atgactgatctccgcccggtgatgttcacggtccccggcgagccggtggggaaggggaggccgcgcatcggccgcgtcggcgcccacgccaggatgttcacgccggcgaagacggcggcctacgaaggcctggtagccatggctgcccaggaagcgctcgcaggacgccccctgatcgccggccccgtgctcatcgaactgcggatgttccaccccattccgcggtcctggtcgaagaagcgccaggccatggcgctgatcggcgaggtcatgcccaccgtgaaatgcgatgccgacaactgcctgaaggcggtgtgtgacgcgctcaacggcgttgcgtggaaggacgacacccaggtcgtcaatgtgatgctcgcgaagcggtacgccgaggtgccgcgcgtcgaggtgaagattgttccgctgatggcccagggagcgcagcggtga

SEQ ID NO: 330116 - DNA, 426 bp, Pseudomonas aeruginosa
atgcatgacaagtacaagctggcgatcattcgtcacgagaatgccaagcaagtcgtgcagggactgtcccgagacatcggcgctgcgatcaacagttgtccgatctcgattcgagcgcagtcctgggacacgccgaacagcgagcgcggtgaactctgggatgaggcatcgggcaagcacaagacccacctatggcatgccttcaagcatcgggagccttcggactgcggatatggaacggttggtctcggtgacgatggcatagacgacgcccttgcacccggcggcgaattcgaatgcgagcactgccgccgcgcctaccagttgatcagagaccgccgttgcgcgaagcaggaactcggacgcgctcgtctttcgattcgggcgctggggcgcgctgcgcttgaggaatcgacccatgactga

SEQ ID NO: 330117 - DNA, 609 bp, Pseudomonas aeruginosa
gtgaaacgcgtgttcgctaccctcaaaaccagctatccggcttggtacgagaagcactacggggaacgtcgtgcggagacgcttgccaagcgagtctggctgaccggtatcaagcacctgagcgacatgcaggtcgaccgaggcctccagcggatggtgctggatcaggactttcctccgagcctcaaggagttcctgcggctgtgccgcaagatcgacggtttgccgagcgccgagggcgcctggtacgaagccttggagcagcgctacagccacaaggtcgtgaaggtggctgccgaactcacaggcctgttcgagcttcgtcgggcccagtacggcgacaagcgacttcgcgctgagttcgagcataactatgccgtagtggtccgacgcctcgaggctggtgagccgctggacggaaaggtcgccaaggcgattggcctcgacagccagaagtcggagctgcagcgcgccgatgagcttgccgagcagcaactgctccaccggatgcaagcccaaggcctggatgggctcagtggcgcccaggcgcgggaactgctgctggccaagatgcgccggaaagcgccggaggtgcgccgtgatgcatga

SEQ ID NO: 330118 - DNA, 885 bp, Pseudomonas aeruginosa
gtgccgtccttccagatcaacgacgaggagcgggaggcgctccgcggcctacccatgcttgcccgcgagatctacgtgttcgccctgcgcccgttcatggacttcgcaacaggcgttgtcggagagcggcgcgggatctcttggaagtcgattgccgaggagctctacgtcgagccgcaccagggcatcaagggcggggagccctccgaaaaggaactgcggcgggcgctggtctggctgcagaaggtgggcctggtgggccccaacttggccgaaaggcgcctgatttttgagttgccgaaggcttcacgggatcaatccgtccgaaaaaaagtgggcactaagtgggcagatgaagcgggcagttatgtggaagggtcagagcccagtaactacgcggctttcccggaaaaagagggcagatatgtgggagggggtgaaagtgaaaaagtgggcacacctccggtatccggtaataaccgtaccgtacctaacgcgtgcgtgcgcgaatgcccagccgatccggccactgcgggacagtggtgccagttcttcatccgcgagcgcggattccagatccacgcggtgcagaccgccaggaccatgccgctgttcgcctcttgggtcgagcgcggtgtcaccgcggagcagatgctcgcggcaatggagatcgccgaagccaagctcggtgccccgcctgactcccccctgtactaccgaaattttctcgatgaactcttgctggagcgccaccggatggcaacagcaccgcatgcggagcaccgccatgagcaaaccgacggacgaaacgcccaagcacgtcagcgacccgctgcacgacgttcgcgcaacgctgttgacatcctccacgacgacgactggtga

SEQ ID NO: 330119 - DNA, 372 bp, Pseudomonas aeruginosa
atgctgatcttgacccgccgccccggcgaaaccctgcatatcggcgacaacatcaccgtcacggtcctcggcagccaaggcgaccaggtgcgcctcggcatcaccgccccggacgacgtcgccatccaccgctccgagatctaccagcagatcggcaacgtccgaccggtgccgccggcggaactggtcgaggcctggaaccgagagcacccagcgccagcgctgatcgagtaccgcccgtaccgaggggccgaaccgcagcgcacccgcaccgtcggccgagccagcgtgtcgcttggcggggcggcggttatctggatcgaaggccagtcggcgccggtggcgttgcgggcctgcaccgcgatctcctga

SEQ ID NO: 330120 - DNA, 153 bp, Pseudomonas aeruginosa
atgatgtggacataccgcgagcgccgcaaccgcgcggctttcagcaacgcgcaactcgcttacgaccgtgccgtcgaccctctctgggaccagccggagccggaaacggagcccgaggacgagcaggaggacgacgatggcatgggcgaatga

SEQ ID NO: 330121 - DNA, 240 bp, Pseudomonas aeruginosa
gtgattgagccgcaactctcgacggttttcttcgctcctacggcgcggcgccgcttcttgacgcgccgggcggcaatcaatgccgaggccagggcgatcatcaacaagcacttcccgattgagcgcggctgctcctgcggctgcggcgatccgggctggcggcttgaggaggccaacccagagcgcttcgcgcgctactaccggctgctcaccgccgtgctgaagaaggtgaagtcatga

SEQ ID NO: 330122 - DNA, 141 bp, Pseudomonas aeruginosa
atgaacgcgaagcgtaaagccaccctcctcggcgccctgctcgcctgcgccttctacctctttctgatcctcggccccgccaccgccggccacattaccggcgagcaaccagccgcagctcaggcaattagggctttctag

SEQ ID NO: 330123 - DNA, 285 bp, Pseudomonas aeruginosa
atggcaaaagcgaagattattcaggctccaaaaccgcagaacggcttctatgtcggaactacgaagaacaccggcctaagccagcgagaaagccttgaagagatcatgatcaatctggctacagcgctcggtgtgaacgaaatacacaaggctctgacggcccgtgatagctacatctatgagccgcaaaagaagggactctatttctcctatcaaagcgcgacgaacacgatcctcgatctttcccgtaaggtcctggaagccgagaaggctagaaagccctaa

SEQ ID NO: 330124 - DNA, 909 bp, Pseudomonas aeruginosa
atgtctgcagctctcgcatcggtcggcgcgctcgaccgcaccaagtaccttggcggcagcgatgtcgccggcatcctcggcatcagcccctggcgcactccgttggacgtgtacctggataaggtccagccgcgcaccggtcccgtcgacccggcgaagcagaagattttcacccgtggccagcggatggagccctacgtcatcgacctgctggccgaagagaccggcctgaagatcatcggtcgcggaaaccgctaccgcgaccagcagcacgatttcatggctgccgagatcgacgccgaggccgccagcggcgaaaacatcgagatcaagacggtcagcccgttcaaggcaaaggactggggtgaggttcagaccgatgccattccagtccactacaccgcccaggccatgcacggcctgatggtcaccggccgccaggtctgcatcttcggcgtactgatcggcggcgacgacttccgcgtgtaccgcgtcgagcgggacgacgaaaccatcgcggcgattcgcgagaaggaggtcgagttctggggacgcatccagcgcctggatccgcctgaagcaaccgctgtcagcgacatgctccggctgttcgaacgtgacgccggaaccagcatcgaggccgatggcaaggtcgtggaggtgttcaaccgcttgcgcgaactgaaagccaaggccaagggcctggagtacgagatcgagtccgcagaggagcgcatcaagctcttcatgcaggaccacgcccaactcacggtcaacggcaagtcggtactgacgtggaagtcccagaccaccaaccgcttcgaccaatccgccttcaaggaagcccaccccgcgctgttcgagcagttcaagaagaccagcgaatcccgcgttttccgcctcaagtaa

SEQ ID NO: 330125 - DNA, 201 bp, Pseudomonas aeruginosa; identical to SEQ ID NO: 327314

SEQ ID NO: 330126 - DNA, 765 bp, Pseudomonas aeruginosa
atgagcaacaacccgcacttcatgaacatgaccgccgacacgctcggcaagagcttgctgcagggactgatccaggaaatccggatcatgccggactgctggcagaagcttcccgaggccaagcagcaggacatcatcgaccgcctggagcgccaggtacggaatgccgccaccatcgcggtccacaccattgccggcggcgaccgcgacacggtctacggcaagctggagtcgatgaccgcgaaggacaagatgaaggccgtattcgtggtgaatccgagcagccctcacaaggaggacctgctgttcgcggtgaacaaggattgcctgctcatcatcggcggcgccaacgagttcaccgagggcatggaccaggtcaagcctgacccggaccagaacccgctggacctgaatggcggcgaccacgacatggaagacgccggcgcctggggcggtatgcaaccagcagacgacagcgacgtcggcgatgccgagttccaagagctgccgcaactcaccgtcgagcgcttcgccggccacaccctgggcgagatcgccatcggcgtcgccaccaagaaggacgtgttcgacgcggcctggctgcaatcgcgcttcgctctcaccaccgaggaagccgagcgcgtcgttctccaactgctggaccagggagtcatcgtgctcgagcaggaaaacgaggagtcccgcgagttgaacacttaccgcgtcgtcaagaagccgggggatatcgccctcgacctggagtga

SEQ ID NO: 330127 - DNA, 1746 bp, Pseudomonas aeruginosa
atgcgcatcacgaaactcgaaatcaccaacttccaagggctgcgtcatgcggcccttgatgtttctgcgccggtgctcctggtggccggccacaacggcgccggcaagagttcgctgctcgacgccatcgccatggccttcaacggccagccgcgccgcgtctcactgaagaaggagatggacaagctggtaaccgagggcgccaagaagggcgaggcgcacgtcaccttcctcgacaacggcggtgacgagcagacggcctgggttatgttgcccaccggcaagagcgccccgctggccgactcgccgttcctgccctacgtgctggacgccagcctcttcgccgcgctggattcgaaggagcgccgcaaggtgctgttcgaactcagcggcgccagcgccagcccggcggaagtcggcaagcgtcttgaatccaaaggcctggacctgaagctgttcgagaaggtgaagcccctgctgcgcaccggcttccctgcagcggtggagcaggccaaggcctacgccagcgaagcgcgcggcgcctggaaggcgatcaccggcgagaactacggcagcgagaaggctgtcgactgggcgccggagctggtggccaccgtggtgaccgatgaccaggtcgccgaggccggcaagaacctgcagcagttcgaggatgacctcgccgaggcgcagcagaccctgggcgccagcaaacaggcccgccaggctgccgacggccgcgcccagcgcatcaccaagctgcgcgacctggtcgacctggagccgcgccgccgcaacaagctgagcacggacgagcagaaccaggacgagtggtccgagaaggtcatggccgccgaactggcctcgtccggcagcgtgccgcaccagccgctgacctgcccccactgtcagggcgcggtcgacctgcaggccggtgctctggtggtgcatcagccgcctgagaagatcgctgacgccgaggcagccaagcgtctgccggaataccgcgagtatctggccagtgctcagcgcgccgtggcgaacagccagcgggacctggacgagtgcctggccgccgccgagcagatcaaggccctggaaaccgagtccgccgacgcgcccagcgccgaagcgatcgccaacggcgagcaggctatcaacgagctgcggcaggcccgcgacgcgagccgcgcgaagctggtggcccttcaggaagccatggaagcggctgcccagcgtgaggcatcgatcgcgaaagcgcaggccgcgcaccgggatgtggtggcgtggaccggcatggccgacgcgctgtcgccgaccggaatcccggctgagatcctggccgatgcgatcgggccggtgaacgagctgctgcagcgcctatccggcaccgccggctggtcgcccgtgcagatcagcgccgacatcgacgtcacgttcggcggccgactgtacggcctgctatccgagtccgaacgctggcggtgcgacgcgacgctggccctggccatcgcgacgatctccggtcttcgcctggcgctgctggatcgcctcgacgtgctggatatccctgctcgcactcagcaggcgatgaagctgttccagagcctggccgccggcggcgagatcgacacgctgatcgtcgccggcacgctcaaggaggcgatggcgaagacgccgacctggctacaagcggtctggatcgacgccgggcaactcgtcgaccagcagcaccaggctgcagcctga

SEQ ID NO: 330128 - DNA, 2091 bp, Pseudomonas aeruginosa
atgacttccctcaagaagccctccccgctcgacttcaaaacccagtacggcctggccctggacgacaccgacgacgcgatcatcgtcgacctgttcgccggcggcggcggtgccagcaccggtctggaaatgggcctgggccgcaaggtcgacctggccatcaaccacaacccagccgcaatcagcatgcacgaggccaaccacccgcacgccgagcatctgccgaccgatgtctggggcatcgaccccatcgaggccaccaagggcgccaccgtgggctggctgcacgcctccccggactgccgacatcacagtcaggccgccggcggccagccgcgcaagaaggaaatccgggatctctcgtgggtggtggtgaagtgggccggcaagctgcacaagctcggccgcgggccctgggtgatcagcctggagaacgtgaaacagatcctgcaatggggcccgctgatcgccaagcgcgacaaagcgaccggccgcgtcgtgcgtctcgacggcacggtggccgagccaggggagcgcgtgccgcgccacgagcagttcctggtgcccgatccgaagcgcaagggtcgcacctggcgccagttcgtccagaccctgcgcggcttcggctaccaggtggactactgggtcgagcgcaactgcgactacggcgacccgaccacccgccagcgcctgtacctggtggccacagacggcggtttcgagccagtggcggcggagaagacccatgccgcgaaacccagcaaggggctgaagccgtaccgcacggcagcagagtgcatcgattggagcgacctcggccagtcgatccgcaaccggaagaagccgctggcggaggccaccatgcgccgcatcgcgaagggtatcgagaaagaagtgctccagcgcgccaagcccttcatcgtgccgatcgcgaactggtcgcgcgaagccgtgcatccggtggaccagccgctgaacaccatcactgcctggccgaagggtggcgctttctccgttgccaccccgacgctgatccaagttggctacggcgagcgcgacggacaggcaccgcgcgtccttgaactggatgaaccgctcggcaccgtggtcgccggcggcatcaagcacgccgtcgcggccgcccacctggtcaagttccgcttcgacgccaccggcgcaccggtcgaccagccgatgccgacgatcaccagcggcggagaatgcaagcggcctgctggtgctgcgcacgcgctgggcttggccagcacgatcctggtaggcgtcggcggccgcgccggccaaaccgagccgcgttcggtcgccgagccgatgtacaccatcaccgcgaaagctgactgcggagtggccaccgcgttcatggtccaggccaacggcggctacaacaccacccacagtcgcccggccgatgccccgatcagcaccatcaccaacaagggcagccagcagcagctcgccacggcacacctggtaacgctacggaagggatcgcatggcgcaccggtggacggaccgctgggcacgcaaaccggcacggaccaccacggcctggtcgccgcccacctgctgcatctgcgcggcaactgcgacgcgcgcgccgccgacgagccgctgcacacggtcagcgccggcggcacgcaccacggtctggtcaccgcggaaatggtcgccagcagcctgacgccggagcaattggacggcgcgctgtgggtgtcggcgttcctgatgcgctaccactcgaccggcgggcagtgggcgaagttggacgatccgctgaccacgatcaccaccaaggaccgcttggcgctggtcacggtctggatcagcggtagcccctacgtgatcgtcgacatccggctgcggatgctgaagccgcgcgagttgtaccgcgcccagggcttccccgacagctacatcatcgagcggggccacaacgggcagcggttcactctgtctcagcaggtccacatgtgcggcaacagcgtgagcccgaacacgatggccgcgtacgcccgggcgaacgacccatggaagcggcggctacgcccgagtccgcagcaggtggcggcatga

SEQ ID NO: 330129 - DNA, 1008 bp, Pseudomonas aeruginosa
atgacggtacgcaaggacggcaagacgtggacggctgacttctatgagaatggtcgttccgggcgcaggattcgcaagaaaggcttcgccaccaagtctgccgcgattcgctatgagcaggatttcttcgccgtgaagggcgagacgggccgaccgctggatgaccgtctctccgatctggtgaaggtttggtatgacctccacggctgcaccttgaaggatggcaagcaacgcttggcgcgctgcgaggcgctggcgaagcggctagggaaccccctggcgttcgagttcgattcgttggcgtgggcacgctaccggcaacgtcgcttgaccgaggtgaagcctgagacggtcaatcacgagcaacgctacttgtcggcggtcttctctgaactgattcgcctgggctcctggcacaaggaaaacccgctgggcaaggtccggcaaatcaagacggatcaggtcgaactgacgtttctgtccctggatcaggtcgctcgactgctggaagagtgcaaggccagtacgaacaaccatacctatccggtcgcgctattgtgtctcgccacgggagcccgctgggaagaggctgaaagcctgacgcggggcgctgtgcatggcggcaaggtgcactatcaccggaccaagaatcggcagagccgatcagtgccgatcccggacgagttggagaggttgatattcaaggtgggcatgcctggatctggccgcctgttcatgtactgccgtgccgcgttccgctgcgcctatcagcgttgtgggttccagacgccgggccagatgacccacattctccgccataccttcgccagccactacatgatgggaggtggggacatcctggccctacagcggatcctcggtcactcctcgatcaccatgactatgcggtatgcgcatctgtcgccggaacatttggagtcggcacttcgactctctccccttacacagtgcgggtatctttcagaccatgatcaaccgctttcttga

SEQ ID NO: 330130 - DNA, 1818 bp, Pseudomonas aeruginosa
atggcaaatcagctaacccctggggaactcattgtcgccaagggaaaagttgcgaaagtcaaacaggtatttagtgacaaaacgataagggtaacaattgtcgactctggtgaagtaatactggtgtcggcgcgcgacattcagcgaatccctagtgttacggcaattaatggtagtgatcatggggagggtttgaatgtcaatgattacaccgttgatcaactttcattggcagctgagcgttttgaaattatcagaaagtggaaggttgagggaggggtagtcactaagtactgttctttactgggtgtatcaaagagttacttctatcgtttggctaaaatttttgacgctgacgtaggcccactatctttaattgcgcagacacggggtgtcaagaaaggcgttacgagactggatgagtcggttgaggtcataattttcaaggctgctaaaaaattcaagtcgaaaggagccagctacagcaaagtgtggagcgaggtggatgttgcatgtaaggagcaaggtttttcatgcccttccaaagatacggtattgaggcgtgtacgcttaatcctctcagaaaaaacaagaatgagaattaaagaaggtcctgatgccgcgacgcaagaattttcagctcgcccgggtaaaaaaaatcttgaaaggccgctgcaatgggtacagatggatcacaccctcgtcgatataattctgttggctgatgatcgcataaatattattggacgcccgtggctgacaattgtaattgatgtctataccagggttattcttggttactatcttagcctttacgtcccgtctactgtttcagtggcttgcgctcttagtcattctgtccttcctaaagtaaacttttcggcaagtgttggcttggatccagaagactacccctactatggaaagcctgaagtccttcatatggacaatgccgcagagttcaccagcccaaaatttaaagtagggtgtgaatcttttgggatttcccccgaataccgacctgtaggaagaaaacattttggcggtcatgttgaacggctgataggcacgttcatgactactaaggtgcatttcttgccggggactacaatgtcaaattctgttgcgcgcagaggacttaacagcgaaagaaatgcaaccatgaccttctctgatttttttcgctggttctctcgcgaagtagttgtctatcactcaacagttcatagcgcattaaagtgtagcccgcgacaagcgtggacaaactatttcgcgcccaacggagggcttccttaccccccggcaggcttgaattccgagcaattaaagatttggttcatgcctcaagaagaccgaaaaattaatcctggtggcattaatttgcatggccaagtttattgggatcctatattggggtctcatgtggggactagaaatgtcatagtcaaatatgacccgtacgatatgaatgttgtatgggtgaaattggatggccaattttgcccaatacacctgtctgacgtaaccgttgaggctcctacctatgaggaatatcgtgccggcaagctctatcgtcacccagtccgcatcggagccatagatagtgatggcgggttaaaagcctacagagggaagcaaaaaattgaagaggaaagtaaaaagttaacgcagaaggaaagacgccgagaggccgctgaaaaagtctatactgaggcaaatccaaatcctagaagtagtagctttaacgctgacagggaacatatcaagccaaattattcagcctctccaaaaaaatttcgacctggggatgagtcatga

SEQ ID NO: 330131 - DNA, 861 bp, Pseudomonas aeruginosa
atgagtgatgagcacgtccggtcggacatcagaaaatatttgtcttctaatattgatacgcgaatagccttaattcatcaagaaatatgggtgaacaataactctagtgcagctgtttttcgcatgatgaataatatcgcggatgtaccagatcgtatgagtgcgcctgctttgcttgtggttggcccaggtggctctggaaagacggctataatatctaagattccaaaccatgtaaaaaggagtgcagggttgatttttgtctccttggctgcatccccagaaatagataccaaaaaaagccttaaagatgagatagctttagcgctcggaataccagttggctctggctcaagtcgccgaagtagctctgacctgccaagcgagattagagaggttattaggctgaggcaaatttgggggctggtgatcgacgagtttcatgatgcactgctacgctcgaagcaagagcagcgttttaacatgtctattcttaaaaagctgctcggccctgaatatggattgaaactattttgctttggcactgctagtgcgcgcaacgcacttaaatccaattatgaatttaagagacgttttcacgaagttgctcttgatgactggatagagagtgaggagttcaggtcattcctcttggaggtagaggagtccctaccgctaaaacagccatcacatttgtactctgaggagatggtaggcactattttatctatgtcgaatgggcgcatggacaaaacactcgaattgataagggcggctgcctgttatgccataaaaatggggggggagaaggtggatgttgatatgctgcggcgagcaaacaagaatccttggggctattag

SEQ ID NO: 330132 - DNA, 1029 bp, Pseudomonas aeruginosa
ttgccaacaccaagttctgaagaaacactttcatcttggttgtttcgatgcagcattaatccaaacgccgctggcttccctcgattatcatcaacagaacgcccagcgtattggtgggagggtgtggagatcaaatattcggacccagactcagaattcttatccgccagccagcgattaagttgtgtagccggggacattacccctgaactattacgaaattttttttgccttcgaggcgataaattagtcgaatggaggtatcgccgttttttttgccctgattgcttacgcgatgatgtggcgaatggtcgtttgcctatatggcggaaggactggtgttacatttattcttgtgtctgcgctgcccatgatcgagagttggtgagactagttgatacaccgcgttactcaagggcatgggatgcgtttgtccaaagctgcaattcgatatcaaacaatgcctccatagaggaaactctattctttcgtttttgctcaagtaccttcacaaagattgagcatgctctgatcagtagagacaatcaacaacctacattgcacgatttattttataggctattcaatattttccttcaatgtccctttcgtggtagtagaggcggaatcgctagaatccacttgcaaacgaggaaagatgcacgagcacccgacgcaagctcttttgagcagagtatattattgggggcgtccacggccgatccatcaagtagatttggtagtttggtcttaaccgcatcactactggagattatcccctactcaaggtttttgatatttactaaactgtgtgagaaaagaaggggcgggatgctgatcccaagagacctgcataaggcagcgatttttccatatatcaacagggcaggctatgaaaccttgtaccgttttttagggggtttccctaggaaagattttccgttgctagatcgccatcttcaacttcaagaacattcgtatgttcaagatggtgtccttggcaagcgtctattcggatactcacaatga

SEQ ID NO: 330133 - DNA, 126 bp, Pseudomonas aeruginosa
atgctgctcatccaaaagattactgacattgaccgccagatccgtgtccttggcaatctggtaattgaaggctgcatcaaacaaggtcgtcgcctcgctctcgccggtgtcattgaaataccttga

SEQ ID NO: 330134 - DNA, 390 bp, Pseudomonas aeruginosa
atgctgaacaactttcgccaatccatggcctgggtacacacctggttcggtttggtgctgggcttcgtgctgatggtcgtcttctttttcggtgcactgtcggtgttcgaccgcgagatcgatcgttgggcgatccccgatacgcgcttcgagccgcagcctatgccgtcctacaacaacctgctgaaacaggtatttgccgatctcaaaccgcatccggtggatatggcggcaaccaaagggcgggtaatcggcgacctgccggcgccggaaaccatgcccatggtctcgctctatgcctacaccacccaccgagatcccgtgctgagcattggtggcgagtttggtatccccaaccagccaaaggacccagcggatgatcaatcgtaa

SEQ ID NO: 330135 - DNA, 141 bp, Pseudomonas aeruginosa
atgatcaatcgtaagatcttcaaggagtttttcaccttccgtccgcgcaagcggacccagcgcagcgcgctggacctgcataacatgactggcgtggtggcgttgccgttccacttcttttttgccttcaccggttggtga

SEQ ID NO: 330136 - DNA, 831 bp, Pseudomonas aeruginosa
atgtactacttcccggtctccgggaccttgctcaaaccgctgcataatcggcatgaggtgatcgaggcggcgcataccggcttgccccatgatgaggccggtgtgcccgcgaagatggcctccgccaatgccatggtggccgaggccaagcgcatctgggctacgcgcgatatgccgggagaggtcgggctgctgactatcgagcatctaaatgacgccaacggctacgtcagcatctaccgcgccggcagtgatcgtgtggcgctggtcggggagggcattcacttcaaggccagtaccggcgagctactgcgcaacgacccgccgagtgacccggttggttccgtcaatcaatttctcaccggcttgcacctgcagcacttcgaacactgggcgctgcgctggctgtacgtggcgggcggtctgctcggctgtgtgtgcatcgccagcggttttgtgttcttcgtcgagatacgcaagcaggagcacgcccgactcgggctgcagggctgtcggttggttgacgccatggcagtcaccacggttaccggcatgctgctggcagcggtcgccatgctggcggccaaccggctgctgcctgagcccatgcctggccgtggcgaatgggaaaagtgggtgttctggggtgcctggctgctgagtttgctgcatgcgctgttgcgtagtgcaccagtggcccaggcgcggcacaatccggcctggcgctgctctgcgtcgctgcggtgctgctcaactggatcaccacgggggaccacctggtcaaaaggatgctgcttgaaccctactgggccgtggccggcgtcgatctga

SEQ ID NO: 330137 - DNA, 318 bp, Pseudomonas aeruginosa
atgagtaatgcaggtctgtggttgctgggtgccgccgccagcatgggcttggcgaccagttggttggcgttgtccctgccggcgcactggcgccaggtgttcagcgccgacgaggttgcgccggactatctacgcagcctgggctggctggcgctgatggtatcggctgtgtgctgcttcaaggctgaccatccgtcgatggcggtgctggtctggctcaccctgttgccggtcgccgccgtagcaacggccataacgctgagctaccggctggggctgctgcgcctgttttgcccgttatttctgcgcactcgataa

SEQ ID NO: 330138 - DNA, 165 bp, Pseudomonas aeruginosa
atggacctcataacgctcaccatcatgaaccgagccgaatccccaactgccctgaagggtcccaaattgcaacccatatccttcaacacgcgtactatcgccgcaaacatcacaaaggacgtcactgacgcattcgaactgttccgccgctgtgattttcattga

SEQ ID NO: 330139 - DNA, 234 bp, Pseudomonas aeruginosa
atgcagcgctgcgataagcgcggcgagctgttcttctgctacgttttgcagctcatccacgaaaataacaaggacggtgtgagctgctttggcggcttcaccgagtttagtcagcagggttgtaaattcctcctcgagatcacctttgcccgccagagctgcctcggcttcgtagtcaataccgaccttgagatcgctgaacttcggctccaaagccttggcaaaaccggctaa

SEQ ID NO: 330140 - DNA, 1119 bp, Pseudomonas aeruginosa
ttggacgtatcatatattactgatcagatgccgttgatcgacgagcccaccctagaccccagtagattggcgttgaaggctcaggaggcggccgcaggctttgttgccagcggcaccgccgaaaacacggtacggagctatcgcagcgccctcgcctactggtcggcttggctgcacctgcgctacggcgttgcgatgggcgatgcgcctgtacagtcgactgtagtcattcagttcgtggtggatcacctggcgcgcccactggcaaatggtgcatggacctatctgctaccgccgaccatcgatgccgcgttagtcgcggcacgtgtgaaggcaaagccgggacctctgagctacaacacggtatgtcatcggctttcggcactgggcaggtggcatcgcttcaacaactgggaaagcccaactgaagcactggcagtgaaaacgctgctgcgagatgcgcgaaaagcccaggcgcgccagggggtagttgtccgcaaaaagacggcagctgtggtggaggctctggaggccatgttggcgacctgtacggatggcattcgcggtactcgtgatagcgccctcctcctgatggcgtggagtggcggcgggcgtcgtcgatccgaggtgaccggcctgcaggtcgacgatgtgcgcaaactggatgaagacacttggctctatacgctgggcgtcaccaaaacagacaccacgggatcccgtcgcgaaaaacctctgctgggtcgcgctgcacacgcgttgacggcttggctcatcgccgcgcccgccgataccggtccgctttttcggcgcctctacaagggcggcaaagtcagcccgttcggactatcgtctgatcaggtagcacggatcgttcagcgccgcgccaaattggctggcctcgacggcgactgggccgcgcacagcttacgctcgggctttgtaacggaagcgggtcgccagggggccccattgggtgaagtgatggccatgactgaacatcgcagtgtcgaaaccgttatgggctacttccaagccggagtgctgctgagcagccgcgcctcgatgttgcttcaacccctgcccgccccatcaggcccaaccaaccagcctgactag

SEQ ID NO: 330141 - DNA, 990 bp, Pseudomonas aeruginosa
atgagccacgagatcgagcggtacctgcaggccggtacccgccccaacacccggcgcagctaccggcaagcgctcgagcacttcgaggtcgcctggggcggctttctgccggcgaccagcgatgccatcgtgcgttacttggtcgatcacgccgccacgttgtccagcaacaccctcaagctgcgcctggcggccttggcgcagtggcatgtcagccagggcttcccggatccgaccaagaccccgctggttcgtcagatcctcaagggcattcgtaccttgcacccgaagccggagaagcaggccgaaccgctgcagctgcgcgaactggagcagtgcgtggcgtggctggagcgggcgggcgagaaagcactggacgagggcgacctgccgcagctgttgcgctgctggcgtaatcgcgcattgctgctgatcggcttctggcgcgcctttcgcagcgacgaactgtgccgcctgcaggtcgagcacatccaggtacggccgggggagggcatgcagctgttcctgccgtggagcaagggcgaccgtgacaaccagggacagacctacagtgcgccggcgctggcccgcctctgcccggtgcaggcctacaacgactggatctgtgtcgccggcatcgcccgcggtccggtgttccgcggcattgaccgctggggtcacctgcgcgagcagggcctgcacccgcacagcgtcatcccgctgctgcgggcggtactgaaagcggccggattgcccgccgagttgtatagcagccactccctacgccgtggctttgccacctgggccacgcgcagtggctgggaccagaaggcgttgatgggctatgtcggttggcgcgatgccaagtcggtactgctctatgtggacagcaccggctttttccccgggcaactgcggccgatggtgccaggcctggaggcggaggctttgtcgagtttgcctcgtccaattgcactgccgggcagttga

SEQ ID NO: 330142 - DNA, 672 bp, Pseudomonas aeruginosa
atgaacctgccactagccatttcagaactgcagcaagaaccgcaatccggccttgtctatcgtcgggtaatccgtgctgctgcccctcgtgcacgtctcctgctattgcatggtgtaggcggtaatgaaaccaatctggcaggcctttccggctttatcccagaaggaattgaaatattgctggtacgcagccgcctgcaaatcgcagctgagggctttgcctggtttcaggtaaatttcaccaacgaaggcccggtgatcgttgaagagcaagcggaaaccagccgccagaaactagtggagcttgtaactgccttaccacaaatgcctacagtgatagctggctttagccagggcggtattctcagtgcaagcgtcgggcttagcgcccctcattgcgtgctaggctttggcttgttcagcggcagaattctccctgagctggcaccacacattgccagcgctcaagcattgagttcgctatcggcgtttattgctcatggctatggtgataacaagctccccgtgtcttgggcacaaaaagcggatgcctggttgcaccaactgaacgtgcatcatgaaacatacctgtacgacatgggccacgaaatcaccaatgaagaagtggaagatttcattcagtggctgaagcctgtattgaacatcgcctga

SEQ ID NO: 330143 - DNA, 816 bp, Pseudomonas aeruginosa
atgagtctggcctatccagtgttgttcgtgtcccacggagcaccaacctttgccatcgaacccggccaggccggggcacgcctggctgagctaggccgagcgctgccacggcctagcgccatcgtaatcgtctctcctcactggatgacccgtgggagcgtgcgtgtaggcagcagcaaggcgccggaaaccattcacgacttcggaggctttccgcaagcactgtatcgcctgcaataccctgcaaccggcaatcctgcattggccgagcaaatctgcaacctgctttcccgcaatgggattgccgcaactaccgaatcgaatcgaggcctggaccacggcgcctgggtgccgttgctgcacctattgcccactgcggatatcccggtggtccaagtgtccatgccccacccgctcaatccattgggtgcctggcagcttggccaggcactcaagccgctgcgcgatcagggcgtgctgatcattggctccggcagtctgacccataacctttatgagttccgtagcaactacggcgacccggctgagtacgtagcgcgtttttccgactggatccgtgacgccctgcaagccggtgacctgccagcgctgctcgcctaccgccgcaatgccccggaggccgagcgtgcgcaccccagtgaagaacatttgttgccgctatttctggcgctcggtgccgcaggcgagcactacgccgtggatgtgctagagggcggtgtcgccgacggcgtactggctatggacagctacctgttcaaaagcccaaccgccactcaggagattactcaagcatga

SEQ ID NO: 330144 - DNA, 900 bp, Pseudomonas aeruginosa
atgacctccgaagattccttcagcggcatccatatttttctcgccaccgcccgctctgcgaccttcacagaggcagccgagcgcctggggctgtccaagtcggccgtaggtaaggcgattgcacggctggaggcacgggtgggtaccagcctgttttatcgctcgacccgccgcttgtccctgtctccggatggcgaggcctacttcaccgtgtggtccaatgcgctggaggagatcaaggccaccgagagcaacctcggcaacaagttaggcgtgcccacagggcgcttgcgggtggacatgccggtcgcgttcggtaaacaggtggtactgccggtgctactggagatgagcaaacgcttcccgcagttgcaactgaccttgacctttagcgaccaactggtggacctgacggaagaaggtatcgacctggccattcgttttggcagcgtcgacaacgtccccggcctggtggccagacgcctgacgtcacaccgctgggtaacctgtgcagcgccgggttatctggaagaatatggtacgccgttgacgctcgaggacatgggccagcaccgcagcatcgtcggctatcgccgcggcagcctaatgccctggaaaatggcccaggccgggcaatccttgaagttctcgccaccaccgacctatcagtttgacgatgccgaagcgatgattgaagccacgcgagccggcctcggtatttgccagatgccgctctgtctatttgaaaaggacatcgcccagcaggttgttgttacggtactcgagccctttgaaccggcgcctgtcgaggtccacgcactatggtcgaagagcaatcatctgcggcccaaaattcgttacctggtcgacgagttattgaagctgtatggccacagctaa

SEQ ID NO: 330145 - DNA, 357 bp, Pseudomonas aeruginosa
atgaaagacgaagtcatcagcatttttaccctaagcctggctccggaagacttccctgaatttaaaacgctggttgccaagattgtcgccgctacgagcgaagagcctggcaccttgatgtacgaatacagcgtcaacgaggctcgcactgaggtgcacattatcgagcgttaccgtgccgatgctgtcgttaaccatattgaagaaaccttcgcgccgttcggcgaaaagtttctcgagctggtgaaaatcaccagcctgctagtttatggcaacccagacgcgccgacgcgcaagcacctggatgcctttggcgcggtgtacatgaatccgtttgatgggtttacccggacctga

SEQ ID NO: 330146 - DNA, 795 bp, Pseudomonas aeruginosa
atgcacatcaatcttgccggcaagaccgctttggttactgcctccacaggcggcatcggcttcgccattgcccatggcctggcgctcaccggcgctatcgtgatcatcaacgggcggagtgacagctcggtcgaaaaagccctggcacgtttgagcgaagcggtaccgcaggccaccttcagcggagtcgcggctgatctgggcaatgccgacggcgttggcgttcttacagctgcgcttcccaccatcgacattctggtcaacaacgccggcatctatggtttggccgatttcttcgaggccgatgacgactgctgggaagactattggcaaactaacgtaatgtccggtgttcgcctgagccgcgcgttggttccagccatggtccaacgaggttggggtagggtggtgtttatctcctcggagtcagcccgaaatatcccggccgatatggttcattacggcgtaaccaagacggcgcaactggcgttgtcgcgtggcttggccaaacgtgtggccggcagcggcgtaaccgttaacagcgtgctgccaggcccgacactgtctgatggcttggctgagctgctcaaaggagagtctgcccgctccggcaaatccttggaggccgtcgctgccgaattcgtcatgacccaccgtcccacctcgttgattcaacgtgcggccacggtcgatgaggtcgccaatatggtcgtctatatctgctccacccaggcgtcagccaccagcggcgctgcgctgcgggtcgatggcggcgtggtggacgatatcctctga

SEQ ID NO: 330147 - DNA, 405 bp, Pseudomonas aeruginosa
atgaccgccgctagccgcaccctcccctatgccgccctggtactacgcctaatccttggcgtgatgtttctcgctcatggcctgaccaagctgctggtgttcaccccggccggcacagcaggtttctttgagtccgttggcttctccggctttcttgcctatccggtcattgcctttgaagtggtcggcggcctgttcctgatccttggtgtactcgctcgctgggtagcggccctagccaccgtgcaactgctggtggcagcaagcgtgcacttcggtaatggctggagcttcaccaacgccaatggtggctgggaatacccggtctttctggcattcactgcactggccttggcgctgctggatgacggagccttcgccttgaaacgttcagcacgtaactaa

SEQ ID NO: 330148 - DNA, 630 bp, Pseudomonas aeruginosa
atgaacattacccttatcggtaccggcaacatgggctcggctttcgctcaacagttgtcccagtttggacaccatgttcgtatcaccggccgtgatctggacaaggcgcacgccctcgccgcgcagcatcaaaacgtcgaagcattcgccgctgatcaggcccttggccagaacgaagtggtgatcgtcgccactgcttaccaggacgccttaaccgcgctgaaaagtctgggcagtctcgaaggcaaagtggtcatcgacatcaccaacccgctgacagccgactacatgggtctgaccatcggccacagcaccagtgcagcggaggaaatcgccaaggcgctgccaggtgtggagctggtcaagggcttcaacaccctgttcgcccaagtgctggccagcggtcccacatttgccaacgagcagcaaggcagcgtgttcctggccagcgatagcgcacgagccaaacaaaccgccgttgctcttgcgcaaagcctgggttggaaaaccgtggatgccggcggtttggtaaacgcgcgttatctggaagcgttggccgggttgaacatctacctcggctatggcgcagggctcggcacgcagatcgcgccggtctggctcaatcgttaa

SEQ ID NO: 330149 - DNA, 945 bp, Pseudomonas aeruginosa
atggatcgcgcgttggagatgcaggtgttttgcgccgtggtcgacaagggcagctttgtcggtgccgtcgatgcgctggaaatgtccaaggccgccgtttccaggcatgtaaatgcgctggaggaacgcctgggcgtacgcctgctgcaacgcaccacgcgacgcttatcactgaccgaagaaggacgggttttctaccagcaagcgcgggaagtgctggcgttgatgggggaggcggaaagcgctgtttcttcgggcaaccatgagcctgccggcgtgctgcgggtcaatgcgccggtgagttttggtgtgttgcacctggcgccgctgtggactgcctttttggagcaaaacccgaagattgagctggatatcagcctgaacgatcgccaggtcgatttggtggaggaggggtatgacgtcgcggtgcgcatcgcccggttggaaagctcttcactggtggggcgccggtttgccagcacgcggatgcgcctgtgtgcagccccgagctacatcaaaagccatgcaccagtagaagtgccgcaagacctggccgagcaccgggtgattgcctatagcaacttttccagtgggaacgaatggagttttaccgggcccgatggcgagcataaggtcaacacgcgttcggtcattcgctgcaataacggtgatacatgccgatctattgcgttgactgctggcggcattttgctgcagccaagctttatggtaagtgaggatcttcggcggggtgatctggtggagttgctaccggagtatcgctcggtagaactgggtatttatgccgtctacccaacccgcaaacacctggcatccaaggtgcgggcatttatcaattttctggtcgaacagtttgagcaggtcgactgggagtccggctacccagcacaaaagagccaagcccgggctgcaaagaagatgtaa

SEQ ID NO: 330150 - DNA, 198 bp, Pseudomonas aeruginosa
atgcccgttgtacgagtcagctggttcgaaggaaaagaccacgccgcgaaggaagctgtcgctgcagaaatcacccagagcatcgtgaaaaacaccggtaccgatgccaattacatctacgtcatttttgaagacgtggcgccatcggattgggccggtgcaggcaagctgttcggcgacgatccgaagaagacctaa

SEQ ID NO: 330151 - DNA, 1155 bp, Pseudomonas aeruginosa
atgatccgtgataccgaaaccctgcagattctgctggattctcttcgccagttcgtcggtgaggtactgattcctcgggaaaacgaggtggctgaaacggatgcgatccctaaggacatcgtcgatcagatgcgcgagatgggcctgttcgggttaacgattccggaagcctatggcggcctgggcgtgactatggaggaagaggtaaacatcgccttcgagttgggtcgcacctcaccggctttccgttcctacatcggcaccaacaacggcattggctcaatcggcattttgcttgacggtacagaggagcagcgcaaccagtacctgccgcaactggcaagcggcgagctgctcagctcgttctgcctgaccgagccagatgccggctccgatgcgggctcgttgaaaaccaatgctgtgcgtgacgctgacagctacatcctcaacggtaccaaacgttacatcaccaacgcgccacacgcgggcatttacacggtgatggcccgtaccaacccggaaatcaaaggcgcctccggtatcagcgcctttatcgttgagcgcggcacacccggcgtgtcgctgggcaagacggaccacaagatgggccacaaaggcgcccatacctgcgacgtgatctttgaaaatgcgcgagtgcccgccagccagttgataggcggcgtcgaaggcgttggtttcaagaccgcgatgaaggtgctggataagggccgcctgcatatcgctgcactgagtgtcggcgcagccgaacgcatgctggacgatgccctgcactatgcgctggaccgcaaacagttcggccagcccatcgcggagttccaactgatccaggcgatgctggctgatagcaaagccgaaatctacgcggcccgctgcatggtgctggatgccgcgcgcaagcgcgacgagggcaagaacgtcagtaccgaagcctcctgcgcgaagatgttctccaccgagatgtgcggtcgtgtcgccgaccgctgcgtgcagatccacggtggcgccggctacgtcagcgagtacgccattgagcgcttctaccgtgacgtgcggctgttccgtatctacgaaggcaccacacagattcagcaggtggttatcgcccgtaacatgatccgcgaagcgcagcggtga

SEQ ID NO: 330152 - DNA, 867 bp, Pseudomonas aeruginosa
atggcacgcaacaaagcggatcagcagaaggctgagagcagcactggagcggatgaaatcgctttactgaagatgggcatgctcgacccggccagtgcgtcgagtgaggacgaaaccagcggccagttcgtgactgcgctggcacgtgggctggagctgatgcggtgctttaccccgcgcgacaacgtgctgggcaatcaggaactggcgcggatgaccgggctacccaagccgaccgtgacgcgcttgaccaacaccctgatgcgccttggctgcctcaagcgtgaggtgcactcgggcaagtaccagctggatgtcggtgtgctggggttcggctacgccatgctgtcgaatctgtcgattcgctcggtggcgcacccgctgatggaagagctggccaatcacgctcaagccgcagtggcaatggcggcccgggatcgcctgcagatggtttacctggacgtcgttcagggccaaggcaataccacgatgcggcggcagatcggcagctacttgccactggcgcaaagctcggcgggacgcgcatgcctggcggcgatgccagagagcgagcgagagtttctcctcgaccacatgcgccaacgcgaagcagcacagtggccggtgatccgcaagggcctggatcgcgcgtttcgcgattacaccgattacggcttttgcctatcgatcggcgagtggcaccgcgacgtcaactcagtcgccgtgccgctgttacacccgcagttcgggttactgaccttcaactgcggtggaccgagcttccagcttccacgggacaagctcactgacgatatcgggcctcgcctgatcaacatggttaacaacatcggcgccgccgctcggtaa

SEQ ID NO: 330153 - DNA, 786 bp, Pseudomonas aeruginosa
atgagtcacgaacctgaatctgtagtgaacctggaaattcgagaagacggcgttgccgtcgtacgcatcgaccggccagaagccaagaacgcgctcaatagcgcggtgcgtgaacaactcgccgagcactttcgggcactggctcgcaatgggcaggtgcgggcgattgtacttaccggcggtgacacctgttttgtggccggagccgatatccgcgagtttgcccaagcgcgcccgattgaaatgtacctgcgccataccgagctgctgtgggaagccatctcccgctgccccaagccggtcatcgctgcagtgaatggtttcgcccttggcggcggctgtgagctggccatgcactgcgacatcatcgtcgccggcgagtcggcgcgctttggccagccagaagtcaaactcggcctgatgccgggcgccggcggtactcagcgtctgatccgcgcggtcggcaagttccaggcaatgcgcattgcccttaccgggtgcttggtctcggcccagcaagccttggccatgggcatgctgagtgaagtggtgggcgacgagcagaccattgtccgtgcactagagctggccactgaaatcgccgccttgccgccgctagccgtcgcgcagatcaaagaagtgatgctggccggtgctgacctgccgctggagagcgcgctggtgttggagcgcaaggccttccaattgctattcgattcgagcgaccagaaagagggcgctcaagccttcctggaaaaacgcaaagcgatcttctcaggagaatga

SEQ ID NO: 330154 - DNA, 1542 bp, Pseudomonas aeruginosa
atgacacgtgaaattaaccggatggcggttgttggcgccggagtcatgggtacaggtattgctcagatcgccgctcaggcgggcattcgcgtcacgctgtttgatagtcgcgaaggcgctgcgcagggcgcccgcgaaagcttgaaaggcacgttggacaagctggtcgacaaaggcaagattgccaacgccgatgcgctggccacgctctcccgcgtgcaagtggcgagcgcccttacggaactgagcgacgtcgacctggtagtggaagccattatcgagcgcctcgacgccaagcagggcttgctcgccgagttggaagccgtggttgccgatgactgcattctggctaccaacacctcatcgctctccgtcaccagcattgctcgcaattgccgacttccccaacgcatcgctggctttcatttttttaaccctgtgccgctgatgaaagtggtggaagtcatcgatggtctggcgactgacccgcaggtaggcgacagcctccgagccctggctgcccgcatggggcataggggtattcgggcgaaggacacaccagggttcatcatcaatcacgccggccgtgcatatagcactgaggctttgcaaattctcaaggaaggcgtagccgaacccgccgaggtagaccgtatcctgcgcgagggtctgggttttcgcatggggcccttggagctgtttgatctgacggctcttgatgtttcccatccagtcattgagtcgatctacaaccagttctaccaggaaccgcggtatcggcctgcagcgctaacacgccagatgctggatgccggctacgtcgggcgcaaggtcgggcgtgggttttaccgatacgccgacggccagatgatcgatccacccgccgcacaggcagtacctgcgctggaagcatttccgccggtttggcttggcactgaaaaccccgaggatcgtgcacgtttcaccgagcttcttcagcaggtgggcgcgcgggtcgaagagggcacggtcccaagcagcgaggccctgtgtttgctggcaccttacggtctggatgccaccggcgccgtcggcctgtttggcaccgatcctgagcgcacggtgtgcatcgacccgctgctggatatcgcccgctaccgcacgctgatgctaaatcccgctacccatgccgacatgcgcgatgccgcccatgcgctgttgggccgcgatggcgtgggcgtcagtgtgatcaatgacagtgtcggctttgtggcccaaagggtactggccatgatcgtcaacctggcgggcgatatcgttcagcagcgtatcgccagtgtcgatgacctggatgaaggcgtgcgccgtggtcttggttatccgcaaggtccgctggcctggggcgatagtgtcgggcccaagcgtttgctcaccactcttgaacgcatgaccgaactgacgggcgatccccgttatcggccgggtccctggctgcggcgacgggccgccttgggcctttcattgcgtcacaacgaaccactcccgactgaacctcaacgctag

SEQ ID NO: 330155 - DNA, 1203 bp, Pseudomonas aeruginosa
atgctcgacgcctacatcttcgcgggactgcgcacgccatttggccgccacggcggcgcactcgcttcggtacgcccagacgacctcgccgcccatgtgatccacgaattgctcgctcgccacgccatccctggcgaagccatcgaggacgtgattctgggcaataccaaccaggcaggggaggacagccgcaacatcgcgcgtcacgccgcactgcttgcaggcttgcccgtgaccgtacctgggcagacagttaaccgcctgtgcgccagtggtctggcggcggtgatcgatgccgcccgcgcagtgacctgtaacgaaggcgaactgtttgtcgccggcggggtggagagtatgtcccgtgcaccctttgtcatggctaaagcagaagcggcctatagccgcgaactgacggtgttcgacagtaccattggcgcccgttttcccaacccgaagatcgtcgccgagtttggcaacgacagcatgccgcaaacgggcgataacgtggctcaggagtacggcatctcccgtgctgaggccgacgtctttgctgccggctctcaggcccgttatgaagccgcacgtagcgcaggtttctttcaggaagaactgctcgcggtcagcgtgcccaccgggcgcaagacgccacccaatgtggtggagcaggacgagcacccgcgcccgcaatcggacctgatcgctttggctcgcctgaatcctctctccgaaggtggtgtggttaccgccggcaacgcatcaggcgtcaacgatggcgcggcggcattgctgattggctcggccgcggcgggcgaacggcacggcttggttccgatggcgcgcattctgtcggccgccgccgtgggtgtggccccgcgcattatgggcgtcggcccggtggaggctattcataaggcattggctcgcgcgcagctcagcctggcggatatggacattatcgagatcaacgaagcgttcgccagccaggtgctgggctgcctgaaaggtctgggtgttgcgttcaacgacccgcgggtaaacccacacggtggcgccatcgccgtcggccacccattaggtgcatccggtgcgcgcctggccctgagcaccgctcgcgcgctgcaacagagcggcaaacgctacgctgtggtgagcctatgcatcggcgtgggccaaggcctcgccatggtgatggagcgtgtgtaa

SEQ ID NO: 330156 - DNA, 1239 bp, Pseudomonas aeruginosa
atgggtgctttgactgggtatcgcgtgctcgacttgagccgcattctggctggtccctggtgcggccaaactctggccgatctgggtgccgaagtgatcaaaatcgaacggccgggcgcgggtgatgacacccgtggctgggggccgccatggatgaaggggcagaacgccgagtccaccggcgaggcttcttattaccagtccaccaatcgcggcaagttgtcggtggcgctaaacatcgccagccccgaggggcaggaaatggtgcgggccctggctaccagttgcgacgtactgatcgagaactacaaggccggttccttggccaagtacgggctggattacgctagcctcgctgcgctcaatccacgcctggtgtattgctcggtgacgggtttcggccagaccgggccgcgcgccgcagaaccgggttacgacttcatcattcagggtatgggtggaatgatgagcatcaccggcgagcgcgacgatctgcccggtggcggcccgcaaaaggtaggcgttgccttcgcggacctgatgaccggcctgtactcgacggtggctatccaagctgcgctgctcagccgagaaaagaccgggcttggtcaacatatcgatatggcgttgctggatgttcaggtcgccacactgtgcaaccagagccagaactatctggcttccggcaagccgcccgggcgttatggcaacgcccacgccaacattgtgccgtaccaggtgtttcgcgccagtgatcgcgacttcatcattgcctgcggcaacgactcacagttcgtcgcactgtgcgacgccatcggcctgccagagctgccgaaagatccgcgtttcgcgcgcaacgccgaccgagtcagcaaccgcgaggagatcgttgccatcctgtcgcgtcactttctcggagggctcgccgatgagtgggtagggcgcattcacccgcagggcgtaccggtaggggccatcaacagcattgcccaggcgctggacgaaccacagatactggcgcgcaacatgctggtcaacattccccatcccttgaaagccgacttcgtcacggtcggcagtccgatcaagttgtctcgcacaccggtcgagtacctgcgccccgcgccgatgctgggtgagcataccgatgaggtgctcaagcgccagttgggtctcgatgatgagcgcctggccgagttgaaggcacaaggcatcatcgaacagcttggtgaacgctga

SEQ ID NO: 330157 - DNA, 765 bp, Pseudomonas aeruginosa
atgaaagtcctcgtagcgatcaagcgtgtggtcgattacaacgtcaaggttcgcgtcaaggcggacaacagcggcgtcgatctcgccaacgttaagatgtcgatgaaccccttctgcgaaatcgccgtggaagaagccgtacgcctgaaagagaagggcgttgccagtgaaatcgtcgtggtgtcgatcggcccgacggcggcgcaagagcagctgcgtactgctttggccctcggtgccgaccgcgccatcctggtcgaggctgtcaaggaagagggtgctgacgagctgaactccctggccgtggccaagctgctcaaggccgtggtcgacaaggagcagccgcagctggtgatcctcggcaagcaggccatcgacagcgacaacaaccagaccggccagatgctcggcgcgctgaccggcttcggccaaggcaccttcgcctccaaggtcgaagtggcgggcgacaaggtcaacgtgacccgcgagatcgacggcggcctgcagaccgtggcgttgaacctgccggcgatcgtcaccaccgacctgcgtctgaacgagccgcgctacgcctccttgccgaacatcatgaaggccaagaagaagccgctggaggtgctcaccccggacgccctgggcgttgccaccgcgtccaccgtgaagaccctgaaagtcgaagcgccggctgcccgccaggccggcatcaaggtcaagtcggtggcggaactggtcgagaaactgaagaacgaggcgaaggtaatctaa

SEQ ID NO: 330158 - DNA, 945 bp, Pseudomonas aeruginosa
atgactatcctggttatcgctgaacacaccaatgccgccctggcgccggccactctcaacaccgtggccgctgcgcagaagatcggtggcgacatccacctcctggttgccggtgccgcctgtggcgccgccgccgaagcggctgccaagctcgccggcgtggccaaggtgctggtggccgacaacgccgccttcgcccatcagctgccggaaaacgttgcgccgctggtagctgctcttgttcaagaagcagggggcaagggttacagccacatcctcgccgccgccaccagcaacggcaagaacatcctgccgcgcgtcgccgcccagctggacgtcgaccagatctccgaaatcatcgccgtggaaagcgccgacactttcaagcggccgatctacgccggtaacgccatcgccaccgtgcagtcttcggcggcggtgaaggtgatcaccgtgcgtgccaccggtttcgatccggtggccggcgaaggcggcagtgctgtcgtggaagccgtggccgttggcggcgacgccggcatctcggccttcgtctttgaggcgctggccaagtccgatcgtccggaactgaccgcggccaagatcgtcgtctccggcggtcgcggcatgcagaacggcgacaacttcaagcacctgtatgccctggccgacaagctcggcgccgccgtcggtgcttcgcgcgctgcggtcgacgccggtttcgtgcccaacgacatgcaggttggccagaccggcaagatcgtcgcgccgcagctgtacatcgccgtcggcatcagcggtgccatccagcacctggccgggatgaaagactccaaggtcatcgtggcaatcaacaaggacgaagaggcgccgatttttcaggtggcggattacggtctagtgggtgacttgttcgaggtcgtgccgcagttgcagcaagtgatctga

SEQ ID NO: 330159 - DNA, 603 bp, Pseudomonas aeruginosa
atggccggaaacatcaaaaaacaggtcgatagtatcgactacagcaccgtcgcggttccggaagaacaccgcatgagcaaaggctcactgacgatggcttggtgggccatctgcagtgctatgttttggctggtggtgtccgccaccctggcaatgagctttggtacgatgaatgccataatcggcttactcttgtcggtcgtaacttatgcggccatcaacggggtcattgcccgctacgccattaagaccggattatcggtcgcactcttctcccgggtgctattcggacgcgccggcgcagcactggccaccctgattttcttcgccacggcgatctactacagcgtgtttgaaggctcggtgatcgccattgctatccaacactacgtgtccgacatcacgctcaatcaagcctacctaatagtggtgctatacagcgtgccactggtgttcggtagcgtgcagacctggctggataagttcaatggcgtgctgctgccgctctacctgattggtctgattgccgtagtagcgatggccgtcggtgaatacggctacagttctgcctggttggaaatgggcctgagagcgggccagtaa

SEQ ID NO: 330160 - DNA, 708 bp, Pseudomonas aeruginosa
atgatgtacacctgggactacgcacgcttcggtcgtaagcaggacgccagctaccacgctaaatttaacttcggcctaccattctatatcttcacctttcttattaacggtctggtcggcatctttctcgccgccaccattcccacagagggcggcctgtctgaggtctcggtggtgctggccattgtcgagctgatgggtatctgggggttgttgttcgtttgggtcagccagacccgtatcaataccgcaaatttcttcatggccgctagcaacatgcatgcgttcttcggccgttttggcttggcggctgtgccttatatggcatgggccgtagtagttggcatcgtggtctacacaatgatgttgctcaatgtgttcagctacattctgcaagccctggcataccagagcatctttgtagtggcttgggtagcgatcgctttggcgcatattttctcgccgaaatatacccagctgttcgagggcaatattgaattcgctctcgaacgagtcaacgccttcaacccgtgcggcttgatcgcctggttctttgccgctggcctggggatagtgctgctgaatttcggcggagcaacgctggcgaccttctcagcgccggtgacctttgtctgcgcgttcgccagctactggctgctactcaacagcgccaaacgcagctggtttgtccgcaccagctgcagctga

SEQ ID NO: 330161 - DNA, 1179 bp, Pseudomonas aeruginosa
atgaaaatgatcaacctgcacccacaagcaactctcatattacttccattgttggcatcgctcgcgctacccgcaggtgcggtggctatcaatgacaacttggacattggcggcgccgtgcgtgcgcgtatcgactacgaccccgaccgggatatcgagaagctgagtttcgatactgcctttctcaccgctacctacaactccgatagttggatcggcgcggctaaataccgtttctatggcgacgcttaccctttcgactataccgacaagatcggtgacatcgccttcgccgaatatgcatggatcggctacaagttcgatgagtcgcgtcagattcaggtgggactaaacaagattccgttcggcctgctgccctatgccggcagcactttcttcttgaccttgggcagcgtgatcggcctggaagacattgcgaaccttggtgttaaatacatccagcagcaggatgactggaacttccaactcgcttactacctaagcccggctgatcagggtcaaggtacaagccgcggcgggcggacctatgcaaccagtgttgctacggcagatgactacgtcgtcgacggcagcgataaccacgagcgcgacatcttagtcgggcgtctggcccgcaacctaaagcttgggagctggcagtcggagatcggcgcctcggcattgacctcgacgctgcagaaccaggacagtcgtgatagcggccgccgaaatgccctagcagtccactactcgggcaagaatggcccctggggcgtgcaactgcaagccactcgccaggacatgagcccggagaatcccggcagagacaagctggttagcttcggcagcttcgacggcacctttaacgttgccgccaagggtaacctctatgtagccgacctcagctatgacattcctggctcactcgggtggctctctggtgtcaaggtttacggtaactacagcctgttcgacaaggatgagtccagcttcgaggattcccagcgcttcatccttggcacatctttctcgctgaaagacctatggatcgccgtcgagtggttgcacggcaagcacgatccctacatcggtggcggtagctacacccagagcctgggcgccggcggtagcgaacgctgggaaaaccagttgtataccaatatcggttactacttctga

SEQ ID NO: 330162 - DNA, 1278 bp, Pseudomonas aeruginosa
atgacgcctgacagcgcagaggtatcggcggcgtcggtgacgtggatgaacgcggagccggacacgctgatggagcgggtgcttgcgccgctcaatctcaagcgtgcgtatcagcgcgtggtcagcaacaagggggcgccgggtgccgatggcatgacggtcgccgacttggcaggctacgtgaaacagtattggcccatcctgaaggtcaggctgctggcaggtgaataccatccccaggcagtgcgggcggtcgaaattcccaaaccgcagggcggtatgcggcaactgggcattcccagtgtcgtggatcgcctgatccagcaagccctgctgcaacagctcacgccgatcttcgatccgctgttctcggactatagctacggcttccgtccgggcagaagcgctcaccaggctgtcgagatggcccgcacccatgtggcggcgggtcataggtgttgcgtggaactcgatctggagaagttctttgatcgggtcaaccacgacatcctgatgttctgtgttgagcgccatgtcgaagacaaacaggtgctcagactcatccgccgttacctcgaagcgggcgtcatgtcgggcggggttgtcagccatcggcaggagggggcgccgcaaggcggcccgctttcgccgctgctgtcgaacatcctgctcgatgaactcgaccgtgagttggagcggcgaggccatcgcttcgtgcgctatgccgatgacgcgaacatttatgtccgtagtccgcgtgctggcgaacgagtgctggccagtgtcgagcggttcctgaatcaccgtctgaaactgagactgaatcgggacaagagtcgcgtggctgggtcgtggaaatgcgactacctggggtatgggatgagttggcactcgcagcctagactgcgagtggcaaccatgagcctgcgccgtgtgcgcgaccgtctcagggaactgctgcgaggggtgcggggccacaagatggcgaatgtcatcgagcgggtaaacccggtgctgcgaggctgggcaggctacttcaagctcagccagagcaagcgtccactggaagagctggatggctgggtcaggcacaaacttcgctgtgtcatctggcggcaatggaagcagccctctacgagggcgcgcaacctgatgcgcctgggattgagcgaggagcgtgcctgcaagtcggccttcaatggccgaggcccgtggtggaactcaggagcgccgcatatgaatcaggcgctgccgaagaagctatgggacagactttga

SEQ ID NO: 330163 - DNA, 1746 bp, Pseudomonas aeruginosa
atgaacacagtagacccgatcaccctggcagtcgtgcgcggtgcgctcgaaacagcccagcgagaaatgaccctgacgctggaaaagaccagtcgctcgagcgtgttcaacctcgcccacgactattccaacgcactcttcgatcacctcccggaaatgatcctgcaaggccaggacattcctattcatctcggttcgcttatcccagcgatgaaatgcgttgctggcttcttcggtgatgagattgccgagggcgatgttatttatcataacgatccagcctacatgggcagtcatatcctcgactgctgcatgtacaaaccggtgttctataagggcgagctggtgttctggacggtctgcaagggccacctgaccgatattggcggcccggtaccggccggctacaacccggacgcaaaagaaatctacgcagagggcctgcgcatcccgcctgtcaagttgtgggcccagggccagcgccgggaagacgtaatcaacctgctgctgaccaacatgcgcgcccgcgcctatcaagaaggcgatctgaatgcccagtacggtgcttgcagcgtgggcgagcgtcacctgatcgagttgctcgatcgctatggcgtcgaccaggtccgagcgtgcattaccgagctgaaagatatggcagaccgtcatatgcgcgcattgttgcgtgatgtgccagacggtttctacagcggcactgccattctcgaagactccggtcatggtctgggagaattgtcgatcactgcccaggtggaaattcgcggcgacgaggcgcacgttctgatagagagcccgccgcaggtgccttacttcatcaactcctacgcgggcaattcgatctccggggtttacctcggactgatgatgttcgcccaggtgccaccgccctacaatgaaggcctctatcgctgcgtgagtgtagaccttggcccgtccggtactctgtgcaacgcccaggagccggcaccgcacgtcaactgcaccactactccgatggaaaccctcgccgatgccgtgcgtctggcccttgaacaggcggctccggagcgtgtgaccgcctcctgggggcatgccagcgggatcaatatcgctgggcacgacccacgcaacaacaacgatgaatatgtgaccatggtgctggcctcggtcatctccggcgctggcgctaacaaggctatggatggttggcctgcttgcggcccgctgtgctgcttcggcgcgctgatgtccggcgatatcgaactgcttgagtactcctatccggtactgatacaccgctacagcctgatgaccgacagtggtggcgccggtgaattccgcggtggctctggtactcgcctggagctcgagccgctgaagcacgccatgaccgtggtcggtttcggtgagggccggcagctgcctaccgccggtgcggcaggggcgaagaatgttctgctcgagcccaagctcggccgcttgatccatagacatgtcgacggtgaggaagaccattacatccagaacactctgctgaccgcacaaccaggtgagcgcgtaatcaacgtcaacccgggcggtggtggctatggcgacccactacgtcgtccgctggccacggttctagccgatgtgcgcaacggcttggtctcgattgacggcgcgcgccttgaatacggcgtagtgattgacggcaacggccaactcgatgaagccgcaacccacgcacaccgagccgcgcactga

SEQ ID NO: 330164 - DNA, 2091 bp, Pseudomonas aeruginosa
atgagcaaacaacaatatcgcctgggcatcgatgccggcggcaccttcactgatttcatcctcgccgaccatcagggcaacgtgcagttgttcaaggcgccgtccaccccacatgacggcaccctggccatacgcaacggtctggcgcaaatcgccgatgccctcggccgtacaccagccgagatcattgccgactgcgatctgtgcatcaacgggacgactgtggcgctcaacgcactgatcgaaaagaccggggtcaaggtgggcctgctgtgtaccgatggccatgaagacagcctggaaattcgccttggccacaaagaagatggccatcgctatgacgccacttatccaccggcgcatatgttagtgccgcgccacctgcgccgtccaatcggcgggcgtattatcagtgacggcagcgagttcagcccgctagacgaggcggcgattcatgccgccatcgactacttccgcgaacaacaggtgcaggcggtggcgatctccttcgtctggtcggtgcgcaaccctagtcacgagcagcgcgctatggctatggtgcgtgcggctttacctgacgtatttgtctgcagcggccacgaggtgttcccgcagattcgcgaatacacacgcacctcgacaaccgtggtcaacgcctaccttagcccagtgatgggtcgttatatcgaacgcatcgacgcgctgttcgaggagctgggcgcgcagcagcctacccgctatttccagtccaacggaggtctggctcctggcgtggtaatgcgtgagcgggcggtcaacgcgatcaactccggtccggcatctgccccgcaagccggcttgtgcgtggcccagccattcggtatcgacaacgtaatcaccgtcgatatgggtggtacctcgttcgacatcactcttagcaaaggcggtcgcaccaacttcagcaaagacagcgacttcctccgttaccgtatcggcgtgccaatgattcaggtggaaacccttggcgccggcggtggctcgatcgcccaccttgacgacttcggcatgctccaggtcggtccacgcagtgccggggctaaccccgggcctgtgtgttatggaaagggtggggtcgagccgactgtaaccgatgctaacctggcgctcggttatctggctgatggtgcactgctcggtggcagcatccgtctaaatcgacaagccgcgatcgatgcgatccgcagtaaaattgccgaaccgctgggtatcagtgtcgagcgcgcggccgtcggtatcattaccctggttaacctgagcatggttagtggtatccgccgcgtgtccattgagcgtggttatgatccccgtgacttcgccctgatcggtgccggtggtgcagcgggcatgcacgtgatgcgactagctgaggaaatcggcagcaaggttgtgctgattcccaaggtggcttcggggctgtgcgccttcggccagattctctctgacatccgctatgatcagctgactactttgccgatgcgtttggatgacgagttcgtcgatttggagcaactaaaccaggccctgcagcagttacgcgagcgtggtatgacgaacctgcgagacgatggtttcggtggtgacaatcgtattgaatgccagtacagcctggagattcgttacctcggacagatccacgagtgcagcgtcgaactgagctgcgaccggctcgaccgtagcagcctggcggccctgcgcgaatccttccaccagcggcacaaggcgctgttttccttcagtgagcctaacagcccggtcgaactagttaatctagagtgctcggtgatcgcgcggttacagcgtccaccaatgcctgaacttgcaaccccgctcaaggcaacggccgcgattccggctggtcatcgtccgatgctgttcaatgcgcaagacgattggcaggacacgcctgtgtacaacggcgaccgcatagaagtagggcagattattcaaggtccctgtgtgattgaggaagcgaccacaaacatcgttgttccaccgggctggcgggtcagtctggatccctcggccacatatgaactgactcccggtcattga

SEQ ID NO: 330165 - DNA, 960 bp, Pseudomonas aeruginosa
atgacagatcaattgtctacgcggtattggcctgagggagaaaggcaatcgcgttgggccgaagccatcggcaatacatattttccattgtcgttggagttcaattccagcgccattttccaaggcagcctgaaaatttggaaaacgggcagtacgccgttggcgttatcgcgcctgcgctccagtcagctaggctattcgcgcagcgagagccaggttagcgaagatactgaaccctgttaccttgtaacagtgccgcgccttaccgaagtacacttcgagcaagacggtcgtgagctccattgtaagccaggtgggttcatcttcgagcgaggcgatgcgccttatcgttttcactactcctgcgacaacgacctttgggtattcaagctgcctgagcgcgcgctacatggacagatacgtggagccgagcgctacacccgtttctgtttcgaggctcggcgtggattgggacgaatttttgttgatcaactggcgatgtgtgccgcgcgcttcgacgaatgcgatgcggatgcccgtcatatgctgctggaacaggtgctttcgacgttgttaatggctctgcgccaagatgagcgcgtccttaatagtgagagttcgagtctagctgccctgcatttgcagcgtatcgagcactacatcgaccgaaacttgtgttcagctgaactaaacccgcagcatattgctcaggcctgcggcttatcggttcgctatttgcataaattatttttcagtacgccctacagtctcggtgaatggattcgcctgaaacgattggaggctgtatatcaacgcctacgtgatccccactgccacctatcaatcggtgagctggcatatcgttgggggttcagtgatcaggcacaattttcccggcattttcgccagcactttagttgtactgccagtgaagcccgagccgtttcgttaaagccgtag

SEQ ID NO: 330166 - DNA, 720 bp, Pseudomonas aeruginosa
atggatacgctcgccccccgccaaaactcagcagtcagcggctatgagtggctcaagcgggacataattcagggcatgttcaagcccggagaaaaactgcgaatgactgcgcttaaggagcgctacgacctaggcgtaggccctctgcgtgaagcgctatcgcatctgattgcggaaaatctggtagtagctatcagtcagcgtggctaccgcgtcgctcctatgtcgctgagcgaaatgcaggacatctatgacgcacgggccaatctcgaagcgctggtacttaagctcgccatcgaacgcggcgatgacgcctgggaggcccaggtgttggcctattcgcatacattggccaaggtaatggaggtcaagacccaggagcagatgctggaaatatgggatgcccgacacaaggccttccatacagctatagcctccggctgtgggtctagacacctgctgcaggcgcgcgcctatctgttcgatcaggccgagcgctatcgccagctgtggctgcggcgcacggtgctatccgaggaggccttgtccctgaaacgtcaagagcacagcgaactggtagaagctatccttgcccgtgacgcaacgcgagcaagcgccatgatgcaggctcatctgatgacaccagtaccgatcatcgaagggatcatgcgcaacagcaacctgagagcatcccagtccgcccctgaaatcatgggatag

SEQ ID NO: 330167 - DNA, 978 bp, Pseudomonas aeruginosa
atgaatgcctttacccagctcaaagatcttgtgatgccgctaccgaccgccgttaaggggttttctctttcaccctccgctcagtcgccccgtttgttcgagctgaccttcactaaggcgacgatagaggctttctgtgtagcagtggccgagtggccggtgcaggcgctggaatacaagtccttcttgcgatttcgcttcgccaaaattcttgacgatctctgcggtaacagcctgcgcccggtgctactcaacgccctaatggatcgtgccaccggagggctgttaatcaagcaggaggccctgaatgatgtggcacaagctgatgatatggtcaaattctcgactgctgtggcccacctgctggggcggtcgaactttgatgcgatgagcggccagttctacgcacgcttcgtggtcgagaacgtcgataattcggacagctacctgcgccaacctcaccgggtaatggagttgcacaacgatggtactttcgtcgatcagatcaccgactacgtgctgatgatgaagatcgatgagcagaatatcgaaggtggcaactcgctgatcctgcatctggacgactgggaggatcgccatgctttcttccatcatccgctagcacggcgcgtcatgcgctggaccgcgccgccgagtaaaagggtcgatacggacgtgttccattcgatctttgatgtcgacgccgaagggcggccgactattcgctatatcgatcaatttgttcagcccaaagacttcgacgagggcaactggctgaccgacctgtctatctccctggagggcagtaaacagaagctttccgtgccggtgccagttggctgcttcctgctgattaataacctgtattggctgcatggccgcgatcgtttcacccctcaccctgggctgcgccgtgaactgatgcgccagcgcggttacttcagttaccccaaactcggccatcagcaaggccaataa

SEQ ID NO: 330168 - DNA, 1281 bp, Pseudomonas aeruginosa
atggagtataagcagagcctcgcccgccggatcgtcatcgccttcatgctgatgacggtcgccgtggggggactgttctccgccggcatcgtcggcgtggtccacatcatcgaggagcgcctgatttcccgcgacctgggcggcgagctggagcgcatcctgcgcgacgacctggcccagggacgcaacccggtgctcgatcccggcatgcgcttcttcatcagcgacggccagggctcctacgccatgccgccggcgctggaccaactggatgtcggtttccacgaagtgttcgagggcgacttgtcgttccatgcgctggtgcgcgacatcgatggtcgccgcttcgtcctgctgcaggaccagagcgatttcgaagcgcgcgagcaggtgctctacgcctcggtgctgaccggctacgtgctgagcatcgccctggccggcctgcttggctggatgctcgcgcgcaaggtgatggagccggtggtgcgcctggcgcgccaggtgcggcatcgcgaacagttgctcggtctggcgccgccgttggcgccggactacgccaacgacgaggtcggcgagctggccgcttccttcgacgagacccttggccgcctgcgcgacgcgctcaagcgcgagcaattgttcaccagcgacgtcagtcatgagttgcgtacgccgttgatggtcatcgccacctcatgcgaactgctggccgaagaacccagcctcggcccgcgcgcccgtggccaactggagcggatgaccaaggccaccgaggagatgcgcgacctggtgcaaaccttcctgttgctggcgcgtgcgcagaagggcgaggaaagcctggcgccccacggtagcctggagagcatcgccgacgacctggtccaggtctggcgcgaacaggtcgaggcgcgaggactgaccctgcactaccgcaacgaaggtgcctgcgccggccagttcaacgcgccactgctgcgcgcggtgatgggcaacctgttgcgcaacgcgacccactacaccgatgccgggagcatcacgctgaccctcgacgagcatggtttcagcgtcgaggacaccggggcgggcgtcccggaagaacaacgcgaacgcattttcatgcccttcgttcgcggcagttccagctccgggcgcggcgaaggccttggcctcgggctctcgctggtgaagcggatctgcgccgccgagggctggagcgtaaccctcagcgcggtggagccgcatggctgccggttcgaagttttactcgatgttgcttga

SEQ ID NO: 330169 - DNA, 369 bp, Pseudomonas aeruginosa
atgaagcagagttcgattctggcggaaactcgccatgagctgctggacgatattgctgcacatactgcaacagtactgtctgaacatggtattgacgctggcctggctgaacaggccggccacgcggtagctgatcatctggcgaaccagtggcgtggtgccacgctatacatcccctccgactatcgccaccaggttaccaagcgtgatctccagatcctctcagagttcaacggtcgtaaccatcatgccctggcccggaagtacggactgacgcccagctctatatataagctgttaaagcgtattcaggatcggaagttcgaacgtgaccagggcaaactggacctcggcgacggcctggcctga

SEQ ID NO: 330170 - DNA, 210 bp, Pseudomonas aeruginosa
atgcagttgcaatgcccctgctgcgccgagcagttcccggtagaggtccaggccctggccgctttctcaaagcggccgcaggccggtggacccagcacccagcaattactcaaagaccaggtcggtcgagttcagtccgatatcgtgttggggctgattactaaagaggatgaagagcgccagatcgcggcactgaaggggggagcatga

SEQ ID NO: 330171 - DNA, 2829 bp, Pseudomonas aeruginosa
gtggtacggcttcggatcgccataggactactcgtcagcttcctgctgcttctgctcggtccgatgtcgccggcggtcgcggacgacgccggcgtttccagcgttcccctgcaaaccaccgccaccacccccagcgtcaaccagaactggcgcctgctgcgcgacgagagcgcgcaactgcggatcgccgacgtcctccagcgcaaggagcagttccgcccgctggccaagcgctccttcatcttccccgccagcccccaggcggtctggctgcaggtccagcttcccgcgcagaaggtgccgagctggctgtggatcttcgccccgcgggtgcagtacctggactactacctggtgcaggacggccaactggtgcgggaccagcacaccggcgagtcgcgaccgttccaggagcgcccgctgccctcgcgctcctacctgttctcgctgccggtcgacggcaagccgatgaccctgtacgtgcggatgacctccaaccatccgctgatggcctggttcgaccagatcgacgaagccggcctggtcggcctggagaagcccgcctacgccttcggcatgctgctcggcggcatgctcctgctgctgatgtacaacctgatccgcttcgcctactcgcgcagcgccagcagcctgtggctggcggcggtgcacgcggcgctggcggtctgcgccgcggcgaacctggggctggtggcgttctggctgccgggactcaagttcaaccagtcgctgaccgccgacctcggcgccctcggcgccgcggtgagcctgctgtggttcgcctgcagcttcttccgcggcactgcggaaagccgcctgaaccgcctcctgcaaggcgaggcgctgttgatcctggcggtcggcgcgatcatcgccttcacccagcaactctggttcagttggctgatctacctgctggtgatcctcagttcgctcagcgtcccgctgatcgcggcctggcactggtatcgcggctaccagccggcgcgcctgatcgttgccgggatgatcgtgttcaacgccggcttcatggtgttcctgccggtactgttcggcaccaagcaactcgatccgggctggctggtgctcggcgtgttcagcttcgccaccctcgccgggctggtcctgagcgtctcgctcaccgaacgccagcggctgatccagcagctcaacctgcaacagcgcaccagcgaggcggcgcacaccgcggaattgcagaccaaggccgagttcctggccaagatcagccacgagatccgcacgcccatgaacggcgtgctgggcatgaccgaactgctcctcggcaccccgttgtcggcgaagcagcgcgactacgtgcagaccatccacagcgccggcaacgagctgctcacgctgatcaacgagatactcgacatctccaagctggagtccgggcagatcgagctggacgaagtgcagttcgacctcaacgcgttgatcgaggactgcctggatatcttccgggtcaaggccgagcagcagcgcatcgagctgatcagcttcacccagccgcaggtgccgcgggtcatcggcggcgatccgacgcgcctgcgccaggtggtcctgagcctgctggacaacgcgttcaagcagaccgaggaaggcgagatcctgctggtggtggccctcgacgaccagggcgagacgccacgcctgcgcatcgccgtgcaggacagcggccacccgttcgacgccaaggagcgcgaggcgctgctcaccgccgagctgcacagcggcgacttcctttccgccagcaagctcggcagccacctcggcctgatcatcgcccgccaactggtgcggctgatgggcggggagttcggcatccagtccggcagcagccagggcaccaccctgtcgctgaccctgccgctcgacccgcagcagctggagaaccccaccgccgacctcgacggcccgctgcagggcgcccggctgctggtggtggacgacaacgaaacctgccgcaaggtgctggtgcagcagtgcagcggctggggcctgaacgtcagcgcggtgtcgtccggcaaggaggcgctggcccagttgcgcaccaaggcgcacctgcgcgagtacttcgacgtggtcctgctcgaccaggacatgcccggcatgaccggcatgcaactggcggcgaagatcaaggaagaccccaacctcaaccacgacatcctgctgatcatgctcaccgggatcagcaacgcgccgagcaagatcatcgcccgcaacgccgggatcaagcgcatcctggccaagccggtggccggctacacgctgaaggcgaccctcgccgacgaactcgcccagcgcggcgtcagcggcgtcaccaactacctgcaaccggccaaggaagcgcaggcgccgagcctgccgagcgacttccggatcctcgtcgccgaggacaacagcatctccaccaaggtcatccgcggcatgttgaacaagctcaacctccagccggacaccgccagcaacggccaggaggcgctcagcgcgatgaaggcgacccagtacgacctggtgctgatggactgcgagatgccggttctggacggcttctccgccaccgagcagctccgcgcctgggaagcccacgaacagcgcccgcataccccggtggtggcgctcaccgcgcacatcctcagcgaacacaaggaacgcgcgcggctggtcggcatggacgggcacatggccaagccggtggagctgtcgcaattgcgtgagctgatcgcctactgggtcggcgaacgcgatcgccgccgccagggcgacgccctgccctcctga

SEQ ID NO: 330172 - DNA, 1290 bp, Pseudomonas aeruginosa
atgaacgtactcatcatcggcagcggcggtcgtgaacatgccctggcctggaaagtcgcccaggacccgcgcgtggcgaaggtcttcgtcgccccgggcaacgccggcaccgccaccgaagccaagtgcgagaacgtcgccatcgacgtgctggccctggagcaactggccgacttcgccgcgaagaacgtccagttgaccatcgtcggtcccgaggcgccgctggtggcaggcgtggtcgacctgttccgcgagcgcggcctggatatcttcggcccgaccgccggcgccgcccagctggaaggctcgaaggccttcaccaaggacttcctcgcccgccaccggatccccaccgccgcctatcgcaacttcaccgaggtcgagccggccctggcctacctgcgcgagcagggcgcgcccatcgtcatcaaggccgatggcctggccgcgggcaagggcgtgatcgtcgccatgaacctggacgaagccgaagccgccgtgcgcgacatgctcgccggcaatgccttcggcgacgccggctcgcgcgtggtgatcgaggagttcctcgatggcgaggaggccagcttcatcgtcatggtcgacggccagaacgtgctgccgatggccaccagccaggaccacaagcgcgtcggcgatggcgacagcgggccgaacaccggcggcatgggcgcctactcgccggccccggtggtcaccgccgaggtccaccagcgggtgctggacgaagtgatctacccgaccgtgcgcggcatggccgaggaaggcaacgtctatatcggcttcctctatgccggcctgatgatcgacaagagcggcgcgcccaaggtcatcgaattcaactgccgcttcggcgatccggaaacccagccgatcatggtccgcctggagtcctccctggtcctgctggtcgaggccgccctggccaaggcgctggacaaggtcgaggcgacctgggacccgcgtccgaccgtgggcgtggtactggccgccggcggctatccgggcgactacgccaagggcgaggtcatcgaaggcctggccgaggccgccgcgctggacggcaaggtgttccacgccggcaccgcgctgaaggatggccaggtggtcacctccggcggccgcgtgctctgtgccaccgccatcggcgagagcgtgtccgccgcccagcaacaggcctatcgcctggccgagaagatccgctggaacggctgcttctaccgcaaggacatcggctaccgtgccatcgcccgcgagcgcggcgagtcctga

SEQ ID NO: 330173 - DNA, 1608 bp, Pseudomonas aeruginosa; identical to SEQ ID NO: 318234

SEQ ID NO: 330174 - DNA, 645 bp, Pseudomonas aeruginosa
atgagacagccaaccgcactgattgcctgcgagttctccgggcgtgtccgcgatgctctggcccgggttggtttttacgccgtgagctgcgatctgctgccttcggaaaccgaaggggaacacgtccagggggatgtcctggaaatgctggactgggggtgggatctgctgattgcccacccgccctgcactgacctggctacctcgggtgcccgctggtttcccgagaagattgctgacggtcgtcaggcacgtgccctggagttcgttcgtaccctgctgtcggcgcctattcgattcaaggcactggagaatcccaagtctgtgatctccagccatattcgcaagccggaccagatcatccagccctggatgttcggacatggcgagcgcaaggaaacgcacctctggttgcagaacctgccgcttctggagccgacccgtatcgtcgatggacgttctccggtcgtgcattacatggcgccaggccctgaccgctggaaggaccgtagccggacctatatcggtatcgccgaggcgatggccgagcagtggggccgttatgtgatgcgggccttggcggaaccagaatctgtgagttttcaccccgagcagcaggacctgctgcgtgtcctggagggctga

SEQ ID NO: 330175 - DNA, 2199 bp, Pseudomonas aeruginosa
atggcggataagccaaggaatgttttgattgcaaatggtcatgagctgatagggcagctttcgtggccaaaaggaggcggcaaaaaatggcttccgtattctatttctgatgtcagacccgtgctgcataagcagcttgtagaaattgcggagcaggctgccactactccctcggctttaacgccaagaggagagtctaccgtgaatgtcgtgttgcatcctgcatttttggctaagtcatatttcccttctacaattctgcgagactcggggttggtgattcttgggtctaagccagtctctatagttccacaaaaggttcgcagtggagagcctagggaaacgaaaactgcatcaatttttgtttcgggtactgcggacagcttcagagcaatggatgaaagtttgatgagtcttaaagcttctatgactcgtcaggtggagttcgcacgtattgaatttattagcatgtatgctgcaaaagataagcttcgtacaagctctgttagccaatggccggactatgtgcatgtcactatacatgccggagagtctgactctgacattcatttggcatttaagcattttgtcgaagagctaggtgggcgcatttctagcagaggttttcggtttgtatcaggccttacttttgtggtggtgcagttgtttccggaaatgatcccgcgtcttgcagagtttactcgtgttcgtctaattagatcacttcctgagttgcaggaagagtggaagttgaaaccagatttggcacgggcttatcggtctttgtctctgccggttggtaaacctatttcaaatgtcaaggcagcaatatttgatggtggtacggctaatgcttttccacagcatgtggttgaaatttcatctccacttcaacctccatcatctacgaaagacctgtctcatggagtaaatgttacttcgtcgtttctgtatgggttagtcaatgaagatacttctaatctacctttgccgtactgttatgttgatcatcaccgggtactgccgacttcagatagtccagagcaagctttagatgtgctggatcgtattgtaactgccctacgaagtgcgaaggtttctggagcgcagtatcgctttgcaaacattagtcttgggcccgttactacattctttgatgatgatgttcacgaatggacgtcgcggttggacacagagctttcagatgggcagacattatgtaccgttgcggtaggtaataatggcctgcttggcgaagagctggggcgtatccagccacctggtgatgcagtaaatgcatttgcaattggggctgcaggatctacgaagaaaaaatggggaagggcaccctatagcgcccttggacctgggcgtagcccgggttacgttaagcctgatgtcttggcttttggaggttctgatgaggaacctgttccagtatttagtcctctagctaacaccgtaattccggtggcgggtaccagctttgcaagtcctttggcattgcgcgtagcggtgggggcggatgtgcttagtggttctgtttttaatccaattactttgcaagcattgatgatcaatggatctgaatttagtggtcgaagtcacagtcgcgctgaagtaggctggggcagggtgtcattagagccagagaacattatttttactggcccagatgttgtaagagtcgtttatcaggggatgacccacccaggtaagccacaaaaggctgttataccaatacctaggagccttcctgctggaagtaaagtaaatgttgcagcgactttttgctatagagctcctgtcgattcggcacatgctataaattatactcgatctggactttgggtccgtgcctataaatctcctaaaaagcccctccctttgtttggaagtggaatgtataagtcagaagcagagttgcgttcagactcaatgcgctgggatactgttcttcatgcaaagagaaagataacggtggatgatttagatggtccttatttccatattaattatcaggttcgagatgagggtgaggctgtgcgtatggaggacgcggtgcccatgccatatgccctcgtagttactattgaggcacctggggtaaatgacttgctcagccgagtgcaatcagagtatccagttctgcaaactctgccggttatggttgagcctggaattgaaatctccacataa

SEQ ID NO: 330176 - DNA, 1110 bp, Pseudomonas aeruginosa
gtgtcaaccgtacccgcctcccatgctgaatggattgcccttattcgagagggttgtgctggaaactcatcggcgtttcagctacgtctcagccggcttattgcgcggttaaggcgtgaaaggtcgtctttgtcagaccttctttcaaaagcactggcagaagccaacgcatcaaaattgactttggcaagggactctgccgctcaacaagctgcgcttagtccggtggattccgaaagtaatcttccgctgactactatccaatttcccgtagttatggagcatccaccggtatgggctccggaagttgagtcagggattaataccttgataaatgagtggaaaaactctggccgcttaattgaggcagggttaagtccgtcgcgtacaatgcttttgtctggtcctccaggtgttggaaagactatggctgccacgtatttggccgagcagcttaatttacccttggttagcttgaatctagcggcggcagttaatagtcttctcggtaaaaccgggaataatttagtaaaggttctcgctcacgcgagggctcagccttgtgttttgcttttggatgagtttgacgcttttgctaagcgacgtgatgacggacaagatgttggtgagttgaagcgtgttgttaacgttttgttgcaggctattgatgaatggcctgcaacttctcttttagttgctgctacgaatcatgaagaacttttagatagggcaatattccggagatttgatttttggcttagatttccggaaagtagttttgagcaagttgtgagcctattaatgcagttggggtgtgacagaggattggcaaggactttggctcctgtgcttgtgggggctcctttatctgatgttcataggctggttatgaaggccaggcggcaagtggttctagagaacgatacatttgaacgtgcaatattaagtctggctgttcctgatgcgctggataacgaagagttggctcgatatttacaaataaaacgcttaaaaagcgaagggaaatccctgcgtgctattggaagtgaattaaagattcatgcatcaacagtttcgcgaattctgcagaaggttaatagaggggattaa

SEQ ID NO: 330177 - DNA, 264 bp, Pseudomonas aeruginosa
atgagggtggtgctgatgctgatgattgtcgcgctggtgggatgcgccggccggcaggaagccgagctgcgcacggtgcgcgtagaagttccggtggcggtgccgtgccgagcgcccgcggtcgaggtgccggcctgggcagcggctgggctgaagaagagcgacgacctacagaccaaggtccgcgcgctgctggccgagcggcggcagcggatcgggtatgaagcccaactgctggctgccaacagggcctgtcagaattag

SEQ ID NO: 330178 - DNA, 435 bp, Pseudomonas aeruginosa
atgcgtacttcccaacgaggcatagacctcatcaaatcgtccgagggcctgcgcttgtccgcctatcaggactcggtgggtgtctggaccatcggctatggcactacgcggggcgttacccgctacatgacgatcaccgttgagcaggccgagcggatgttggccaatgacattcagcgcttcgagcctgagctggacaagctggtgaaagtgccgctgaaccagaatcagtgggatgccctgatgagcttcgtctacaacctgggatcggccaatcttgcgtcgtccacgctgctcaagctactgaacaagggtgactaccggggtgcggcggaccagttcccgcgctgggtgaatgcgggcggcaagcgcctggaaggactggtcaagcgtcgcgcggcggaacgggcgctgttcctggagccgctgtcgtga

SEQ ID NO: 330179 - DNA, 168 bp, Pseudomonas aeruginosa
gtgaatcgtagaccaatcttgctgaaggttaaagactggctggaggtcaaaatgccaacgagtcatttcctgaatttttgcatcggggtcagcctgctgatcctcgcctgtggagccgctgcctggctgtcgtctcccgtgctgctggcgatcctggccggtagctga

SEQ ID NO: 330180 - DNA, 333 bp, Pseudomonas aeruginosa
atgcagtacagcgtgatagtcacgggcacaggattcgaaggccgtagcggcaggatacgcctggcggtgcgccctggaatggaagttaagctagcgccagagccggacaacccgcacgaccctagtgccatcgccgtctacgttcacgtccggcgctggttcaccctatttctcccgactgatgtgcaaatcggctacctcaagagagaacgggccgcgttcttcacccgaaagatgaaggagggagggcggatcactaaggcaatagtgaaaagcatgtacaccgagctcgaccatcccagggtttctttgagcatcgaaaccgactggtag

SEQ ID NO: 330181 - DNA, 861 bp, Pseudomonas aeruginosa
atgcaaaccgctcaaataattccgttccagttcgaagctcgcgaagtccgcaccatgctgatcgacgaccaaccatggttcgttgctgccgatatcgcctctgctcttcagtacctgactgcaaaggatatggcgcggaacttggatgatgacgaaaagggtaggcagattctgcccacccctggcggagatcaggaaatgctggtcatcaatgagtccgggctgtactcggcgatcctgcgtagccgcaaggccgaggccaagcgcttcaagaagtgggtaactgccgaagtgcttcctgcgattcgcaaatatggtcgatatgaggactccagcaacaagatggcaaccctggttggcgaaaccatcggcaccgatggcttccacatgctcggcgcgctgatcaagggcaaggtggccgccctcccggtcgaagtccgccgccgcgccagcatgaaaatctggtcacagacccatgccgcattcggggttcgatctgccgcagacattcccgccaatcaattggatgcggcacgaaacttcgtcgccgcctacagcgttcacgaaggcgaatggctgccgaagcctgaaaaacgctgcggcaccatgctcaacgaccaccaactctacgacgtgtacttcgtctgccaccacttccagtacctgttcgaaatcttcaagcgccacagcctctacagcttccttgggcagcacggctcccgcgcgggcgtagagatgatcgaccacttcaaggatggctacatgggagtctggaagctcaggagggatttcgatggtgaattcgatgcagtacagaggcgactgaggatcaaccggtactctgatttcagcatcagatag

SEQ ID NO: 330182 - DNA, 2004 bp, Pseudomonas aeruginosa
atgacgacctacgccaccggtaacccgctgggctccaaagacccgcgtgacctgtacgacaacgccgagaacttagacacggcaatgaactcgctggatcaagatcgctggatggaccgtgggcctcagcgtcctccggttgcacgatggacctggtggggaatcgagcagtatgtcatgcagtggctggccgctcagggatttgaaccgaccccccttgaatatgtcgacggctctccgctgattgttgatcgcccgactcaactgattcagcgtgacgggaacctgtatagcgttcaactgccagcagatttcccggtcagcctcagcgggaactgggccaccgacgagagtctgctggttgcccaggtcgaccgctcgctgcgtcagcagttgagagctccgggtggcgccggaatgatgggttacgatccggcggaaacgtacccatcagatacggttgggtacgcaataaaagatattgatggaaaggctgaggaagcatctaacttagcgatgactggcgcatttggtaacgcgcagatgctaaccagagtaagagcgagaatatcaggcgccccaactatgtatgtgcttggtgattctatttctcatggggcttttgccgggagaatataccggaatggctgggtgaatcttctgcgaagaatgctctacaacgagatcggcactctaacttatggattcacgccgctgatgtctctcgttgacggagctggaaatacctctaatgaaatccactctatcgatttcgcaaaaacatcaggaacccactcttgggtttatagatcaaatgaaagcggatcatatgttcctcaagggttatcgtgggtgtcaaatgaggttggcaatattataaggtcgacaattccaacatttcaggatgcatgcacggtttactacgtcgcaaggcctggagggggaacgtttgacataaaagttaatggatcggtagtagctagtgtgaatacacaggcctcagttgtaaacgctttgcaaggccaggctgtaaccctgaaagataatgggtttgggaaatgtgtaatcgaggttgttactacatctgccgcaactgttgaattttctggtttttcatatgctaacgcctatagtcagtcggctcttcataatttttcaaattctggccgtaggcttcgctgggtggatgagtccgtcatcagttcgatgatggcaggaacctctctattcatcatggcactaggtgtcaatgacgcgtcagacaatgagtctgatacggcgtactatgaagagttcgtaaaaagaattgattggctgataagctattcaaatcaaaatagcgtacctgtagtggtgcctgattttttgtggagttacccagatacaaacaatacaaggaagcagctaaagcgactcgctgacgagactcaggggctatacataccgtttgccgatttctttagaaaaggatcgcagtcagcagatgcaaattatcttgtaaatactcttaagctcttttcggatggttcccatccaaacgttcatgggcataagtatatagcggagactattgctaagaaactcggcctttcagttagctcgaaaaaacaagcgctcgactaccatgattggtggatgccgatatcaatcacaagcacgacaataaaaaatgcggactttggttcgattcctccaagcagggtgataactgcaactcgaaacaatggcgcgaatgttctgtttagattttatgtctctggcgtctctggtacgtctgctgttgctttctctggaacatactcatctgactctggcgtgttcgttgaccttccagtgactggacagatggagcttgagacaaatggggcaagttccggagttgtaagtatctctcaggcaggaataacaataacgccaaattcatcgaacactaaaagcactcatcggtttgttgttagcgttgcacgtggggagcgaccgtttgttgatggtgtgatttactag

SEQ ID NO: 330183 - DNA, 321 bp, Pseudomonas aeruginosa
atgagcctgatcccgcttgatacggcaaagtcctttcttgatgtgatccacgattgggatgacgccaagctccagttgctgctggatggagcggaggacgaggcctgccagttcatgtggcgccagtcccttgatggcctttgcaactgcgaagagagtagtgaggctgtcagtagcgaaccgggccttccgcctagcgtggtcatcggagtgcttcttttgcttcaggccagctaccaggctgctcccgatgaaatcgcgacgctgcgcaaggcggccgaggtgaagctgatgccgtaccgatgcggcatgggggtttga

SEQ ID NO: 330184 - DNA, 366 bp, Pseudomonas aeruginosa
atgagctactgccgttggagcagcgatgatttccaatgcgatgtttacgtatacgaaagcgtagccggtagattcgtcactcacgttgctgccaatagggtggttttcaaggatgaactgcctgccctggttcctttcgagccggagtacgttgaccagttcttggcgcgccacaaccaggtaatggcaatggttgatgcggctggtcgtgtacggatcggtcttccgcacgacggagacagctttgatgacgccgatcaagaggcctgtgcggaccgactggagtatctgaaagggctgggctacgtcgtcccgcagtacgccattgacgcactgcgcgaggaagcagaggagggcattgcatga

SEQ ID NO: 330185 - DNA, 210 bp, Pseudomonas aeruginosa
atgaacccgcgtatcggcgttgctctgtgggtcttggatcgccatgagtggaactggagaaggttgaatcggtacgccttcatcatgcgcaagaagctggccgcgaaggccgtcgcactgatcgcccatgaccgcatcttgaccgacgaaatccttactcgcgggcttccttcctactgggacagagaagcgaaggaggtgagggcatga

SEQ ID NO: 330186 - DNA, 270 bp, Pseudomonas aeruginosa
atgagcaagttcaaggcaggagacctggcgcttgtgatcaatcacaccttccctccggtggttggaacctgcgttgaactgatcagccgccatttggttgggccggttgatcgtagcgatccgatggacccaggagtttatgaaccccctgacggcgagccggtgtgggtagtggacgatcaaggcgccatcgtttgggagaagtggctcatgccgcttcggggagacttccagcccgagcagaagaaggcgaagggagagatcgcatga

SEQ ID NO: 330187 - DNA, 201 bp, Pseudomonas aeruginosa
atggatatcgtagacatcgccaacgattacgccgagcgtgaactcgctgaacgcctgtactcccgagtcaagtacgtcggcgagagcctgtccgaatgtgaagactgcggcgaggagatcccggtagcgcggcgttcgatcatccctggcgttcgtaaatgccgggactgcgctgaacgggctgagcggagggctgtgtaa

SEQ ID NO: 330188 - DNA, 975 bp, Pseudomonas aeruginosa
atgagcttccaagctatggcgtgggctactgagcagaagctcccaacacgagagaagttcgtgttgatcatgctcgccaactatgccgggaatgagcagtgggattgccacccgagcataaataccttggccgatgacaccggcatgagtcgcgacacggttattagggcgataaaggccctggaagatgcctctctggtgaagatcgttcgccgcaatgttgacggtatcaacctcccaaatatctaccgtctcgttcgtgcagggggtagtagcactgtgcagggggtagtagctgtatgcgaccagggtagtagcactgtgcagggggtagtagctgtatgcgaccagggtagtagcactgtgcagggggtagtagctgtatgcgaccagggtagtagcactgtgcagggggtagtagctgtatgcgaccagggtagtagcactgtgcagggaggggtagtagctgtatgcgactctaaccagtcattagaacctatcattgaaccagtagagctgcgcgcatccgcgccgaaaaaagattccgggttgatcgggctggatgaaatcaaatccgagtttcccgacctgccggaacagcttgtccgggattttctccgcgtccgaagggcgaagaaggctccgctgaccgaaacctcatggcggcggatcgcgaaagttctttccgaagcttccgagaagggctgcactccgagtgacgctctcgggttggcagttgagcgtggctggcagggtctttcgctgcaatggctttccaatgccggcttgctgacctcgaacgttaaatcgatccgcaaagggctcggcccggacggcaagttgctgccgggttacttctggcacgacgccgatatcgaccttccggttgagaagcgccgcatcctgagcgatgaaacccacgaccgcgcctccgggtatcgctgggactacctgcgctccagggggctggcatga

SEQ ID NO: 330189 - DNA, 423 bp, Pseudomonas aeruginosa
atgagcggatacggttttgtttatgttctgaccagtcctgccatgcctgggttgtataaggttggtgcgactactagatctccgcgtcagcgtgctgaagaactatcacgcgggactggtgttccgcatgagttcgaagtggctttctatgctgaagttcaggagccgttcctttgggagcgccgtgtccatgcattgctctcagacaagcgactttccagttcccgtgaattcttctacggccccctgatcgacatcattaacaccatcgagggcgatggcgaatgcctgtcttactgggatagcgatcaagccactgaggcccgtaaccctgggatggtgtggcccggaaagccgctttggttcgagcagaatctgcatagcgccggttacctggagcgcctgcggaggaacgcacaatga

SEQ ID NO: 330190 - DNA, 141 bp, Pseudomonas aeruginosa
gtgaaggactccattgtcatctgccagggtggacagatcgtgatcgtcactctggatcaactccaccagttcacaagcgatctctgcattctcgccgcctccatgcgcgaagacatgcgcaatccgctggaggacgaataa

SEQ ID NO: 330191 - DNA, 675 bp, Pseudomonas aeruginosa
atggccacctacatcagcactccgatcgtgcttcctggtggcaaacctctggatttctatctgatcccccgcggagagctggttgagttcactgacgatgggatcactatgttcgctctcagcggcctagggtatcaactaggcgataagcgaaactggaaaggtctggagaatctagccatcaagcacgggtttagcctgaccgagtcgggatcgtttgaggctgtgttccttcaatcggatatggccgaatggggcggccgcatcctcaaactctttgcggctatcgccgcctgggaagacgagcgtttcagtgagggcgatactgacttctctctcacgtcagagattgagatgctgctccgcgccaaggcgccagagaagcaactggtcaggaacgctaccgtgtccattgggaagaacgagatatccttcgacttcctgtggggagatacttatgttgatgccatccgacctgtggcgcagtcggtgaacgcgcggcttaggaaagccgttctcattaaccgcagcgaagatccgcttaagttgctgtttatcgtcgatgatcgaggtcaagaagagcgggccgaagcagaaatcagcgtactaggagatatcgccagcacgatacgactgacggatttcgagaagcactacagcccagcgctacattga

SEQ ID NO: 330192 - DNA, 207 bp, Pseudomonas aeruginosa
atgaacactcaagctcaagcattccacctcatgatcgaagtcaagtatggcgatagcccgtcctattggcatccggctttcgaagctgagacccaagaggaagccaacgatctgatccagcacttcccgcaggcctacggtgaaatttcccgccgcatcgtggtaggcgccccttccatggactgcacagaactgcggccctgctga

SEQ ID NO: 330193 - DNA, 294 bp, Pseudomonas aeruginosa
atgaacgtacagaagcacctatccattctcgggtatcgcgccagggatcgcgtgaccggcttcgagggcgtggttacctcggtctgcttcgacctatacggctgcattcaggtagttctgaaccctggaatcggagacgacggaaagatcggcgaacagctttggttcgacatcaatcgcatgatcgttgccgagaataaacccagggtcatggacctcccggacttcgagtacgggccaattgctgaaggtcgtcacgggccagcagagaagcccgccatgcgaactgtgtaa

SEQ ID NO: 330194 - DNA, 240 bp, Pseudomonas aeruginosa; identical to SEQ ID NO: 329296

SEQ ID NO: 330195 - DNA, 300 bp, Pseudomonas aeruginosa
atgaacggcagagaaatgcttgagctggcggctaaggcggccggctatcggatccactggtacttcaatggcgacgaaggaatcgaagtcagcgaaaagaacggaccgcgactgacatggaatcccttgctgaacaatggtgacgcatttgggctggctcttcgcatccctcacctgaacctgcaatggctgatagctgaagccttccaagctcaccctgacgatctggaagcacgcgaacagtatgcccggctgatgatcgttgagttcgcaggaaagttagagaggtctgaagcatga

SEQ ID NO: 330196 - DNA, 366 bp, Pseudomonas aeruginosa
atgaacactgcattgaaatacgcacaggaacgctgggacaacgcgctaccgcccgacgatgacggcgacagcgagtatgtcactgagcaagtcggcaagcttctgaactgcgaggacggtgattgcgtgccgttccatgatcggaaagaaaggccctttatcggccctgagtttacggtctacggattcgccggattcgtgcctgagtggcttgctgaggtcgaaagcaaagagtgccctatgactcagctactcctagccgtccgccgaggcgacctggaactggcccagcgcatctggttccgcgtattcgaggcggcgcttatcgagaacgctgaacgactggttagggagagacgcacatga

SEQ ID NO: 330197 - DNA, 663 bp, Pseudomonas aeruginosa; identical to SEQ ID NO: 323748

SEQ ID NO: 330198 - DNA, 492 bp, Pseudomonas aeruginosa; identical to SEQ ID NO: 323749

SEQ ID NO: 330199 - DNA, 867 bp, Pseudomonas aeruginosa; identical to SEQ ID NO: 323751

SEQ ID NO: 330200 - DNA, 567 bp, Pseudomonas aeruginosa
atgaccgaccacgcagagctgcggaggctggctaaggcggcaacgccggggccgtggactctatatgtgccagaagactaccaagggccggaagaactgccaggatacggggttgaatgcgccgaaggccgcgcgattgtttggggagcattggagcctgaaacaggctgccagtttgaccgagacgccgagttcatcgccgccgccaaccccaataccatcctcgccctgctggacgagatcgaccagctcaaggcggagaactgcgcccacaaggacacgcagaaacactgcgagttgttggagcagtacttgaaggagtgcgcaagcgccctgcctggcacctactacatggaccctccagacggcggcaatgtcagcattccagagcagattcggcgcatggcgaaggatgctgcgcggtatcggtggctgattgcatcagcatggtacgtagggcctgagccgaagggagataccgaagcagtcagttggcatgaccacaacgacaccatgcacggggtgacgaccgcaatcgacgcagccatagaaggagccaagcaatga

SEQ ID NO: 330201 - DNA, 825 bp, Pseudomonas aeruginosa
atgcaactcgcatcccgcttcgcttcccgttccccggtgctgcgttcggaacgtcccttgtccgatgaccaaatccgggcagtggccccgtccatcttcgcggaggcaccacacgaaagccgctccgagcggtacagctacatccccaccgcgaccgtgctgcaagaactgcgcggggaaggcttcgagcctttcatggtgacgcaaacccgcgtgcgccacgacgaccgccgcgactacaccaagcacatgatccggctgcgccacgccagccagatcaacggccgcgaggccaacgaaatcatcctgctgaactcccatgacggcaccagtagctatcagatgctggccgggatgttccgcttcgtttgcagcaatggccttgtctgcggcgacaccgtggccgacgtgcgcgtgccgcacaagggcgacgtagccgggcacgtcatcgaaggcgcttacgaagtcctgcacggcttcgaccgggcgcaggaatcccgcgatgccatgcgcgccatcacgctcgacgccggggaatcggaagtgttcgcccgcgctgcgctggcgttgaagtacgacgaggacaagcccgcgcccatcacggaatcgcaaatcctgatgccgcgccgccacgacgatgaccgccgcgacctgtggagcgtgttcaaccgcacgcaggagaacttgaccaaaggcggcttgtccgcccgcgccgcgaatggccgccgccagaccacccggcccgtgcagggcatcgaccaaagcgtgcgcctgaatcgcgccctgtggctgctggccgatggcctgcgccagttgaaagcctga

SEQ ID NO: 330202 - DNA, 1437 bp, Pseudomonas aeruginosa
atgagcatgaacctggtcaccctcctgtacctcatcgcctcggtctgcttcatccaggccctgaaaggcctgtcgcacccgaccacctcgcgccgcggcaacctcttcggcatggtcggcatggccatcgccgtggccaccaccgtcggcctggtgttcaagctgggcgcggagatcgccaccaccggcgtcggctacatcgtcgtcggcctgctggtcggcggcaccgccggctcgatcatggccaagcgcgtcgagatgaccaagatgcccgagctggtcgccttcatgcacagcatgatcggcctggccgcggtgttcatcgccatcgccgcggtggtcgagccgcagtcgctggggatcgtcgcgcacctgggcgacaccattcccaccggcaaccgcctggagctgttcctcggcgcggccatcggcgccatcaccttctccggttcggtgatcgccttcggcaagctctccggcaagtacaagtttcgcctgttccagggcaccccggtgcagttctccgggcagcacctgctgaacctggtgctcggcctggcaaccctcggcctgggcctggtgttcatgttcaccggcaacctcaccgccttcgccgtgatgctggcgctggccttcgtcctcggcgtgctgatcatcatccccatcggcggcgccgacatgccggtggtggtgtcgatgctcaactcctattccggctgggccgcggcgggtatcggcttctcgctgaacaactcgatgctgatcatcgccggctcgctggtcggctcctcgggcgcgatcctctcctacatcatgtgcaaggcgatgaaccgctcgttcttcaacgtcatcctcggcggcttcggcgccgaagccgacgccggcggcccggcgggctccaaggagcagcgtccggtgaagtccggttcggccgacgatgcctcgttcctgctgaccaacgccgacagcgtgatcatcgtccccggctacggcctggcggtggcccgtgcccagcacgcgctgatggaactggcggagaagctgacccatcgcggggtcaccgtgaagttcgccatccacccggtcgccgggcgcatgccggggcacatgaacgtgctgctggccgaggccgaggtgccctacgagcaggtgttcgagatggaggacatcaactccgagttcggccagaccgacgtggtcctggtgctcggtgccaacgacgtggtcaacccggcggcgaagaacgatccgaagtcgcccatcgccggcatgccgatcctcgaggcctacaaggccaagaccgtgatcgtcaacaagcgctccatggccagcggctacgccggcctggacaacgagctgttctacctggacaagaccatgatggtgttcggcgacgccaagaaagtcatcgaagacatggtcaaggcggtggagtga

SEQ ID NO: 330203 - DNA, 1416 bp, Pseudomonas aeruginosa
gtgacggaccgtgctgccccttccaactggatgctcgccctgctcgcctgcgcgcaactgatcatcgccctcgacgccaccatcgtgttcgtcgctctgccggaaatcagccgggcgctggatttttcggcgcaacgcctgcaatgggtggtgagcgcctatacggtggccttcggcggcttcctcctgctcggcgggcgcgccaccgacctgctcggccggcgccgcatgtacgtcctcgggcaaagcctgtacgccctcgcctccctcgcgggcggcctggcccagagcgagttgccgttgatccttgcccgcgccgtgcagggcctgggtggcgcgctgctgttcccggcgaccctggcgctgatcagcaatcacttcgccgagggcccggcgcgcaatcgtgccctggcgatctggagcatcgcctcggcgttcggcctggccctcggctcggcgctcggcggcgcgctcaccgagctgttcggctgggcctcgatcttcctggtcaacgtgccgctggccggcgccgcggcgctgctcgccctgcgcctgatcccggccgacgcccggcgccagcgcggtcggcgcttcgacctggccggcgcgctgacggtcaccgccggcgccaccctgctggtcttcgccctggtccagggccccgagtcgggctgggatgcgccctcggtacgtttcggactttacctttccgtcccgctgctactggcgttcctcgccatcgaacactacagccgcgacccgctgatgccgctgcgcctgctgggcaaccgcaacctgcaggtggcgatgctgctgaccgcgatcttcatgagcagctacggcgtgcagtactacttcctggccatctacttccagtcggtgtacggctacagcgtgttgcagaccggcctggcgttcctcccggcgactctgctctgcaccctcggtatccgcgtcgccgagcgcctgctggcccgccacggggcacgcgcgacgctggtcgccggcctgctgctgggcgcactcgggctcggcctgctggcagcgtgcctgccgctggggcgcggcttcctggcgctgctgccggccatcgtgatcctcagcgtcggccagggcatgacctggaccgccatgtgggtgagcgccgccagcggcgtcgatcccgccgaacagggcgtcgcctcggggatggcctcgatgacccagcagatcggcggcgcgctcggcctggccctgctggtggcgctggccaacgcccaggtgcgcggcgccgatgccgccagcctgctggccagccaggcgcgcggcatcgaatgggtgaccgcgctcagcgccctgctcgccctgttcggcgccgccctggccttgcgcctgcgccgtgaggaacccgcggcgtggcagccgagtcgcggctga

SEQ ID NO: 330204 - DNA, 1086 bp, Pseudomonas aeruginosa
atggtgtcatcctctcttgaaggaggcatagactatgaaaggctagcgaggagaggctcacgcctttcctcaccagaaatattcaggagcgctttcaaaggaaaagatagaagacatacatttaaaatcgaagtctgtgtcggcggcgtcaattacaacatgagcgtacgctcagttaattcattctcatacttctcagagtcagttcgctacaagaataggaccatagccgggcgctcccataatggatcaactctattaggagttccattcgacagcaaattagatcaaaaaaggagcatattcccttttctacaatcattgaggcccaaagagttagccgaaaataaaaagaccccagccgatcttctttcaacggtcgaaaaatttgctatttactctccgtccacaccaatattaaggggtatcgccacagactcaagctcaaaatccccattgggaatctatggtgggagacttgccgaagcactcaacgaggttattaatgagaaaaactcgataactgatctacgtagattttttagacttctagattggtttaaaaaaataggcacaacccaagaaacagagcaagaacttatatctgagcacgtaaatttaggcagactaaagcttagatatgaagacaaatacatgaaaagcaccttcaacaaactctatgcctatgatgtcagtgagggcgctctctttgtccttttcgtactcgttcttttaatacacaaagattctccaccaatttttgcattggacaacatcgacaacgctctaaacccgggtctagtcaggagtctaatgggacatattgtccaaatattaaaagatcacgaagaaaaacaaatttttctaaccacacacaacccttctacattagacggactagatatatttaatgaaaaacatagactcttcatcgttgagcgaaacgaagagggccatacaaaatgccggagaatcgctcctccagagggaatgacaaagaaagactgggaagaaaaatacttcggcatgaaactttctgagatatggctttcaggcgcaattggcgggatgcctataggattctaa

SEQ ID NO: 330205 - DNA, 729 bp, Pseudomonas aeruginosa
atggacaaaaagtacctattggtctgcgaaggacaaacagattattttgtaataaacgaaatatctaaatccatatctaacaatattggaagaaaggtaatcattaccccactctccccccagcaagatgcaacgaccggcacttggcctcaacatggatggaccgcaatcagaaactggtgtcgactatatggaaagaaaacagccgcagaactagccccacttcctcaaaaacttagggaagcggcgctcagaaaaaactggcaagcgctactcaagtttgaaaatgccgatggaatcattcttcaaatagatgcagacattgcagaacagataaaagacttccccgcatttgatcctaaagaacaacatagaaaagaatacttagacggtgcgattagattttggctaaacgataaaaacctagaacctcaaatgtacctagccattacaagccatgcactagaagcatggataatggcgacacactcaaatactgatcccgttttcgcggatcttcctcagaacttcgactatgaggaagtaacagacgtagaggctagattaatcaggctcgggtacaaatctaaaagggtaaatggcacgcgccgcctctcaaaaaaagaaagtctctataaatcctacgctgaaaaagtcgctgaaaacctagaaactgtcagagcaaaatgtacagcagccaatgaactctgccagcacttggagaaatag

SEQ ID NO: 330206 - DNA, 981 bp, Pseudomonas aeruginosa
atgtccaaagcactccccactcgcgcactggccacgacgcttctggccctggtaagcgtcgccgcccaggcacaagcacagaacgaccatgcagcgcacggccaggccgacgctcaaacggccgcgccatccactcagaccgtggctcctgccgccgacccgcacgcgggtcacgcgacgtcggcgagcggctcgaccgcggccccggccatggatcacggcaacatgcagatgcagggcgggtcggcgcctcctgacgcccgcgatccgcatggctactccaatggcctgacattgggatcgggcgactacgccgtacccggtgtgccgcggctgatgctggccgacgaacacaggttcttttcgttgcgcggcgaaactctggaacgccgcttcacgcgcaaaggagacgactccacggcctacgacctccaggcgtggtatgggacgacctacaacaaggccgtcgtgaaggccgaaggcgatatcgccaaaggaaagctcgaagaatcgcgtaccgagcttctctgggggcacgccgtcgcaccgtactgggacacccagctcggcgttcgggtggataacggggaaggcccgagccgtcaatggttggctttcggcatccagggcctcgccccctactggttcgagctggaggcgacgggctacgtgggaagtggtggacgtacggcgctgcgtgtcgaaggcagctacgagctgctgctgacccagcgactgattctggagcctcgcgccgagttgcagttttatggcaaggacgacccggaacgcggtatcggcaagggcctggccgaagcgtctgctggcttgcgcctgcgctatgaattcagtcgccagttcgccccctatatcggcgtggaacgggcgggcagcttcggacgcaccgcggactatgtgcgtgccgaaggcggccgtgcgcagcagacgcgctgggtggctggcgtgcgattctggttctag

SEQ ID NO: 330207 - DNA, 1902 bp, Pseudomonas aeruginosa
atgccgcctcgttcacccttttttatcgtgcccacacagggcctttctcgtcggcgtttcgtccaagggttagccgccggcggcgttctcgctgggctgtccacgccggcgttcaaggcatttgcccagcaaggctccgcgacgcgcggtgccgcccctgtgctgaagggcaccgagttcgacttggtgatcgccgaatcgcccgtgaacttcacgggcaagccaggcgtggctacgaccatcaacggctcgctgccggcaccgacattgcgttggcgcgagggtgacaccgtcacaatccgtgtaaccaacaagctgcgtgaagccacatccattcactggcacgggatcatcctgccgtatcagatggatggcgtgccgggcatcagcttcaatggcatcgctcccggcgagaccttcacgtaccgcttcaaggttcagcagagcggctcctactggtaccactcgcactccggcttccaggaactcacgggcatgtacggggcgatcatcatcgaccccgctggcgccgagaccatccacgccgaccgtgaccacgtgctgctgttctcggattggaccgacgaagacccgatgcgggtgttcaccaagctcaagtcccaaagcgactattacaactacaaccaacctaccgtcttcgacttcttccgggacgcctcgcgcgaaggcacggccgctgcgatcgacaagcgcaagatgtggaacgagatgcggatgaatccgacggatctcgcagatctgtctgccgccacgctgacctatctggccaacggcgtcacccccgccggcaattggacggcgctgttccgaccgggtgagcgcgtgcggctgcgcatggtcaacggtgcgggcaacaccttctacgacgtacgcattccaggactgaaactcacggtggtgcacgtcgatggtgttgacgtggagccggtgaccgtcgatgagttccgattcggtcctggcgaaaccgtcgacgtgatcgtccagccacgggatgacgcttacacgatcttcgcccaggcgatggaccggacaggctacgcgcgtgccacgctggccgtgcgtgaaggtcttcaagctcccgtgcctgccctcgatccggtcgaatggctgaccatgaacgacatgatgggcggcatgatggggggcatggaccatggcgggtccggccaggccatggagatgaccgggatgacgggcatgacgggcatgaccgggatgaccgggatgggctcgggttcgatgtccgggatggatcatggggcgatggcaggcatgaatcacggcgccatgaaccacggtggcatggcgatggatcacagccaacacgccgcggcggcggggggactggccgtgcccagcactactgctcgccacgctcgcaccgagtatggtgccagcacggacatgcgcgttgacatggcgcgcaccaacctcgatgaccccggcatcggactgcgcaacaacggtcggcgcgtgttgaccctcgcggatctgcataccccgtcggggccgctggacaagagaggccccggccgggaggtcgaactgcacctcacgggcaacatggaacgctacgcatggtccctggacgggctggagttcggaaagtccacgccggtgcacttcaaacacggcgagcggctgcgggtcattctgcacaacgacaccatgatgacccatcccatgcacctgcacggcatgtggagcgagctggaaagccccgacggtcgcttccttgcgcgccgccacaccctgccggtgcagccggcacaacgcatcagcttcctggtgacagccgacgcgctcggccgctgggcgtggcactgccacctgatgttccacatggatgccggcatgttccgcgaagtcgtggtgtcttga

SEQ ID NO: 330208 - DNA, 330 bp, Pseudomonas aeruginosa
atgaacgagacccaagccatttccgccctcggcgccctggcccatacccagcggctgcgcgtgttccgcgccctggtggtcgccggccccgaagggctgacacccagcgtcctcgccgaccagctcgacgtggcccgcaactccctgtccttccacctgaaagaactggcccatgccggcctggtcaccatcgagcagcagggccgcaacctgatctaccgcgccgacttcacccagatgaatgggctgctcggctatctgaccgagcactgctgccagggcggcgcgtgcgaggtcaccgaatcctcctctgcctgtacttcctgctga

SEQ ID NO: 330209 - DNA, 471 bp, Pseudomonas aeruginosa
atgaagcgctttcacgtccacctgcacgtcgatgacctgaaccgcagcatcggcttctattcccaactgttcgccgcgcagcccgcgcgcgtcgaaggcgactacgccaaatggatgctcgaagacccgccggtcaacttcgccatctccacacgtggcaacaagccgggcatcgaccacctgggtatccagaccgacgatgccgaggaattggcggtgctgaaggcccgcgccgaggcggccgacatgacgctgctggacgagggcaccacgacctgctgctacgcgcgcagcgagaagcactggatcaccgatccgcagggcgtggcctgggagcacttccacacgctgggcaacattccggtctttaacgaagcggcgcctgcagcgacttccgccgcagcgtgctgtaccccggtgcgcggcaagccggtgggcgttgcggtgaagccggcttcctcctgctgctga

SEQ ID NO: 330210 - DNA, 498 bp, Pseudomonas aeruginosa
atgaccaccgacaagacctacaacgccctgttcatctgcacgggtaactcggcccgctccatcctggccgaaggcatcctcaatgaattgggccaggggcgctttcgcgcctactcggcgggcagccaccccaagggcgaagtccacccactggcgctcgccacgctggagcggctgcacatgccgaccgccggctaccgcagcaagaactgggacgagttcgcggcgcccggtgcgccggagctggatttcatcttcacggtctgcgacaacgccgccggcgaggtctgccccgtgtggccggggcgcccgatgtcggcgcattggggtgtgcctgatcctgcagccgttgaaggcaccgacgagcagaagcgcaaggcgttcacggatgcggcgctgacgctgcgccgacgcatcgaattgttcctgtcgctgccgattcagcgcctggatgccatgtcgctgcagcacgagctgcgcagcattggtacgaagtga

SEQ ID NO: 330211 - DNA, 1086 bp, Pseudomonas aeruginosa
atgagtgttggaacccaaacggccggccgcgtgccggccgcccccaccatgagcgtcttcgagcgctacctgagcgtgtgggtgctgctgtgcatcgtcgccggtatcgcgctcggccagttcgcgccgggcgtgttccaggccatcggccgcacggaagtggctcaggtcaacctgcccgtgggcctgctgatctgggtgatgatcattcccatgctgctcaaggtggacttcggcgctctcggccaggtcaagcagcactggcgcggcatcggcgtgacgctgttcatcaactgggccgtcaaaccattctcgatggcgttgctggcgtggatcttcatccgccaggtcttcgcgcagtggctccccgccgaccagctcgacagctatgtcgcgggcctgatcttgctggccgccgcaccttgcacagccatggtgttcgtctggagccggctgaccgggggcgatcctgtgttcacgctgtcgcaggtcgcgctgaacgacaccatcatggtgttcgccttcgcgcccatcgtcggcctgctgctgggcctatcgtccatcacggtgccgtgggccacgctgctggtatcggtcggcctgtacatcgtgattcccgtcatcctggcccagttctggcgccgcgccctgctgagcaagggccaagccgccttcgaccgggcgctggagcgcatcgggccgctgtccatcgcggcgctgctgctcacgctggtgctgctgttcgccttccagggcgaggccatcatccgccagccactggtcatcgccatgctggccgttccgatcctgatccaggtgttcttcaactccggcctggcctactggctcaaccgcaaggcgggcgagcagcacagcatcgcttgtccttcggcgctgatcggcgccagcaacttcttcgagcttgccgtagccgccgccatcagcctgttcggcttccagtccggcgccgcgctggccaccgtggtcggcgtgctgatcgaggtgccagtcatgctactggtcgttcggatcgtcaaccaaagcaagggctggtatgagtgcggcccgaaccctgcccgcggataa

SEQ ID NO: 330212 - DNA, 423 bp, Pseudomonas aeruginosa
atgagcaacatcaccatttaccacaaccccacctgcggcacgtcgcgcaacgtgctggctctgatccgcaacagcggcgaagagccgaacgttatcgaatacctgaagacaccgcctgaccgcgaaacgctgcaacgcctgatcacggacatgggcgcgccaatgcgcgccgtgctgcgtgagaagggtacgccctatgcggaattgggcctcgatgacccgaagtggggtgacgagcagttgattggcttcatgctccagcaccccatcctcatcaaccggcccatcgtggtgaccccgctgggcacgcgcctgtgccggccctcagaggccgtgctggacatcctgccgcagccgcagcgcggcgcgttccgcaaggaagacggcgaagccgtggtggatgcggagggtcgcagggtctga

SEQ ID NO: 330213 - DNA, 303 bp, Pseudomonas aeruginosa
atggagcaccacgacctgctgtcggggctgatccgcctgcatgtgctgcaccacgcagccgagcaggagatctacgggcaatggatgatcgacgagctggcccaccacggctaccgcctctcccccggaacgctgtacccgatgctgcacaagatggagcgcgacggctacctcgtctcccgccaggagcgtgaagggcgcaccgtgcgcaagctctacacgatcacgcccaagggcaaggaaggcttggcgctggccaaggaccgcatccgggagttcaccggggaggcgatgcacaaatga

SEQ ID NO: 330214 - DNA, 1230 bp, Pseudomonas aeruginosa
atgacagattccaccaacaccttgcagcatgaggccgctgccgcgcgcggctcacccgtcgaagtcttcggcgccttcctcaagctggggctgacctccttcggcgggccgatcgcgcatctgggctatttccgctcggagttcgtcgagcgtcgccgctggctggatgaccgcagctactccgatctggtcgccctgtgccagttcctgccggggccggccagcagccaggtcggtatggcgctggggttgggccgcgcgggctggctggggctgctggcggcctgggccggattcaccttgccatcggcgattgcgctgatcctgttcgcctttggcatcgccgagtaccaggggctggcccagtccggctgggtgcacgggctcaaggtcgtcgccgtggccatcgtggcgcaagcggtctgggggatggccaagtcgttgtgcccggaccggccgcgcgccgcgctggccattctggcggcgctgctgaccatggtcctgccctcggccgcgggacagcttgccgccatcgcggtggcagggctgctgggctggtggacattgaagatcgcgcaacccggcggcggccacgcccacagctaccccgtctcgcgcaagctgggcatcgtggcgctgctgctgtttgccgcaccgctcgtcgggctgcccctgtgggcggcagccacggactcgtccacgatagccctgctggaaggggtgtaccgctccggtgcactggtcttcggcggtggacacgttgtgctgccgctgctgcaggcctcggtggtgcccagcggcgtcgtgagcaatgccgacttcctggccggctacggtgcggcgcaggccgtgccggggccgctgttcactttctcggcctacctcggcgcggtcgcccacggaccgctgcatggctggatcggcgggctggcactcctgggcacgatcttcctccccgcttttttcatgctggtcggtgcactgccgttctgggaagggctgcgccaccgcgcgggcatccagacggccatggccggcatcaacgccggcgtggtcggtattctggtgtccgccctctatgacccggtatggacgagtgccatccacagcaaggcggattttgggctggcgctgctctcgttcggactgctgacggtggggcgcgtgccgccggcgctcgtggtgctgttagccgggctggtgggctgggtcatggcgatgggcgtctga

SEQ ID NO: 330215 - DNA, 531 bp, Pseudomonas aeruginosa
atgtggcacaccctgaccatccagctccgacacgaaaccgccgacgacattgccgccatcgaagcggtcacgaccgccgccttcgctgatgcaccacacaccagccacaccgagcaattcatcgtgcgcgccttgcgtgccgccaacgaactgacgctttccatcgtggccgaagaacatgggcgcgtcgtcggtcacgtcgcgctgtcgccagtaacgatcacccatgagcacaggcgaaagaccgagggctggtatgggttggggccgatctccgtcctgccgccaaggcaggggcgaggcatcggttcgcgcctgatggaacaggcgctgtctgaactgcgggctatgcaggccgcaggctgcgtgctgctgggagatccaacgtactacacgcgctttggcttccaggcccatgcgggcttgcaactgccgggcgtgccgcccggctatttcatggcgctggccctgcatgggacagtgccggaaggcatcgcgcactacagcgatgccttcaacgccgccgcctga

SEQ ID NO: 330216 - DNA, 699 bp, Pseudomonas aeruginosa
ttgagcgcccaccgcacggcggcgctgcaaatcgaagtggcccggcatccgcacgtcgcgctggccgcgctggtgcatggcatggtgcagaaggttttgcaggacagctaccacggccacgacctgccgctgggcgtgagcctgaaagtgcaagaccggctggaaggcatggccccggactggccggagtcgcccgccgctgtggcgctgcgcgaactgcaacaggtagccggggaagccttgccggaggacagcgccgaactgttcgccgcgctgctggcgaagtcgcaagacgaactggtgcggctgctggccgtgtgcgtggcttccacggtggacgtggtgacgccccgtgccacgccgcaccagcccggcgcagaactggcgcaggccgtgggcctcgacatggccgcatggtggaagccgaccgcagaaggctacttcaagcacgtttccaaggccgtgattctggatgccgtgggcgcgtttgcaccggaattcgtcacccggctggcgaagctcaagaaggccgacattgccagcgaggccgagcggctggccgatggcaccggctggatgcccgccatcttcaaggccgaaggcccgcaggaggccgcgcaggaagaaggcccggagcaggacgccccggaggataccgaggcaatggcggatgaacccgccgaggcactggccgcttga

SEQ ID NO: 330217 - DNA, 930 bp, Pseudomonas aeruginosa
atgagcaatgcaccatttcccatcgatcccgaactgacggcgatcgccatcgcctaccgcaacggccggatgatcgcagacgaggttctgccgcgcgtgccggtcggcaagcaggagttcaagttctggaagtacgacctcgcccagggcttcaccgtcccggaaaccctggtcggccgtaagtccaagccgaacgaggtggagttcagcgccaccgacgaaaccggcagcaccgaagaccacggcctggacgcgccggtgccgcaggcggatatcgacaacgcaccgacgaactacaaccccctgggtcacgcgaccgagcaaaccaccaacctgatcctgctcgatcgcgaagcccggacctccaggcttgtcttcagccccaatagctacgctgcgggcaacaagaccaccctgtccggtaccgatcagtggagtgacccgaccagcaacccgctgccgatgatcaccgatgcgctggatagcgtcattctgcgcccgaacatcggcgtcctgggccgccgcaccgccactatcctgcgccgtcacccgaagatcgtgaaggcatacaacggctcactcggcgacgagggcatggtgccgatggccttcctgcaggagttgctggaactggacgcgatctacatcggcgaagcacggctgaacatcgctcggcctgggcagaacccgaacctgatccgcgcgtgggggccgcacgcgtccttcatctatcgcgatcgcctggccgacacccgcaacggcaccaccttcggcctgaccgcacagtggggtgatcgcgtgtccggttcgatcgccgacccgaacatcggcctgcgcggtggccagcgcgtccgtgtcggtgagtcggtcaaggaactggtcaccgcaccggacctcggcttcttcttcgagaacgccgtcgcggcttaa

SEQ ID NO: 330218 - DNA, 630 bp, Pseudomonas aeruginosa
atggcccgcaaacccagtaacgacaaggacaaagcggctgcacctgccgcacctgccactaccggcgcacagccgccggcggaagagaacctgatcgacggccaactggccggcgttcaacaccaggacggcactgttattccgctcgccgaactgccggaagcggaactgcggcagatcggtaccgacctggagatccaagacgccgccacgctggcgatcgagcagctcgtcgctgccattcaggcgcagaaggtgctcgtgccggccggcgatgaagtggccagtcccgaagcggagaaatcgcctttgcggatcgccgacgatgacgcgcgctaccaggtgctgctcagcgacggttcgctggcctatctggaagatctggcccaggaggatctcgaagcgctggctgcagcctgctacgaactggcgattcagtcgcgcggcggcgagctgggccggactatcggggtggatctggccgccggcctcaaggaccgcttcatcgtgcagcgcgagcgtctggatcatgacggggagacgtatacccatggtgatccgatctacctggatagcacccaggctgctcagttgctgtcgcttggtgcggtcaggtcggagatgcagtaa

SEQ ID NO: 330219 - DNA, 288 bp, Pseudomonas aeruginosa
atggacaaccaacatcgcaaaatcagcggctatcgcgagttgactcaggaagacatcgacctgatgaaccgcgtcaaggccaagggggctgagctgctggagcttcagcgtgaagtctctgcccacctggtgaagtgccagtgcaccttggctgtcgaggggccaacggaggagttcagccgcttcctgaaggcagaaccccgccgctgggcttcgatcgccaagactgacatccagacgggtgtcatggctctggtacgcgccatcgctcagcccgagggctgctga

SEQ ID NO: 330220 - DNA, 456 bp, Pseudomonas aeruginosa
atgtccagcgctccattcgatcacaacctgatcatcgagcgcctgaaggatcaggtagctgtcttggagagtgtcggcggtgcggcggactttgctgccatcaaggcggtccgcgacttccggacaccgaccgcctacgtgatcctcgctgaggaaacgccgatgccgcgctcgtccggagcacccggcgcagcgacccggcagatggtccaggtgcgattcggtgttgtggtcgcaacccgcaactaccgggacaacaagggcaagaacgcgatggacgatctgcgcccggtactgggacaggtgcgggatgccctgatcggctgggtgccgcctggtctggcgggagcccgtgactgccaactcatccaggggcaacccgtggactacgacacgtccgttttgatctggaccgacctctatcagacccaacacgccatcgggagaacctcatga

SEQ ID NO: 330221 - DNA, 3768 bp, Pseudomonas aeruginosa
atggcaacgggcaaagaacttgatctggcactacgcatccgcgctgacgggaatcagggcgcccaggccctggacaacatcaacagccaggtcgagcagatcggtatcagtgccaccgccaccagcagtcagctgagtgcgatcggcgagagcgccgatcaacaggcggcacggctcaaggccatggtggcggccagccttcagcagcaggccgcgttcgacgccctggctagcagttccgacaagctcaacacctcaacccgcgccgcaactgccggttggcaggagagcgcccgcgcccaatcggcgtcgatgaacgcctaccacaacgccgagcgtgccaggcagcatcagatcgcaaccgagcagcgagccgccgaagccgccgccaaggcctcggccgagttcgacaagcagcaggcagagctggccaagctgctgggcgcaatcgatccggttacacgcgagctggagaagctcgacaacctggaaagacgcctgggccaggccagaagctcccggttgatcgatcccgaaggcttcaccacctacaacgccaagctccaggagcagcgtgaacgcctgcttggcacgtccgatgccatggctgtggccgggatctctgctggccagtaccgccaggccatgcggcagttgcctgcgcagatcaccgacgtcgtcaccagcctggccagcggcatgccgatctggctggtcgccattcagcaaggtgggcagatcaaggacagcttcggcggtgtgggcgcgaccttccaggcgctgggtgacaagatcaagtccttcttcgggatcgcgagcacggccagcgaagaactgggtgagatcgcccgcggggcagacgcagcagcagtatcggccaacaacgccaggaccgcgatgaccggccttagcggggccggcagcgcctttgcgatcgttggcgtcgcagccgctgctgccggcgtggcactggccgctgcctacgagaaaggccgctcggaagcgaccgagttgaacaaggccatcatcctgaccggcaactacgccggaaccagcgctggccagctctccgcgatggccgctgcgatcgcgaaggcgaacggcacccagtatgaggccgtggccgtattgtcggagatcaccgccaccggcaagttcacggtcgatcagatcgagctggtggccagtaccgcgatcgccatgcaagacgccactggcaaggccgtttccgaaacggtggccgagttctccaagctggccgaagacccggtcagggcgtcgcaacagctcaacgagaagtaccactacctgactgcctcggtgtacgagcagatcaccgccctgaaccagcaaggggacacgttgggcgccgcccagctcgccatggatgcgtacggccaggcgatggatgagagggccagccagatcgttgagaacctgggcacgatggagcgcgcctggaagaccgtcgctggcgttgccaaaggcgcctgggatgagatgctcggcgtgggccggacggagacgcccgaggaacggctggagcagctgaccaaggggcaagcctttcagcctggccgcgctgtggccagcggggcggtctttggcccgttgggctggttcaacgagctgcgcaaggcgtatcagcgcagctcgatgtcggacgacgagcgcgggaagcaattcaccgatgccctccaggaaatccaggacgagggcgagaaggcgcagaaggcgcgcctggatcgctacctggaggacgaggcaatacgcggccagcagagcatggacaagctgctggagtcggtgcgcaccaacaaggaaaagcgcgacaagctcaacagggagctggaccggagcatcgccgcgattcaagccacgaacccggaagacgagcggctgcgcccggagaatatcgctgctgctcggcgagccatcgacgagaagtacaaagacccgaagaccccgaaggggccgagtactccactcgatcagtccaccgtcaccgaagcgaagaaccagctggaccagctgctggccgactacaggaacgctgagcagagcttgcaggcgcagcagcgggctgggctgctctcctacgccgactatgtcgcccgccgcagcgaactgatccgccaaaacaaggaccaggtcaccgcagcctaccaagcggagatccaggcgctggaggcgctgcgcagcaagagcactaccactgccgcacagcgcatcagcctcgatcagaagatcgccgacgcccgcaacaacatggtgaaggcacagaagaaatccgacgcggacttggagatactccaggtcaacgagcaaggccgcctcaagaagcaggcccaggcggtgaaggcttacgccgacgcgttgcagcagcagcaagatgctctcgcgctgcagggggagcgggctgcggccgccgttgggatgggggcgcaacagcgcaggctgttcgagcagcgcggcaacctcgacgatcgcttcacccagcagagattggatcttgccagccagtatggcgacggctcgcgtggcatgagcctcgacgagtacaacgacaagctgcagaagctgcaggcgaaccacgcggcgatgaccgagcagctccaacgcaactacgcggccttgcaggtcgcgcaggcagactggaccaacggtgcccgctcggcgttcgccgactatctcgactcggccaggaacgtcgcgggccagacctacgacctgttcagcaacgcgatgtcgggcctggagaacagcgtcgtttccgccgtaacaacgggtaaggccagcctggatgactttctccgtacgctcgcggccgactccgctcgtatggcgaccaggcagctcggggcatcgctgctcagtagcttcggactcggcgagaccaaagacgctggtagcaaagacctggccgtaggtgcctcggcggtctcggcatcggccggcgccctggcaaccgcgggaggcactctcgtgaccggcgccgcggcgattcaggctgcagccgcatcgctagcggcagcgaacggtggccaggtggtgagcggagcagcctccgcagcgggacaaaccggtccagcggctgctattgctgccgcgtcgaccgaaggtgcagccgcaatgggtagcgcgatcagcgaagcaaccacgtcgggcggtggcaccctggcgagcgcgctggctggagtgtttggtcagggtgccagtttgttcggcaacctgttcagcagcctattcggtggcggtgctgctggcggcactggcggtggggggggctggttgcaactgggcatgagtgccgccagtgcgtatttcggaggtggctttgccgatggcggccgtatccaaggaccgggcaccggcaccagcgacagcatcccgatcctggcctcaaacgacgagttcatgacccgtgccgccgtggtacggcagcccggcgcactcgcgtttctggagcagttcaaccggtatggcatggctgccctgggcgcctgggcgaacccggtccgccacgctacgggcggcctgatggggactcctgctccggccatgcccgctccgggcttggctggttcgcgtctacaagagcccgcaaagaatctcagcgcgacgctgaagaacaaccagaacttctacctggtcgacgaccccagccgcatcggtgatgtgatggcgggtcgttacggcgacgaagcaatggttctgcacatcagccgcgacccgcagaaattccgtcaactactgggaatcaactga

SEQ ID NO: 330222 - DNA, 957 bp, Pseudomonas aeruginosa
atggccaccgaattcggcacagccacgaaccaccagaacctggtcgagcgcctcgtccagttcctcaccgcgaacccagacctggtcgcggctgggcaggcctacgagatggttttcgacaacaccattcccgcatccgggacggcgatcgcgattcgccaagtgacactgcgtgctcctggcctcggcggcgacgacagcatcttcatgggcgtccagtcctacggcgacaccgcgctcgactactacaacgtccggctgatgggcggtaccgcgttcaatcctggcgcgctgccgccgggcggtgacttctggacggcgttcgttaactacagcccgcgagtacagctgcttgcctggaaccagccgatgccctactggttcttcgcgaacggccgcaggttctggatggtcgtcaaggtcagcacgatctacgagtcggccggcgccggcttcgtgctgccgccgtgcccgccgtcgcagtacccctacccgctcgctgtggttgggtcgtatcgcggggacgtcgctgtgcgctggtccgacgtcactgaccggcacaggggcatcagcagcccctacgagcgcagctgctatctccgcgatcccgccgggcgctggcttggtttcactgtcgaaggaggggctgccaacgagtccgactacagcaatcggacgctcctcccgctgggctgcggccgttatgcgggcagcagtgacaccgtggtcaaacaactgcgtgattcgttcgggaagttcccgctcaaagcgctgtcgttcgtcacccgcgaaaccgagggtcgccgaaacctgggcgacttcgacggcgctttctacgtgccaacgctcaactcgggcgccgaggacgtgattgtcgaggacggagtggaccacgttgttttccaaaccgcctggcgctcgggcaacccctggctctacgcaatcaggaaggactga

SEQ ID NO: 330223 - DNA, 213 bp, Pseudomonas aeruginosa
atgagactgtcccccagcatcaccctggctctgaacattacctacctcgacctagcgctgatccagcggctgttcgcaggcagtcgcgacttcctgccggcacctgagctgtattgctcgccggtgccgcgcgagcggcatggcaagtccggggtggctcgggcgaaacgtaaggcacgcaagtacaagcggaggaaccatggccgtccttag

SEQ ID NO: 330224 - DNA, 996 bp, Pseudomonas aeruginosa
atgtcgatcaccaagctccccgatggccgttggttcgtcgatgtagaaccgatcaagggcaagcgctttcgcaagcggttcaagaccaagatggaggcgcagcaattcgaggccactgcgcgtcagaagtgtgcggagaaccccagctggacgctcaagccgaaggaccgtcggcgtctctccgagttggtcgaactctggtatgaactgcacggccagaccctgagcaacgggcatcgttgcgtggcgattctgaggttggtggcaaaggacctgggcgacccggtcgctgtctccctggagcctgcgaaagtggctcggttgcgtagccgacagatagccaatggcatgtcgggcaagaccgcgaataaccgtcttggctacctcaagtccatgtacaacgaattgcgccaactcggcgtcattgactatgagaatcctgtggggcgcatgcggccgctcaagcttcaggaaagaccgctgtcgtacctgaccaagcaacaggtgtccgaactgcttacggccctggatgcgcgcaccacgtcgccacatccgaagatggtcgctcgtatctgcctcgcgacaggggcacgatggggtgaggctcaggcgctgacgccggaacgtctgaaaggtaatacggtgatcttcgccaacaccaagtccaagcgtgtgcgctcggtgccgatctcggaacaattggccgccgacattcgccggcattggcagacccacgggcccttcacgaactgccttggcgtgttccgcctagtgctgctgtcgacctcgatcaagctgccgaaggggcaggccagccacgtactgcgccatacgttcgccagtcacttcatcatgaacggtgggcacatcgtgaccctacagcacatcctggggcacgcctcgttatcgatgacgatgcgctatgcgcatctatcggaagagcatctatccgaagctgtgaaattgaatccgcttaacgttatccgtgctgggtag

SEQ ID NO: 330225 - DNA, 324 bp, Pseudomonas aeruginosa
atgtgcagcgtggctgcgcgactggctccgatgatccgcattgatgcgctgtggctctccaccgagccgctggacatgcgagcaggcaccgagacggcgctcgcccgggtagtggctgtctttggcgcagcgcgcccacaccacgcctatctgttcgccaatcgacgagccaaccgcatgaaggtgctggtgcacgacggcatcggtgtctggctggcggcccggcgcctgaatagcggcaagttcgtctggccgcgcgatgccgccaccaccgccacactcagccgaacgcagttcgatgcgctcgtgctgggcctgccctag

SEQ ID NO: 330226 - DNA, 966 bp, Pseudomonas aeruginosa
atgacccgtcatcatcccagtgacccgcgcgcggcgttgttgcaacaccgctggctcaaccgcctgcagaccgggctgttggtcctgaccctggtcgggatcgcagccgccgcaggaagcctgctgttcggggaaagcgacctgtggctcgcgctgtttgccgttgcaggcacgctgctgctggaaccggcagccgcatccgccttgaccttgcgcctataccgcgcccgggcgctgcacccacacgaagccccggaaattttggccctgttgcacgagctgtccgtccgtgccggtttgcccgcaacgccggtgccgcactacgtgcccagtgccgtcgtcaacgccttcgccaccggatcgaagcaggaggcatcgatcgccctcaccgatggcctgctgcgcaacctgagttcgcgcgaactggcgggtgtgctcgcgcacgaggtcgcgcacatcgctaatgaggatctgcgtgtcatggggctggcggattccgtcagtcgcctcacgagcctgctagcgatggtcggacagatcgctattgtgttcagcttgcccgcactgctggccggcgcggtggcggtcaattggcctggactgcttctgctgatcgcctcgccccagctggccctactcgcacagctcggcctgtctcgcgtgcgtgagttcgatgctgaccgcctcgcggcggaactgacgggcgacccgcacgggctggcgtccgcgctggcgaaaatcgagcgggtcagccgctcctggcgtgcctggctgcggccgggatggggcaatcccgagccttcctggttgcgcacccatccggcaacgcaagatcgtatctcacgcctgctgacgttggcgcctggacccgtaacagccttgccgtttcacgcgccccatttcttgccggaatccgctgtgacgccgcgcccgccgcgctggcgcccgagcgggctatggcgctga

SEQ ID NO: 330227 - DNA, 1716 bp, Pseudomonas aeruginosa
atgcaggacttgctcggcgccaccctgatcctgctggcggcatgcagcctcgcggatgtggcgacggcggcgttcagagtacccgccttgctgggttacctcgccgtcggcgccttgctgggcccgtcggtcagcggtgtagtcgcgccgggagaagcgcttgattttctgtccgagctgggcgtggccctgctgctgttcatggttgggctggagttctccctcgggcacttctggctttcccgtaaaaccgtattggcggccggcagcttgcagacgatcgctgtcgccacgccactgaccttgatgttgatgtggctgggacagccagttcagcgcgctgcgttgctcagcactgcggcggccatgtcgtccacggcgctggtcagccgacagctggccgaccaaggcgagctcaccacccgccacggccgcagcgccatcggcgtgctggtctttcaggacctggccagcgtgcccctgctggccctgctggcgatctgggcgcgcggcgagtcgccgaagatcgagagcgtgctgctcgaagtgttgggcgtgctgatgttgttcgcggcagcggccctcgcctcccgtcgtctgttgcatggcctgctgggctgggtggcgcggcagggccacgaagaatccttcgtgctggtttccttgtgcgtggtggtggctgccgccgctgctgcacacgcggtcggcgtatccgccgccctgggtgcgtttttggccggcatggtgctgggcgagagcgacttccgtcaccacatggaaagccacctcaaaccgtttcgcgatgtgttgtcgggggtgttcttcgtgaccatcggcctgcagttggacggagcgcagattctttcggcaccgctggcggtgctggcgtggctggcagtgctggtaccggtcaagatcgggctcaacaccctggccttgcgggcgacgcgcctgtccgccctcgatgcctggcgcacgggcatagcgttggggcatggcggcgagttcgccctgctgttgttgggcatggtcttgcagcagcatctgatccccgcgaccgtcgtacaacccatgctggtcgcgctggtgctcagcatggccttggcaccgctgctgatccgccatcacgatgtacttgcccggttcttgagccgcaccggcggcgtcattcagccaccccaggctgaagaagtcgagatcgccgcgcagacggcgcgatatcgagaccatgtcatcgtttgcggcgcgggcgagcttggcctgacagtcagcgagattcttcgccacgccggcgtggcgcatctgctgctggaagcagacgagcagaaggtagaggccgcgcgtgccgccggcgcgccggtgttccatggcgatgcgagtcggcccgataccctgctggctgccgggttggcgcaagcgcgtctggtggtgctcacgttcgaccatgcccagcaagtgctgcgcatcgcccaggcgattgccgagcgccgtccggcgctgaccttgtgggtgtcatgcagaagtacgaccgcggccgatgcatttcgcgccatgcccaacgtgcgcgtgtaccagcaatcctttgccgcagctattgggctggcggaacaggtgatgtcgacgcttggcatgtcgaccgagctgattgaaggacacatcagcgcaatgcgccgccgtctcgacagcagccgttttccagggagttcatcgtcatga

SEQ ID NO: 330228 - DNA, 2298 bp, Pseudomonas aeruginosa
gtgtcgccccgggtcaaggacgcgctcagccgtgctttcgtggcctccaacgaactcggccactcttatgtcgggccggagcatttcctgatcgggctcgccgaggaaggcgaaggtttggcggccaacctgctgcgccgttacggcctcacgccgcaagcgctgcgccagcaggtaagcaaggtggtcggcaaaggggccgaggatggccgcgccgagacgccgaccaacacgcccgagctggataaatactcgcgcgacctcaccaagatggcgcgcgagggcaaactcgatccagtcatcggccgtgcgcaggagatcgagaccaccatcgaggtgctggcccggcgcaagaaaaacaacccggtgttgatcggtgagcccggcgtcggcaagaccgccattgtcgaaggactggcgcagcggatggtcgccggcgaagtgcccgagacgctgcgcgacaagcgtctggtcgaactcaacatcaacgccatggtggcaggcgccaagtaccgcggcgagttcgaggagcgcgtgcagaaggtgctcaaggaagtgaccgagcaccagggcgagctgattctcttcatcgacgaggtgcacaccatcgtcggtgcaggccagggtggcggcgaaggcgggctggacgtggccaacgtgttcaagccgatgatggcgcgcggcgaactgaacctgatcggcgccaccacgctcaacgagtatcagaagtacatcgagaaggacgccgcgctggagcgtcgcttccagccggtgatggtgcccgagccgacggtagcgcagaccatgatgatcctgcgcggcttgcgcgacaccttcgaggcgcaccacaaggtcagcatcaccgaggatgcgatcatcgccgccgccgagttgtcggaccgctacatcaccgcgcgctttttgcctgacaaggccatcgacctgctcgaccaggcggccgcacgcgtgaagctgtcggccacggcccgcccggtggcggtgcaagagctggagtccgaactgcaccagctgcggcgtgagcaggactatgtggcctcgcgcaagcagtacgacaaggccgccgagctgggcaagcgcatcgaggccaaggagactgaactcaagaagctcgtcgaggaatgggaacgcgagcgcgcctcgggcagcgccgaagtcaaagccgagcatgtcgcgcagatcgtctcgcgcctgaccggcattccggtcaacgagctgacggtggaagaacgcgagaagctgctgcatctggagcagcggctgcacgagcgcctggtgggccaggacgaagcggtgcgcgcggtggccgatgccgtgcggttgtcgcgcgcgggcctgcgcgaaggcagcaagccggtggcgacttttctgttcctcgggccgaccggcgtgggcaagaccgagctcgccaaggcgctggccgagtccatctatggcgatgaaggtgcgctgctgcgcatcgacatgtccgagtacggggaacgccataccgtggcacgcctggtgggcgcgcctccgggttatgtgggctatgacgagggcggccagctcaccgagaaggtgcgtcgcaagccctacagcgtgttgctgctggacgagatcgagaaggctcaccccgacgtctacaacatcctgctgcaggtgttcgacgacgggcggctcaccgacggcaagggccgggtggtggatttcaccaataccatcatcatcgccacctcgaacttgggctcggacatcatccagcgtcggctgaaggcccgtggcgccgccggcgaggaatacgagaagaccaagtccgaggtgatggacgtgctgcgcggacacttccgccccgagttcctcaaccgcatcgacgagatcatcgtcttccatgcgctgggcaaggaggagatccgccatatcgtcggcctgcagctcgatcgtgtggcccgcaacgccgccagccagggcgtgacgctgaccttcgatcagaccttgatcgatcacttcgcggaggaaggctacaagcccgagttcggcgcgcgtgagctcaagcggctgatccgcagcgagctggaaactgctctggcgcgcgagatgctgggtggcggtatcggcaaggccgatcacgccagcgcccgctgggacgacaaggccgaacgggtggtcttcgagcgccaggagccacccgcgaagccggccgagcctgagaagcccgatgccgcgaacgtggccgagacgccgccgagcgacgcgagcaagcctgcgcgcaagaagaagtcagcgggcggcgaatcttga

SEQ ID NO: 330229 - DNA, 213 bp, Pseudomonas aeruginosa
atgaggctgacgacgatacctcgaatcaagaagatcaacctcagccaaaagcggttcgagcgcaggcgcaggctgtatgcgagtaagcgctcatggcgtcttgatggcggaccgctcaaccgggcctggctgtgcagccctggaactcttcgattcagcatcccaggctggagcggctactacgacggcgagaataaatgggtggagctatga

SEQ ID NO: 330230 - DNA, 519 bp, Pseudomonas aeruginosa
atgagcattgattggaacacggcaccggagggtgcgactcattgggagccgagggggatagtattcggcgaaggctggatgaaaaaggccgggaatgaatggtcctattggctcgaaggaagcgaagtgtgggccggagtgtgggccgattgttttgtatccgcagagcgtgaggcgacattcgaggctagaccgaaagaggcctgggacggccagggcctgccgccggttgggacggtgtgcgaatacagacacatgatctggcctgagtatcgtccctgtgaaattcggtacatcagcgaagagtcgctagttgcgtatgacgacgcacaagaacagttctaccgcacgtgcgacatgctgttccgccccatccgcacccccgagcagatcgccgccgaggagcgggagaaggcagtcggtgatatggctatgtcaattcaaggagttccatatcagtaccctacgctttacgcactctacgacgccggctaccgccgccaggagtcatccacatga

SEQ ID NO: 330231 - DNA, 366 bp, Pseudomonas aeruginosa
atgaacaccgcattgaaatacgcccaggagcgctgggacaacgcgctaccgcctgatgatgacggcgaccgcgagtatgtcaccgcgcaagtcgggaagctcctgaactgcgaggacggtgactgcgtgccgttccatgaccggaaagagaggccctttatcgggccggagttcactgtctacggctttgctggattcgtgcccgagtggctcgcagaggtcgacagcaaagagtgcccgatgacccagctactgcttgcagtgcgccgaggcgacctggaactggcccaacgcatctggttccgcgcattcgaatccacgcttatcgagaacgctgaacgactggttagggagagacgagtatga

SEQ ID NO: 330232 - DNA, 294 bp, Pseudomonas aeruginosa
atgtcattccaaaccaaggaaacgcgcagggctcgctgccgacacctgtgcgaatgctgctaccgcattgtgaatgcaggtgagcgatacgtgaagatcgccggccagaacgaaggcgacttctacagcgccaagacgtgcttggcctgtgacagcctcatacaactggtatgggaaacggcaggcccatacgactacccggatggtctggcattcgatgagttctatcaagctgccgaagacctagatctagcctgccggattccgcaggaaaacaggagggcagcctcatga

SEQ ID NO: 330233 - DNA, 177 bp, Pseudomonas aeruginosa
atgagcgaacaaatcacagcgctcgaatacgttgagcaacgaaaggcggaactggaccaatttgccagattctggttgcagaaccagggcgctcccggctggcccgagaagttggccgaaggcgagtggttcgaacaagaggcagcttggggatcatataccgagcgccacgactga

SEQ ID NO: 330234 - DNA, 489 bp, Pseudomonas aeruginosa
atgagccgacgcctcgaaatcttgcgggcttctctcaccaaaaaagaagccctgttcagccaaaagcttagcgcccacatggaaacagtgaaagcagccaatgggcagccgctcaacgacaaaagaaacggcgcggcaacgcttgagaaatgggatcggcagaatgacgcactgcgcgcgctcgatgagtctgtagccaagacattgcgagcgatagagcgcgaagaagccaagatcgcgatggtgcaggctgtcgctttgcctggccccataaaatcactcatagactctggcgtcttgacgcagtggcgaaaacatccgcgatttttctttgtgactggtgttgataaagcacgtatcgaactgatagataacggccagattggccaccgctatctttccagcatcacgactaaagagcagtacgcgatattccgcgatactttcaacacgcttaaagcgcagctctccgatcagcaggaaggctaa

SEQ ID NO: 330235 - DNA, 729 bp, Pseudomonas aeruginosa
atgaacagaaacgaacgaatcgcgcgagccatccagctcagtggaaaaacgaaaagcgaaatagccaagctctgcgacgtggctccctctgccgtgacccaatggatcagcggcgaaagcaaaaccttgaaagcagagagcgtctttgctctgtccaaggcaacaggcttccgtgcggagtggataacgctaggcacaggtccggagcgcgctgtagaggccggacctgctcaaagccagggagaactagtcggcttagtctctgcttgggatgcagacacgccgcttgaggatgacgaagtagaactgccgtactactctgaggtggaacttgccgcagggaatggtatgacggaagtcgttgaaatcgctgacagaaaacttcgattttcgaaagacacgcttcggtcagccggcgtggagccagaatgtgcagcggtggcccgagttcgtgggcgatccatggagaggttgatcctcgatggcgccgctatcggcttcgacaccagcttcacacacattgtcgacggtgagatctacgccttcaatcaggatggaatgcttcgcgtcaagtatctctattccatgcctggcaactcagtccgcatcaggagcgaaaacagcgaggagtacccagacgagatactgaccgccgagcagttcggccagattgcaatgcttgggcgtgtgttctggtggtctacggtacggcgtgcacctcgcagatag

SEQ ID NO: 330236 - DNA, 174 bp, Pseudomonas aeruginosa
atgaacatgaacgaagccatccagcattttggctccaaaaagaagctcgctgaggccctgggcatccggccgagcgctgtcacgcagtggggggattcgatccctgtaggtcgtcagtaccaattgcaggtcatcagcaagaacaagctgaaggctgatcagaaggccgcctga

SEQ ID NO: 330237 - DNA, 309 bp, Pseudomonas aeruginosa
atgacagccagccaattaaaccccgagcaggaagcaagggcccgcaagaactacagcctcatcgtgcaacgacttgcatcggttggaaatgcgccggttgcgcatgcagtcggttgcgacgagtcgacgatcagccggatgaagccggagaagttcttggagttcgcccggatcttggctgtgctggacctgaaggtcgtaggcaacgagatgaagtgcttcaacgagaaggagatcgccgcgatcttgcacctggcgaagtcgaagctctctgaggtcgagagcgtcgagcagttggagtgggactga

SEQ ID NO: 330238 - DNA, 801 bp, Pseudomonas aeruginosa
atgagcaatatcgtttcattacgcaacaccggggggtttacccggatggacaacgagctgtatgaagccctgataggagctgaattgtcggggcgcgagcttcgtgtcgccctggccatccatcgcctcaccgttgggtacaacgtcgaggaggcgcgcatcgctgcctcggttatcgctgacatgtccggcatccaccgagaggatgtttcccgggccatctgcgagctaatccgtcagcgagtgatttaccgtaccggaggcagtcggagcccgatgggtttcgctccggtttctgagtggaaaatcgacggcaagaacacccatcagaacaagcagaaatcagtgccacagtgtggcgtttctaccacatccaatgtggcgttcttaccacgcaataaagacagtaaagacaattcagttccttcggaacttgtcgacgctgggcgtcaacctgagcagggcgagctgatctctgaacctgttcgccaagctccccgtgtcgaggcatgtccgcaccaagccattgtcgacctgtaccacgaaatcctatccgaactcccatctgtcgccctgatcaacaagggacggcgtcagcatctccaaggccggtggcgtgagcatgcagctcaccgtgaccttgggttctggcgtgagtatttcgagagcgtgaaggcctctccgtttctgatgggcaaggttccaggccgcaatggcgcaaagccgttccgggccaccttcgactggctgattgctccctccaacttcgtcaaggttgtggagggcaattaccatgcgtga

SEQ ID NO: 330239 - DNA, 1386 bp, Pseudomonas aeruginosa
atgcgtgatccctacagcctcgaagccgagcatggggttcttggcgcgatgatgcagcgtccagagctaatcgacgttcttgccgatgagctgaccccggagtcgttctacttcgcagacaacgctgaagtattccgggcgatcatggcggtacgttctgccaacaaggcggtcgacttcctgaccgtggctgagcagcttggagcgcttcctagcgagaccccggcactggcttactgctgcgagatcgtgaagaacactcccagtattgccagcgcctcgacttatgcccgtatcgtccatgagcgcgctgtggaccgggcactgcacgtcgctgcccaggacatttccgagattgccagttcgaatcaagagaccgccgaaaaggtctctgctgctcatgccgcaattatggcggtggatgccggcgaaactagcgttgacgttcagaaggcttcagatgtcctagcaagccaggtcgaggtctggcagcaccgccacgaccgttatcagagcggccaaactctgatgggcatttcttctggattgactgatcttgacgccaagatcggcggtttcttgcccggccaactgatcgtcgtagctggccggccagctatgggcaagacaaccttcgcaatgtcctgctcgatccatgcggcgctcaaggaacggaagtcagtgctggctcttagccttgagatgagcaatggacagctcattgatcgtgccgttgcttcagtcgggaagattccgctgagcatgattcgaaacggtaccgcatgcgaggagtacggtaccgaactgggcgccgcatcgcgggccatcagcatgtccaacctgtacctcgctgataagccagctctgaatacgatcggcagagttcgcgccatggcacggcgccacaagatgcgctatggactcgacatgctgatggtcgactacctgcaactcatggacggagagggggagagccgcgtcaacgtcatcagctcaatcagtcgcggcttcaaactcctggcaggcgaacttggcgttccagtgattctcctaagccagctttcccgaaagtgtgaggagcgccctaacaagcgtccgatccaatccgacctccgcgaatccggcgctattgagcaggacgcagacatcatcctctttgtgtatcgggatgaggtctacaacgagcataccgagttcaaaggcgtggccgagatcatcatcgcaaagggacgcgaagttgaaacgggtacggtgcgcgctgcgtttcttggtcagtacaaccgctttgaaaacctgtctgccgagtggcgtcctgatgaagtggttagaccgcaaaaggtaactcgactgtctgatcgctacggcagcaaaggagcggacaaatga

SEQ ID NO: 330240 - DNA, 216 bp, Pseudomonas aeruginosa
atgaagaccttcgaactcctgcggatggaaggcctgcgcacctacggtcgtcaggtcgaggccagtacttggcgcgaagccgagatgcaatgccgcgacggcgagatcgtaaacggcgaactgatcggtgtgtacgactgtgacccggtaaccgaggccgtctgcactgcgcgcaatgacgtgatgatcgagcggatgggggtgtgctgtggctga

SEQ ID NO: 330241 - DNA, 306 bp, Pseudomonas aeruginosa
atgagcaagttcaaggcgggggatctggctatggtcatcaaggccaaccatgaggagaacctggggaaggttgtgacgctgcttcaatccacctctgaagagattatcgactgcggacgcggcgcaaagacttcaaatccgaaccgactattgtgttgggtcattcagcacgaagggctggtcaccagtacagcctttggattcgagtgcctggttaaagttggagcgtgccccgagtcatggctgctcccactccgcggcgacttccagcccgagcagcagaaggcgaaggaggagatcgcatga

SEQ ID NO: 330242 - DNA, 210 bp, Pseudomonas aeruginosa
atgaccccgcgtatcggcgttgctctgtgggtcttggatcgccatgagtggaactggagaaggttgaatcggtccgccttcatcatgcgcaagaagatggctgcgaagtccgtggctctgattgcccatgatcggatccttaccgacgaggttcttactcgcgggcttccgtcttactgggatagggagacgaaggaggttgaggcatga

SEQ ID NO: 330243 - DNA, 159 bp, Pseudomonas aeruginosa
atgagcggatcgaaggttgctcgactggccatcggaagcttgctggtcgctgcattgattgtctacacgcaaacctccactccggtgaacggatggattgttctgctaatggggaccgccactctatggcttggctacttcgcgggagaagagctatga

SEQ ID NO: 330244 - DNA, 234 bp, Pseudomonas aeruginosa
atgagccgcagcttgttcttccgcgccatgcggagagttcctgttcggccaagagcgctcattgtcctggtgatcatgatcgccttcggctgggtgccgcttgtggtggctgtatgcgaggcagtcggcgaaggggttcgggcctgccggcaggaatcgtccaggctctacggcgacttcagcaaagctttcaccgactgctggaaagccttggtttcgggggagcctcaatga

SEQ ID NO: 330245 - DNA, 297 bp, Pseudomonas aeruginosa
atgtcatcgccgcaaccccggcgccgccgcgcgccgcgtatgaccagttggacgctggtcaccctcgtcctgctgatcatcctcgccgcgattcgcccggagcagctccaggtcgtcgcctataagttggtcctggtgaccttgggcgcggtggccggttactggatcgatcgcagcctgttcccctacgtggctcgcccgcatgagtgctcagccaacctggttgtcgtgggcgcatggctgcgccgtgggctgatcgtactggcttgcatcctcggcctgacgctggggctctga

SEQ ID NO: 330246 - DNA, 735 bp, Pseudomonas aeruginosa
atggaagctaaagggaacgccgcagagcggttgctcaagatacttgaaggaatgaaacgtactccacctaagacaccgttgtctgttgcctgggctaatactttgggatgccaaacccctagagaactatttcgctacttggctgacgtgattcatcttgcagatgaagcgcggcgagaggtctctgcgttaccggatctcaatcaagagctgttcttggccccgttcaccaacatagacaaccttctaggtcgaaccagcctgacccaacactggggcgattacatagccttgttagatgatgccactctccttggacttcgctttgcagctgagcgtgtgagtcgagagggaaaaccagctgcctacctggctgaggaggttgcagcagagttggtttccgaactaaatcagatgcttgagcaagtggttgcttcagagttgccagatgagcttaagcatcttttctgtcgcaatcttgaggaacttcgccatgcgttgttggcgtttagaatctctggtgcccaaggaatagcggatgagattgatcgggccctcggctctatcgtgaggcacagggaagtaatcaggagtgaaactcctagctcagaggaaagcttagtggagaaggtgttcaagctcctcgagcgggtaaattcaactatcagctttgcccagaacactgctcctcttgtaccggccttgaagggactcttggcggttctacccaattga

SEQ ID NO: 330247 - DNA, 744 bp, Pseudomonas aeruginosa
atgcagagcggggacgatggcttggccaagctggccgaaaagcttcacggtattcgtgaaagccttcctggagcggatggtgaaacgccgaacgtgccggcgtccgatatccgcattaagcgcaacagcggcaacgtcaatttcggtacccaggtcaacatcggcgcccccatcatatcggagccgattgccctctctcagcgaaggagcttgaacaacagggtggaggaaatcgcagggatctacggcgtcgatcctcgcgtcatctggcgcgaagtccttcataccagattcggcatcggtaacgtcggtgagctatcgaaggcgcagtatgtcgaggctgttcaagcgctagatgcccacgaagcacagctcaaggctctggcggcggaaaacagagagcagagccatgtaaagcgcttggttgcagaggtgctacagctcgcgaatagccggggggcctatcaagacatggccaaattctgctcccgtgagttcggcctgaccgtcctgaatgacctgagccctgatcaattgaagctggtactcaaatacctagacaaggccacaatcgctcaagatctgccgactaaagaggctgccgtaaaacgccagacatctccaaggcctaccgcatattcacagggaggcttcgtagcggaagctaaagcgttggtccttcagtaccccattcactgtggcgccatcgctctggtactgctcatgttgggcaagatcatctaa

SEQ ID NO: 330248 - DNA, 441 bp, Pseudomonas aeruginosa
atgttcccatgtcaagagaaaagaggaacgtttgtgcccttttttggagagcgtttgcgcgcggagagggaacgcctgggctttagccagcaggaattcgccgacatctgcggtgtcaccatgcgaacccaaagaaactacgagaaaggtgatcgccaaccagatgcgagctacttggctgctttgacccaaacgggtggtgacgtgctctttgttctcactgggcaacgtcaggtaggcgcggcggcatggttgattgacgttgatcgcttagcccgcatagtgaagatgctcgaagctttcgcccgagatgccgggaagcgttggccgagtacccaactcatggcggtggcagccgaggtttacaacgccttattggacgagcccgccttggatgaacccaaggtcgaaaggattttgaagttggtagtgaatcgctga

SEQ ID NO: 330249 - DNA, 1077 bp, Pseudomonas aeruginosa; identical to SEQ ID NO: 328685

SEQ ID NO: 330250 - DNA, 3666 bp, Pseudomonas aeruginosa
gtgccgctccacctcatccgccagatgttgcgcgctccactgtccggcgtcgccgagcaggacccgggctcctgccagcaggggtacgaagagttgttcggcagcggcatcgaaactgatcgaggcgaactgcaattggcagtcgccagggccgacgccgtaggtgcgtgctgccgcctggcagtgcgcgacgagcgccgcctggctgaccgccactccttttggctggccggtcgagccggacgtatagatcacgtaggccagcgtctcgccagctacctccggcagcggccgcgtatctgcactcgccggccaggcggcggtctccagcggcagccgctcgacctctgccgggcagggcagccgctccgccagggtttcctggcagatcagccagcgcgcgccgctgtcgcgcaacatgtacgccaggcgctccgcggggtagttcggatccagcggcaggtagccggcaccgaccttgaggatgcccagcaggccgacgaccaggtcgaaggagcgctcggcagcgatcgccaccagcgcttccgcggccacgccgcgcgcccgcaggccacgcgccagacgctcggcgcgcatatccagttcggcatagctgagatactcgtcgccgcataccagcgcgatcgcctcaggcgccgacgctgcctgatgcgcgaaggccgccgcgacgccgccccgcggcagcgcctcgagcggtgcctgccaatcccgcagcgcctcctggcgttccccggcgtcgagcagggccagctcgcccagcgctgcctggggggtctcggccatccgctgcagcagatgcagcagatgacggtccagttcggcgatgtccgctgcgtcgaaatcgcgccgcgcatagacgtactgcaggctcaggcgctcacccagggtgacacccagcgtcagggggtagttggtctgctcgtggttgcttggcgtggagaactccagatcggcgggagcctggcgcagagcctcggccacggggaagttctcgaacaccaggatgctatcgaacagagcctcgccgccatgcccggcccagcgctggatgtcgtacagaggcgtatgctcgtgttcgcgcagcgccaggttgagcgcctgcatcccctgcaggtattccgcgacgctctgctgtggctgcggcgcggcgatcaccggcagggtattgataaacagaccgatctgcgcctcgatgcctggcagttccgccggccgtccggccacggtggcgccgaaggctaccgtctcctgcccgcagtgccgctgcaggagcagcgcccaggccgcctgcaccaaggtgttgagcgtgaccttctgaccttgggcgaaggacgccagttggcgggtcgtctgcggatccagttcgcgcagatgctcaccctggccaggctgctccgtcctcgcctggcgcgccaggcgtgtcggcatctccagggaggccagccgatcgcgccagaagaactcggttgccatcgcatcgcggctctgcaaccaaccgatgtagtcgcggtaacgcccaacgggagcggctacctcctgccccgcatagcgctgcagtacctcggcgagcagttgggcgttgctccagccatccatcaggatgtggtgataggtatagatgaggtgcatccgcccattcgccagcggcaccaacaccaagcgttgcaacggcgccctggccgggtcgaaaccggcttcgcgctcagcctctgcctgccgttgcggatcactgcctggcggggccagccgcagctccagcgtcgcctgctcgaataccacctgcaacggctgaggccagccgtccttccagaggaatccgctgcgcaggatctcatgggcatcgagggtggcctgccaggctgcgcggaagcgatccgggtccaatccgccgatatccatgcgcaactggttgacatagtcgccttccgttccatgaagactgtgaaacagcatgccctgctgcatcggcgacaacggatagatgtcccgcaccgaatcaggatccaaggacaattcatcgagctgcgtctgggaaagcccggccagcgggaagtccgacggcgtcacaccccgatgccgccggtcgagacaatgctcgatcagcgcgtgcagctcccgcgcgtagtcatcgaccaggcgctggacggtcgcctcggcgaacatttcccggctgaagctccagtgcaggctcagctcgccgccgtagacctggccttcgatgctcaaccagttggccagcggggcgcacggatcctgggcggcgccggcgctttccgtggccggtaccagcagcgccgctccatcgaactgacggtcgaaccggcccaggtaattgaaggtgatccgcggctgcggcagtgcggccaggcgggtcgcagcctcctctccagccaggtagcgcagcaggccgtagccgacacccttgtccggcacgccgcgcagttgctccttgatcgccttcagcgactcgccgaggtccgcggccggggtcaggcgcagcgggaacaggctggtgaaccagcccaccgtgcggctcaggtcgatggcctcgccgaggtcctcgcggccgtgcccttcgagctgcaccagcacgctggcgtcgccgctccagcggcaggtcgcgcgggccagggcggtcagcagcaggtcgttgacctgagtccggtaggccgccggggcttcctgcagcaactgccgggtacgctcggcgtccagggtcaggacgagcttgcgctcatggcggttttccagggcgccctgcgggttttcgcatggcagcgcatgcggagcgtcgtgcagttgcgcctgccagtagtcgagttcgtccaggcgcgcgccggcctgttcgtgcaggtgccggctccaggcctggtaggaactgctacgcggcccgagatcggcgtcgaggtcggcatagagacgctgcaggtcttccagcaggatacgccaggacaccccgtccaccgccaggtggtggatgaccagcagcaggcgctggctgccgtcggccatgtccaccagcagcgcacgcagcagcggcccctgttcgaggtcgaggctgcgctgggcttcttcgcaaagcgccagcaacgcctcctcggaccccgcctgccggcgccacagcggctcgccggcctgctcggcgtaggcctggtgccaggcgccgcgctcttcgcgaaaacgcaggcgcagggcatcgtgctgcgcctgcaggcgttccagggcacgccccagccggtcgccgtcgagcggctggcgcgcctgcaacaagagagactggttccagtgctggcggttgggaatcgcccgctcgaagaaccagcgctgtaccggcgccagcgccacctcgccgcttgccggcccctgttccgccgtcgccgcacccgccttggccgccagggccaggctgcggatgttctggtgctggaacaggtcgcgcgggctcagttgcaatccggcctggcgcgctcgactgaccacctggatcgagacgatcgagtcgccgccgaggctgaagaagttgtcgtccaggccgacccgctcgacgcccagcaggtcctgccagatttccgccagggttcgctccactgcgttgcgcggtgcgctgtagcctgcctgcgccacgcttacttcaggcgccggtag

SEQ ID NO: 330251 - DNA, 1884 bp, Pseudomonas aeruginosa
atgaacgccctgcccacatcgctgttgcagcgcctgctcgaacggccggcgccgttcgccttgctctaccgcccggaaagcaatggcccgggcctgctcgacgtgatccgcggcgaggcgctcgaactgcacggcctggccgacctgccgctggacgagcccggcccgggcctgccgcgccatgacctgctggcgctgattccctaccggcagatcgccgagcgcggcttcgaggcgctcgacgacggcacgccgctgctggcgctgaaggtcctggagcaggaactgctgccgctggagcaggccctggcgctgctgccgaaccaggcgctggaactgagcgaggaaggtttcgacctcgacgacgaggcctacgccgaagtggtcgggcgggtcatcgccgacgagatcggtcgcggcgaaggcgccaacttcgtgatcaagcggcgcttccaggcgcgcatcgacggctacgccacggccagcgcgctgagcttcttccgccagttgctgctgcgcgagaagggcgcctactggaccttcatcgtccacaccggcgaacgcaccctggtcggcgcctcgcccgagcgacacatcagcgtgcgcgacggcctggcggtgatgaacccgatcagcggcacctaccgctacccgccggccgggccgaacctggccgaggtcatggaattcctcgacaaccgcaaggaagccgacgagctgtacatggtggtggacgaggagctgaagatgatggcgcggatctgcgaggacggcggccgggtgctcggtccctacctcaaggagatggcgcacctggcgcacaccgagtacttcatcgagggccagaccagccgcgacgtgcgcgaggtgctgcgcgagacgctgttcgccccgaccgtcaccggcagcccgctggaaagcgcctgccgggtgatccgccgctacgagccgcagggtcgcggctactacagcggggtggcggcgctgatcggcggtgacggccagggcgggcgcacgctggactcggcgatcctgatccgcaccgccgagatcgagggcgacggccgcctgcgcatcggcgtcggctcgaccatcgtgcgtcactccgatcccctgggcgaggcggcggaaagccgggccaaggcttccgggctgatcgccgcgctgaagagccaggcgccgcagcgcctgggctcgcacccgcacgtggtggcggcgctggccagccgcaacgcgccgatcgccgacttctggctgcgcggcgccagcgagcgccagcagttgcaggccgacctgtccggacgcgaggtgctgatcgtcgatgccgaggacaccttcacctcgatgatcgccaagcagctcaagtcgctgggcctgacggtgaccgtgcgcggcttccaggagccgtactcgttcgacggctacgacctggtgatcatgggccccggcccgggcaaccccaccgagatcggccagccgaagatcggccacctgcacctggccatccgttcgctgctcagcgagcgccggccgttcctcgccgtgtgcctgagccaccaggtgctgagcctgtgcctgggcctggacctgcaacgccggcaggagcccaaccagggcgtgcagaaacagatcgacctgttcggcgccgccgagcgcgtcggcttctacaacaccttcgccgcgcgcgccctgcaggaccgcatcgagattcccgaggtcggcccgatcgagatcagccgcgaccgcgagaccggcgaggtccatgccctgcgcgggccgcgcttcgcctccatgcaattccaccccgaatcggtgctgacccgcgagggtccgcgcatcatcgccgacctgctgcgccacgcgctggtcgagcggcggccctga

SEQ ID NO: 330252 - DNA, 822 bp, Pseudomonas aeruginosa
atgagttttaacagccgcgaaagctcgcttgcggatgggcagccggtgcggctgtaccagttcagccgtggcgcgatccgctggagctacaacagcagcgaccgggacatcacctaccagaaccaggttttccgcaccgtgccgggcggcatcaccgacaacggaattatctgttccggcgatccgcagtccgaccagttcgtcatcaccgcgccggccgacctcgatgtcgcgctgctgtacaagacgcggtcgccgagcggtgcaatcgatctggtcgtctacgacatgcactacggcgacgcggaggcggcggtcagttgggtcggtcagattggcgacgtggactggccgacggtggacagttgccgaatcacgtgtgtgtcggaagatgagctgatggatcagcccggtctgatcgacacctattgccgtacctgcacggcggtcctgggtgatcaccgctgcaaggtgaacttggtcccgcatcgggtgacgctgacgccgcagagcgtgtcggactggatgatttccagcggcgtggtcgccggctacgccgacggctggttcacggctggctatgtcgagtggcaggtggacggtgacaactacgaccgccgacacatcgagcggcacgccggggcggacctctacattctgggcggtacccaaggcatcccggccggggcacaactgcgggtctatcccggctgcgacttcctcgctgaaacgtgcgatgcgaagttcgacaaccttctgaacttccggggcatcaacaagctgcaaggcaagtcgccgttcgatggcgaccaggtctggtga

SEQ ID NO: 330253 - DNA, 1509 bp, Pseudomonas aeruginosa
gtgatcagtatggaaatgatgggcaaaatccgccggatgtatttccgcgacaagctgtcgctgcatgagatagccaagcgcaccgggttggcgcgcaacacgattcgcaagtgggtcagagcacctgaggccaagccgccggtctaccaacgccgcgcgatcttcaacaaactcagcccttttcacaccacgctggagcaggcgctaaaggccgattcgctgcggcccaagcaacagcggcgcagtgccaaggcgctgttggcgcaaatcaaagccgaaggttatgacggtggctacagccagctcaccgcgtttatccgtgcctggcgagggggacagggcaaggcgtcgcaggcctttgtgccgctgacctttgctcttggcgaggcgtttcagtttgactggagcgaggaaggcttgctggtcggcggcatttaccggcgtatgcaggtggcacatctgaagctgtgtgccagccgtgcgttctggcttgtggcgtatccgagccagggccatgagatgttatttgacgcccatacacgctcgttcggcgccttgggcggcgtgccgcgccggggcatctacgacaacatgaagaccgccgtcgacaaggtcaataagggcaaaggccgggcggtgaatgcacgctttgcggtgatgtgcgcgcattacctgttcgatccggacttctgcaacgtcgccgctggttgggaaaagggcatcgttgaaaagaacgtgcaagacagccgcaggcgtatctggctagacgcccaggactgccagtttcactccttcgaggaactcaatgcctggctgggccagcgctgccgcgcgctttggaacgagctgacgcaccctcaatacagcgggctgagtgtagccgaagtgctggagttggagcgcgctgaactgatgcctgtgccagcgccattcgacggttacgtcgagcggcctgcgcgggtctccagcacctgcctggtcagcgtcgggcgcaaccgctactcggtgccatgtgagtacgcgggtaagtgggtcagcagccgtttgtatccgacgcgaatcgaggtggtggccgatgatgcgctgattgccagccatgtccgcttgctggatcgcgaccaggtcagctatgactggcagcactacctcccgctgatcgaacgcaagcccggtgccctgcgcaacggcgcgccctttgctgatctgccggcgccgctgcgtcagcttaagcacggtctggggcgtcatgccggcggtgaccggatcatggcgcaagtcctggctgccgtaccggtcgccggactcgatgccgtgctggtagccgttgagctggtactggagagcggcagcctgagcgccgaacacatcctcaatgtcgtggcacggctgacagcatccgaaccaccacccagcgtcgaaacccacttgtcgctcaaggaagccccggtcgctaacacggcgcgctacgaccgcctgcgtggccaggccgagggggtcggtcatgcgtga

SEQ ID NO: 330254 - DNA, 804 bp, Pseudomonas aeruginosa
atgcgtgatttgatggcggaactcaaggagctgcgcctgcacggcatggccacggcctgggcggagttaactgcacagggtgagtcgaacacagcctcgtccaagtggctgctcgaacacctgctggaacaagagcacacagatcgcgccatgcgctcggtgagccaccagatgaacatggccaagctgccgatgcaccgcgatctggccggcttcgacttcagcgcctccagcgccgacgctcgcttgatcagcgagctggccaacctgagctttaccgacaccgcgcagaacgtggtgctgatcggtggcccaggcaccggcaaaacccacctagccaccgcgctggccgtgtccggcatcacccggcacggtaagcgcgtgcgcttctactccacggtcgatctggtcaatctgctggagcgcgaaaaacacgacggcaaagccgggcggatcgcccaggcactgctgcgcatggatctggtcatcctcgacgaactgggttatctgccgttcagccaggctggcggtgcgttgctgtttcacctgctgtccaagctgtacgaacacaccagcgtggtgatcaccaccaacctgagcttcgccgaatggtcgagcgtgttcggcgacgccaagatgaccaccgccctgctggatcggctgacccaccactgccacatcgtcgaaaccggtaacgagtcctatcgcctgcaacacagtagcttggcggcccaggccaagatcaaatcacgggagcgaaagcgtaagggcggccaggaaccggaggacgatgagtcgttctga

SEQ ID NO: 330255 - DNA, 219 bp, Pseudomonas aeruginosa
atgatcgtgactgtacagcacctgcacaccgtgccgacttggactacccggcagggctactgccacggccaggcgcgggccttcttcaagcgccacggcctggattggctgtccttcttgcggaacggcatcgacgctgacctgctggtcgcaacaggtgatgcgctcgcgctgaaactcgttgaacacgcacgtcgggaggttgcccatgggcgctaa

SEQ ID NO: 330256 - DNA, 465 bp, Pseudomonas aeruginosa
gtgtgctgccatgccttcggcacgcacctgatcatctgcacctcctatttcgaaagcgcttcgttcctgttcgtcggctgcgcggcggcgccggagctgaccggctatgcctaccaggtgctggagcgacagctgcagaaggcgcgcaaggacttcctgagcacgcagaaacgctgcaagcggtccaccaaggtagcccgtggagatgccttcgcgcatggatggatcgaggccgtgtacgccaaggtcgaccagttcgcgggcgtcgacgacaacatcgcagacgcgattcaggcgtacatggcgaagcaccacgctgacgtcggcaagttcgagatgaagcgccgcaagctcaaggcacgtgacgaagtggccagtgaagcggggtatgccgcgggcaagcgcgcgcggctgcaccaggggatcgggcaccaggccgtggctcggcttactcagggggtgtga

SEQ ID NO: 330257 - DNA, 624 bp, Pseudomonas aeruginosa
atggctgaacaaacagtgcatgttcccgccgggtaccgcatggacgccaaggggcgcctggtacctgaaaaaatgatcaagcccatcgacctggagcgcgaccacctcgtgcaggagatcgtcgcgaaggggaaagccctgagcaaggcgttgcttgacttcaaactggctacattcggcgatatcgaagccttcattaccctgtcggccgagcagtaccaggcgaaggtaggtggcaagaagggcaacgtgtctttggtcagcttagacgggcgctacaaggtcattcgggccatggccgacaacatcgccttcgacgagcgcttgcaggcggctaaggcgctgatcgacgagtgcctccatgaatggacggaaggtgctcgcgcggaggtcatcacgctgatcaacgatgcgttccgcgttgaccaggcgggaaacatccgcaccggcagtgtgcttgccctgcgccgcctgcagatcgatgacgaacgttggcagcgtgcaatgcaggccatcggcgaggctgtccaggtcgtgagcaccaaggcgtacgtgcgtatccaggagcgggtcggggacaccgaccagtaccgctccattcctcttgatatcgcgggggtgtga

SEQ ID NO: 330258 - DNA, 456 bp, Pseudomonas aeruginosa
gtgaagaacacggacacggcgggcttgaagggctatgacgcaggcaagaaggtctcgggcatcaagcgccacatcgcggtggacacccagggattgccgcatgcgatagcggtgaccacggccgaggtgacggaccgcaaaggcgcactgcaggcgctacagcgctgcaagccccggttgagccggctacaaagcctgctgtgcgatgcaggctacatcggtcggccgttcgcgcaaggcgtgcagcagattctgggagggcatgtgacggtgcagatcgccaagagaagcgagcttcacactttcaaagtgatgcccaagcgctgggtcgtggaacgcagctttgcctggctggacaagaacaggaggctgtggaagaactgcgagcgatggctcaacaccagcctgcagttcgtccacttggcattcttggtgctcttgctcaaaagactttga

SEQ ID NO: 330259 - DNA, 519 bp, Pseudomonas aeruginosa
atggcaacccccgcctatatgtccatcaccggcaccaagcagggcctgatcaccgccggcgccttcaccgaggattcggtcggcaacacctaccaggaaggccacgaggaccaggtgatggtccagggcttcaaccacgaagtgatcatcccgcgcgacccgcagtccggccagccgaccggccagcgcgtgcacaagccggtggtcatcaccaaggtcttcgacaaggcctcgccgctgctgctggccgccctgacctccggcgagcgcctgaccaaggtcgagatccagtggtaccgcacctccgccgccggcacccaggagcactactacaccaccgtcctggaagacgcgatcatcgtcgacatcaaggactacatgcacaactgccaggacccgggcaacgcccacttcacccacctggaagacgtgcacttcacctaccgcaagatcacctggacccacgaagtctccggcacctccggctccgacgactggcgctcgccggtcgcagggtga

SEQ ID NO: 330260 - DNA, 159 bp, Pseudomonas aeruginosa
atgggcgccccgcagatcatctggatcgtgctggcctctgtggtcctggttacgtcctatgcgtgcgatggcctcaccaacgtgatcagcttcaagcagcgcgtgttcgacgtgatcgcgatgacggccctggtgtggtggggaggcttcttcggatga

SEQ ID NO: 330261 - DNA, 2127 bp, Pseudomonas aeruginosa
atgagccgccgcacggactccgacgcaccgaccatcaccgccgcctatccgcgcctgctgctcggcctgctggaggaacgcggcctggacggacgcgcgctgctgcgggaaatcggtctgtcgacgctgcgactggaagagccggaagcacgcgtcacatcgcagcagtaccaggcgatcgccgccgcggcgctcgcgctgagcggcgaccccggcctcggcgcacagctcgccttgcgcacgcctcccaccgcccatggcagcctgggctacgcgatgatggcctcggcgacgctcggcgatgccttgtgcctggcgctgcgctacatgccgctgctgcagggcaacgtcgaaatcagcctgctgcgcgaggacgagcaggtgatcctgcgcatgctgccaggccccgcgctcccgccggcactgcaccggtacttcagcgaagccctgctgatcggcctgtatcgctccggcgcctggctgctcggcgaaccggccctggtcggcaggctcgacttcgactatcccgaacctgccgtgcctgtgccgctgccgcagtgccgctacgaccaggcccacgtccagctggtgttccccgccatcctgctcgcccgctcgctaccgatggccgatccggctgcgttgcgccgcgcccgcgaacactgcgagcgcgaactggcgctgctcgatgccggccgccgggacatctgcgcccgcgtgcggctggagctggaacgccaggaacagcgcttccccaacctggaggaagtagccgcgcgcctgcacctgtccagccgcagcctcaagcggcatctgcatgacgccggcaccagctttcgccagttgctcggtcaggctcgccagcgccaggccttgcgattgctgcggcgtcccgaggtgtcgttgcagcgtatcgccctgtacctgggttacagcgatccaaccaacttcacccgcgccttcaagcgctggaccggcgagccgccgagcgacacccgcgcccgcctgctgggcggcaaccagtttcacgaacaaatgccaagcgctcgacaaatccctcgcgtttcccttgagcgcggcaagcgctgttctatgctgctgcggccggcatccggccggcctcgacagcgatatgaaagggactttatgaaaccagcgatcaagcgcgcctgcctgctcggcacggcactgttctccctctgcgccagcgcagcccaggcggccggcgttctggtaggaacctgggacctgcggggcaacggccagctcgccgcggtctaccgcgacggcgccaacctgcaggtggtggaaggcggcagcacccgcaactacagcttcggcaacgtggtctggtcggtcttcggcgccaccgataccgacggccagcccggcgcggaaatcctggtcaaggccggtcccgacctggtgatcgtttcccacgccagcaccacccagcgcaagtacccggtaggcaacgtctcctgggcgatcatgcgcgccaccgacgtcgacaacgtcgccggcgacgaagtcatcctcagcatcggcaacggcgtgcgcaccgtattcgatcgcacccgtacgcaacgcgacgccaccttcagctacaacggcacctggggcctgttcgacgtcgccgacgtggacggcgcgccgggcaaggaactggtgctgaacatgggcaacggcgtcaaggtcatcgacccgcgcaccagtggcgccaaggacttcaccttcagcggctaccacgcgctcgcacagatcgccgacctcgacggccagcccggcgcggagatcatcggccgcaccagcaccggcatctacgtgatcagcaacgccagttcccgcaaggaatacaacatcggcgccagcgcctgggcactctatggcggcaccgcggacaccgacggcaagccgggcaacgagctgatcgtggtgatgcagggcaaggtgcgggtcatccaccacgccagcggcgccagcagcgactaccgcatcggcgacgtcaactacagcatcgattcggtggccgacatggatggccagccgggcgcggaaatcctcgtgcgcgacgccaacggcaagctgttcgtgatcaacgaccgcaccggcaaggtaagcagttga

SEQ ID NO: 330262 - DNA, 1209 bp, Pseudomonas aeruginosa
gtgagttggccaatagttaagctgggggaaattttcgatatcacatctagtaagcgggtccatgaaattgattggcgcaatgaaggtgtgccattttaccgcgcaagagaggttgctgttcttgcaaaggaaggtcgggttgataatgacttgttcattgatgagtcaatgtacgaagaatttaaagccaagtatggcgtccctaaggttggggacctgctagttactgctgttggaaccctggggaaggtatatgcagtccaggagtctgatcgattttattttaaagatgcgagtgttatttggttaagggcgaggcaggaggttgacacttcttacatccaacacgccatgaatagcactgatgtacagaggtttatacagaactctagcggtgcaacagttggcacatatacgattagccgggccaacgagaccgaaatccccctcccacccctgccagaacaaaagcgcatcgctgccatcctcgacaaggccgacgccatccgccgcaaacgccagcaagccatccagctcgccgacgacttcctccgcgccgtgtttctggacatgttcggcgatccggtgaccaatccgaaggggtggagcgtgaaaccgctctctgccggcataaggtcaatctcttcgggatggagcgcgactggtgaaaaccgtccttgcggcgctggggagaaaggtgttctcaagattagtgcagttacaagtggcgttttcaagccagaagaaaacaaagtcgtctcccttgatcagatacctgacgggaaaaagcttttaattcctaaaaaaggggatcttttgtttagtcgggcgaatacaagggagttagtggctgcaagttgtattgtcagtgctgatgtcgaagatgtttttttgccagataaattgtggttggtagaaactgatcaggggaagattctgccggagtttctgaattatctactttggcagccaagattcaaagaaaagctgacgtcccaggctacagggacaagtggctcaatgttgaatatttcaaaattgaaatttgaagaaacagatgcgattttccccggcatagcgcttcaagagcagttcaagcgcatctattgggctcttcaggggactatcgacgcatctactacctcaagggagaaggtagacaatttgtttcactcgctaagccaaaaagccttctccggtcagctgtag

SEQ ID NO: 330263 - DNA, 1830 bp, Pseudomonas aeruginosa
atgcgcctcaagtctgtcagactcacccatttccgcggctaccgtgccaccacggtcattcctatcgacgatgccatgaccggtatcgtcggccgcaatgactatggcaaatcgaccatcctcgaagccctcgccatcttcttcgagagtggagacgtcaaggccgacaagagtgatatgaactgcttcagcctggccgagggcgccgagcagttcgagattgcctgtgagtttgacgacctgcctgaagcgctggtgctggatgagaatgccgagacgtccttggcgcaggaatacctgctcaacgccgagggcgcgctggagattgtcaaaaccttcaaggccaacaccggcaagctggagcgcaccgccatccgctgtgagcaccctgcggatgaagcgctggctgggctgctgagcctgaaaatggccgaactgaaaaagctcggtgagcagcatggcgttgctgagcaagtggcagacaaacgtgtggcttcacagtggcggcaggctatccgtgcggcagcacagcccatcgcctgccaggagatgctgctcgacatcagcaaaggcctttcgacggacagcaaatccatctgggaaaaaatcgaggcccagctgcccaccttcgccctgttcaaggcggatcgtgaaagcagtgatggcgacgcagaggccaagaacccgctgcagcaggcggtcaaggaagctcaggctgcacttcatgatcagataagcgcgctggagcagcagatcgaagccagtgtgctggatgtcgccacccgcactctcgacaagctgcgggaaatggcgcccgagctggccaatgagctgaccccgcgcttcaaggaaaagcccaagtggagtttcagcttcaccctggacggcgagaacggtattcccatcaacaagcgcggcagcggcgtacgccgcctgatcctactcaacttcttccgcgccgaggcggagaaggccgtggtgggcacccagcgcaatgtcatctacgccatcgaggagccggaaacctcccagcaccccaactaccagatgatgctgatgaaggcgctgctggaactctccaaccagcccaaccgacagatcatcgtcaccacccacgttcctgccctggccggccttatgcccatcgacggcatccgctacgtcaccaaggatgagaacggcatccctatcgtcaagatgcccaatgacgatgtgctaaaggaggccgcggagagtctgggtgtactccccgaaacagggatggagcgggcgaagggcgtcgtgctggtggaaggtaagtcagacgtcaccttcctccgccatgcggctaacacgctaaaggctggcggacatcttcagtccagtcttgaggatgccggcatcgttccgattctgattggcggctgtggcagcgtgaagcactgggtcaccctgaatcttgccgatgacctcgggctaccctggtgtgtgttcctggactccgacatcggcggcagccaggagcaggtcgcttctatcgcaaagcgaaaacaggaagtcgaagcccgcgggcgccccttctattcgacgcgcaaacgggaaatcgagaactacctgtgccctgacatgattgatgctcaaaccggggtcagagtgacattcaccgacacctgcgacgctaagaaaatcatcggccaggcggtgcgtgtcaaagcggatgatgtgatcgacaggttctggccgttgatgactgctgagcagatccttcagagctcgatgtatcaggagggcggtgagcaacgctcagagctgaaagagctaatcgagaacctgctggcgttggctgcctga

SEQ ID NO: 330264 - DNA, 333 bp, Pseudomonas aeruginosa
atggaaggcaacaatcatctctacaagctttcaaccaccccctccgggcaacgcctatggacttacatggcggccattctcgaagtcacggaaatggatcagggaaagccattcccgctgaagcggttcctggggaattttcagactcacttggacgcaggttggatcgaacgcgtgcccgaggggtacagattgacccgtcgtgggcaagactattttcaagaccgctaccgtgccggaaatccccagtatatagagcgacctgcggttgagcggatgatcaggtcaatcagttcagggagcggagagggggattgggttccgctgtcctga

SEQ ID NO: 330265 - DNA, 3336 bp, Pseudomonas aeruginosa
atgtcgtactccgtaattaagtactcgtcctggctgggacgctttctccagcgtcgtgggctttcagcgcctgatcagcgcggactctatgcgtaccactgcagtctcgaagagtacggagagctgcagcatttgctccgtgagtttgggggctttgatgcggcgttaaaggacccggcagcctgtgcttgtttggtactttttggttcggagtggtatcgccgtgagtaccgcagtgagtatgcctggacctgggacccgatctggaaaactctgggatttaatctgtcgccgggagagctaagcaaggtcatccctaaagggttggaggggtattggaaacgtccccttcatttctacgaagcgggtcatcgggattttctagggtcgctgtttggtgaggggggcttgccctttcaggtattgcgcgagggaggcagccgcttccagtggctgtttgaccgcttgctaaggcagtacgaccagtggcacctgctgggcttcaacaccctacagcaggtggagcagcaactggaaaaggccagtcttcctcaggtgtttgcctcacgtacgtcgatcgaactgattgcgcgtatggtcgatgagcttgtggctctggtccggaattatgggctggcgcaggcggatgagcccgtcgtccgcctggatgctctgaaccccaagtggcgtgaattgttccctctgcctctggataacgagactggcagcgaactcctcaatggtcttttaaagactgcgaccattgagggcaaaaagcgacgccgggatgcgactggatggtcttgtcgacacttttggcatgaggcgcagccggatgtgctcaaggttcaggtctcgatgccggaggaggtggtgcttcgtctgacgacgcagccatctaccacccgttttgagctggccattgtcgaagatggacaggcgattgctgcgcttggacccggctacgcgctggtcgacaacggtgttgcccatatccggctgcgccttcgtgaggtgatcggaaagcggcaggattgcagtgcccaactgagcctggtggctatggcaggtggcatgctgatcgccacccagccgatagagggcagtgcagtggcccttggcgaagtaccgttgggtttcgagccagtgaatgatcgctggcagctgtgcggtcaggcttcattcaatacggctggtgaagagctgctgctggtgctgcccgaaggtgggaagttgaacatggctgcagagggcgaggaagccatcttcagcgatatggcaccggctttttcgctgcatacggtaaaggttcagggcaaggcgcagttccaggttgagagtgatgaactctaccggatacgcacgggacatgcggttggtatgggcttggggctggaactggctggtacccagatcgactggccgaccaagcccgctctgacctttgtcggtctgcctcgtgtgcagtggccgaccgctgctggggaactgcaacagcagggcggtgacctgtacgttgccggcaaacagccgggaagcggcttgttgcaggaggtactcggtacccaatatgtgtcggtgcgcaaccgcagtggcaacgccctgttacgtcgcagggtgggtatcttgccgacggatttccgtgttgagctgcgcagtggtgagaagccggggcaggggagcattttggtgcattcccggcagcgctgcctgctccagattgttgacgacagtctgcaggtacagcaggtaaagcgtgaggatcacaccgagcttaggctctcggcaaagggctttcctccagtcagggtccgcctttcagttacccccagcttgatggctgacccagtggagattgacctgccgtttcccaactcgggttttctggcctttgatggcacaggcaaacatctgaaacgcgatctcagtgtcgacgacctgttgggggcgcgtctgtatctgtttggccgggctggcgcaccaacccgttttagccttgagctgaccctcaggggtagtgcggccaggaatgcttgttacagctggacctacacggtggccgaaaagccgctggagctcagtctgttcaatatccgtgaacagattgttgacctgctttcgcttcagtcgggcattgatcaggtcgtcgagttgcgggtgttcggtaacggtcaggataccagttaccgcatccgtaggtattcgacggagatgcaactggatcgcgaccgtcagatgctgtgtgctgccaatctgcacgatggcgccgacgccattcccgaaccggtgttgatgctgttgcatgatcctatgcgtagctccatcgcgctccgttcccgcaccagcgaaggtgtgcccaccggcgacttcgagttaccgatagctgttgaaagggatggtccctggctggtgttgcccaaatcgggctcatctgtatcgttccggccgctatttatcgctggtggatggaagccgttggcgccgagcgatggaatccagagtctgcaaaaggcagtgttgaccttcgatcatgcttcacctgttagctccttcacgcctgtgttggatgccatggcggttaaccctatgcatagcggctggcagttcttgcgggccttgtatgaagggtacggctatctgcccctggcgaccttcgaggtctggaaggctctggtagggcacacccgcgcgttggcgatggcacttttcaagtttgaaatggaggcgacattccttggccggctggagactgagtttccgattttctgggagtttcttcccattacagaaatccatcttgcggccaagcgcttcgctgcattccttaaggtgaaagggggcgctgaggaagccattgatgctctgatcggacgaatgttttcgcgattgggggaaacctattcagcctacgggcagagtgtgcagcgcttcctttctggcaagcctgttggcccagagatcaaggtgccgctagcgactttcaagagtgtcctgcatggctggtaccttgagttgattcgcgagcgcagtgaggcaaagtggccggagttcggcggcaagcggctggagcgttggcacagcagccaaggctgctcggtgattgccttcaggtcggaaatggattaccgcaatgcggtgctctatctaccggtattcgccgctgcggtcgcctgtggcaaggctcggttcacagatgcgtttgcggatggcgtcgaggcgattttcttcttgcgccaggtccgcgatttcgattcgaagtggttcaactcgatctatcaatattgcttgttgaacagcgtcatggatatgcagaaggcagagtcggttaatggataa

SEQ ID NO: 330266 - DNA, 6336 bp, Pseudomonas aeruginosa
atggataagtatttctctgggctagtcgagcaggcgctttcccgtgccactgagtccaccttgagtatcttgagcattaccgatccggacttgcgtgagcacctggaaagtctgatgcgcgcggagtgcgggaaagagggtgcattcctggcgccacccgtgtttgagcagaccttcagctgggaagagtcggcgttcaccatggagcaactggcgagcaaggagcacttgctgagcaaggagatcgtggcctcgctcgatggcaaggcgaatgggcgttaccgctttggcgcgagttggaaacccttcacccaccagttggccagctggcgctcattgctagagaagaagcattcggtggtcgtcaccagtggtaccggctcgggtaagaccgaatgctttatggtgccggtgctggaggatctttatcgcgagtaccgtgacgcagctcgtcagccgctggtcggggttcgggcgctgttcctgtatccacttaacgccctgatcaactcgcagcgcgaacgtttgaatgcctggactcagagctttggaagcggcattcgctattgcctgtacaacggcaatacaccggagttgcaggcgaatgtgcgcagcgagcagagcctaaagcctaacgaaattctgtcgcgcgagctgatgcgtacgcaaccggcgcctattctggtcaccaacggcaccatgctcgaatacataatggtgcgccaggtcgatgcgcccatcgtaagaatctccagagagcagaaatcgctgcgctggattgttctggacgaggctcacacttacgtgggttcccaggcggctgaattggcattgcagctgcgacgggtgatgacagccttcggcgttacgcctaaggatgtccgctttgtggcgacctctgcgactattgccggtgaggacgctgcaggacagttgaagcagtttctctcggatctgtcgggggggccggttacgcagattgatgtctgggggggtaaccgggtcattcctcctcttgccccctgtcaacaaacgctggttgctctggatacgctcgagtccatgccgcctgtaattgcggacgatccagaggttcatccggatcgatacgaggccctggtccattctccgcaagcccgagcactgagaaatctgctggtgaccacccccaagccgttgaagctaaccgagatggtcagccagatgcgtcaggaaggtgggtggtcactgtcacaggacgaaatactacgttggttggatgtgtgttcaggcactcgtctttcagccagtgagccggcgtttctgaagctgcgggcgcacttcttccagcgcacaactcacgggttatgggcctgctttgacaagtgctgctcagcaaagtccggaacggcgctgcaacaaaactggccctttggttatgtctacgccaatcagaggcaaacctgcagctgtggcagcccggtattcgagttggcgttctgcaatgactgcaatgagccgcatctgttggcgcgggataagaacggaaagctgatccagtgggaaagctctggtggcgatgaattttccctgcagactgaaacacctgttgaggaagatgcgggggctggtggctcaggggtactttcagtcaagacaccgctggtgctttgctcgttcgaaaatgccggcagcgcatacatccccgttgaggtcgataagttcgctggttcattcgcagctgtttcagctgaacgggtacggtttggggttagagatcttgatgccaagtgcagccacaacagctgtggatttagtgggctgcacggagcttctcctttccgccgcgcaatgctgggcggacccttctatgtagccaatgccgtgccgacagtccttgaatactgtcaagactatcaagaggaagatcagacgccggagcacggtccgcagtctctgcctggcagaggccgtcggctaattacctttacggacagccgccagggcacggcgcgcatggctgtacgtatgcaacaggaggcggagcgcagcaggttgcgcggacttgtcgtggagattttgagctggcaccagcggagccaggccagctctcaggtagattccagccgcatcgatccgtcggttttgcaacaattaatcgccaaggcgaaagaggaagtagagctataccgcagcgttggtatcaaggaggaagtcagggccgcggaggaaaaagttacacggtttacagccatgctagcttcagcaactggagcgaaagttaggccgacgctagtttctctagcttggtcggagctctccaatgagctcaagcagaaggcagacctgaaaggctcgatgctgctttacaacaagtatcagaagcccgagatcttccgggaccatgatggcccctacaagctggcggaaatgttgctgttccgcgagtttatgcgccgcccgaaacggcagaacagtctggaaacccaagggctggtgaaggtcgcatacgttggcatggataaggtccaagaagtgccggcgtactgggggcagaaaggtctgacgctcgatgattggcgtgacttcctaaaggtggcgctggactttcatgttcgggagaacagctatattcaggtcgatgagggctggttgagttggatcggtagccgtttttctgccaagagtctgcgtaatcccgagtcgaaagaagcggatgagatccgggtcaagcgctggcctcagatccgcaatggcaaccattcccagcgcctgatcaaactattgttgcttggcgctggtttgaacccggctaacacggccgacgttgatctggtcaatgcttggctaagagctgcctggttgcagttggccagaccgggctcagcgctgaaggctgacgaaaaccggtactacctacccagagagcacatgctgttctcgttggttgaccgggcctatgtctgtccagttaccaacaagctgttggataccaccttcaaaggctttacgccttacctacccgctcacctggatttctctcagttgactgaagagcagcgcgagagctatcaggcagagccgattgagctacctgacctgtgggagtttgaccgttctcaggacgactatgcgccgggacttgcgcgagttagaaacctggtggcgaatgatcctcttgtaagcgatctacgagcacggaacctgtggacggatatcaatgatcgggtagtggaaggtggcttctattaccgcacagcggagcactcggcccagcagtcttctgaacgcctcggctcctatgaagagatgttcaagaaggggcagctcaacgttctgaactgctccaccaccatggagatgggcgtagatattggcggtatttctgctgtggtcatgaacaatgtaccaccgcacccggccaactacctgcagcgtgccggtcgcgcggggcgaagcaaggaatccagggcgattacctacacgctttgtaagaacaacccgcatgatcagcaggttttcgccaatccgagttggccgttcgagaccaggatccccgcgccagtggtggcattgaactccgagcgactcgtacaacggcacatcaactcgctactgttggcggactttctctgcaatgtggttgggctcactcagactgagaaaaccagtctgaatacgcagtggttctacgacgatgagcacggtctctcacaatgtgaccgattcattgagcggctgggacaagttgtctccgatctggacgacgcgctcaaagacttggtgaaaggcacagctctggtcggtgtggacccggctcagctgcgccgtcgttcaatcgattcgatcaagccgctgcagagtcgttggctgaagagctatcgcttcttactttctgaggagaagcacgcgaaagccaacagcccctatctgaagcgtctccagattgaaaaggctcgccactgcaatgagtatctgttgcgggatcttgctgcgcgtaccttcctgcctggttatggcttccctaccgacgtggtgaacttcgataacttcacgattgaggattacatccgcgagcaggacgcagggaaaaagttgaagcacgatcgcgaggacaacgtatcccgctacaaggggctgccgtcacgcaatctgtcgattgccattcgcgagtacgctcctggtgcagaaatcgttctggatggccgggtgttcaggtctgccggcgtttccctccactggcataacctcaatgctgatagcaaagaagcgcagaaaatggacattgcgtggcgttgcgatgtctgtggcgctctggactatgaggaggggttgataaagaccgatgagctgacttgcagcaatgtcgactgccagtcactgatcaagccccaaaacattcgcaaggtcctgcagccctctggttttgtcaccgatgcttatgagtcggcctccaatgacatccagcatcagaaattcatcccagttgaaaccgcctgggttttcgtcaacgccaacaagactccattgccaaacccggcggttggggcaatggcttatggtgcggatggaaaggtcttccatcacagctcgggcgagcacggaacaggttatgccttgtgcatgagttgtggtcgagctgagtccatgcaaccggatagcgggttcccgcgagacctgtcgccgtctggcgagcactatccgccacgcccgaccaaagaggacaaagatcagaacaacaagcgccttccctgccagggcagcgggagcattcttcctagtgtgagccttggcgctgtagctactactgatgtgtttgaactcaccttgcaccatcccgtgcgcggggagttcattgcagactcagcgcaggaaagtgcaattgccatgacgctagcagtggctttgcgggctgcgctggccgagatactgggcgtatctgcttccgaattgggttatgcaactcggccaagcaaactgccaagtggacagtccattcgcgtccttcagcttttcgacgtaatcagcggtggtgcgggctttgccactagcgcgccgctgcatgtcgaggagctgctgcgggggatggtgaagaagctcgattgcaagcattgtgaaactggctgtagtgagtgcctgctggactcccaaacacggcatgatcacgacaagctggatcgcaaggcagcgctcgactggctgggcccagacttcattcatcacgtgggtttgaccgccgaaaacaaactctcattcgccgatggccagtatgcgcctggcagcattgagagcgttctgcgccggctgatcaacgagggtgcaaagagaattactctagtggcctctggtgatgtggcagagtgggatcttcttgctccacagtttcgtaaggcgattcaggcctatgttctggccgacgagctgactgttgagctgctcgtcccggcagatatcactgatggggttcttgtgcaggatctccagcgcctgtcggaccttggagtaaacgtcgggaatgcgatcactgagccaggtgagcatctcgttgcccaggtgtttaaagagagcgaagttgtcacgctggcctcgcgcagcctcgtggcaactgttccaggccgtagctggcatcaaagtgatgagctagtcgtactctcgaagagtcagccggagtttggctggcaggtgatggacctttccagtgcagcgagcgactccttcggcaaggtagcgatcgtcgacatatcaatccacgaggaactcaatgggtcgctgctgcaattcggtgagcgtttctgggagctgcttggcgctcgagatcagcaagttgctgacgtgattgcgactgcgaagatcaacaggctgacctactcagatcgttacattcagaaccccgcggtagttacgatcctgggtgcggttctgaaagatctgaagagccgcatttctgcggatgcggttgtgcaggtgaagacgctattcaaatcaggtcggctgcaaggtcgtaaagccttcgacgactgggccaatcaggacgatttcgagttcttttcacgcaattggctgtcggcaatggttgggcatcaagttgaactgattgtggagtcgtcgaatcgcgaaatccctcatcaccgtaggttggagcttgagtttgaagacggcaggacgctgaaggtccggttcgaccaaggagtggcctattggcaggttcgctttagctcgcatagcgacatgtggtttgactttgatctggctgcccaggatcaactcatgcacatggccaggatagttgaaaccgcacggatacaaaactctgagcagaagtgggcgacggacgtgttggtcgagctaaagagctaa

SEQ ID NO: 330267 - DNA, 3393 bp, Pseudomonas aeruginosa
atggaacttaaagactttcccatgctgtccgaggatgttctggctctctctacggatgagcgtatcgacggtttcctggccggccaggcgatcttcctccagagctatcaggatgagtggctggcggttcagggcgactcacgtgtcagggtcaactgcgctccggctgaccatggtctatttagccgtctggtaatgcgcgatcagagccgctggctactgaccagcaaacagggcagcaagctgctggtgcagtactgcgcaccagtcgaagtgtccgccatgcagcttgaactggggatagacgagctgatcgcagatgatctctacggcaagcaggaaatcgccgataagagcatcgaccttgcttgccgatggttcgcggagcagtttctggtgcgtgggctggccgagggggactggctcaccgtcgcgcgctttagcaacagcgcctccaaaggaggcttccaactgctgggcaagggttggcgcgccgatgtggagcaacggcaggaccgtggattgctgatcaaacgccttacccgccactctcgccgtgatggtgcattctcattgctgatcggccagtttgcgttttgtgatgcctccgttgccgctgttctcaatagcgccagtcagcaggcgttgctggatgccgcgctgcgcgacagtgccagttatttggagttgtggaatctctacaacgacaaggaatggcagagtgcattgcggcaggccgagaccctgcgctcactgcgtttcgtgcaatgtgatggaggggaagatggacgtgaaaacgtctggcgtctgactccgaaatcgcaggacgactaccgggagtttcgtcagcgatggcgcgatctcgaattgccaagcgacacccagttcgacctgggtactgagcggcccgactgggctgaagagctgaccaccgacgaggcgaaggcagccgcgagcacgccgcgcggcaccgtacgctttgagcctgactgtgttgtcttcaagactgcctcaaaccggcgcgatgttcgcccgaaacaggctgagggctggctctacctctcactggcaggccagcgttccgtaggcaagaggcgccttgcggccaaacaatccattgactcgggcaagcggctgtcgcagttgaagtggcttctggagggcgttgcggtgccggcggcccggcgccggcccatcaaagggcttacgccctatgcgcaggaaaccttcaaggggggcaagccaacagagaagcaggccctggccctggatgctgcactcaatacaccagacctagccatcatcattggcccacccggtacgggcaaaacgcaggtaatcgcggcattgcagcgtcgtctggctgaggaggcagaagagcggaacattgccgcgcaggtcctgatcagcagctttcagcacgatgccgtagacaacgctctggatcgcagcgatgtgttcggcttacctggcgcgcgcgtgggcggtaagcgcagcgcgagcgatgaggcgtcgctgatcgatccctggcttgagcggcatgtggcccatttgcaggaaaaaattaccacggagtacagcaagtacccggaactggagcgcatcagggatctgtcgaccagattggcgctggctcgagttgtcggcgcatcgccagctcaacaagtggaagtgttcgaccgcattctggacggactgcgaggcctggagcaaagcggtctggtattgccgcccaggctggaaagtcagcttgaggaccatatcgagcaactaaaaaagcaggcgccaagttccgccgagagccggccggatgtagaagccttgagacgcattcgagcgttacgtgtcgagacctcctcattcgctgacgatggccccgatcgagcctgggatttgctcagctggttgaagcgtcgtggccaaggttgcagcgccgagttgctggcattgctgcaagacgctgcggatagctcgcacccggcggaatcgaccctgcatgcgcttgcggagtgccagggtcgcctactcgaacagtatttgcccgattaccgacctacggaattgaggcgtcaggcggaccctgaggggcaggctctgcttgatgaagtcgacaggcatctggagagcaaactgcgccagcgcaagcagggcgtagcctgggtgctggagcagctcgtcgacagcctggcgatggaccgcaatgctgctcaggctgtggttaacgagtactccatggtggtgggggcaacctgtcagcaagctgcaggccggcagatggcgagtctgaagtcagtggctggtctggatagctccgatattgagttcgacaccgtggtgatcgatgaggccgcccgcgccaaccctctggatctgtttgtgccgatgtccatggccaagcggcgcatcgtcctggtgggcgatgaccggcagttgccgcacatgctcgagcctgacattgaagggcaactacaggaggagcacgagctgaccgagctgcaactggcggcttttcgctccagcctgttcgagcgcatgcgcgtgaagctgcaagacctggagaaacaggacacgattcgccgggtcgtgatgctggatacccagttccgcatgcatcccatattgggggatttcgtcagcaaacagttctacgaggctgttggtctaggggcggtacgctccggcagggctgcggaagattttgtcttctcccaggatttgctggctgctctaggggagcgtgagccgtactaccgaggccgggtatgccaatggatcgacgtacctgttgcccagggcaaggatcagcgccgcgggacgagccgagtcagggatattgaggctcagcgcattgctgaagaggtggtaaggctgatgcatgccggaggtggcagcctctcgattggcatcatcaccttctatgcggcgcaacgtgatctgatcatggagaagctcgctcagcagcggatagagggtgttgcgttgatggagcgccgcaacggcgcctatgagccgcacgagcatttcaaatgggccaaaaaggtgcgaggcgatggctcagtcagcctcgaagagcgactgcgtgtgggctcagtcgacgcctttcaaggcaaggagtttgatgtcgtcttgctgtcctgcgtacgtacctaccagcaggcaaggcctgggcaagcctgcgacgatgcagccgacgatcgtgagaagcaattgaatcgccagtttggcttcctgcgtttgccgaaccgaatgaacgtggctatgagccgtcaacggcaaatgctgatttgcgtgggtgacgcggcactggcaaccagtcccgaggcggaagaggtggtgccggcattggcggccttctaccagatgtgtggaggtgagcatggcagccttcgttga

SEQ ID NO: 330268 - DNA, 1314 bp, Pseudomonas aeruginosa
atgaaagtattgaaaggtcaggacatcctggcgcttggcttcatgacgttcgccttgttcgtcggagccggcaatatcatttttccacccttcgtaggcctccaggcgggtccccatgtctggatcgccgccctgggcttcctggtcacggccgtcggcctgccggtgatcaccgtgatcgcactggccaaggtcggcggcgcgatggatactctgagccatcccatcgggcgcttcgccggcggcctgctggcggcggtgtgctacctggcggtggggccgctgttcgccaccccgcgaaccgccacggtttccttcgaggtcggcctggcgccgctcaccggtaacggcccgctgccgctgttcctctacagcctggtgtacttcctggtggtgatggctatctcgctctatccgggcaagctgctggataccgtcggtcgtttcctggcgccgctgaagatcatcgccctggcggtgctcggcatcgccgccttcgccctgccggccggcactatcggcaaggccgaggaggcctaccgggtggcggcgttctcccagggtttcgtcaatggctacctgaccatggacacccttggcgccttggtgttcggcatcgtcatcgtcaatgccatccgttctcgcggcgtgcagaacccgcaactgatcacccgctacgcggtgatcgccggcctgatcgccggtctcggcctggcgctggtgtatatcagcctgttccgtctcggttcgggcagccacgacatcgccgccggtgccggcaatggcgccgctgtgctgcatgcctacgtccagcataccttcggctcgctgggcagcgtgttccttgcggcgctgatttccctggcctgcctggtcaccgcagtgggcctgacctgcgcatgtgccgagtatttctgccgggtgctgccgttgtcctaccggaccctggtgctgctgctggccggtttttcgctactggtgtcgaaccttggcctgaccaagctgattcaggtctcgatcccggtactcaccgcgatctatccaccgtgcatcgtactcgttgccctgagcttcttcgccagcctgtggcgttcgcagacccgcatcgtcgctccggtgatggccgtttcgctgctgttcggcctgatcgatggcctgaaggctgccagcctcgaccactggctgccgaactggttgacccacttgccgctggccgagcagggcctggcgtggctgatcccttcggtggccaccctggcgttggttgcggtaatcgacagactgctgggcaagcccagcgaagcggtcgcctga

SEQ ID NO: 330269 - DNA, 894 bp, Pseudomonas aeruginosa
atgaccgccgatcccatcctgaccctgttcctccccatcgccctgggcatcatcatgctcggtctcggactgtccctgaccccggccgacttcctccgcgtggtgcgctacccgaagccggtgctggtcggcctggtgtgccagatcgtcctgctgcccctggcctgtttcctgatcgtccagggcttcgccctggaggcggccctggcggtcggcatgatgttgctggcggcctcgcccggcggcaccaccgccaacctctacagccacctggcgcatggcgacgtggcactgaacatcaccctgaccgcggtgaactcggtgatcgccatcctcaccatgccgctgatcgtcaatctgtcgctgcaatacttcatgggcgacgggcaggcgattcccttgcagttcggcaaggtcgtgcaggtcttcgtcatcgtcctcggcccggtggccatcggcatgctggtgcgcaaccgcctgccggccgtggcggatcgcctgcagaagccggtgaagatcctttccgcgctgctgttgctggtgatcatcctgctggcgctagccaaggactggcagaccttcgtcacctacgcgccggtggtcgggctggccgcgctggccttcaacctgctgagcctggcggtgggctactgggtgccgcgcctgctgcgcctgccgaaggcccaggcggtggccatcggcatggagatcggcatccacaacggcaccctggcgatcgccctggcgctgagtccgagcctgctgaacaacagcaccatggcgattccgccggcgatctacggagtgctgatgttcttcaccgcggcggccttcggctggtgggtcagccgtggccaccaggccacgccggcgcccgtgacggcgccggactga

SEQ ID NO: 330270 - DNA, 420 bp, Pseudomonas aeruginosa
ttggactatatccttgtcgcctacgccttccgggaagagcttgagaagcagaagggcttggatcaactcccggaccacttgaagaaatttccatgtggctgctgcggcgtggtgtctgaactgctcggtgactatttcaatacgcagcttgggttgcgggttgagtatgtttgcggcgaaaaggacggtggctctcatgcctggattgagttagatggcgtcgtcattgacatcaccagcgaccaattcgaaggacgcccgccggtgttcatcgctgcaaaagatagctggtacacctcttgggaagaggcatcgcggaattttgcaatccaccatccaagtgcctggacatatcgcgaagagcgcgaagtgcttcgaaaggtgctcagtagtgccgggcttcccgatccagacgtataa

SEQ ID NO: 330271 - DNA, 4959 bp, Pseudomonas aeruginosa
atgcaaatcatcgttcggggcaatgggctgcacaaaagcgagacaaatgctctggatcagatgcagaagcatctgcgggacagttggtatggctacgcttcagtgctagtggccgacaagcaaggctcgatggaatttgaccttattatcgtcacccatgaccggctgctggttgtcgagctcaaggaatggcatggcaagctgactagctacgatggcaactggatcataacgaccaagcgtggcgagcagaaccgaggcaaaagcgcatatcaccgtaagcgcgaccagggctaccgcctggcagccatcctaaagactgaacttgaacacaagctggggtattgcccctatgtcgaggcgcatgtcgtactctgcggcagcgctaccccggagtacctaccggaaaacgaacgtcagttcgtccacaccctggaagactttctgaagatcggcggtaaacactacgaagattacgttcagaaagtcaggatgatcatattcgatgagatgggcaggtcgcgtccgaaccagaaccagcccatttttgacagcttctttcgtggaagtcgtgtcgagctcgcagagtttcaatatcttgaatacacggcagccattgcacctgaccgtgtgcatgaccagcacctgttcagtgagtaccccgccacgaacgccggcccacccatcagcaaagccatgatgcgtcgctgggatctggcagcactgggcctggcgtttcacgatgacgaaacatggcgtcggatcgttacccgcgaggactttgtgttccgaaccgccagcgctgccaacagcccactggaagacttcctgctgaggcccctgtctcccatggtggaagacaacatcacaagcgactgtgttgagttgttcgagttgcgcaagaacaccctgcgccttgagcagcatctcaatcttcacggccataaatggtcggtggatgatcgtctcgacctgaccaaagccttacttgcgccctttgctgaaatgcacagcatgggcttcgcccatcgagatattgatacccagaacctttggtactcacaggattcgcgcattgtgctggcctcaagctttcatgcagcgttcattcctgacaagggcacagtcaaggatctggctgagcgcctgaaaagcagctctacgctgctgcccgaggatgtctacgcggccgaaggggatgtcctcagcccttttgcgaaggatgtgtacctcttggcccttgtggcccacaagatttgctttcatggcgccaagtttgtcctggaagagggaattcccgtctggcgttcgatacccaatgatcccttcgatggcgagttgaatactttttttgccaaggcaatggatcttgagccggagaaccgctttgccaacgcctcggaaatgcttgccgagttaaacaccctggcaatcggcaaaccgctgcaatacgacgacacacaggaggtcatgcaggagatcgccaaaggcgacttcatcaaggccgactggaacccttacatgctgatgagttacttccctccagcaccgggtgtaatccctgagacgacagctgagaagatggtctatcggtgcgtatttgaaggcgaagaggcacttctcaaattctggccgaaggctgttgtagacatcaagaaccctggcatcaatcgccgaattctgcgcatgcgtaagcgtatcgagcagactctggaagacgagttaccattaccgagcctgttgagccatggcatgtttgccagcggcaacggactgtttgtggtcactcggtttgaggagggcaaaagctggccagatttcattgcaggtctggacactcttgaaaaaaagctagaggcggcctcggcgctgtgcaacctgctgatcaatgttcatggcagagatttcgcacatggagatctgcacccaggcaacattctggtgtgcccaagccaggcggatgagctactgtccctcatcttcattgacgccctggattttggcgatacgtcagatccgtacaacgttgagtatggcccgatcaatccggcgagcaccgacagcttcgggcgagattgctatgcggtctatcagatcgttgaggagcttctgggggaggaagctcccaaggccctagccatcgagtttgccttggccaaggagcagcctaacggcattccggtagccatcgatccattggatgaaagcatcaaggccgaacttgaggccctgaaaaaaccctcactccctgaaatacagcccctcaaattcgtagctgacgttttcaagtggcctgctacagaaatgctgcttcaggcaggtgaatcggcgtactacctgcaagtcgagcgtgctgatcgtaacccagagcagctgtacataaagatcactgcgcaggataagcgacttagtttcaatttcgaccctgtgcgagagaccttgtcgtctgcatggctgtcggacgtatccttcagcgattacatttccgcaggccataaagctcaggctaccttcacccaacctattgccattcagaaaggtatttccaccaaggcaacggaagaggcattcgtccgcttcctgttaaaccaggagcccgtgcagagcttcctcaagaagtctgatgaggtggaaggcgaggaggttgtcgaggatgaatgtgatgctttcgtcgatcagacagtaaggcccttcaccatttggaaggccatgctggagacggagggcgaccaattgatgagggttgagattgaaaacgcgaccttcgaggagagccagaccggagcgctgctaatcccctatgtggcgcagaatggccgggatctggacttcaacgaggatgcaggtgatatcggcatctacctagatggtgaaagtcgtccatttggggaagtggttgccgaggaatgcagctcgacccgactggcagtgcgcatgttttctgccggcattcgcagcgtgaagcaaaagctgactcctggtacggagctgatttttgagtcaaaactcaacaatgcatcacgtgagcgccgcaaaaaagcgatggagcgcgtgctgaatggtgtatcccgcatctcgaacctgcccgcctattttgatcaggacggtgcacagcaatcgaaagtcattggcaagattccagaagaagtggcgatcagggctcgatacgactctgaattcgagcaactgaacccccggcaaattgtggccttccagcgaaccgtctccgagggcccgatttctgtcctccagggcccgccaggcactggcaagaccgcttttgtcaccaagctgatccactacctgttcgaaaatgagttggcggggaatatccttctggtggggcaatcgcatgcttcggtagacactgtggcgatcaaggcccgagagctgtgttcagcgcttggtacagacttgagcgtcattcgcctgggtcatgaatcggctatcgatgaccaaatgctccagtgtcattccagttcgatccagcgccaaattcgctacaagtttcagcgtgaatatgaaaagcggatcaatgcgctttcctcccgcctgatgctcagccaggaactggtggaggaattggccaaactgcatcgcagcatcagcccaattcttgatcgagtgcgcacgtataccaagcagagagatgaaattgccgccaagcgccaaatcagtgaagaaacgcgcatcgacaaggtcatgggctatgacgccaagatcaaaagctgtgtggagtcgcttcagcaccacatggacagccgaaagtatgagttcaatctaccatcacctgctgctccggagttctggagcgagctgtccactcaggtggcacggcagcatggcgtcaccaatcagctggcacttcagcggttgaacaatctgattggaatcagccaggactggattgacgtattgggctcaggggctgcgaactatgacaagttcctggtcaagacctcgcaactggtgtgcggcactctggtgggaatcggggcgggcggtattcacattgaggagatggagttcgactgggtcattgttgatgaagcagggcgagcacaagcttcggaattgatgatcgctatgcagtgcggtcgccgtgttctcctggtgggtgaccacaagcagttggcgcccatgtatgagaagaaacatatacgagaggtcgccaggaagctgcagattgatgaacgggaggtgctcaaaaccgattttgagcgcgcctttctcgtgaacaatggcattgccttggatactcagtaccggatgattgagccgatcggcaaggtcgtcagccattgcttctataacaacgagctgtacagcttccgcaagaaagctgatccctggtgctcggaattgccttatcccttgaacaaaccagtcagctggatcgacagcggcacaggggagcgggcggtcaatgaagacgagcctcagaaaggcaagttcgtgaacaagcatgaggtcgctgtgtgcctgcatctgctgcggcaactggcacgccccgagcacatggaaaagctcaacgccaagcgcactccaatgagcccacagccgattggcttaatcacgatgtaccgggggcagaaacgtctgatcgaagaggaactgagtcgagcggaatgggcggccccactgcgcgatgccgtcaggattgatactgtagattcctatcagggcagcgagaatgctttattaatcctcagcttagttaggaataatgacaagggtcttcaaggtttcctggtagatcaatccaggatcaatgtggcgttgtcccgagccaaggatcgcctggtgatcatcggctccaagcgcatgtggagtggcgtgaacgcaccttccgcgttgggcagcgttgttcgctatgtatccgagcagcacgccatttcgccagatgattacgaaatcgttgacggcaccacagtgattgagggccagcgcaatgaatga

SEQ ID NO: 330272 - DNA, 1557 bp, Pseudomonas aeruginosa
atgaatgatgaatatcaagccgccgacgcctctggctttcgcatctgcaacaccatttccctattggtgccggcgtatcaataccagatcaactgtgcttggacgaaggaggtttcccttcctgcggttgaggagtttacctgccgcttgctgctggccttgcaggaagtgctgcctggcgagatccgagattatttcggcctgtctaagcgcgaatgtgacgtgttgatcgagacgctcatccgtaacaagctggcggtctacaccaatgatgggcatctgacgccgtcatcgatgcttatggatcgcaccaagggcagttcatcggccagtccgagcctcaccaagtatgaggagaggattgagcgccccatcttcgagctgctcaccaagacgatcatgccgccaagccagcacaaccgaacccgctgggggcttccacagatccctgtgccgccagaaagcaaggggtggtctgtactggctgtcgcggatgccttcggcgatcaataccgagctttcctagatttctcgaaactctccgagtcggaaacccgcaagacccgactctacaaggtcggcacctgtgaccagatggccccagtcaatatccaagtggatctggaaatcggcttgttgccaacgcaggccggcaatgttgagatcatcaaacgtgtcgccgagaaagtcgggggtactcgccagcgcccgttaagcatggatctggaagccaagatatccgactacctcaacagtctcaggatgcccaaggacgggatgagtccacaggaatactgccaggagttcaaagacgaggtactagcacgttacctggacgatcgagggttggacatcaactcatggctgatcgatcacaaggatcgcaaaaccgggtatggcaaccaggaaacaagggcgatgattggacccttgtatgacaacaacaaccgaatcactctaggccgcatgctggaagacctctccaaggactggcctgagggtacgattcactctgccctatggttgtcgagctctgtccctctttgggcggccaatggaacgctgctgagcgatttctgccgcaagacagcagaaaagctgagcgaagccccacatgtcaaaggcaagatcactgcgatcctgccattcgatgacaagaaggagttcggccagctgcgcagcacctaccataaccgtattccaaacgggatcgcgttcgaaggatcggatcttcaggatcgttttgaaatcttcttgatccccggccagctcgctgtggtgcagtaccacttccagccgagcgatgatagtgctgcaaccgtgccgattggctacatcacccgtgatcctgtgcgtgttgcccacatcgacaatttcctcaactctcggctgtccggtcggggagagggttttgttgtgtggagcgaggattcggagaaggacatcaccaatcacatggaaaaggatcgtctagagctgattcaatccagtagcctgggctttcctatgactagtcaggtgaagcttacaattagaaagccgcccagaaagtggtaa

SEQ ID NO: 330273 - DNA, 516 bp, Pseudomonas aeruginosa
atgagcggcgtggacgcagcaggtaatcccgaggcgctacgggcgcacaaggaagcgtcgcagcggcagacccgccaagagctagagttggcgctcgctcgcctaagaaatggcaatccgcgccgcgttaagcgcggcgctgcgatcagcgcaacgacagtggcgagagaagcgggtatcgatcgctccacgctttatcgtttccacgagcccatcctgacggcgatccgcaagttcaacgaaaccatgccgaagcagcaactggaggctaagcaaggggagctgggggaagcacaggccaaggcccgcgagtatcgggaggcactcgaggcggcgcgagatgaaattactgcatgggctcgtcagaactatttgctgactcaccgcgtacgggagcttgaagccactatccagcagcgcgacaagctcatagcggacttgcagactagattggccgtgactgcgaagtcggttccgctgaggtcggtcgccgggccccgcgatcactccgagtga

SEQ ID NO: 330274 - DNA, 1914 bp, Pseudomonas aeruginosa
atgatcccgctgccgcttgacgttactcgcctggcagatctgactttcctgcaaaaagcacgtttgcctgtctcggccgccgtcgatacggcaggctcgccggtggtaatcagccggtacgaagatgacgtctggaatttctggccgtacatctcaagggagaatgccaaggacggtgaaaagcggatcatctggggtatcgcgctgccggacggttcaaggctgaccgacgaggcgcatcgcagcttgttggcctcggccaaggatttcatttggtcgcttcatgtcgatcccatcgagggcgggaagcgcctggggctgaagacactgatctccctgatgggcaacctagcgtttctgctgcgttggatggtcagtcaaggcatcaccaggtttgcccagttggatggcagaaccctggagtacgtagtggcagccaaggatggaaagtccgccaaaagtaccgtgatgaagaggttgctcctggtcgagaagttgtatgcgcaggtggggaagatcgatgactacctgccatctcatccctggccatttgaaagtgctgccctgctggccggcatggaccaacgcatggcccaccgagtgccgaaaacgccggtgattcccgagtcggtgttcgtaccgcttgctcagaaagccattgagtacgttgagcagcgtgcgccggcgatcttggtcgttcaggccgaggcggagcaggccatggcggcagccgaggcgcgtggcgtgaaagggcatgcctatcgacaggtctttggtacggaagtggccagggcacacggctatgcagggctcagagaactgcatgccgaaatggcgctactcaggacggccagctacatctgcatcaacatgttctccggcctgcgcaactccgaaatgatgtccttggagtccgggtgcatctcaagggagcccggaatcgatggcagctacgagtgcatctggttgcatggcacgatctacaagaccggcgagcgaccacacaaatggctagtgccgccgatcgtggtgcaagcggtcgatctcgccgagcgcatgatcgagcctttccaatcgatgctccgggacgaagagcggaagcttcgcaagctggaaaccatcgagtcgaagcatgcaaagcgcttggcggaaatatccaggagcaagaacaagctgttcttggcgacgcactatagccagcagggaccggtggccgtgatgccgggcggcgccgccgtcaacaggtggctgaaggacttctgccggcatttccagatccgagccgacaacggcgaagtgtgggacctggcttcccaccagttccggcgcacgttcgcctacaactatgctcgttcggagctgggggatctgctgtacctaaaagagcactatgggcactggagcctcgacatgaccatgttgtatgccgacggcggggccgacgagtaccagatcgataacggtctgctggacgacgtggtgcgcgctaaacaggaacgccaagcggagatactggccggttacctcgactccgatacccccttggccaaaggtgaggattggctgggcacgtggcgccccatggttcgcaccgccaagaacaaggacgagttgattcaggagttgagcagcacgatcaccctcaacggtaccgggcatagttggtgcgccggtaatgccaaagggggcagctgcggtgggctgtgtctgttcgaggccgatatgtgcgtcgactgcaatatggcgctgatcggccctgaacaccttcctgtttggaaagaaattgctgagcagcaactagtggtgctgcaactacccgatatgggcgtaccggccaagagccgggccaaccgcattctggagaaagcgaatcaggtgatcagcaaactcgatggcagtaggtcggaagcatga

SEQ ID NO: 330275 - DNA, 1692 bp, Pseudomonas aeruginosa
atgattggcaggaagcgggtcgttcggaaagtcgagtccatcacactggatggcactgttgtcgatttgccgccgtcatggtgcttcaccatcagctgtcagcaccatggtgaaatccgcttcgatttcgatccatggtgccggcgtgatcgcgatgacctggtgatgcatgtacgggatgccgtgtggtcgctgcggcatgagctggtgggaatcaccctgcaggggatatttcagcaactcgccacttacttcttgccattcttggatgaccttgagaagagtggctgcgttgtcagccgcttgagccagattgacgagaaggtggtcagagatttcctggcgtggctcgagcgacgcatcgccggcggggggcggcggaccggtcaaccgctgtcactctcggcgaagaaaaacgcctattctgcgctgaagacagtgctgaccaaccgaatgaaaaagacgccggagtcggtcagcactcagttgaggttccccaagtcgccgttccccaatatcaatcggttggtgccgaagcgcgcgtcctacagcaagggcgagcagaacaggatcattgcggcgtgcaaccaagacttgaagcggattcacaatgaaaggggcgaagactcattgtctccggcccaggttttggcggtgcacctgatcgttttggcattggccaccggccggaactttcaaggcctgcttgagctgcgacgagatagcctaaaaccccatccgctcaaggatcgggaagttctcatcactgaaaaacgccgcggcggttccacgcaggccgcatcataccgggcgcaggctgccgaccagggggctgagcaagagcagatactcacgattcccaccaccgtgggcaaccacttccggtggctggctgaattcacccgctcactgagcgacgaagcgcgcgccgaggatcgcgacgtcgtattcctgtggcaggtgccccataccgggcgccacccaagatccacccgtcaggggcgggttaaccgcttcacccaagtggatgcccgaaacgccatcgcggatttcgtggcacgacatgaactggtggatgaccgtggggagcgccttctcttcagcgtcgctcgttgtcgcccgaccttcggcaccaacctgtatgcccgaacacgagatattcgcaaagtccaactcgcactgggccatgcatccgccgagaccaccgcacgccactatgtgtcgttaccggcagttgctgagcgggatcatgtctttgtgggtcaagcgatggtgggctggatcacttccgcggatgagacaaaagccacggcactggccgccgatggcaggattccgctgcagaacgtgcacgaactcctgagcggcggatacaacaccgtcgttgctcgctgcaagaatccctttcgcgagggaggagaggtttgcggcaagtacatggtctgcttcagatgcccgcagatggtggttttcgaggacgatctctggaagatgttcagcttctacaacaagctgcttgccgaaagaaacaagatcgccccgcatcactgggtcaagacatacggctgggtcatcaagaccatcgacaacgacatagcaacgcaatttccggctgacctggtcgaggcagcaaagagcaaggccaggctgacacctcatcccgcctgggcggtctctggagccgcattatga

SEQ ID NO: 330276 - DNA, 1131 bp, Pseudomonas aeruginosa
atgcgggtgttctacacggatgagagtttcgagctgaatggcgtgcccttgccagggattccgttcctggccaatgccggtgcagagctgatcgagtcggccaatcgttaccttttccacatcgcggtcgtgcgagggcgcactcgctctcccgccacctggcgaacctacgcagaccacctctacgagtttttctccttcctcgaagagaacgctttgttctggactcgggtgaaccaggagcacattgcggtctggcgcaactcgatgctggatcgtggcctgtcccgctccacgatcaacaagcgcctttcgaccaccagtgcgttttacacttggtgcgctcgccagggcttggccgaacagctgccattcgaaactcaggatgtgcttgtgtcaaaacccaaggggttcttggcccacgtcgatgcttcagggaatcgcctgcaggccaatgagttgaccttgcgtactcagcagcaactccccaagtttctgagcatcccggaggccgtccagtttatcggggcgctgtcgcctcgcaggacgcaactggtggcctacctgatgttgctatgtggtctgcgtcgtgaggaggcctgcgcgctcgatgttcgggttctgccgacgccggccggacattccccaagtaaggccatcaagatgacgctcgatccgagtcttacgccgactaagggctccaaggagcgctgggtgatggtgccatacgacttggcgggccatctgttcgactacatgatgcgggatcgaccgaaactagccggcatgtaccacaagcgccatggcgcggagacaaccaggctcttcctgacccgtgatggcgctgagttgtcgctggatggcttggatgtgacctttcaacgagcctcggccaagtctggggtgaagtgcacgcctcatcgtctccgacacaccttcggcacctacgaatttttgcgcatgtccgagcggcgcggcacggatggcgcgttgcactgggtacgggatcgtctgggccattcgagcatcaccaccaccgaggtttacgtgcatgcggcggacctgctgaaacatgatgaggtggacggttacgttgaagaggtcctgcagcgcgtagggagtcgttcatga

SEQ ID NO: 330277 - DNA, 3081 bp, Pseudomonas aeruginosa
atgagagacattgagcactggctctcccaactttcatacaccgagttcccggaggaactctttgaagctgggaaggcgaccggaacacgccaatatgctgctgagattgaagaaatgctgtcgcctaacggcagcattagagcctctgctgttttctgcgtaggcgagcagcctgcaatctgcttttttgataagaaaactttagaacagccacaagcacaacgcattgagcaaattcgccaacgcatttggaaccaaaatcttgcctctgtggtaattgttgttgactcagagagcttggctgcttactccgtaagcgaccgagatgcagagcctgatagtctcataaaatcagaggcaacccgtgatggccactggtccgcttttgaagttcagtctggctttattaaagatcgactctctgagtggtttagccccgaggagcgagtcgatcagcggctattagccaacctaagagccgttgttaaaaagctcggcagagatgggctaaccgaaagccaagctgaagcattgatggcccaagttatatttctttgctatttggagcaaagagaaatcataggcgaagcatatcgcaagcaccatcaattagatttccttgaggcttatgtttcacgcagagacggccaagagattgatcgactacttagccagctgagcaaagatttcaatggtgactttctgagctcaagcgatggtggagctcccaagtggtccaccttaggaaataatgcgtttctcgcaattaaacaatttctcgaagctgttgatatagaaacaggtcaaggatcattttggcgttatgacttcagccatatccccgttgaactaatctcgggaatttatgaaacgcttttgaaggatcgccaaggggcgctcggcgcctactacacgcccagacaccttgccaatctggttaccgaacaagccttccaaccatttaaagatccctcaacttgtacggtatatgatggagcttgtggttccggaattctactaaccacagcattccgcaggatgctgcgttatgccgaagtaaggcagggacgatctttgcgtttcgccgaacgcgtttcgctcatgacggctacaatatttggcaatgatattgacgaaacagcgtgctggatcactgcattcagcctttatctgtcgctcttggagggattggagaagtcagacatcctgtcactacaaacagatgccaatcttaagctaccaaaattagtcggacctggtctgaatatccagaaagggattgagcatggcgactttttctcctgtgctaacccatttgcgggcaagagaaaattcgacatcttcctttgcaatccaccatggagggagtcagacaacggtgaaaatcccacatgggaagagtggtgccgccaacaggagccgccctacccaatcggccgtcgccaaatcgcagcaggatttgcataccgctcgatgcatagcgtaaagcccggcggggtaatagctctgataatgccgctaaacctaatagttggagctacaggacagtcatctagctttcgccagcggttgctcgaagaggcaaaaattgagcgaatcattaatttctgtgatattcgccgcttactcttcccagcagccaagcacccgtgcgcagttgtaagagctcgaccacgccctatcgaagaggagtctatttccttaaccgatgaaactatcgagtactgggcacccaagacagacgtaagccttgcccttggccgtctagcgcttcactctgtcgatatgaagctactgcgtgcgcacgaagtttacgagaaaccctatcttcttatttctagctactggggcgaatacagggatatcagtcttctaaaaagattacagcgcctcggcactgtcagtacaacaatggagacacggtcatctccctggctatctgcgaaagggttccatgcgccaaactccagcaaccccgatcgcacacttggcccactcgagaatcttgcgtacctacctgcagacagactaccaagcgcatatccaatcgtcgctggagatgtccaactaggtaaagtgaaagactatttctccatagtcgcaagccctggcggccgcaacgcaaaactttatgatggccctagagtaatattccccgatggacttacggacggctatgccgtacgtgcagtttatacagaaactccctttgcctttacgtcatcaatcggtgtaatcggtggagagcgttgcgacgcagacttgttaaaacttttggcagtctaccttcgctccccgctcgtttcgtatttgatggttatgactggctactcagtaattggcgaacgcccccgtatagcccttgacgatatagaggcattcccattttgctcaccagagcaacatccaaccccccagaaagctgccgaaatagtatcgtcagtatcatcactactctctgaactggagaagacttcggagtggcagcgagatgtcgcttataacgatatatcccagcagctggacaatttaatatatgactacttccagctaacaagcactgaacgcatcctcgtcgaggacatcgtacaggtagtgacaaaatcaattcaaccggccaactatcagcgactaacaacccctttactgcatcgtccacagaagaacgaagtccaggaatacttaagcgagctatccaaagaactatcatattggagagagcgcagcagtggaaaaggggcgctagagattcatgccgtcatgcatgatgaaggggggttctttggagcgatccaagtccggatgaaaagtggaaataatgactccgtagaactgatcacaacaaaagctggctttcacaaaatgcttagcgagctacatcagagcctgggactccatgcgtcgacactcagctcagacgaacttttcagaatcccaaatataatggttttgtcgggcgactcattttattttgtaaaacctctgcgccgtagattctggatgagacgaacagctttaacagacgcagaccttatagttcagactgttcgttcagcggcatggaggcagatttaccaatga

SEQ ID NO: 330278 - DNA, 723 bp, Pseudomonas aeruginosa
atgactatgtcaccttctgccgcttggttcgatgtttttcctggaccaagaattccggacgtactcgcctatgtcgctgacacgtgggactttcttcaaaacacctacccaggttctgtgtgcttttctcatgatgagactgcacttaccgacaatctctgcgaggctttagaggaccatgacaggcgcctaacaagccgtatggactgcgacttccagccagaaacatgggagcttcggcggggaccggacggtcgcacgactcggattgcaagggctgatattcgagtaatccttggagctccaggaactccacatttggttatggaattcaaaaagctggatgggagtgctgatagtaaatggcggtactgtttcgacggtatgaaccgttttgttgacgggaaatatgcccaaggtcatgccttcggcgtgatgtgcggattcagccctaatgaccttgataccgaagcaaccgaccttgctggttacatcagcaaggttgaatactgccagcgattgagctgcattccagatgaaggcaaaagagtggtgaccattccatctctcgcagctccacctcgcgcgagattcgacactaaccaccatcgctccagctgctctagcgcgccaatcaaactacttcacgtattgatcccatgtgctaactcaccaacaagctccacaaaaccagctcggcgtaggcgccggactaaaacttag

SEQ ID NO: 330279 - DNA, 1032 bp, Pseudomonas aeruginosa
atgaagacccaggaagaaattttcgagatcataaaagcagctcgccaactagtgaaggagctgccgtcaacagaactatctaagttgactggggatggttatgtcagcgaatacaaccgtatggttggcgagcaaggagtggatccagaaaagctatggtctgcaatctgtgccacccaaagtaagtccacatatcgcagaagggtggcggcaacaatacactgctgtcgtctgcaactacgtgaggctttacgtagtcaagatgcagcacagcgtgcgggggacacgactgctctcctacaccaagtcgcagtcatcggagaaattgtcgaaattatagatattattggtagacacaaagggcagtgcccactagaggctacagtacggcgaaagtcaaaacgatccgacttgaaatacctgcccagtaattggcgagatctgctgcttaggcagcttgaggggagcaagtatgagttggcttatctggtagaggcagtatctggatgccgaccaggtgaactcgagaaaggcatcaaagtgattttctctgaagacagcaggctactgactatccgaatcgataacggagtcaaggttactgaccacaaaggtcagccctggcgagagatcacctatcgagtcgatcagagtcttccgttggttagggctctctatgaagcctgcagaaagattgcgccggacgcgatcgaggcggttgtcgacatcgagaaaactaccaactggcgtgcagcgctatcgtcggccgggcagaagctatggccgagactgaaattcagggtctgcccgtaccacctccgaaatgctgcagctagtgactggaagcgggccggactgagcgaagaggagatctcggctgcattagggcactgcgtgaacaagacctccagcatctatggtcaatcccaaatcggccaagggagcggcggtttgtgccctgttgaggtaagagccgcacgacctatcctaaatacccggactctgagccgatcgatcctgagccctaaatga

SEQ ID NO: 330280 - DNA, 2655 bp, Pseudomonas aeruginosa
atgcccgatgtacgtctttcctctcgttcgttgacccccgtgctctgtgcggtggggctcgcctgcgcgctgcagggcgaggtgcaggccgccgacggtgggccgcgcgacgcggccacggcgccccgggtattcgacatagcgcccggcgaactggccgaggtgttgttgaacatcgtgcgccagggacacgtgccgatcgctttcgaccagcgcctggtggcggggttgcgcggaccggatatccgcggccggctcagtgtcgaggacgccttgcggcgtgccctggccggcagcgggctggcatacgcgcaggacgaaagcggtgccttcgtcctgcgccgcggacaggcgcctgtgcaggagacgcgaggtgcggcggtggcaccgaccttgtccaccgtggtggtcaccggcacgcgcaagagcgatgtgagggcgcaggacagcctgagcccgatcgacgtggtcagcgctacccagctacgtagcagcggcgcggtcgacctgcgcgatgcactggtcaaactgctgccctcgctgacccgccaggcccagccgttcaacgcctcggcgttgacccacacgcagtcgctgcgcgggctgagccccaaccatgtgctggtgctggtgaacggcaagcgtcgccacgaaacggccaatctcaatatcagcggggggctggagaagggctccaccggcgtcgatctggacaccatcccgatcaatgccatcgagcgggtcgaggtgctgcgcgacggcgcctcggcgcagtacggttcggacgccatcgccggggtgatcaacgtcatcctcaagtccgccgacagcggcgggtcggcggccgctgacgtcgggcagaccggcgacggcgacggcttcacccatggcggcggggggaacatcgggctggccttcggcgatagcggcttcgtcaacctcaccgccgaatatcgcgagcaggagcgcacgatgcgcagcggcatcgatgagcgcaccggtcggcgcgacaatatttccatgggcgatcccgcgttccaccggcaatcgttggcgctcaactcgggtttcgggttgggcgacgatatcgaggtgtacggcttcggcacctatacccggcgcaaggcctcctcggcggccaactatcgcctggcttcggtggcgccgacgctgtatccggacggtttcacgccgcgcccgaacagcgacgaggacgactatgcgttcctcgctggggtgcgcggcgagcgtctgctggatgcctggcactgggacctgagcagtggctacggcgccgaccgtcccgatatcggcatgacccagtcggtgaacgcggcgatctaccgtgaaaccggcaacagcccgagaagcttcgacctggcgcgctaccgcaacagccaatggaccagcaacctggacctggggcgagaattcgaactggatttcctcgctgctccgctggcgttgtcgctgggtgcggaataccggcgggaaagctaccgcatcgacgccggcgacccggcgtcttactacagcggcggggcggaatccctggctggcctctcgccgctcagcgaggggcaatggtcgcggcacgcctgggcgtcctacctggacctgggtacctccctgaccccagcctgggaggtcgacgtggcggtgcgccacgagaaattcagcgacttcggcagcaccaccaacggcaagttcgccacccgttaccagttcgatccgcgggtggcgctgcgcgccagcgtaagcagcgggttccgcgcgccgtccctggtccaggagcactacaccggcctcagcgtcggcccgaccatcgcccttggcctgctggcggccaactcgccggcggcgaagatgctcggcgccgacgaactgcaaccggagaagtcgaccagcttcaaccttggcctggtactcagcccgtgggaaaacgtcgggctgaacatcgacgcctaccagatcagcatccgcgaccgcatcgtcgacagcgccacctattccggccaggaagccatcgatgccctggccgcggcggggatctcgttgccggccagtgccagtacggtcagtacccactacctggccaacggtgccgacacccgcacccgcggtgtcgacatcaccggtcactacctcgtcgcgcttggcgagtacgggcaggtcgactgggaactgtcggccaacttcaaccgcaccaccttgcgcaagaaccatcgaggcgccaacggcgagccgctgctcaatgcccagcaggtcgcctggatcaccagctccaccccgcgcagccaggtttccctcggcggcacctggagccgccaggactgggaggtcagcctgcgcctgacgcgctacggccggaccagctcggaactcgactacacggtagggccggacgcctggtcgacggagaaattcaaccatttcgtcaacgacccgaagtacatcaccgacatcgccgcgcgctaccggctcagcgccgacctgacgctgaccgccggcgccgacaacctgttcgacgtccgtccggacaagctgcccgcgcagaacaccacctatggcgacgtgctgcgctacgacacctatgcctcgcagatcggcttcaacggcgccttctactacctacgcgcggcataccgcttctag

SEQ ID NO: 330281 - DNA, 801 bp, Pseudomonas aeruginosa
atgaaaaagaaaagacgttttaatttttcagccgctactgtaaaagagatagcgtttcaagcgcaattattttgttccaaccctgaatgctgtaggtttactacctattccacgtctagcggcaaagctagagcaattgctgaggcagcccatattaacgcagcaagcgcgggcggcccacggccaaacgcgctctcaacagaagaagatttaaagtcggctgcgaatggcatttggctttgcaaaatttgccatgggaaaattgatgatgatccgaacttttactcagaagctaaattgcgccactggaagaaggaacatttgaaattcgttcgacagctagttggaaaggatttcgatgtagtacattttgaattgtacgcccgtagtcgtaatctcgcccagagttttagctttctcgcctttctcgatggaaggcgagtcttttttgaagccttgcctgccgagtacccagatcaggtgctacagtcacttcttgaggttcgatcgcggattactaacgcgctagggcacatgaagcaagaagagttatcttcaaagattctccgtgaaatgaaaaaaaaaattcagcactttctaactgcgcaccctcagctcagtgtgctgaaatgcgatggtggtgatccagattttcttgatttctgcagaggactccaaaccctgcgtgcagaccttctgccgaaggtggtgcaaatggctaacgacctggaatacgacttaagccccgatctacaaaacgagtataaaaaattacaaactcttaagttagattgcacgtga

SEQ ID NO: 330282 - DNA, 684 bp, Pseudomonas aeruginosa
atgcctacgcaagaagatttaataccactccttattgatggcgcgctgagcgtatttgagaatgctgatcagcttttcttcgaggcgggagttttagctaacgtgaaagcattttctcgagcatatttgctacaccaaatatctcttgaagagtgcggaaaaatcgaaatcctgggtgcagcagttacctcatgccttgctggagtagatatagatgtgaaatctctttccagagcttttcgaaggcatgaagctaaaaacaaaataaatgcatatcttcttcctcgctcagaagatgagaaagctgcagaggaaaaacatgatactgcggcagcagctagcgcctttaaagatatccaagaacaattccaccatgagtcgaataatttaaagaacgcatcattatatgttgactttgatggtgcttttacgtccccaggagacataatctctcaagatgactacgatagaatccgagcattaaatgagaagttcatgagactgacaagtatcaaagtgcagatgctatccaagtggaaagacgatatcgctgcagctgctaatggcattcaagagttggacacattgataaatgataattatccaaaggagaagtcgctggcggaacttcttaaggcactgcgagagcgtataaatacgaattctatgcggcgtaaagagtga

SEQ ID NO: 330283 - DNA, 1512 bp, Pseudomonas aeruginosa
atgaccttcatgaccaatgactacctggagtattacctcaccctcctcggctggatcatcaacaacgggatctggaacatgatctcggatactggcctgttcgcggtgcccttcgctgccatcgtgatgcgcgaatggctgaaagttcgcggggaaggcgccgacgagggcaacaagggcgtgctgtctctggcccgcatcgagacgcacatctacgtcggctacatcgtggtcgccctggcggggatctcggtcgtcaacgtgagcttcgacaccatcgagttcgaccagactcgcgcccagcagtgccaatacaatctgccggcaccggcggacaccggctggtcgagctccttcagcagcctggccggcaagagtgcgcagatgccgctctggtgggcgatgatgcacgccctgtccaagggcttcaccagcggcgccatcgcggccattccgtgcggcacggatctgcggcagatgcgaatggaagtggacaacacgcgcgtgaacaatccgctgctggcacaagaaatcgctgatttctccagggactgctacgggccttcccgtgcgcggctgttcatgcggcaacccgacctgggctccgtcgccgaggacaacaaggcgttgcaagacctgaactggatcggctcccgattcctgttgaacaccccggggtactacgacaccgactactcgaagagtccccgtcagtcgtggccctacaacgccacccgcgatgccggcctgcctcaggtgggcggtggtggcggctacccaacctgcaagcagtggtgggctgactcagggattggtttgcgtgatcggatcaagggccaggtggatccggacctgatgaccagcttcctcaagtgggcgaaatggctgaaccaggacgaggtaaccgaggcagtcattcgccaggtgatctccccctccagccaggtcaagggcaacgtctacaccgattacggcgggcaggtgggcggcaccgtctggaacggcatcgcgagaaccgcaggaaccttcggcgttgccctgggcagcctggcctacttcccagcgatggatatggtccgccaagcgctgccgatggtgatgtcgttcctgaagatggcaatggtcatctgcattccgatggtcctggtcatcggcacctatcaactgaaagttgccatgacgatgacggttgtcttctttgcgatgatgttcgtcgatttctggtttcagttggccagatatatcgacagcacgatacttgatgccttctatggttcgggatcaccacatctttcattcaacccagtcatggggctgaatacggctactcaagatgcgatcttgaacttcgttatgggttctatgttcattgttttaccactactgtggatgacagcgatcggctggtccggaattcaagcagggtctgttctgaacggattgagcagagggactgaaggagttcaagccgccggcaaggaagcaggtaatagagttaaaaacgcagtttga

SEQ ID NO: 330284 - DNA, 348 bp, Pseudomonas aeruginosa
atggcagatacgctcaccacccgaaagcttatcggccagctactggtcggagtgctgatcgtcatcggactggcaggggtcggtacgctgctcagcctcttcgccctgaaccacttcggtggcatccagggcctggaggcctggcggcaaagcaactactggagtttgttcgcctggcgggcgctgctgtactgcgccctggccatcgcctggttccggctcaagcagcgcaaggaactgagcgcgcatgagcggcagcgcattcggcggatcgagatcctggtgctgttgctggtcctgctcatcgaattcagcaaagcgtacttccgtactggaggcgcatcatga

SEQ ID NO: 330285 - DNA, 549 bp, Pseudomonas aeruginosa
atgtctatcgtaccgggggtagtccacagcctctacggcgacgcgaaagcgcgctggacgatcaatgaatacgccgacctggagtgccccttctgcaaggtctacaccccgcggcttaagcgctgggtagacagccacacggacgtgaacctggtttggcgccatcttcccctgcagatgcatggcgaggcggcccgccaccaggctcgcctggtggagtgcgcggggatccaaggcggcgctaaagcattctggagcgctatcgatgcgatcttcgctcagtcggccggcaacgggggcgggctgcctggcggcacattggactttcctgatctggaccaggctcgactggagaaatgtgcgaaagacatggacctggtggaccagttgatcaagacggacatcgacactgcacggtcgaacggcattacagcgaccccgaccctcgtcatccaggacaaccagacgggacgaagcgtgaagcttgaaggcatggccgacgagaccacgttgctgtcggcgatagattggctagccaaggatctctag

SEQ ID NO: 330286 - DNA, 1347 bp, Pseudomonas aeruginosa
atgcctacgcccgacaagaacaacaagatcgacgtccaggctttcatcgatgcgcaggcggtttccgccttccagttgcgagtgctgtcgctgtgcttcctgatcgtcgccatggacggattcgacaccgccgccatcggcttcatcgccccggccctggcccacgactggcaactgagcccggcgcaactcagcccgatcctcggcgccgcgctggccggcctggccctcggcgccttcgccgccggcccgctggccgaccgtttcggacgtaagagcgtactcctgctctcggtgctgttcttcggcggctggagccttgcctcggcctacgccggttcggtggaaaccctggccctgctgcgctttctcaccggcctcggcctgggcggggcgatgcccaacgcgatcaccctgacctccgaatactgcccgcgccggcaccgcgcgctgatggtcaccgcgatgttctgcggcttcaccctcggctcggcgctgggcggcctgctcgccgcgcggatggtcccggcgctgggctgggaaagcgtgctgctgctcggcggcggcctgcccctggcgagcctgccgctgctctgggcatgcctgccggagtcggtgcgcttcctcgcccgccgcgcaccggacgcggcgcgcctgcggcgcatcctcgaacgcctggggcgcctgcccgacggctgggccggacgcctcgaactgcccgccgacgagtccgacggcacctcgcccctgcggcagatcctcggcgccgagctgcgcggcggcaccctgctgctctgggccacctttttcatgggcctgctgatcatctacctgctgaccaactggctgccgacgctgatcggcggcaccggcttcagtctcggcgaggcggcgacgatcagcgccatgttccagctcggcggcaccctcggcgcactcctcctgggcagcgccatggatcgcttcgacgcgcaccgggtgctgagcctggcctacgtcggcggcgccctgttcatcctcggcatcgccagcctctaccacagcttcgccctgctggcgctgtgcgtcgccggcgtcggtttctgcatcagcggctcgcaggtcggcgccaacgccctggccgccgatttctatccgacccgcagccgcgccaccggggtcagctgggccctcggcctgggccgcatcggctcgatcgtcggctccctcagcggcggcgccctgctcggcctgggcctgggcttcagcggcatcctcgccctgctggtgatcccggcgctgctcgccgccgtggccgtgcatcgcctgggccggcgccgggccaggccttctcccaccactctctga

SEQ ID NO: 330287 - DNA, 1419 bp, Pseudomonas aeruginosa
atggccaaactgacagccaagcagctggaagcactcaccgccgccgatgacgggaaaatcctccgcgaggatggtggtctggttgccagagtccgtgcaggtgtgcgcggtgtaacggtgcaattccgctatgaattcaaactggatggattgaagcgcgaccaaagcctgggcagttggccgaagaaatcactggcgcagattcgcgctgaacgcgacgaggtgaaagcgactgccagtaaagggatcaaccccaccgctgcccgcaaagcagccaagatcgaagcccaggctgctatcaccgccaccattacggaagccgagcgccaggcagcggaaaacaagacggttgctgatctgtttgatgaatggctacgggacggagtgtcccgtcaggatgaaaacgctgagctacggcgcagcttcaccaaagacgtactcccgctcattggtaagaaacccttgcgcaatctcaccgagaaagacctgctgactgtgctgcgcgcagtcaaaaaccgcggcctcaaccgcgccgtggtcattcgcagcaaggacattggccagatgctgcggtgggcagaaaagcgcaaaccctggcgcaccctgatggcagacggcaatccggccgatctggtggacgttaagaaactcctcgaccacgactaccaagagcagcgtgaccgcctgctctccccagatgagatccgcgagctgcgcgatatctttgcccgactggagcaggactacgacgccctacccactggccagaaatactccggcattcggcccgtcaaccttcgtgtccagtgcgccgcctggatctgcctgagcaccctttgccgcataggcgagttgctcaaagctgaatggcgacatgtcgatctggataaaggcacctggtttatcccggccgaagccactaaagggcataaaggcaaacgccaggaccaccatgtatttctgtccacctttgccttggcgcagttcaagcgactcaaaagagacacagggcatacgctgttttgctttcccagcaaggacgagaaaaaccacgtcgacaccaaaacggtcagcaaactgatcggcgaccgccagtgccgcttcaagagccgcagcaaacctctagctggccgccatcacgacgactcactggtgctgagcagaggcgccaagggtgaatggacgccgcatgacctacgccgcaccggtgcaacgatgatgcaggagctcggcgtaacgctggagatcatcgaccgctgtcaaaaccacttgcttggcggatccaaggtgcgccggcattatctgcatcacgactatgcgaaggagaaaaccgaagcttggcgtcttttgggagagaagcttgagacatttatggcaaccccaggtttgctctcgaccacagaccattgtgtctattga

SEQ ID NO: 330288 - DNA, 786 bp, Pseudomonas aeruginosa
atggacgagcctatccagaaatcccaatccaatcccgcctggacccgagacgagttgattcttgcacttgacctctacctgaaacatcgtgattcgctgcccaccaaacatcatcccgaagtccaagccctatcccagttgctgggccaaataggcaaagctctcggtctcaacaaaggcggcagcttccgcaacgagaacggcgtctacatgaagcttggaaatttccgccgctgggatccggaatacatcaaggatggaaaaactggcctagctaaaggcaacaaggacgagagactggtatgggatgaattcgccgatgcaccgtccaagctcgccgccgtagtagccgccattcgcggtgccgtcggaagctcatcacccgagggccatgctctggccggcgacgacgaaccgggtattgaggaggcggaagaaggcaaagtgctgacccgtctccaccgttatcgcgagcgcagccgtgccctagtcgaggccaagaagaaagacatattgcggaagcagggtcgcctgcaatgcgaagcatgtggcttcgatttcgcagaggcctacggcccggcaggcaacggtatcatcgatgtccatcacaccaggcccgtccataccctgaagcccggcgaaatgaccagactcgctgagctcgctctcctttgcgcaaactgccatcgggtcatccactccaagcgtccatggctgagcgtggagcaggttcgtgcgctaagaaaaaaaacgtcaatccatgcagcccagaacaccatatggtga

SEQ ID NO: 330289 - DNA, 1062 bp, Pseudomonas aeruginosa
atgattgatgctgttgaccttttctgtggcgccggcggcctgaccgctggcatgcgtaacgctggcatcgaagtccacgccggctacgacatcgaatcccagtgcaagcatgcatatgaagtcaacaatcaggcagctttcgttgctcaggacgtcaagagtctcactaaggaacagcttgaagcatggtatccgcgagtcgaaggccgttaccgcctccttgcgggctgtgccccctgccagcccttctccacctacaaccaagggcgagacaccagtagcgacagcaaatggcccctgctgtaccacttcgcacgcctgattcgagaagtgcaacctgaactggttacgatggagaacgttcctgatgtcaccaagcatcaggtctaccaagatttcgtaaccaacttggaatctcaaggctacaaggtgtgggccaatcgtgtggcttgcgtcgactacggattacctcaacaccgtcgccggcacgttctattggcctccaaactaggtccaatcggactcatcgaacctacccaccgcgataagcctgtcagcgtcatggaaatgatcggtgatttaccccgaatcgcagcaggcgattgcgacccggatgatccgatgcatcgcgccgctacgctgaccccgatcaatttgcagcgaatcttgaactctcgtgagggcggcacttggcgggattggcctcctcacctagtggcagaatgccaccgtaaggccagcggcaaaacctatcccagcgtctatggccgaatgaagagggatgagccaagccccacaatgaccacgctctgctatggcttcggtaatggccgatttggccactacgagcaggcccgcgcattgtctctacgagaagcagcgatcttgcaatccttcccacgggattacgaattcatgccggcgaaagacatcacgttcaaagcagtgggccggatgattggcaatgccgtaccggttcgcctgggtgaagtgatcggtgaaagcctcattcgccatgtcgagacgtatgagcagaatcggcgccaaggaattcccgcctga

SEQ ID NO: 330290 - DNA, 768 bp, Pseudomonas aeruginosa
atggatgaactcttggacgccattgcagctgttgtgtgtctggtctctcctgagaaagttcatgcaatagcaagccggattcgccagaccgataccagcaaagctagcagcgcattgtcgggcgtggtcggcacgcccactgccgcagggttagtggatcaactcatcgatgcctggcgagctagcgctgtcagtgccgaggcgctcgcatcgatgcttctcgcctcaggtcatgtcttagccaaggcggcgaatcagcaatccaccgagctcgtgtggacagggccgacgaccccctttgtttctgctcgtcgaacggagcaggcgttgttgcaagtcatcaatgtcgccgagaagacccttttcataaccagtttcgtggcttatgacgtctcgaccatcgtgaaggccctgaatgcggctagtgatcgaggagtggtcatctccatgctgcttgagttgtcccaggatcacggcggtagtatcaccttcgatgtgatagggaaaatgagaacgctagtccccactgcaaagctctatgcctggcgtgacaaagtcgacccgttcactgatgggcgcgtccacgccaaagtcgccgtagctgacgacaaaatgtgctttatcaccagtgcgaacctgactgggcacgccatggaaaagaacatggaggctggcgtcttgatttcgggtgatccatttccgggccagcttcaccggcatctggaagccttggcgatgattggggtgatcgctcctgccgacgactga

SEQ ID NO: 330291 - DNA, 1860 bp, Pseudomonas aeruginosa
atgatcattaacaacaaaacgccagttggcgaagtgcgccccagccaattgctgtggacttatggcccaggtgcgcttattgacctgcccagtctttccgtagtgacgctcggcatcgaccgatgggaaaaggatcgttgccagccgattcaagaggcacgtttactcgctgccgttcggaaggttttgggggcgcaggtcgagaacctgcggatgccgccgttccagaaaagcgaactcgtcgacgtatggtcggcggaagccaatatcggcgttcccgtccggccattcccgcgctggatgcgttgcgtgaaatgcggcctgctttcgcccttcgatgctggtctgttcgagatcaaggagaaccgcttcaggccggagcgaacccgcttcgtgcacaaaggctgccgtggttccaaaggcgaccagccggccaaggatgcggatgccgtccccgcacgtttcctgttggcctgccgcgacgggcacctcgacgatttcccttggcactacttcgtccatggcggaaatagctcatgcaaggggacactgcgtttctatgaaagtggggcttctttgcagaccgagaacctttgggtcaagtgtgatgcttgttcgacttcaagaagcttggctcaggcattcggtaaggctgggaatgaaaatttacctagctgcagagggcgtcacccacatctggatcactttgacaatgagtgtgatgaggagcctcgcgcagttctgttgggggccacgaatagctggttcccgatcacgctctcggcgcttgcgattccccaaacccaagacccactcggtcaactgatccaggacggctgggagtttttcgaagatctggattccgaagtcgaagtgtcggtgacggtgaagacactgaagaagaccggcgcgctgccagggatagacaaatatgatgcagccgcgatctggtcggctatcgaggcacatcgcacaggcgacggacaggagatcgtgggtgaagacgacatcaaggggcctgagtggagtgtgctgacagaggcgaacccacccgcggactatccccatttcatgagcaagaaggtcggcacgccgccagggctgggaggccatataagccgagtcttgctccttgagcggttgcgcgaagtgaatgcgctgctggggttcacgcgggtcgaagcacccgaggagtctggcgatcccaatgagcgcccgcagatggccagcctgtcacgcagcaagccggattgggtgccagccaaccaagttcatggtgaggggatcttcatccagttcgatgaagctgcgctcgtcaactgggaggctctggatagcgtgaagaaggtcgaccagatgctccggggtggtcacaagggatggcgcaattcgcgtcacctcgaccctgacgagggctaccctggaattcgttatgcgatgctgcacacgctctcccatctgctaattcgggagctggcattggagtgtgggtacaacgccgcgagcattcgcgagcgcatctacgccgacacatcaggaaatagtccgcaggcgggcattctcatttataccgcagctgcagattcggacggcacgttgggtggcctcgtcgatcttggcaagccagaaaatctgggtcgcttgctggggcaggcgttgaatcgtgcgaaagtttgttcctctgatccactctgttcggagcatgggccggaaaaggatcgctctcttcatggtgctgcctgtcatgcctgcagcttggtagcggagacctcttgtgagcggggcaatcgctatctggatcgatcgctgctcataccaacactcgaacgcgccgacgctgcctttttcaagggcttctga

SEQ ID NO: 330292 - DNA, 3993 bp, Pseudomonas aeruginosa
atgaaaaataatccaaatacgggcgcggtcagcgctcccaccgcttggatcgccgtcgatcatggtctcggtgccgatctcaggcttgctccttacacgctcgtattgaagggcgaccgatccctgtatcagaccatcgccgacggcgattgggtgctagtgctcaaccaagccggggaaatcgtccgcactgggcgcgtgctgaggcttcgttccgatctcgaaaccaccacgatcttcttcgaccgcatgctgatggccgagtcgccggcttcgatcggcctcacgtcactctcgccgccgtcctccggtaccgctggccctattcagtggacggactttctggagtcgctccccaaggccttgtataagaccatcgccgaagtgccgaccatagaggatcaggcctatatccgcgagctgctgcaattggccgtgatggacgacctgctcggcccagcaggcggcccacgtgagcgcatcgtcgacatgggggtgcgtgaccgctacctggttggcaaactggccccgcgtgaaactgcacagggtggtatcgaggggttggacgggccactggccaatgacgatgtagaagaaccctccgaacccaagacgcccggtcggcacgaacccggtgcagagttcggaacggctaccgggcgcgttgagccagagtcggattcggctgacgagattgatgctgccagtaaccagtcgttggtgcccagcagcctcggtatgactttctgcgtggatggcgatgtcgaccagatcgagatcgaagcgcgctgggggcgttatgagcgcgtgccgaacgatgagcacgacctcataaagcccaatctgcagaaggccaaggtatggcaacgcattccctgtggcggcaagatcgtgctgccgctgaccgaaggtgtgattccccatcaggctcccgataacaggtttcccgaagtgcgcgtacagggctccattagagctaagagtgccaagggcgatcggttggttacattgttcctggtgaatgcacaggaggagctggataccaaccgcgatacggcgtgggtgttccagccggaactgatcgttcgttcggagactgacgccgccaagcgcgccatcttccggcgcaggccggtgctggacatagacggtggggatcccgagcgtgaagcgctggagatgatctatcgcaatcgcgtcgagttcgccatgggccatggcgttgccgtccatgccgaaacggctggcgacgtcacgctggccaccgaggtgcgcactacggtgatgcctcagtacgaggtgcaggtcactgagacgcctgggctcgatccctccgatcgctcagcgatgcgcgagatggtcagcagcggcctactcgacatgcagaaactggcgaccttggacattgacccgctggtcgacgcattgaatacattgacccgcgactacgccgcgtggattgccctgcagcgcgggcgcatcggcgaggacgtggtcggatatggcgtgcaggcagcgcaggcgctggatcggtgtaaggaaatccaggagcgcttgcagcagggtgtcgacacactgaaagccgatgagaaggcactggctgcctttcgcttcgccaaccttgcgatggccaagcaacgtgtgcgcagccagtacgcgctcgaagtacggcgtgggcgtgatgtgactgccgatctattcgaccagccgaagaaccggagctggcggccattccagttggcgtttctgctgctatctatcccatcgctggcgaacctgagtcatccggatcgtgtccagcccgtcgaggcttatgccgatttgctgtggttccccaccggtggcggcaagaccgaagcctatctgggtgtggcggcgttcacgatggcgatccgccgtctgcaaggcaacctcggtggctacgacggctcgcgcggtctggctgtgatcatgcgctacacactgcgcctgttgaccttgcaacagtttcaacgtgctacggcgctgatctgcgcgatggaaaagcttcggcgagatgctctcgttcaaggtgatgagtcgctcggcaaggagcctttcaccataggcctgtgggtcggaaacaaagtcacaccgggcacgaccgcggacagtcaccgcgccatcgaggatgtacgcaatcccggcaagtacaacgctggggcggcatcgcccgcacagctcaccagttgcccgtggtgtggttccacgatcgaccccggaaaagacgtcgtcgtcgatagggatcgcggtaggacggtcgtttactgcggtgacaaaaagagcagttgcccattctctcgcggcaggtcgagcagttcaccgtatcctggcattccggtgctgacggtggacgaagagatctaccatcgccccccgaccatgatgatcgctaccgtggacaagttcgccatgatggcgtggcgcggtgaggtacgcacactgtttggtcgcgtgggcaaggaatgcgtgcgccacggcctgctttggcaaggagccaaatgcaatggcaatcaccaagcggacaagagctttccttccgcgaaggtgaaaaccatcaaccccattcgtccacctgacttgatcattcaggatgaattccacctgatcagtgggccgctgggcaccatggtgggtttgtacgaaaccgccgtggatgagttgtgcggctggacgctcgatggcaagacggtcaagccgaagatcatcgcttcgacggcaacggtgcgcaaagccaaggagcaagtgaacaacgtctttatgcgacgtgtttcggtgttcccaccgcacggcctggacgtggaagacaacttcttctcggtgcaacgcccgatcgaagagaaaccgggacggcgttaccttggcgtgtgctcgcccggtagttcacgccctgcgatgctgatccgcgtctacaccgccttcctgacggcggcacaagaactgttcgatcactttggcgagcccgctgacccgtatatgacgatggtcggctacttcaactccctgcgcgagttgggcgggatgaagcggctggcagaggacgacgtgcagacacgttcctaccgcgtgcagatgagcatggtggagcggcccgcactggcacaacgcagcatcagcaacattcgcgagctgacgtcgcgggtatcgagtcaggatattcccaagtacctcgacaacctggaggtcaagttcaagtccgagttcgacaccgctaccggcaagtatgtgacccgctggcaggaaggtgacacacgcgccatcgatgtggtgctggcgaccaacatgctgtcggtgggtgtcgatgtgaatcgactcggcctgatggcagtgaacggacaacccaagggaaccgccgaatacattcaggccaccagtcgtgtcgggcgttccttcccgggtttggtctgcacggtgctgacgtgggccagaccgcgcgacctgtcgcattacgaaaccttcgaacattaccacgccacgttctacaaacacgtcgaggcgcaatcggtcacgccattctcaccacgtgcgatggatcgtggattgacgggctcgttgctgagccttatgcgtctggagaacgacgaattcagtccgaacgaaggcgctggccaactgagcatgtccaatcaggccgagatcgtcgatgccatcaaggtgttggcgactcgcgcaggcaatgtcgctgaagataactcgcgtaagcagttggctgagacagagctgaaagagcgcgccgatgaatgggcgaaggcagtcagcgttccagggcgaacattggcatatgaaaagcgtgggcagaattcagctacgacaaagaatttgattgaagctcccggcatcaaaccatgggacaactggaccgtgccaatgtcgatgcgggaggttgagccaggcgtgcgcctgatcatgaacacgagccatatcacggacgatcgcgattggaagcctcgtcctgttacgaaggatgaggattga

SEQ ID NO: 330293 - DNA, 1626 bp, Pseudomonas aeruginosa
atgaagagttggaaggagcaactgcgggatatcaagagcatgttacgtggggcggggggaggcaaggagcgaggtgatgagtcacccacgatcgatttcgagccaccaccagcttggctggcaggtgggcaggcgacttcgaagaagtcgcctgcccagcatcccgtccagaactctgccaccccggtcacagttggcgcgtctgccgacgtcgcaccggcacgccccagcgtgttgctaccgccgccattcaaacctcgcatcgacgatgggtgtgctctgaatatgccggagtgggctgacatcggcagatcgttgcagcatcccgaacatcgaggcgaacgatccgtaccgatgaccgtcagagtcggcgtcgattttggaaccgctttcactaaggtggcgattcgagcgggggtcgatttggtgcctgtcgaatggtctgccgtcacgggggacgattcggagacgggacgctatgtgattcccggctttgtcgttcgtgcgccggatggcgagttctgctggcggcgactcactgaagccgatatccgagggaacctcaagcttccggtcatcgagatggtcgggacggaggagtgcccaatagccgccgtggcctatctggcgttggttctccgctacgcgagagctttcttgtaccggaacgtggaaattggacgtaagctcgtcgggcgttcgctacgctgggagctgaacatcggctgccccaccgagccccacgaaaaccttaaggtcgtcgatgcatttcggcgtctcgcccgaaccgcgtggctgttggcggcggaggatcggcttttagagcaggacgtcctggctgcatggtctttggccgattctgcaatagacctcgaaacagaaccgggtgtcgtgccggagttcgttgctcaaatagcagggtatctgggttcgccgcaggtgaaggaaggtctgcacgcgctgatcgacatcggcgcggccaccctcgacgtggcgaccttcaatgtcgttctgctcaacgatcgggcatctccaccgcgcatccccatcttcttttctgcggtgcgtcccctcgggactcactacctgcgccacaaccgccattccagactcggccttgatctttcgtggagcgacacagcacctgtcgaatcgtccgatgacttcgggcagcgaaatggcaagcttcaggacgaggtcgtagcagtcgatgaggcattcggggggcaagtcgcccgctgcatcatcggggtcatcgatgggacgcgcgccaacgcatggggagacccgcgtagtgaggcttggcgagagggtttgccgatattcgtcactggcggtggggcgaattgcgtcttgtatcgccaagccatagagcaggtgcaaaaagaggtgcgggaactagtgagccagagactgggttctttgacacatttcagactcatcgaattgaatccagcatccggaagtgcgcggaaaatcgcggcaggtgacaggctgacagtggcgctcgggttaactgaggatgccgagaatatcgctcgtgttgtcccccatcgggacattgaaccgatcgcatatggaaagacggaacgtgccgaacacacggatctgtatggagatcaatga

SEQ ID NO: 330294 - DNA, 3132 bp, Pseudomonas aeruginosa
atgccttggagtccaggacaactcgtccgccacattgacgacccggccaagatcggcacggtgaccgatcagacgcgcgcgcgtgcgtccggctcacaataccgcgtgagctggaacgggcgtctggactggcactacgaggaggagttggtcgcagccgacgcgggtggtgacgatcctctggaactgatccgcgaaggacgttatggacgggtggatgatctgcgtcagttgctgacgcacatccatctggccgggcgactgtcgaacgtcgtctatgccatgggtctgacccagaccgacttctacccgcatcaatacaagcccctgctgactctgcttgactcgcccgtcaatggcctgttgatcgcagacgaagtgggtcttggcaaaacgatcgaggcggggttgatctggactgaattgcgcgcccgctacgacatgcgtcgcctgttgatcgtgtgccccgccatgctgcgggagaagtggcggttcgagctttcctcacgcttcggtctggatgcgcgtgtcgtcgatgcggaaacgttgcggcaagaactggcttcgaccgagcatcgggaacgcgcatggatcgtgagctaccaaggcatccgcgttccgagcgattgggattccgccgagagtgacaagcccaaacgatcggttcgcgcacggctcgccgacttgctctaccagcacgccgatcaagaaccactgttggacttggcgatcttcgatgaggcgcattacatgcgcaacgaagaaacgggcgcctggcggacgggcagcctgctgagggacgtcagtacgcatcagttgatgctgtcggcgacgccgatcaacctcggttcggatgatttgttcaatttattgcgcttgctcgacccggatcatttcgagtatccggaagatttccgaaacgttgttctcgccaaccgtccggtgatcgccgcgagcgacgtcgtgcgtgatcctacgagcgataccgaccaaatcatggcggcgatccacgaaatcgagtcgtcacgatggttcgagcgatccgagcgtgtcgaccgcttgatagaggaagccgagttgatcaaggactggacgaacgacaggcgtatcgacatcgcagccaaactcgaacggctcaacttactcgcgcacatcgtcagccgcacgcgaaaacgggaggtgcagtccgatcgcgtgttgcgtgacgtcacggtgttcgaggcggaaatgtcaccagtggagcgggagctttatcaggcgatcaccgaggggacgcgggagtatgcgctggccaatggcattgagcacggtttcctgctctccacgccgcagcgcatggttgcatctagcccggcagccttgctgcggacgtggcgcgacgacggcctcgacgccgacgcccttgcggtgacgatggatgaggtcgatgaagacgaggaaaagctggccgaaaggacatctggcctcaaacgctggctggcaagtagaacgctgccccaattcggatttgccgacctgagcaggaacgactcgaagttcgctgaactttccaaggcgttcaagcgattcgtggccgaggatcgagaggccaaggctatcgtgttcaccacctttcggggcacggcgcgctatctcgtcgagcggctttccgccgagaatgtggaggccggattgctgatgggcggcgcggagttcgacaaggaagccgtggtctccgctttccgcgaggacaggaactgtcgtgtattggtctgcacggacgttgccgccgaaggcgtggatttgcagttctgccgtctcgtcgtcaattacgatctgccgtggaacccgatgcgcattgagcagcggatcgggcgtatcgatcgcatcggtcaaatgtccaaacgcatcttggtgtggaacttcgtccacaaggacacgatcgatgcgctcatcattgcgaggctggccaagcgcatcggtgttttcgagagcgctttgggcgaaacggaggaagtcctcggtcaagtccgcaaactcgaagacatcctgttgtcgaggcacctgactgtcgatgaagaggcgcggttgatcgaggaggtagcgctggcgatcgagaatgccaagcacaaacagggagaactggagcgagaggcgatccagctggtggcacacggtcagcaactgctggcacagattgaggccgcgcgcggcgatggaaagatcgtaacccgtcacgatctgatccgttacgtcgatggatgcctcaggaacgtcccaggttgtcggttcatcgcggcgcatggcgacgccgacacgttcgacatcggcctgagtcccgaccttgcagcggagttggacgagttcgtgaggcgggagaatctggttggaaagacgggtcttgcctccggtcagaccaagcgttgccgcttcacggacaggatcaccgacaaacccaagtctggtgaggagatcgtacatcgcttccacccgatcgttcgttttctgtcgcgcaaagccgaaggatcggaggatcgctttccgctctacgcagccagagtcgctgccgaaagcatcgaggtgggccgatatgcgctgatgacccgattggcgagcttttccggtgtgaaggaggaagagcatctcttggtcgctgccgtacccctcgaccgtgagacgtaccttgacgatcggatagcggaagccttgctcgactcggtcaggaagtccggagacgactggccgacggtggcggtggatgtagatccggaggtcggtatgaatgccgccgagctgagcgaggaaatcctccggcatcggtacaaggcgattaaagacgaaaaatggcgcgagaaccgagaccgtgccgacgtgctttcgcagctattggacgaccacattcgcaaaaaacgtgagggattcgagatgcggatcaatagtcacgaaaactacgcatcgctgtacggaagcagcccggatggcaagcgacgcaagggcttggcgaatgcagagcgcaagaagatggaggattttctggcccggatggaaacccgtcgagcgatgctggcgcgtaaaagtcaggccttttcggctgaggcgcgcgacctctgcgtcttgctagtggacgtggtggcgtcgggaggtcgtccatga

SEQ ID NO: 330295 - DNA, 4377 bp, Pseudomonas aeruginosa
atgagctacgacaatacccaccacgactggctctcgctgatcgagatctcaggcccttttctcgccgttcctgttctgaaggaagcctttcctcaagggctggaagaactcgatggcatcaagcgtaaacgcctgcgccaagcctacgaggagtggcgcgaagcgctggagctggaagatgcccagttcgccgagttgcacgtggcctggatcgacgaggtgctgtcgcggggccttgagcttgatgaagatggcaaaggcgacgttctcaaacgcgcagactggtgcgccgcaaaccttcaagtcagctttcccgaacacggcgtgacgctgtcgccggatcttgcagcgatcgatgagcaacgagccaataaaccgctgctgctgatccagtcctatgcgcaggatgtcgatctcgatgccaccctgaagcgagacggttgggccgccactcccgctgactgcatggtgcaattgtgccgctcactcggttgccgcctcgggctggtgaccaacggcgagcgctggatgctggtagatgcccctgtgggtgccgtcagcacctttgcaagttggtatgcccgcatctggagccaagagcccatcactctgcaggccttcgtgcatctactcggtattcgtcgtttcttcgtcgatgaatccgaacaactgcctgcactgttcgatcgttcactgaagctccaggacgaagtcaccgacgctcttggcgagcaagtacgccgtgccgtcgaggtattgattcaaaccctcgacaaggccgaccaggatcgcaatcgagaactgctgcacgacgtcaaggaacccgagctgtacgaagctgcgctcacggtgatgatgcgcttggtgttcctgctctccgccgaagagcgtggcctgctcttgatgggcgacgaacgctatgaagccaactacgcgctctccaccttgcgcatgctgttgcgcaaagagtccgaggagatcctcgagcgccgatgggacgcttggtcgcgtctgctggcgatcttccgcgcggtgttcggtggtatcgagcacgaaaacctgcgcctgccagccttgggcggttcgcttttcgatcccgatcgtttccccttcctcgaaggtcgggccaaaggctcgaactggcgcaccgatgcagccaagccattgcccatcgacaaccgcaccgtgttgctgttgctggaagccatccagcaattccaaggccgaacactttcataccgcgcactggacgtcgaacagatcggctacgtgtacgaggggctgctcgaacgtaccgtcaagcgcgccgatgaagtcacgctggagctggatgccaccaagagcgccaagacgccatgggtcaaactagctgagctggattcggctcgcttggatggtgccgcgcgactcgccgaattgctgcaagagcgctccggcagttccgccagccgggtgcgcaacgatctggccaagcccatcgacgacaccttggccgatcgactgctgaccgcatgcctgggcgacaccaagcttcgcgaccgcgtcaaaccctatgcccatctgttgcgcaccgacccatggggctatccgctggtgtaccccgcaggagccttcatcgtcaccaccggttccgatcggcgcgaaaccggtacccactacaccccgaaatcgctgaccgaagcgatcgtcgccgagaccctcacgccattggcctatgtcggcccggcagagggagcaccgcgtgatcgctgggcactgaaatcacccgccgaactgcttgacctcaagatctgcgacccagccatgggctcgggtgcctttctggtgcaagcctgccgctggctttccgatcgcctcgtcgaggcttgggcactggtcgaagcaacgggcaaaaccgtgagcgtggatggtgaggatctggaagcaggagcggccaaggaacctctgccccgcgatagcgaggcgcgcacggtgatcgcgcgccgtctcatcgctgaacgttgtctgtacggcgtcgatttgaacccactggcagtcgagctagccaaactctcgatctggctggtgacgctggccaaggggcgtccctttggctttctcgaccataacttgcgttgtggcgatagcctgttgggtctccatcggttggatcagctgacccagctttcgacgaatcccgccggccaggggcagctgcgtctgtttggacagaacattgagcgggccgtgcgccaggccatcggactgcggcagcagttacgcgagatgcccatccgcgatatccgggatgtggaagccatggcacatctggatgcagatgctcgctgcaggctcgaagtaccggagtgcatcgccgatgcgttcatcggggatgtattcgcaacaggactcaatacgactgccctagaagctgagcttgcgtcgcttgcaagtttggcaggccaagccatcaatggcagccctggttcactcgatgcccttcgcagacgatcccatctcacgctctcgatagatctacccgtcgacaaaccagcacgtcagcctttccattggccactggagtttcccgaggtgttcgctcgcgagcatggcggcttcgacggcatcgtcggcaacccaccatttctaggcgggcagcgcatcaccggagtcgcgggcacggccttccgtaattggctggtagcgcacatcgcagaagggcggcgcggctcggcggatctggtcgcctatttcttcctacggtcttggagtctgctgcgggagggcggcagtttcgggctactcgcagtcaacaccattgcggaaggtgatacacgacaggtcgggctggaggccatggtgggcgcaggtgctgtcatccatgcggcctacccgaacgagccttggccaggaaaggcggcagttgtcaccagtcgcgtgcacgtacacaaaggtccgtggcgtggcgagtgctcgctactcggacggcatgttcctttcatctcggcgttcctgtctggtcgggaagagtggagtccgaaaggcctgagagctaacgaaggcgtcgcttatcaaggatcaattgcgcttggtatggggtttgtgctgtccgctgaagaagctgcacaaatgctggaggcagacccgaaaaacgccgaagtgatctttccatatatcaacggagacgatctcaattcagatccggaacaacggcccggtcgctgggtgatcaacttctgggattggcctgaggagcgagcgcgagagtacgaattgccgtttgagcgcgtcttgatgcgcgtgaaaccagaacgagacaagttaggagggaaccccagtgctgaggggcgaaagaagaagtggtggctttatgggcgagatgcgaaggccctctaccacgccattggccgcggcaaccagttcgtcaagcatccggcgctggcagctgtcccgccgaagccgccgcttgattccgttatcgctattactcgagtttcgaaatacctgaacgtcgcactgatcccaaacgcttcaattttcacgctagacctgttcgtggcgtccttgagtgacttcgctagcgttgggttgcttcagtcgaacattttttcggcgtgggcatggagccgtggtggacgaatgaagcacgaccttcggttctccggttcagacgttcttgaaacttttcccatgcctgtttcgtaccggtgccctgaaatggagatgcttggtgaagaatttcaccatgtgcgcgcggcactaatgagggagaaaggccttggtctgacaaagataaccaacctagttcactcccccaaagtacagggcgcgcagatcgataggctgagagaagcttggtcgcaaatcgatgcgcacgtgattggtctttatgggtggtcagacatccagcttaatcatggattccacgaggtcgattacaggccggagagcgatcgcgtccgcttcaccatctcggaagctgcgcgcgtcgaagtgctgctgaggttgtcagagttgaataggcagcgatacgaagaagagctcgctcaagtgctgcatggtgaagccaagccacgtacttcatcccgtgctccgcgcaccagacgcatccccaacgcagcaacgttccagtcctcgctcgatttcgacgccaatcccgccaacgagggccgatacctcaaagtcgccgaaccacccgctgactatcgcgcagggccagttcgtgccatcgtcgaatatctgagcacccatcccggctggcacgccaaggccagcatcctcgccgtcaccggcatcacggacggtcagtggaacgtcgctatcgccgacctgatctcacgcggcagagtcgagcgtcatggcgagcgccgcggaactcgataccaactgatcgaatag

SEQ ID NO: 330296 - DNA, 3129 bp, Pseudomonas aeruginosa
atgactgcgtctttggatgccagcagttaccgcaatattccggaaccaggccaactcgtcgaagttagatgtcggcaatgggtggtggccaatgcagatgcctccaaattaggcggcgtgcaccagcatgccgttacgctagcttccattgatgaggatggacttggcgaggagcttgaggtcatctgggagattgagcccggcgcgcagatcatcgagcgtgctggccttccttcgattaccggccaggatgattccgacacactggaagcgtttcttgacgcggtgcgttggggggctgcgaccaatgccgaccgaggcttccttcaagcgccattccgcagcggcgtcagcattgaggacttccaactcgacccactggtccgcgccatcgacatggcccgcgtcaatctactcattgccgacgacgtcggtttgggtaagaccattgaggccggtctcgtcatccaggaaatgttgctgcggcaccgtgcccgcactgtcctgatcgtctgccccgcttctctgcaggagaagtggcgcgtcgagatgctggaaaaattcggcctcgatttcagagtcgtcgacacggcctacatcaagcagttgcgtcgagagcgcggcatccacgccaatccgtggacttcgcatccgcgcttgatcgcctccatggactgggtcaagagtggcgaggggctgcgtgccatgcgcgacgttctacctgcacacaccagctatccacgcaaattcgacatgctcgtcgtcgatgaagcacacaacatcgctcccgctgccggtgcgaactacgcgctggaaagccagcggacgcgcttcattcgctccatcagcccgcatttccagcatcgcctgttcctcaccgcaaccccgcacaacggctacacggaatccttcacctctctgctggagttgctggacgaccaacgcttcgctagaaacatcctgcccgatgaaaagcagttgagtcaggtaatgatccgccgcctcaaaagcgatctggtcgatgcggaaggcaagccgctctacgcgcagcgcaagctgcaagcgttgccggcctcgtactccgcgcaagagcgggctattcaccagaagctgagcgaatactgcgcgagccgtgagcaggatgcagagaaagtaggcaatgctttcggcacgtcgttcgtcaatcagttgcttaagaagcgactcttctcttctcccgcggcgttcgcatccaccctggaaaagcacattgccagcttggctaatggcagccaacgcaaggataaggatgcgatggccgaccgcattttgcgcaaagccatcctgcgagtcgatgaagactacgcaaacgatgtagaggtcgaaaacgcccagtccgaggccgtcgaagaggcctctcgtcgtgcgcaaccgctgacggcagaccagcaacaaatgctgaatgaactgcgatcgtgggctcagacggccaagaaccaggtcgacgctaaagccaaagcaatcctcgactggctcacggccaaccttaagaccgacggtcaatggaatgagcgccgggtgatcttgttcaccgaataccgcaccacccaccagtggatgcacgagatcctcgcgagccacggttatggtggcgatcgactggccatacttcatggcggtttggcgcaagacgaacgtgagaaggtcaaagcggccttccagacctcgcccaaggattcggcggttcgcatcctgctggccactgatgctgcgtctgaaggtatcgacttgcagaaccactgtaattgcctcatccatctggagatcccttacaaccccaatgtgatggagcagcgcaacggtcgtatcgaccggcacggccagcgccataaagaagtgttgatctggcaccctgtcgatggcggcgaacagggcaaggcgaccattggcgggcacggcgatgacatcatccgggcgctgcgcaagctcgaatccatgcgggcggacatgggcagcgtcaacccggtcatcgcaccgcagatgtcggggctgatcgaaggctcgctcaaagacctcgacactcgcttggctgaagccaagatcgccaaggccagtcgctttgttcgtgccgagcgtgaactgaaagaccgggtcgccaagctgcacgagcggctcctgaccacgcagcaggattttcatctcacgcctgagcacatcctcatggcggtcaagacgggcctcgccttggcaggccgcccgccgcttgagccttttgccctggccgacgccccggcgggtaccgtattcaagatgcccgcgctttcgggctcgtgggcgcgttgcctcgaaggcttgcgtcaccctcacacactgcagattcgacccatcaccttcgatcacgccgtcgccaccgggcgtgacgatgtggtgctggttcacctgaaccaccgactggtgcagctgtgcctgcgtttgctgcgcgctcaggtctgggcgcaaggtaatgtgaagaagctgcatcgcgtcacggtgcgttcggtgccggacgcactgatcgatggccctgccgtggtcgtcatctcgcgattggtcgtcactggcggcaaccatcatcgcctccacgaagagctgaccgtggccggtggctatctgggggataaaaacttccgccgcgaagaaggcgtcaccaaggtccagcaatggctggatcaggccaagccactgacagccgcagactctctgttcgatgccatccgcgtgcgtttcgatcgagcgcagagtgcaatcctgcagtcggtcgatgctcgctcgaaagaccgactcaagttcctgaccaacacccttcaatcccgcaagcagcaggaagtggccgatatcggcgccgtgctcaatgagctggaaaaagccatccagcttgaactgaacaacgatctgcaaccggcgcagctctccctgttctcggaagatgaacgaacacagctcaggcgcgataccaccgcactggaagcgcgtcttgcccgcattccagccgagcgccagcaggaggctgatgccatcgaaatccgttacgccaatctgaacgaccgcaccttcccggttgcagtgatttttctggtgcccgaatcggtcgctcagggaggtgccgtatga

SEQ ID NO: 330297 - DNA, 414 bp, Pseudomonas aeruginosa
atgtcccgtcgtaccgaccaggaatgcctcgcccatgtcgcatcaatctactacgaggcccactcccgtaccggtgatcaccggcaggcgttcgtcgagacaatccgcagcgcactgctggggggctatcagccttacgcggcatgggtgaccaatgcgatgctgcgcaccggcagaccggcgtttgcggtcgcgctgaatcatcctgaggctgatcaggtcttcccggttatcgtcggcgggggctcgatcgactggggcatttcgctcatggatgaggcgtacacgccggaaaccggacgcggctggtggctgattgagggggaagccctggatctctacatgcgctgggcgcggcaggagccggaaccgccgcagctcgaactcgacttcgcgatggggatgaggccgtga

SEQ ID NO: 330298 - DNA, 411 bp, Pseudomonas aeruginosa
gtgctgcaccccgacccgccgcagcctgatcaacgcctgcgctcgctgccacgactggtcgagatcctgcgcgactttccccaggtcgaggtggtgatcagctcgctatggcggtcgaaactatcgctcgaccaactgcgcgacctgttcccggtagatatgcgcgagcggatcatcgacttgacgccgatcgccgagcgaatcgacggctggttacccgcacggcgcgagggtgagattttggagtggcttgaagcctctggccgctccgatgagccatggctcgcgatcgacgaccagggatggcagttcacccggcaccgggaccggcttattgagttcgtgttctacgacggactcaccgacggaattgaggcgctgctgcgccagaggctcgccgccgattcctga

SEQ ID NO: 330299 - DNA, 378 bp, Pseudomonas aeruginosa
atggtgcgctactgcgaaatccctgagccatgggctaccagattccaggtcaccagcctcggcgccacctgttccctgtacggttactacgcccgcgactgggaaaaattcctcgaactctggtcgaaagaggccgaaacggtcgacgacctggtcgagcgcgagcttgagcgcctggccatcgctggcgtcaagaaagccgcagcgcgcagcattgccaggctcgctgagctgggggtagacgacgcggatctgacggagtttgtccgtctccaggtggggataggccgctggccagagggcgacctgctggaggcgttccgggcgtggcgtgaccagaacaatacgtcgaacgccgttcctgtctgcaggccataa

SEQ ID NO: 330300 - DNA, 501 bp, Pseudomonas aeruginosa
atgatccaggatcttctccaacacctcgaacaggccgacagcggcctgttcatccacgccccggagggcacctgccagcgcctggccgaggcgctgggggatgcgggcaaacccctcgccggcctcaccgaaaccgaggacagcgcgctcaccatcgagcagctggtcgaccagctggccgtagaaccaggacacaccatcgctgccaccctggaggccgccagccgcctgattgtggagccgatctatgtcctgatcgatcacgccgaacgcctcgaatactcgggcctgacctacgccctgaaagcggcccgcgacgcgctggccagctccgaactgtccggtctgcgcttggccctgttcagcaccgaccgcgccgtcctggagcgcatgactcgccaacagtcggccgctttcttctgcgcccagctcctcgatgttgccgatgaactgtcctgcgagaactccccggctttcggtcttgagtacggcccatggtga

SEQ ID NO: 330301 - DNA, 249 bp, Pseudomonas aeruginosa
atgaaccgcctacgccccaccatcgacttgtcctacggcgagcaggaagtgcttcagcgcgtcctcgccgaacctcggaaaatcgccgacgctctggcgccaggcgacgcccgcgaacattcgcgcatcatcggcgttctggaggaggtggcccaggccttcgccgagaccttcttccaggtagtcgaaaacttgcccgaccccgagccggagcagacccagcagcagggtcgcgggatgagcctatga

SEQ ID NO: 330302 - DNA, 1035 bp, Pseudomonas aeruginosa
atgaggcgaccaactaataattcggatatcccaacacaaaagcctgcgtctcctatcgtaccgtcagaccgtggggaactccgagcaatcgccaagccaatcttggaacgctacaacggcctggccgagtcaaccagggcggaatatcgtcgaattatgctgcgcctcaatggtgcccactggcacgattacgcgaccgccaggcaactacgcaatccaggtgctttgagggcggcctggcgtgtatctatggcgtattggttgtccgaggcattacgcgaatcagagcgcgcccctacagccgaagcccgcgctgctgcacgattattggctaggaactatgcagctcaactactgagtcaggaacagtactatttctctccaacgcagcggaaaaaatctaaagctaagcgggggtcgctagcaggtctgccgagcaattggcgtgatcaactattagaggtcattccggctaagcacaaactgcactgcgcgattatgatgcttaccggtatcaggccagaggaattaggaaagccgattgagcttcgagctttgtctggtaatagccttgaggtactaattcagggcgccaaggtcagcaataatactgatgcaggccaatcttggcggcgcttaacttttcgagacggactttccgaagcaattcgccaagctgttataagtaaaggtgggcaaatttccgtggcgcccaaacaaggacttggacttcaaaaagccatcgctgcagcggcgcaaaggctggggttccaaggaattagtgcatatagcctgaggcatgcatttgcagcagatttaaaatcgcagaaagccgatcctgacgcaatttctcttgcgttaggtcatgtcagccgtgcaagcaaaagtcggtacgggtctgcgcgcaatggtcgcgctgggggagctattttacttgaagtagaagcggatagagctcttcgtggtgaggtgcgggacccgaatatattttttgacgatcatcagctgatctctataaagaccaaacgtcaataa

SEQ ID NO: 330303 - DNA, 882 bp, Pseudomonas aeruginosa
atgggtcacactagatatcctgcagttgacttccgcagctcactagaatcagcattcggattgctggaatggcaaccagtagctgatggtcaaatccatagatttcacatatctggcgaccgtataaactcaaaaaacggttggtatatattatttcctggcgaacagactggttattttggcagttggagaacaggcattagtcatcattggagcaacctcccccatactagccatcttgaaaagattttaatcgcgaaatccactatgagtcttcgctcacagagagaagccgaattacaaagaaaacatgcatcagttgctgactacgcacatcagctatggattaaatctagctctgcgaaatcgtgtcacccctacttagtagccaaggggtgccaccagcatgatctgcgccaaaaaggcgaaaaactactggtgccagtttatgacaaaggaaaactagttaacttacagtttattagtcccaacggagaaaagcgcttcctaaacggcggaaaattgaaaggctgctacgcactaatcggacctcccttaaatacctccaacttatacatctgcgagggctgggcgaccggtgcaactattcacgaagaaacagataaaacagtcgcttgcgcaatgagctcgggcaacctgctaagtgctggccaactcctacagagccagtatccacatgccaacttaatcatcgccggtgatgacgatcgccagactgatagaaatccaggaagaacagctgccacaagagctgccacagcactcggctgtggaatcatgctgccgcaatggcccgccaatgcccccctctcactgacggatttcaacgacctgcgtctatggttgaaggcaaacaaatga

SEQ ID NO: 330304 - DNA, 843 bp, Pseudomonas aeruginosa
atgagtgcttccatcatcactgcgccgatatatttagaaccaatccagttgctgcctgaaatagaggcagaaaaaccctacccaagtgacgccttaggcgaattacttggcggcgcagtcgccgccattgcctcagctgtacaggtaccggatgcactggcagcccagtcgatactgaccgctgccgccatggccgcgcagccgcatgcaaacgttatgcgcgccggccagaggattcccttgtcgctgtttggcctaaccgtggccgaatctggtgatcgcaaatcttctgccgaccaactggttctgagtgcccatcgcgaatatcagcagatactaaaaaggaagcacaaagttgcagaaaaggagttccgaaacctacgggatgcccaccagaaagcacactcggtgatactcgataaagctaaaggagcaacacctgaggtagtagctgctgaactaagcaaactcaacgaaccagccgaaccaaggcagcccgtcattctggtcgaggagccaactatcgagggactacaaaagagtctgctgcgaggacacccctctcaaggccttttcagtgatgagggcggacaattctttggcggctacgccaacaggcctgagaacattctcaagagtatttcgggattatcaaagttgtgggacggagcccctatcacgcgcacccgcgcagcagatggggagagtgctacacgaaacggctgtcgtctgagtgcacacctgatgattcagcccatcgtagcgcaggaggtgttaactaaccccatcctgcatggccaaggacttctggctagattcctaatcgcctgccaccatcactag

SEQ ID NO: 330305 - DNA, 636 bp, Pseudomonas aeruginosa
ttgtaccgcgacgtaaatcctacaggtgatgatcgcctgatcgcattctggcagcgcatgagtacattactagccgtcccgccaaagcttgacgcacaagatgaactctcgccgccagatctgaaactagagcccgcagccctgtcagcctggatcagatatcacgacgacatagaaaaaacacttggcagaggcggtgagatgcaagaaatcaaaccaaccgctgcaaagtcggctgagaacgctctcagaattgctggtgtactagcggttacagaaggtttaaccagcattacccaggaaatcatggagcgcgctgctatcctgtcccgctggtatctgactgaggctctccgtatagcctacccagtgaaaatagaaacacagttgctacaggcacagcagctgctcgactggctgatagccaaggaatggaaatcattcgacgctcgacgcctgcaacgcgagggcccatcaatggtcaggaaaagcttcaagcaacgcgatcggctgctagctattttagccgagcaccgttggctgtcgacgacaaatggaaaagagttccgtctcaccaccgccaccgccaccgccaccgcgacagccgcgacatttgctgcagctcagccaaggtaa

SEQ ID NO: 330306 - DNA, 1857 bp, Pseudomonas aeruginosa
atggaagccaatagtcgtcctctgctgcgaatcttcgagcccacggtgtgctaccagattccgctgttccagcggccctatgtctggaagcgtgaggataactggcagccgctctgggaggacttcgagcgcctgctcggtgtggtgctggctggtgagaagctgcgcccgcatttcctcggtgctgtggtgcttgagcagctgcgcaatgacaccggttcggtgcagggccgtcaggtcattgatgggcagcagcgcttcaccaccttgcagctgctgctgatcgccgcccgcgacctatgctgcagccggggtagtgagcgctttgccgggcgcttcgagtcgatggtctccaacagtgacacgatggtcgatgatccgtcagaggtgcccaaactgttgccaaccaatgccgatcgtcacgcgtttgccttggtacatggcgccggcagcccggacgcgttgttgcagcaggcgagcaagaagggcgtggacttcagctacgatcagggcatcgtcggcgcctacctgtacttctatgggcagttcgaggagtggttgcggccggaggctgcagaagcggaagagtcgccggataaacagctggatgcgctttgggccgtggttcgcaatggcttgcagttggtggtgattgatctcggcgaagacgacgaatcgcaagtgatctttgagacgctcaatgcacgtggcacgcagttgctaccggcggatctgatcaagaactttctgttccggcgcgctcaaagcgaaggcggtgatatcgatacgctgtacgaagagcattgggcggagttcgatggcgagttctggcgtgaagaggtcaagcaggggcgggaaaaccgtcctcgcattgacatcttcatccgccatttcctgaccctggcgatgcggcgcgatattcgtgtcggccacatattcaacgaatacaagaactacgtgcagtacaccgccgactggggctcttgtttcattgatccggccaactctgcaagcgagcatatggcgctgcttaagacctatgccgagcattttcgccagttctcttcgcccgcggcaggatctcgtctcgcccattttctggcgcgccttgtggtgatcgatacttcgacggtttatccgttgctgctgctatgtagccagcgactgcgcccgcagcagcaaaccgagttcgaggcgatcctgacggtgcttgagtcctatctgttccgtcggatgatttgtggcctgaccaccaagaactacaaccgactattccttgatctgattcgtcatctcgagcgggaaaagcagattacggcccaggtggtcggtgcgttcctgctctccagcgaaggggaaagtgtgcgcttcccgaaagacggcgagctgagcaatgcgctactcgactacccgctgtaccagtggtggccgcagtaccgtgtgcgggcggtgctcaaggccttggagcgggcactggcgcatgccaaaagcgaggctgtcagcttgccaacgggattgaccattgagcatatcctgcctgtgaagtggcaggagcactggccgctgccagcggaggtgcagaatgatccccaggctaacgtggaattcagccagcgtcgtgatcgaatcaagcacacgctgggcaatctgacgctggtgaccagtagcctgaaccctgcattgtccaactccgcttgggcagccaagaagccggagctcttaaagtggagcaagctgaatctcagtcgtgacttgcatgaccatgaagaatggtcagagcaggagattctcgcgaggggagcggcgctggcgaagtctgctattcagatctggccatatccggacgttgatcggtag

SEQ ID NO: 330307 - DNA, 3099 bp, Pseudomonas aeruginosa
gtgacgagtagcatttcggagcgattgatcgaagaggaatcagccaaaatattctcaaggcttggtataccttgcgaacttgcaccaagtcttgacttcgataaccacgagcgaccagacctcaacagtggagtccttccgcgccgtcttatagaccgcgtacaaagtataaatccccatttgccacaatccatctgtgcagaagttgcgttaggagctggccgtccccctcacccgacacttgtcgagaataaccgctggttccacgatctactcacgaatggtgtccgcgttgagtacaaagacgcaatcactggcgagacgcgtggaggtcaggcgcggttgattgactttgataaccccaccaacaacgatttcttagtcgtgcgacagctcacagtcgctggggcaaatggaaagagcattcgaccggacctagtgttgtacgtcaacggtttgcccttagtcgtgatggagctaaaagacccagccaatacgacggcaacaatgaacatagcgattgaccagctcagtcgatacaaaaccgtcgtaccggatttgttcgtaccgaacttacttctggtcgccagcgatggacttttgactcgggtgggtagcgtcacgagcggccggcagcgctttacaccatggaggtcatctcaaggtggtgagccgacgctggaagcgttgattaacgaattgctcaatcctaccgcactcctagactatctacgttcgtgtgtggtttttgaagaggacgagcgcgggaacatcgtcaagaaaattgcaggctatcaccagtttcgagcggtacgaagggctcgggcgagcgtattaggtgcaattaagacgccggagcgcgcaggcgatgagactgcaggcaaaggaggcgtagtctggcacacgcagggcagtggcaagagcctaacgatgctaatgctggcaggtacactggtgcgtgccgcggagatggccaacccaacagtaataattgtcaccgaccgcaatgacctagacgaccagctctttaacacctttgcaatgggtcgctcgctgctgcggcaagaccccgtgcaggcagacagccgagagcatctaaagcaactgctagaccgcgcaagtggcggcgtggtcttcacaacgattcacaagttcaccgaggcgcacggcgcaattagtgagcgagcaaacgtcgtcgtgatggcagatgaggcccacaggagccagtacgggttcgtcgaaggcggagcgcgctggatgagagaggcacttccgaacgcgacgttcgtggggttcactggcacgccacttacagcaggcgaccgcgtcactcgaaatgtgttcggtgagtacgctgatgtttacgacattcgtcaagccgtgatcgacggggcgacggtgcccatctactacgaaccacgcatcgttaaactttcaatcgacgaggcgggcgcgcaggaggcagaagcaaaaatcgcgcagtacgcgggtcgcgacgaaaacggacaggaaacgccagagaatatccgaattcctctggaggaactgtacggcgcgccggagcggctggagcgcctagcaaacttcgtcgtcacacattgggaagagcgtcgagccgcgatggaaggcaaggcgatgatcgtgacaatgagccgcgacattgcagctcggctgtatgacgaaatttgcaatctacgtccagattgggacgacaaagatgacgcgaaaggaatagtgaaggtcatcatgaccggcggggcgttcgaccccgagcatatagcgcgccacgcgcggagtaaggcgcagcgcaaattactggcggatcgctttaaggatccggcagacgatttcagattggcaatcgtcgttgacatgtggctaacaggcttcgacgttcccagcgcacatacaatgtacctggacaaaccattagccggacacaacctaatgcaggcaatcgcgcgagtaaatcgcgtgtatggcgaaaaacctggtggcctaatcgtcgacctgatagggctggccgacccattggccgacgcgatggcgatgtatgcaaacacaaccggtgcgacggataagcctgtcaaggaactgcaagatgaagcgattcctgctatgcaatcggcattcgagcaactacgcagcttcttccacgaattcaactatgcagaggcactagagaccgacccatcgaaggtgctgcgtgtgtacttgggtgcaatcgaccatgtgctggacgttaaacacgctgaaggtgacgaaactggctggcaacgcttcggcggtatggtgaaacggcttgcgacagcgttcgctcttgcagttccgcggaatgagacacggaacatagccccccatctggcatttttccagcgtgtggctgcgatgatccgcaaacggcttgccgacgaccgagcacctatagggagtcaattagacgcctccggcgacatcgaggccgcggtgcggcaggtgattggaggcgcggtggatgcaggcgatgtgatcgacctattcgccgccgccgggctcgacgctgcacgactggatattctcagcgacgaatttctgaatcgggtatctgctttagagcagaaaaacctagccctggaaactcttcgtaagctactggccaaccaaatcaagctgagtgagcggtcgaatcttgtgcaagcgcagaaattccgcgaagcactggaaagggcgatgcttggctatacaaacaagcagatcaccacagcccagatgattgctcagttgttggagctagcgaagtgggtgcgggaagctaaacgacagggacaagacctcgggctgagcgacgaagaggcagcattttatgacgccttgacagagaacgggtcggccaagaatgccatgaagtcagacgagcttcgcttgatggctcgcgagttggcggaaatggtcaagaagatgccccgactcgactggactcagcgggagagcgtgcgggcggacttgcggcgcaaggtacgtcggttgctagccatgtatggatacccaccggacctatccgaaaaggcaacgcaactcgtactgcgacaagctgaattgtcgacggagaacacggaatag

SEQ ID NO: 330308 - DNA, 1134 bp, Pseudomonas aeruginosa
atgagagattcgtccgcacgagaccatgccgagctggactccccgaatccatccgaagcgctactccaatggcgtgagacacgcgatgcggaccgatatcgacaatggtgcttagatacttttgagggatatgtcagggttggtgagcatgagtttcaccccgcagaagtcctactacgccttaaaccggacgtagtcgacaagaccatagcagaatgtaagactcagctcttggaacaagacgaagaaacagtatgtagtcagtttccttcacctatcgccataccctatcaacaagccattcacggaccgcgcgatcctaatcgtcgattaactcgtatgcgagatacgtgggagggcctgatcaattttctctccgccatggtagttgccgaagccaaagtggttggggtggggacatcccctgtgcaggtgatcgaagctacttcacgacgttctatcaggcatagggatctacgaagcgataaactttccattcgcattggtatgattgaggggattcttgaaagctggcgaagcgccggcgtaagggcggtcttggctgatttgatcccagttgggcttcccgctgaattgcgacgtctaaactctgtgcgtaatggtttctcgcatctgggcacactgtctgatgtgcaagcagctcgcttagtagaggaaaatcggccgatcttgcgcgacgtactggtggattgcctcttcctggccgagacgcaacttgtccgcctaattagagtaacgcctggatccccaccttctgcagaaattgaatcgttaaatggtcattcgaatgcgcggcgcgtccgagacttggatttggatgcggatgcccagatggtcatcatgcaatgcggcaaggttggctcattcgaccgagtactcgcaaaaatgcgttcgcgatatctggatctttccccgtatttctacgcatgcgatgacgactcgggacatcatacgcgtatcgcattcttcaagaagcgggcggcagatatgtgccacttggaggtcgttggagagtctcttgcattgacttcagaagccaatctccacgcttctgagttcgttcgctgtgaagtggcggttattggaagcccgggaggcattggtgacgagtag

SEQ ID NO: 330309 - DNA, 1314 bp, Pseudomonas aeruginosa
atgccgactaatagccggccggcttggccaagcttcgctttgacggatgtcttcgacgtccgctctggcctgtccaagcctgcatccgaattcggatcaggctttcccttcgttacgtttaaggacgtgttagacaactactttttgcccgaagcgcttgggaaccttgtgcaatcgagtgagacggagcgagagctgtgcgatgttcgacgcggcgatgtcttccttactcgaacaagtgaaacgcaagaagaccttggaatgagcagcgtagcgttgcgagattacgaaggcgcaacattcaacggatttacgaaacggctgcgaccaaagaatgtcgaccagatcgttccggagtatgcggcttattacctccgtagcccgcgatttcgtagtgagatgagtgcattctcctctctatcgacacgcgccagcttgaacaacgacatgttgagcaggcttcagatcgtcctgccggatcggaaaactcaggaagaaatcggttacacgctgcgcgcgctagacgagaagatcgagcagaatcgtcgcacagggcgagtattggaggacctagctcagagcacgttcaaagcgtggttcgtagactttgagccggtcaaggctaagatcgccgggcaagtcagctttccgggtatgccccacgcagtttttgcttccctcccaaatcgtctaaccgactcatccctcggaccgctaccggagggatgggaggtccgacctatcggtgaacttgtgacagttaggggcggaggtacgccaagcactaaagtcgccgagtattgggatgatggaatccacttctgggcgacgccgaaagacctgtccggcctgcaagagccagtactgttacgaacgagccgccgcattacggatgcgggtgcggaatgtataagctccggggtattaaaggagaacaccgttctgctgtcgtcgcgtgcgccagtcggatatacagctctggcaaaagttccagtggcggtgaatcaaggattcattgctatgacatgtgatggaccacttccacctcattacgcgctccactggacccgatccatgctcggggagattaaatcccgagcaagcggaaccacctttcccgaaatcagcaaaggtgcattccgtccgattccggcgctcctgccctccgtagctatagtgcaagcattcgagacttttgcagcgagtttgtttgaccttattgagacaaacgcacgacaggctttttcacttgaggagatgagagactatctgcttccaaggttattgagtggcgtagcgagggttcgcgcatga

SEQ ID NO: 330310 - DNA, 1689 bp, Pseudomonas aeruginosa
atggcgagttctgaagcaagcaacagcgatctaaattacgcagatacactttggaaggctgctgatgcgctacgcggacaggtcgacgcggctgaatacaagcacatcgtattaggtctgctattcctaaagtacatctcggatagtttcgagagtcgccgcgatgacctacgaaccgaattgacgaatgacggcattcaaggcgaacaactcgaacgcctgctcgaatcgcgcgatgaatacactgctgaacgtgtgttctgggtaccgcacgaagcgcgctgggtcaacctgcaaaaccaagctacgcgctccgatatcgcctcgctgattgatgacgcgatcctcgccgtcgaacgggacaacgcaaaccttaagggcaaactcccacgcgactacgcccgtcgcggcattgagccagtgaaaatgaaggggttgatcgacctcatcgccggcattggattcaaaggtgacagaagccgagcccgcgacatgctgggccgcgtttacgaatattttctcggtaagttcgccgccgcggagggaaagctgggcggggagttctacacgccacgcagcgtcgtacgcgtactagttgaaatgttggaaccctacgagggtcgcatttacgacccggcttgcggtagcggcggcatgtttgttcagtcggaaaagttcgtcgaagcacacggtggacaacgcaccgacgtctccatctttgggcaggagagcaaccccaccacatggcggttggcccacatgaacctcgccatccacggcatcgaggcaaaactcggcgagcagcctgcagacaccttccttcgcgatcagcaccctgaccttaaggcagacttcatcctcgccaacccaccgtttaacgttagcgactggtccggccaattgctgcgcagcgacaagcgctgggtctacggcgacccgccggttggcaacgccaactatgcctggatccaacacttcatccaccaccttgcctacccgaacggaaaaggcggaggtgtcgccggttttgtaatggccaacggcagcttatcgagcaacactggtggcgagggcgacattcgtcgcaaaattatcgaagctgacctcgtcgactgcatcgtagccctcccagcgcagctgtttttcaccactgctattccggtttgcctgtggttccttacccgagacaagaccggtcggaacatccgccatggcacacccaatcggcccggcggtcgcaagggtgaaacactctttatcgatgcccgcaagctcggcacgatgcagacgcgggtgctacgcgtactcacaggcgtagaacaggcagagtgtattccaggcacgcgcgaccccctgcccgcatccgatgttggacgcatcgtatacgcttaccgccgctggcgtggtgagcccgctccagattggtggagcgaggccgattacggcgcatggtcgttcgcttcgacccctggtttcgccaagtcagcaacgctcgaagaaattgctaaacatggccatgttctcactcccggccgttacgtcggcgcagaagagcaagagaatgatgcagagccattcgccgaaaagtatccgcgactgatcgcagaattggagcagcaattggctgagggagaacggctggcaaatgtcatacggcggcggctttcggaggtgagcgatgccgactaa

SEQ ID NO: 330311 - DNA, 825 bp, Pseudomonas aeruginosa
atgctcgcgtatctattgatccttgggatggcgtacgtggtctcctacaaggtgggagtatctagcccgagctttgggcgtgccattgctggttttgctctggccgttttggtcgcctggatcttcggaagcattcttgtagcccagggagccgctttcctggatggattgctggggcgattggatggaggtgatacagataccaagcagctcgtgctttctctttttcagcgtggcttgtggtgggctttgattggtgcgggtgttggtgctttcagcgcgagacgcagaatccaccgtaagcaagacgtgccggcatcggcgttaccgaagtgggacgggaagactgtcctagccgtggttcttttcggtctcatgcttgctgtagtgatgcctgcataccaagattacgccaagcgctctctagagccgggggacttctataaaacgcagcaagccgccgttgctcagggcggagcttcttccgaaatcctcgatccgaatacgaccattccagctaatgcgtatccggaaaaattacctagtggacaaataggccagctctctccagcttcgcagcccgaatgggggcgtggtgacattgtaatttcgccgacctctacggacacccacccagcagttgatgctgcgaccaatgaacacctccgccgaatctacgccgcccatccggatgcggatgcgatatttgctagtgcagagttcagaacttggatggcgcggtatccggcttaccagcgcattgcggcggagggaagcactcaagaggttatcgagatgttcacggcatataaaaaccagcggtag

SEQ ID NO: 330312 - DNA, 273 bp, Pseudomonas aeruginosa
atgagcagcgccaatctttccgggaagattacccgtatccttgcctacctcctcaccggcgccagtctcaaccgctttgaagcggaaaagctcggcgaccactgcctcaacagcaccatttctactctggcaaacaagcatggtctgagcattgggcgccagcctgaaaaagtgccgaaccgctggggcaagtcttgcacggtaacccgttacagcctgtcgccgagcgaagtggagttggcctctcaggtactggctcgcctgggggcctag

SEQ ID NO: 330313 - DNA, 228 bp, Pseudomonas aeruginosa
atgtctgccatcactacccccccatccaaccgcttctcccgcacagagcgacgcatctatcgcctgcggcaggtcatggacgccaccggcttcggtcgcgcctggatctacgagctgatgaagcgcggcgaattccccaaggctcacaaaatcggcacccgcgccgtgggctggaacagcgaggccgtagacgcatgggtcgcggctcaactgggtgaggagctctaa

SEQ ID NO: 330314 - DNA, 564 bp, Pseudomonas aeruginosa
atgagcaagcgggaattacaagcctggcagcccggtatggaaatcacctcggagagtcagtactacgaagtgacaaaacagctcgccgaagcacttctgagtgagcacactcctgaacagctagccgttattgctgcccagcacttgatctacgttgacgtgctaaatcacagcaaacacgaatcagcgcgcgggtttgtaagcgctgagaataggattgtgaaaataacccaaggggagttgagaaaactctttagctctctagccgaaagcctgaaggcggaacttactgaagacatgatcggaattgccaagcacattggagatgcccgtatgaagggctcatcaaaagcggctaacgatgtgaggcaccatgccaataggtcgcggcaagaggaggcgatggccgagtgggatgtctgggaggtccgaaaccctcaaggcaagaagctagcctacaaatttgccgaagagtactgttccaaatacggggtcaccagcacggtaatggggagatggattacagctcacaagaagaagaaaaatgccgtctccagccaatag

SEQ ID NO: 330315 - DNA, 1236 bp, Pseudomonas aeruginosa
atgggcaagctgaacccgaagcaagtcgaaaacctgaacgagccaggcacctatgaggacggcgagggtttgcgtctcgtcgtgaaggcatccaggagaaagtcctggcttttgcgctatcagattgcgggccgacgccgagacatgggattgggcagctatcccgaggtgagcttgaaagaagcgcgcctagtcgcagccggccaccgtaagcagttggcgagcggtatcgaccccatggcggtcagggatgcccaacgggaggccgagcgggaagcacagcaagccaaggaggcgcagcgtgtgaccttccagtctcttgcaattgactaccacaccacacacagctctacgtggtcggagaagtggcgcaagggctggctacgcaagttggagctgtacgccttcccgaccatcggcaagctcccggtcagcgagattgaaaccgagcacgtcttgcgaatcctgcaaccgatctggaatagcaaaacccgcacagctgacgaagtgcgcggacaaatcgagcaggtactagatgccgcaagggctcgcaagctccgcaagggagacaaccctgcccgttggcgtgggcatctggacaacctgctaagccgcgcggagaagaaaaaggcccgcaagcgcgagcacttcgccgcgatgaaatggcaagacgtccccgcgcttatgacaatcctcgccggccatgactctcgcgccgccgtggccacgcgcctgatgattttcaccggagcacgggcacaaatgatccgcctggctacctgggatgagttcgacctgggagccggcgtctggtcactgccagatgagcgcatgaaggcacgcagagctttcgagataccgctggcattgccagttgtggaaatgctcaaacagttgccgcgcatcgagggcagcccgtttctattccccggccaaggtaaaaccggcgctatccacgcgaacgccatccgcaacctgctacacaacctggggcatgacgacgtaacccgccatggcttccggtcgagcttccgggactgggcgaacgaacggacccactacccgcgcgaagtctgcgaactggcgctcgcccatgacgaacgggaccaaaccgaggcggcctactcccgctccgatttcttggagaagcgccgggcactaatggccgaatgggcacagttcatcaccacgccacctgtgaccaatgtcgttcaaggtgacttcaaacgagcctga

SEQ ID NO: 330316 - DNA, 831 bp, Pseudomonas aeruginosa
atgctagccaccagcctggtgctatgcgccgccgttctccacgccacctggaacaccctggtcaagttcagcagcgaccgcttgctggtggtcgcctgcatggacgtggtcggcgtgctctgcgccatcctgctgttgcccttcgtcagcctgccgccggccgaagtctggccctggctgctcggcgccaccgtcctgcaactgctctaccgggtactgttgatcgaggcctacaaggtcggcgacctgggcctggtctatccgctgatgcgcgggctgtcgccgctggtggtgctgggcctgaccctggcgttcggcggcgagcagctcagcggccggcagatcctcggcatcctgttgatccccttcggcatgctttgcctgctctggggcggcggcggttcgcggctgccctggcggaccctgccggtggtgctgctgatcggcctgtgcatcggcggctacacctggagcgacggcaacgccttgaagcgctggccgttggcgcttgactacctggtctggctgacgctgctttccggcctgccgttcccgctgatcgccgtcggcgcgcgaacccgcgccttcgcccgcttctgggcgctggagtggaagctcggcctggcggtcggggtctgcgtgctggccagctacggcctggtgctgtgggccatgcagctggggtcgatcgccgaagcggcagcgttgcgcgagaccagcgtgctgctggcggtgctgttcggcatgcgcttcctcaacgagccgttcggactgccacgcctgctggcgtgcggcctggtgctggccggaatgctgctgatgaagctctga

SEQ ID NO: 330317 - DNA, 348 bp, Pseudomonas aeruginosa; identical to SEQ ID NO: 326769

SEQ ID NO: 330318 - DNA, 2166 bp, Pseudomonas aeruginosa
atgaaaacagtgagcatcgacctggaaaactgctacggcatcaagaagctgcaagctgaattcgacttttctaaagctaaggcctgtgccgtctatgcgccgaacggatctatgaaatcctcactcgcgcagactttccaagatgtcgcagacggcgtcgcctccaaggatcgcatcttcccggcgcgcgcgtgcaggcgcgaaatcaaggacgaagccggtgcggatctacccaaggaaggtgtactcgtcgttcgtccgtatgacgaggttctggggcactcaccgaagacttcaacgctgctggtcaaccctgcgctacgccaagaatacgaagccctccatgccgatatcgacgcggcaaaggagaccttgctgaaagctctcaaagagcagtctggctccaagagggacatcgaaaaggagttgtcgtccaccttcacagcacgtgacgaccagttctatgttgcgctgaatcgtgtcaaggacgagattgcttcgatgcccgacgccccgctcgcaacagtcgcctacgatgtcattttcgacgataaggtgcttgctctgctcgccacggatgaagcgaaagctgccattcaggactacatcaagaagtacaacgaactgttgaccgcatcgacctacttcaagaaaggcacattcaactactacaacgccgcaacggtcgcaaagcagttggccgacaacggcttctttgaggcgaagcactccgtcaccctgaatgccgacgccaagctagagattaccagccagaaggagctcgaagaactgatcgccaaagagaaggatgcgatctctaatgacgaggacctgaaaaggaagttcgcgaaactcgacaagctcatccagaagaacgtcacggtccgcgacttcgaagcctacctgctgaaccatgaagagttgctggtacggctaggcaacgtaccagctttcaaggaggacgtttggaaatcctacctgaaggtgcgcttcgagccatttcaggatctgctgaacaaatgccaagcagcccagaccagacgcaaagagatcgaagagcaggcagcgaaggagcgcacacagtgggaagaagttatcgacatgttcaacgatcgtttcttcgtaccgttcaagctggaggcagttaaccggctgtccgtaatcctcggtcaggagccgatgctaagcctcggctttacgtttgaagatgggacagataaggccgctgttgaccgcagctcacttatgcaggccctcagcacgggggaaaaaaaggccttctacgtgctgaacatcctctttgaaatcgaagtgcggaagaaggcaaaacaggaaacgctcatcatcgtcgatgacattgcggactcgttcgactacaaaaacaagtacgccattattcagtacctgatggacattgccgaagacccccacttcaagcagatcatcctcacccacaatttcgacttctaccggactattcagagccggtttgtccggtacccggactgcttcatggcgtcgaaaactgccgcaggcttggtgcttgagcaagccgctggaattcagaacgtatttgtcaaagattggaagccaaatttcgctaccgagccgaagaaaaagattgcctgtatccccttcatgcgcaatctcatcgaatacacaaaggatgcggccaaccccgatttcgtcaaactgacgtcgctgctgcactggaaggccgactccgaccagatcaccatttctgacctggatgtgatcttcaacagactgttcggacaaaatgttgcttcggccgaaggtgcaaaaactgtgatggcgctcatcgagcatgaggccagtgggtgcctaaaggctgccgaaggtatcaatttcgagaacaagatcgtacttgccatgtcgatccggctcaccgccgagcgcttcatggtcaagcgcatcaacgatccggccttcgtcgcgggaattgactcgaaccaaacggcaaagctgctgaaaaaattccgggaactgttcagtacagagctgaagacgctcaaaatccttcaacgtgtggccctaatgacccccgagaatattcacctgaattccttcatgtatgagcccatcctagacatgtccgatggacatctgcggaaactgtatggcgaggtgatcatgctcgcctga

SEQ ID NO: 330319 - DNA, 3816 bp, Pseudomonas aeruginosa
atgaagggctcgaaacacggcgcctcacgcgcggggtcgcatgccgggcgtggctttcgataccaggatgccgccggcgtctggctggcaactcagtgctggagtgaggagctgccttacggcgaggtagtcccggaagggctggacgactacgagcttcgcggagcgacgcgctctgcccttgttcaggtgaaatcacgccgcgaccacctaggaccgttctcagccagcgaggcggcaaacttcgtgcgtgagctttggtatcgaagcgagggcgcatcctcgccccttaccggtgatttgatcttgcttgtagaacagccgatcgcaggtggccccaccaccgatcacaggctggccgataacccgagcctggccaaggccatggctagcgatccacgctggagctcactcgcacctcgtactcttgtttggattacccccgcgccctttgaagtcgcactgaggtccatcagtcgaattacgtcctgcactcccttggctgcacaggtccattacgctgagctactcagccgcatcggcaacttggccgatgccaatggcttaatcacagataaccgctatgcaggcctggccgtatctgacgtggaggcttgcgtgcgcaggatcgagccgatccttgacctaagcggcatggaggcagcattacgcgacggactctgcgaggcgctcgatttcctgacacccacagatgaccccagcttttatcaaggcgtcaatacacgcccggggcatcttgcagccggtctggtcgccgaacgaccggagacgcgcagcatagtcctcgacgctctggaagccagtggcgccacgttgatcgtgggccaatcgggtagcggcaaatcggcgctgatgtgggaagtggctcgtgcgattcggcataccgtgcgctggttcgaaatcaagcgtggcgatgcggccgacgcacatctgttcatgcgtctcgcccaggcattaagagcatcccctaccgcaccgctcggtttcatcctggacgatgtcgggcgcggaggcagcagtctgtgggatggtttgagcaaggaggtcggcggcggtagcggaattctattgctcggctcgatcagagaagaagatgtgttcatgctgaccgcgcgggcgcgcgccaaagaggttcgtcctcccgttgaagaggcggtggcggaacggatttggcaccggctgcttgaccagggccggacctcttgggtgggttggcgcgaaccctgggagcgaagcggcgggctcctgctcgaattcacacatatcttgacgcgtggcgaacggatcgagacggttctcagtgagcaagtggatcgacggctgcgagaatctcgcgatgccgagctggccgtccttcgcgttacttcgctcgccagcatggcgggcgccacaattgatgctgaacggctgtccacggcgctggatatcgcacctggtgatctgagtcgaggtctacgccgcctgattgatgagcatctcgtttcggcgaaagaagatggacgcatcggaggccttcatcagctgcgttcggcaatgctcttcgacctttgccatgcttacccaccaccggcgccatcacgaacggtgaccgaggcggttcattccgtgcatagcgatagcttggaagccttggccgcccacgtgctggtgaatcaccccggcgcaacaagcgctttcgtcgcggccctcgcctcacgactggagcgcgagcacgatcccgtcgcgctggtcacagcactttccggcatgggccaggctcacatcgaggcaacactacgggcttgggtagcagaagttctgtcggccgggctggaaccgtctcaaatcaccctagccgctatgttcgcagtcgcgaacatagatgtttcctcgatgccactaccggatcgcctgaggagcgccgtaggggcattacgcccccgctcagctgcggacccacgaacggatctactgtccgccctttctcgaacctccttgcatcagatggtggccaccactgatatacaccgccttcgagcactcataggagcgctggtcggcatggagctgccggagtctttgcgatcggcactgctggcggtgaagcccgatttcgaagcagtcgatcttagcgaccttgctgatctgctgggcgcgatccatctgatagatccacgcatcgcatcaagctggggggcggcaccggtgcgcaatcgtttactggagcgcgtcccatgcgaaattccctgggcagggccggttatagtcgaagcagcacccgaagggcgtcttctacgcagcgtcatttactacgttgccccctccgttcagactcgactcaacgatgaagtggcaccactctgcgccacgctgcttgggcttgatccaagcgcaatggtagcggccgtcgacgcaattgcggccgatggtctcccatccgaattaccggatgccagcaaacgcattcctcgggagaacacaccattctccgcgctacccgcgtggaaccaacggtggatcgccgcggcagcgcgattggttggcaacgagagctacaccgactatctgcatcgctcgtatgacatgctggagcgcttgctaaccgtactggagcgcacagtggataccgccctgcgaggcaagcggctgcaaccgaagatgttggagcgcctcggcaatattcacaacgcctctcgccaactaactccaccgcaagacgcagcgctcaacggcaacgccccggctacacacaacacaccactacaaaatctactcttctggtgctccgccgacttgattcggcgctccatcaagttgccagaggaatatggtgcgttcgtcctgtggatcggagatttgctcaaagacgtgcgtaaagcgcgcgaggagccctgggagctcttgggtaaatcgccagaaagactgttgaatagacttgagagcctgatcgcttcgttgaggctattggccattgaagccggcacgcagggcgccaagctgacgcaatggatctccatcgcccgtagcgccttaccggacgacgctttgcgtagtgtcaagatggccgttgagcgccagctgcaggcaagctcagagagctatctgcaaggcattgaagtcaagctaaagcagcaatctattgagtttgagctgcatacgcgtccagattgggaaactcccttaccttggccgaatagggacttccttgccatcgtggatatttcatccccaggcgattggccggcatggattgaagcacatgcagccgaggttcagacggctattggtgaaggccgccaggtatggttcgtgccgcgcataaatcatctcgcactgtcgtttctgaccatcaaaggaaggtactcactgttcgcatcaccgtactcaggggacgactggctagatacgcttcagcagcagcgactgaacgatattctgacccgggaggcgcaacgaggcattgagctaattacagagctcgacggcatgcgccgtttcagactgggagaagagaaccgctccactgctgagcaagcagtgcggcaagaccatgaacggcagctcgcggtggctctcaaggcattcgaggcgcgggccgaaggaacgtcggtacagatgcagctgcggaaattcagcgaggacgtagcggccggccatatcgccttagcggagggcctggccgcactgctgcgtaaccgactgacttccgatgggatggctctgctcatgcttcagaacactttgttggaacaggatcttgctgctgttggatgtgggcaaggtgcagacaatccgcccggagggaatcgaacatga

SEQ ID NO: 330320 - DNA, 1623 bp, Pseudomonas aeruginosa
atgacctccgatgtccttcccgccgacgccgtcgccagtgccgccggcaacgcgcacaagccccatctcgagcagcgtcccggccgcctcaccgccctcctattcttcgccgtgctcgccaccggactgctgttcagcgcctacagcctgatgcaggacgtcgatgacgtcggttccacgatcaccacctggacgcccttcctgctgctcggcgtggccctgctgatcgccctcggcttcgagttcgtcaacggcttccacgacaccgccaacgcggtggctacggtgatctacacccactcgctgccgccgcacttcgcggtggtctggtcgggttgcttcaactttctcggcgtattgctctccagcggcgcggtggccttcggcatcatcgccctgctgccggtggaactgatcctgcaggtcggttcctcggccggcttcgccatggtcttcgccctgctgatcgccgccatcctgtggaacctcgggacctggtggctgggcctgccggcgtcgtcctcgcacaccctgatcggctcgatcataggcgtcggcgtggccaacgcgctgatgcacgggcgcgatggcaccagcggggtggactggggccaggcgaccaaggtcggctactccctgctgctctcgccgctgatcggcttcgcctgcgccgccctgttgctcctggcgctgcgcctgctggtgaagaaccgcgcgctgtacaaggcgccgaagggcaagacgccgccgccctggtggatccgcggcctgctgatcctgacctgtaccggagtgtccttcgcccacggctccaacgacggacaaaaaggcatgggcctgatcatgctgatcctggtcggcaccctgccgatggcctacgccctgaaccgcaccatgccggcggaccaggcggtgcagttcgccgccgtcgccgaggtcacccagcaagcgctggtgaagagcgcgccgcaaccggcgccggccgatccgcgccaggtactctccgactacgtgcgcagcaagcaggcatcgcctgagctgatcccggcgctggccgccctgaccggctcgatcggccaggaagtgaaaggctatggcgcgttctcgcgggtaccggcggaagccatgggcaacgtgcgcaacgacatgtacctgacctccgaggcgatccgcctgatggacaaggacggcgtcggccgcttcgacgccgacacccgcggcaaattgcaggcgttcaagcagaagatcgacgacgccaccaagttcatcccgctatgggtgaagatcgccgtggccatcgccctcggcctgggcaccatggtcggctggaaacgcatcgtggtgacggtcggcgagaagatcggcaagacccacctgacctacgcccagggcgcctcggcggaaaccgtggcgatgctgaccattggcgcggcggacctgtatggcttgccggtctccaccacccatgtgctgtcttccggggtggccgggaccatggcggcgaacggttcggggctacagtggaagaccatccgcaacctgctgatggcctgggtgctgacgctgccggcggcgatcctgctctcggcctcgctctactggctgctcacccggctgttctga

SEQ ID NO: 330321 - DNA, 1629 bp, Pseudomonas aeruginosa
atgcttaaacaaatcaaatgcaatctattcaatcacaaacagatcgactttcatgacgggctgaacatcatcctgggcgatgacgaagccaagaattcaattggcaagtcatcagccctcctagtgattgatttcgcaatgggcggaaccagcctcttagtagacgacgccggcgtcatcaaggcgttgggagatcattcatacgacatcacctttgaattcaaaggcgaacccttgtttgttcgaagatcaactgagcgacctgatattgtagacgtttgcgactccaattacataaaacatgacgagatgtccctagaggcgtacagagaacacctcaagcgcctttacggtctatctggattagagagcacattccgctctatcgttagcccatttgcacggatatggaacaaaggcgagtctgacccagatcatcccttggcaggagcttccaaagaaaaactgagcgctgggatattcaggctgctcgatctatttgagcgcaccagcgatgtttcggtggagcgcgctgcactacagatattgaaggacaagaaagatctaatgaaaaggtcgatgactgcggaaataattcctcggatcacgacgacacaatataggtcaaaccaaaaactgatcaaagacaacgcgcaagccattagcgacctcaaggacaattttgcgggagccatcaccgcgtacgaggctttgttcgacgaaaagctaagagaaatccaacaaagcaaaaacgagttaataaaacagcggagcttaacttcagccagaagagaaaaacttcagagagacatctctggactatcccctcgcctgactgcaaatatcgcgcttgttgctgagttcttccctgaggctgaccttgaacgattacaacaagtagagcaattccacaagaaaattggaaagctagttagcagagaattaaaaaacgagcttgaagccctgcttaatcaagagtcagagatcaacgaaagcattaccgatcttgatcagaaaataaagctagcactcaatctaaagggcacacccacagatctctttgcaaaagtttttgaacttaaagaagttaccgacaaagccagggaagaaaacaaattctttgagcagaagacttccattgacgagagcgaggcggcttctaaagctcgccttgatgcgatctatgatcaaatcttcctcagcatcgaatcttctatcaattcagaactcgaagagttcaacaaaatcgtttacggccctgagcgaaacccttcacaattgcgaattaaaaatgccaactcttatagctttacatcaccactagatactggtacgggtaagtcttacgccggtttggttggctttgatattgcggtgctgtcactcacgaacctgcccttcatcatccatgactcaatgatctacaaaaatattgagatctctgcaactgagaacattatccgaattctaagcgccttcaagaaaaaacaaatattccttgcttttgacgaggcgaaaaaattcaacacggaaacccagaaaaccttgcagtcaaataaagtattgcaattgaaccgcaaccaactgctttacattaaagattggcgaacaaaagagaagaggacgtaa

SEQ ID NO: 330322 - DNA, 222 bp, Pseudomonas aeruginosa
atgctagttccaagtaaattcacaaagcttgaagattccaccatttttagaatgcacgcaatccttgcagaaaagcagcctggcgatacagtggcgcagattttcgccaagaccagaggtaaatttctagatgcgtctgaatttcttgtggcgatggacgtattatttttcttaggttatctggatgtccaggaaggcactggagtgattgactatgcttaa

SEQ ID NO: 330323 - DNA, 780 bp, Pseudomonas aeruginosa
atggcgaatgcacggataacttaccaccctgaagagcacagtatgctttacgcagagacaggcggcatatgccccctctgtgcttgcgcaatcatatttaccaaaccaggctcgaaaaatccaaaaaagggttatgaagtagctcacatctaccctttgaatccaactaatgcacaaaaacttgcacttgctagtcacacgatgccagccgacatcaatgaccttgctaacgtgatctgcttatgcccaacctgccatagaaaatatgacaaagatttcaagattgaagaatacgacagactgcgagccattaaggatggatttatccgggatgtaaacgcaaggaagtcaatttcagaacacagcctcagagaagaaataaaagagctaattgagaaaatatctaatctggacgaagaaagcctgaccagcttcgatctacagctcaatgcttctaccttgagtgaaaagttgaaaaaaggagcgagccccgtcctaaggcgaaatatccgaaatgatgtggtggactatttcgtaaccatccaggacgagttgcgactactggaacaacgcgaccaagcggcagtaaaaatgctactcaaccaagtcaacacttacttctgggcgatgcatagcgagcatccagataacaaagatgcaatatttaattacatcgcccaatggatcagcgccaaaagtggcaaatctatagacgcctccagaatcattacttcattctttgtacagaactgcgaggtcttcgatgctagttccaagtaa

SEQ ID NO: 330324 - DNA, 1437 bp, Pseudomonas aeruginosa
atgagcatgaacctggtcaccctcctgtacctcatcgcctcggtctgcttcatccaggccctgaaaggcctgtcgcacccgaccacctcgcgccgcggcaacctcttcggcatggtcggcatggccatcgccgtggccaccaccgtcggcctggtgttcaagctgggcgcggagatcgccaccaccggcgtcggctacatcgtcgtcggcctgctggtcggcggtaccgccggctcgatcatggccaagcgcgtcgagatgaccaagatgcccgagctggtcgccttcatgcacagcatgatcggcctggccgcggtgttcatcgccatcgccgcggtggtcgagccgcagtcgctggggatcgtcgcgcacctgggcgacaccattcccaccggcaaccgcctggagctgttcctcggcgcggccatcggcgccatcaccttctccggttcggtgatcgccttcggcaagctctccggcaagtacaagttccgcctgttccagggcaccccggtgcagttctccgggcagcacctgctgaacctggtgctcggcctggcaaccctcggcctgggcctggtgttcatgttcaccggcaacctcaccgccttcgccgtgatgctggcgctggccttcgtcctcggcgtgctgatcatcatccccatcggcggcgccgacatgccggtggtggtgtcgatgctcaactcctattccggctgggccgcggcgggtatcggcttctcgctgaacaactcgatgctgatcatcgccggctcgctggtcggctcctcgggcgcgatcctctcctacatcatgtgcaaggcgatgaaccgctcgttcttcaacgtcatcctcggcggcttcggcgccgaagccgacgccggcggcccggcgggctccaaggagcagcgtccggtgaagtccggttcggccgacgatgcctcgttcctgctgaccaacgccgacagcgtgatcatcgtccccggctacggcctggcggtggcccgtgcccagcacgcgctgatggaactggcggagaagctgacccatcgcggggtcaccgtgaagttcgccatccacccggtcgccgggcgcatgccggggcacatgaacgtgctgctggccgaggccgaggtgccctacgagcaggtgttcgagatggaggacatcaactccgagttcggccagaccgacgtggtcctggtgctcggtgccaacgacgtggtcaacccggcggcgaagaacgatccgaagtcgcccatcgccggcatgccgatcctcgaggcctacaaggccaagaccgtgatcgtcaacaagcgctccatggccagcggctacgccggcctggacaacgagctgttctacctggacaagaccatgatggtgttcggcgacgccaagaaagtcatcgaagacatggtcaaggcggtggagtga

SEQ ID NO: 330325 - DNA, 810 bp, Pseudomonas aeruginosa; identical to SEQ ID NO: 324598

SEQ ID NO: 330326 - DNA, 792 bp, Pseudomonas aeruginosa
gtgccaaccgtacgcctcgccgacggcgacctgaactactccctggaaggaccggccggcgcgccggtcctgctgttgtcaaactcgctgggcaccgacctgggcatgtgggacacgcagatccccgcactcaccgcccatttccgcgtgctgcgctacgacacccgcggccacggcgcctcgctggtcacccccggaccgtacgccatcggccagctcggcgccgacgtgcttgccctgctcgatgccctcgagctgccgcgcgtgcatttctgcgggctgtccatgggcggcctgatcggccagtggctgggcatccacgccggcgagcggctcggccggctggtgctgtgcaacaccgcggcgaagattgccagcgacgaggtctggaacacccgcatcgataccgtcctgaaaggcggcgagcaggccatgcgtgacctgcgcgacgcctcggtggcgcgctggttcaccgcgggcttcgccgagcgcgagccggcgcaggtcgagcgcatcgtcgcgatgctcgcggccacctcgccgcagggctacgcggccaactgcgctgcggtacgcgacgccgatttccgcgagcagctcgggctggtccaggcgccgacgctgatcgtcgccggcagccacgatgccgtgaccactccggacaacgcccgcttcatgcaggcgcgcatcgccgacgcgcagttggtcgagttcgccgccgcgcacctgtccaacgtcgaagcgggcgacgccttcagccgccgcctggtcgatttcctgctgtccgcctga

SEQ ID NO: 330327 - DNA, 264 bp, Pseudomonas aeruginosa; identical to SEQ ID NO: 318906

SEQ ID NO: 330328 - DNA, 1263 bp, Pseudomonas aeruginosa
atgtccgctttcctttttccacgccgtggctatctcggcgtgttggctgccgcattctgggcagctccctggcttgccgcgcaggcacagcccctaaccttcgaacgagcccaagctctggccgaacagagtgcccctgagaacctcgcgcgccaggcgcaggtggcatcggcacagcaggctgtagggcccgcagacgccttgcccgatcccaagctgattataggcatcgacaacctgccgatcgaaggccctgaccgttacacacttaatcgtgactccatgaccatgcgccgcattggactcatgcaggaggtaccaaacggcgacaagcgtctggcccgtcgccaactggccgaagcctccatgacgcgggccgaggccgagcagcgtgccatgcagttggaaatcaagcgccagacggcagtgagctggctggacgtatactacgccgaacgcagtgttggcctcttcgatcaactggaccgtcagatcgagatgctccgctcgaccgtgcaatcgctgattgccggcggtagtgctcagcctggcgagctgttgcaggccgaccaggaagctttggcgttacaagatcggcgagatgaactgaatcgcgatgtggcagtagctcgtgccaagctgcgccgctggataggcaacgaggctgaccagcctttgcaaggagatgttcccaatctgaacctggtggcaccgcacctgcagcaacgcattgcctcacaccctgagttgcgcgctgcctccgcccgagtcggcgaggctagcgccgagctgaacgaggccatcgccgagaagacccccgactggggtgttgagtttgcctacaacaatcgcgacaaccagttcggcgatatggtgatggtgcaattcacgttcgacctgccgttgttcgtaggcacacgtcaggggcccaagatcaacgccagacaacaaagcgtgtcgcagatggaagccgagcaggaagcattactgcgcgcccatcaggctgagctggaaggcggtattgccgagcttgagcaactgcgcaggaccttgtcacgcaccgaaaaaaccttgatcccgcttgcaagcaaacgtgccgatctcgaactggccgcctaccaagccggtaacagccagctcacatccgttattactgcccagcgcgacctgattgatgcgcaactgcggcagattgaacagcagcgcaagttgagccagctctccgcaagcctgtactacgcctatgtggagggcctgaaatga

SEQ ID NO: 330329 - DNA, 336 bp, Pseudomonas aeruginosa
atgggcaattcactcaggttcatgatccgctggctcagctacccaacaatctttggcggggccgcagcttggatgatctggttgctctacacgggtattccgtattggcccagcacgccgatcattgccgccctagggattctgctggtggcgctgctggaacgcgtgcagccgttccgtgacgactggttggaggaccaccaggatacccttactgatatcatccatatggtcgtgaacctgtccgtgatccagattacggcgaccgtgctggcccggctgggcgattgggtgcccgcagagttccgtgtcttcccaacagagttaccgctgtga

SEQ ID NO: 330330 - DNA, 2601 bp, Pseudomonas aeruginosa
gtgctgatcggcgagttgctgcagcgcagctacgaactcccagcctattccaccctcaatgacgctgctgaggatgccttagttgcaatgcaggagcggctattcaatctcgttgtgaccagggcgccaattgaggtggtctacaaactgaaagaactgctcgaaacggatttcgggcgacgccaaagtgacttcaacgccctcaagcaggcacccaagaagccatcccgcaaacacttggaagtgctgatagatcacatggcttggctcgagagctttgggaatctagatgccatttttgatggaatcgtcgataccaaaatccgccacttcgctgcccaagctgcggcgtcggacgtcgccgagcttaaggactgttcgctgccgaagcgttacacgctgatgcttgccttgatctatcggatgcgcgtgcggactcgggatcacctagccgagatgttcatccggcgaatctctacgattcacaaacgtgccaaggaagaactagagcaaatccaagcacggcaacgtcagaagctggagcagctggcggccaccctggacggtgtggtgcagattttggttcaggaaccggatgaccaagaggcaggtagcctgattcgggaatacctctcccccgacggcaacctggaacggttacgcgaaacctgtgccgaagtccaggctaccggcggtaataactacctgccgttgatctggaagcatttcaggtcccatcgctcgctgttgttccgtctcagccaccttctccaactggagcccacgactcaggatcggtcgctggttcaggcacttcaactgatacaggacagcgagaatttgcaccgcgtgtggatcgacgagcacgtcgacttgtcgtttgcgtcggagcgctgggtcaaggtcgttcgtcgtcctgccagtgaggggccaccgaccaaccggcgctatctggaagtttgcgtattctcctacctggccaacgaactgcgatccggtgacatgtgcgtacaagggtcggaatccttcgccgactatcgcaagcagttgctaccctgggacgaatgtctccagcgactaccagcctactgcgaaaagatggaactgcctggcacggcgaaggaatttgttacctccctcaagacccagttggaggaaaccgcgcagcaactggatgacaaattcccctcttgccgaggggacgtatcgatcaacgaagccggcgaaccggtattgcgccgagtgacggcgcgcgacatcccgccatcggccatctcgctacagacggccctcatgcaacgcatgccggccaggcacgtactcgacatcatggccaacatcgagcactggattcagttcactcgacatttcgggccgatgtccggcaacgagccaaagctcaaagaacctgccgagcgctacctgatgacgatcttcgccatgggttgcaacctcggccccagccaggccgcgcggcatctggccggtaatgtcaccccccacatgctttcctataccaatcgccgtcacctctcgctggagaaactggacaaggctaaccgcgagctggtggagctctacctgcagctcgatctgcccaaactctggggcgatggcaaggcggtggctgcggacggcacccagttcgacttctatgacgacaacctgctggccggctaccacttccgctaccgcaagatgggagccgttgcctatcggcatgtggccaacaactacatcgctgtattccagcacttcatccccccgggcatctgggaggcaatttatgtaatcgaggggctgctcaaggccgatctcagcgtcgaagctgatacggtgtattccgatacccagggccagtcggccacggtgttcgccttcactcatctgcttggtatcaacctgatgccacgcatccgcaattggcgcgacctggtgatgtgccggccggatcgcggcgctgcgtataagcatatcaaccgcctgttcaccgacaccgccgactggcacctgattgaaacccattggcaggatttgatgcaggtcgcgctatcgatccaggcgggcaaaatctcctcgcctatgttgctgcgaaaactcggttcctacagccggcgtaacaagctctaccacgcggcacaggcactgggcagcgtgatccgtacgatcttcctgctcacctggatcggcagtcgcgagttgcgccaggaggttaccgcgaacaccaacaagatcgagtcctacaacggattctccaagtggttgtccttcggtggcgacgtgatcgccgagaacgatccggacgagcaacagaagcgactgcgctacaacgacatggtggcctcgtcggtgatcctgcagaacactgtggacatgatgcggatcctgcagaaattggcccgcgagggctggcagttcaccgatgaagatgtgtccttcctcagcccctacttgaccagcaacgtcaagcgtttcggcgagttcaacctcaagctcaaccggccgccggagccctggatcaaagactcggtgttccagcaggcagccgggtccatccgcactggcaagctcggtactgcggaaaccgaggagatgacctga

SEQ ID NO: 330331 - DNA, 2607 bp, Pseudomonas aeruginosa
atgaagcttttccagcgcaccgccaaggatgggaacgagttgggcgacctgctcgaaccggaaaagaagccgcgcaaggcagcgtccgaacgcgctgacggcaaggacctgctgcccggcataggcgccagcctgctgggcgtggcggctgccggcgccctgctctggttcggcgtcttcggcggcgccggtgaggcgcagcagcgccagttggacgcggcctgggccgaaggccaggccggcgccttgcgccaggccttgcagcaactcgccgccgacacccgcgccgccgcggccagccccctcgccctcgaagccctgcaaagcggcgacgccgcccgcatcgaggccgcccagctcagcctgctggcctgggacggcgtggtcgatgcccacctgaacgcgcccggccaggccgcccaagacaacgacagccccggcccggtcagcttcgccgccctggatatcctgcaccgggtggaaagtggccagaacgtcgccgccgaagcctacaaggtcggccagcgctggctgctgtacagcgcagcgccggtgcgcggcgccgaccagagcctgcaaggcacgctgctgctggcggtcgacctgcaacggctgctgcgcgccctgccgcccttgccgggcgatgccggccaggtacaactggtccagcagttctccggcgcaccggcccaggtgctgctgcaacgcggtacgccggcgccgggcaagggtgcgcaagcgctggacagcggcaatccgaactggaaactgaactacacgcccggcagcgtcgcttcgacccaggcctcgccgctgctgccggcactcgcggcgctgctggcgctgctcggcggcatcctcggcgcctacctcacccgttcgtcgctgttgcgccgcctgcatcaggatgtcctgaccctcggtcagtatcttcaggaactcggcgggcaacgcactgccaaaccccctgtgcctagcctgccgggcttcgccccgctgatccaggcattggcccgccagccgcggcgcaagccggagccgaccagcgtgcccagccctgccaaggcagcgccggtggcgccggtggcggtggcgaaagcgcctcctcgcgaggagccggcattggcagatccgttgttccagaacaccgacattctggatatcgacattctcgatgaagaccaggacctcctgggattggagcaaacccccatcatgagcactgcaaaagcaccgacgctgcccgccagcatcttccgcgcctacgacatccgtggcgtggtaggcgataccctcaccgccgagaccgcctactggatcggtcgcgccatcggctcggaaagcctcgcccgcggcgaaccgtgcgtcgctgtcggccgcgatggccgcctgtccggtcccgagctggtcaagcagctgatccagggcctggtggactgcggttgccaggtcagcgacgtgggcatggtgcctaccccggtgctgtactacgcggccaacgtgctcgagggcaagtccggggtgatgctgaccggcagccacaacccgccggactacaacggcttcaagatcgtggtcgccggcgagaccctggccaacgagcagatccaggccctgcgcgagcgcatcgagaaaaacgacctggcatccggcgtcggcagcgtagagcaggtcgacatcctgccgcgctacttcaagcagatccgcgacgacatcgccatggccaagccgatgaaggtggtggtcgactgcggcaacggcgtggccggggtgatcgccccgcagttgatcgaggccctgggctgcagcgtgatcccgctgtactgcgaggtcgacggcaacttcccgaaccaccatccggacccgggcaagccggagaacctgaaggacctgatcgccaaggtcaaggccgagaacgccgacctgggcctggccttcgacggcgacggcgatcgcgtcggcgtggtcaccaataccggtaccatcatctatccggaccgtctgctgatgctgttcgccaaggacgtggtctcgcgcaacccgggggccgacatcatcttcgacgtcaagtgcacccgccgtctgatcgccctgatcagcggctacggcggccgtccggtgatgtggaagaccggccactcgctgatcaagaagaagatgaaggaaaccggcgccctgctggctggcgagatgagcggccacgtgttcttcaaggagcgctggttcggcttcgacgatggcatctacagcgccgcccgcctgctggaaatcctcagccaggatcagcgtgacagcgagcacgtgttctcggccttcccgagcgacatttccaccccggaaatcaacatcaccgtcaccgaggacagcaagttcgccatcatcgaggcgctgcaacgcgacgcccaatggggcgaaggcaacatcaccaccctcgacggcgtgcgggtcgactaccccaaaggctggggcctggtacgcgcctccaacaccactcccgtgctggtcctgcgcttcgaagcggacaccgaggaagagctggagcgcatcaagaccgtcttccgtaaccaactgaaggcagtggattcctcgctgcccgtgcccttctga

SEQ ID NO: 330332 - DNA, 1071 bp, Pseudomonas aeruginosa
atgcacaacaatgccgccgatgcgcgctacgaactcgcccaggtatccaccttcctgctgcagacgctggccgaggtggtcgaaggccatggcgtcgatcccgcgcggctgtgccggggcctgggcttcaccgtcgaagacctgcaggaccctacccagcgcatctcctaccgccaggccgtgagcatgatccagcgtgccctccaggccctgccggagcggggactggggctgtgggtcggacaccagaacgtgctcggcacccttggcctgctgggccatgtgctgtcgctgtgccggaccctgcgcgacgcgttcgacatcggcgtgcgctaccagcacagctcgggcggtatcgtcacctccagcgtctaccagcagggcgacaccttcttcgtcgaggtcgaatgccacctacccagcagcgaggtgcaggtgttcgccatcgaggagttcttcgccagcctgctggtgtatgggcgtgccctggtcggcccggcgttcgaaccgctgggcatcgaactcatccatgccgctccgccctacgcgggcgagtacctgcgcctgctgggcccccaggtacgcttcggctgcctgcacaaccgcatggcgatcgccagccactggctggacatgcgcctgcccaaccacaacctgccggcgttgcgccaggcgctggccctgctggagcaggaaagcacccaggtgcaccggaaactcgacctggtccaggcggtggaacgggccatcgcccgcgacctcagcctgggcagccagatcgaaaggatttccgccgaactgaacatgagcagccgcaccctgcggcgccggctggccgaacacgggctgaccttcgaggcgttgctggaacaggtgcgacgagggcgggcgatgagcctgctgggcaaccccgggatgtccatcgaacgtatcaccgaggaagtgggatatcgtgatatccgcagtttcaggcgcgcgttcaagcgttggacgggagtgagcccggcgaccttccgtagcgagggcacgagcccgttggaccaggtcttcacgctggccgcgcgacgctaa

SEQ ID NO: 330333 - DNA, 1194 bp, Pseudomonas aeruginosa
atgtcccgtgattttcttcgttcgccgctggtcggcctgctcgcctgcctgctggcgctggtgatcgccatgggggtcggacgcttctccctgaccccgcaactgccgcacctgatccgcgaaggccagctcgacctgaccggcgccggcctgctggccgccgccaactacctcggctacctggtcggcgcgctggacgcgctgttcgcccgcgaagcgcggcaggcgcgcttgcgcctgctggtcgggctatgggcctgcttcggcctgaccctggcctcggtctgggccgagggcttctggccgcacgcgctgctgcgcttcggtcttggcgtggccagcgcctgggtactgatcatggtcaccgccctcagccagcgcctcgccgcggaaagcggtcgggcccggctgggcgcgctggtgttcgccggccccggcatcggggtgatggtcaccggcctgctggcggcattgggcaacgccctgggccaggactcggtgttcatctggaagctcttcgccgacctcgcgctggtcctgatcctcatgctcctgccgctgctgccgcgcccggccgcacgcagcgccggccacgacgcgcctgccacggcaagcgagaacgccggcctcggccgcctgacctgggcctacggactggtcggcctcggctacatcatcccggccacctttctctcgcagatggccgcggcgcgtttccacgggcaatggcaggccgacctgttctggccctgcttcggcctggcctcggccaccggggtagtgctgatcagcctgcgccggcagcgcccggacggcacccgccgctggctggtcggcgcgctctggctacaggccctcggcgtgctcgcctgtctgctgccggggatcggcggactggccctgggggtagtgctgaccggcctgccgttcctcgccggcatgcaactggtgatgcaatacgcccgcgaactggcgccgcatacgccgcagcgcaacgccggccaactgaccaccggtttcgccctcggccagttgctcggcccgctgctggcggcgctcagcacgcatttcgccggcggcctgcaaccggcgctggcgctcgccgggctcggcctggtcttcgccggcctgctgttgcgccggccgcactcgctcagcgtcgcagcaggcgtcgcagccactgctcgccgctga

SEQ ID NO: 330334 - DNA, 537 bp, Pseudomonas aeruginosa; identical to SEQ ID NO: 322540

SEQ ID NO: 330335 - DNA, 2049 bp, Pseudomonas aeruginosa
atgaagaaaatcaacgcaggcaatcttttcgcgggcatgcgcagcagctcggtgatcgcggggctgttcatcgtcctcatcgtctcgatcgtgttgctgttcgccaactttgcctacctcaacacccagtcgaaccatgacaagcagtacatcggccatgccggcgaactgcgcgtcctgtcgcagcggatcgcgaagaacgccaccgaagcggcggcgggcaagggcgaggcgttcaagctcctgaaggatgcgcgcaacgacttcgagaaacgctggaacatcctggtcaacggcgacgagagcacatccctgccgcccagccccgaagcggtgaagccgcagatggacgtggtgcagcaggactgggatggcctgcgcaagaacgccgactccatcctcgccagcgaacagactgtactgtccctgcaccaggtggcctcgaccctcgccgaaaccatcccgcagctgcaggtggaatacgaagaggtggtcgacatcctgctggagaacggtgccccggccgaccaggtcgcggtcgcccagcgccagtcgctgctcgccgaacgtatcctcggctcggtgaacaaggtgctggccggcgacgagaactcggtgcaggccgccgacagcttcggccgcgacgccagcctgttcggccgcgtactgaagggcatgcaggaaggcaacgcggcgatgagcatctccaaggtgaccaacgccgaggcggtggatcgcctgaacgagatcgccgaactcttcgagttcgtctccggctcggtggacgagatcctcgagacctcgcccgacctgttccaggtccgggaagcggcgaacaacatcttcagcgtttcgcagaccctgctggacaaggcctcgcaactggccgacggcttcgagaacctggccggcgggcgtagcatcaacctgttcgccggttacgtcctcggcgccctggccctggcctcgatcatcctgatcggcctggtgatggtgcgcgagaccaaccgccggctggccgagaccgccgagaagaacgaccgcaaccaggccgcgatcctgcgtctgctcgacgagatcgccgacctcgcggacggcgacctgaccgtggccgcgaccgtgaccgaggacttcaccggcgccatcgccgactcgatcaactactccatcgaccagctccgcgaactggtggagaccatcaaccagaccgccgtgcaggtggccgcagcggcccaggaaacccagtccaccgcgatgcacctggccgaagcctccgagcaccaggcgcaggaaatcgccggcgcctcggcggcgatcaacgaaatggcggtgtcgatcgaccaggtatcggcgaacgcctcggaatcctcggcggtagcggaacgttcggtagccattgccaacaagggcaacgaggtggtgcacaacaccatcaccggcatggacaacatccgcgagcagatccaggacacctcgaagcgaatcaagcgcctcggcgaatcgtcccaggagatcggcgacatcgtcagcctgatcaacgacatcgccgaccagaccaacatcctcgccctgaacgccgcgatccaggcgtcgatggccggggacgcgggccgcggcttcgccgtggtagcggacgaggtacagcgactggcggaacgttcctcggcggcgaccaagcagatcgaggcgctggtgaagaccatccagaccgacaccaacgaagcggtgatctcgatggagcagaccacctccgaggtggtccgcggcgcgcgcctggcccaggacgccggtgtggccctggaggagatcgagaaggtatccaagaccctcgcggcactgatccagaacatctccaacgccgcccgtcagcaggcatcgtcggccggccacatttccaacaccatgaacgtcattcaggagatcacctcgcagacctccgccggtaccaccgccaccgcgcggagcatcggcaacctggcgaagatggcgagcgagatgcgcaactcggtatccggcttcaaactgccggagggcgtggagcaggcctga

SEQ ID NO: 330336 - DNA, 1872 bp, Pseudomonas aeruginosa
atgggtgaccggcacgactacgtcgctctggaatgggtgaaaggcgagatcgccgaaaccctgaaacaggcgcgccaggcgctggaagcgttcgtcgagaacccgcaggacccgacccgcatgcggttctgcctgacctacgtgcaccaggtgcagggcaccctgcagatggtcgagttctacggcgcggccctgctcgccgaggaaatggagcagttggtccaggccttgctggacggtcgcgtgccgaaccagggcgaggccctggaagtgctgatgcaggcgatcctgcaactgccggtctacctcgaccggatccagaccgcccggcgcgacctgccgatggtggtcctgccgctgctcaacgacctgcgcgccgcgcgcggcgagaagctgctctcggaaaccagcttgttcgcgcccgacctgtcgcagcgccagccgcaactggacggcgaggccatcgcgcaactgcgcaccgacgaactcggcggcttgctgcgcaagctgcgccagacccagcagatggccctggtcggcctgctgcgcaaccaggacgtggcgaccagcctcggctacctggcgcgtgtctatgcgcgcctggagggcctgtgccgcgaggcaccgctggggccgctgtggagcatcgcttccggcctggtcgagggcctggccaacggtagcgtggtcaacagcgcctcggtgcgcaccctgctgcgccagctcgaccgcgaactcaagcgcctggtcgagcagggcgccgacggcctgaaccaggccgcgccggacgagctggtgaagaacctgctgttctacgtggccaaggcgccttcgcagtcgccgcgaatccgcgcactgaaggaacagtaccgcctcgacgaggcgctgcccgaccacgagacggtggacgccgagcgcgcccgcctcgccggacccgaccgcgacgcgatgcgttcggtggtcggtgcgttgtgcgaggaactggtgcggatcaaggacagcctcgacctgttcgtgcgcagcgaccgtggccacccctcggaactggacgccctcctggcgccgctcaagcagatagccgataccctggcggtactcggcttcggccaaccgcgcaaggtcatcctcgaccagttggacgtcatccacgccctggcccagggccgccgcgagccgagcgacgcgatcctgatggacgtcgccggcgcgttgctctacgtcgaggccaccctggccggcatggccggtcccggcgacgagcgcaacagcgaggaaagccgcctgcccaccaccgatgtggcgcagatccaccagttggtgatcaaggaagcgcgcaacggtctggagcaggccaaggacgcgatcatcgagttcatcgcctcgcagtggaaccacgagcacctggcccgcgtgccggagctgctgacccaggtccgcggcggcctggcgatgatcccgctggagcgcgccgcgaccctgctggaaacctgcaaccgctatatccaggaacagctgctggcgcgcaaggcggtgccggactggcagagcctggataccctggccgatgccatcaccagcgtcgagtattacctggagcgcctgagcgaggaccatgccagccagagcgacctgatcctcgacgtcgccgaggacagcctggcgaacctcggctatacgctgaaaccgaattcgtcggccccggccgagcccggcctgtccgggcccgctgccatcgagtccccggctgccgagccggagaggccggaggcggtcgtcgaggtcgccgagacagcggagcaaccgcccgccgacacggctcctgccgaggcggcgaggggagatgccccgctgctggccagcgacgacaactga

SEQ ID NO: 330337 - DNA, 657 bp, Pseudomonas aeruginosa
atggctcggccgaatccctggggcagccccggcggcccgcttccggcacagtttgccaacagcttttccacaggaaacccgctgaacgggaatgcccgtgaaaatgtctccaggacttcctctttagacgccaggaagcccatgaatactgggttttccggctttccaggaaagtccgcggcgatcgacggaagcctgctcggcggcgctatgggtggatccgctgtccacagtttcgcgatgcaccgtcgtggcgcattccacagcaccttttccctagctctttcgccaaccgggagaaatcctgtggctccgtccaatgcctttcccccgaccgccgaaggcattttttcaacggggaatgcgaacagcttttccacagacaaacccacagaagcgccagttgccgaccgggcatttcgcaaggcggactcaaggtgccggaacgcttttcgcggatcgcctgccggcagccagatgggcacatcccgcaatggctcgtgcaatctctccgaacacgcgctacacacagacttatccacagcatgcgcacagtgcataatggcggaagcgagatcacgcgccaaagacgggatatttccgtcgatttcccggactaaagaggcgaaagcgccgttccggcagcagaggagatga

SEQ ID NO: 330338 - DNA, 1545 bp, Pseudomonas aeruginosa
atgaaggccatctactggaacgatgccgaccagggcaccagctaccgcgaggaggagatcccggcggagctgcgggcgctggccgaggagtggcgggcgcacatggtcgaggccgccgccgaggccaacgacgaactgatgaacaagtatctggaaggcgaggaactgagcatcgaggagatcaaggccgggctgcgccagcggaccctggccaaccagatcgtaccggcggtgctcggctcctcgttcaagaacaagggcgtgccgctggtgctcgacgcggtgatcgactatctcccggctccgtcggaaatcccggcgatcaggggcaccgacccggacgacgaagagaagcacgacgagcgccatgcggacgacgacgagcctttctcggcgctggcgttcaagatcgccaccgaccccttcgtcggcaccctgaccttcgcccgcgtgtattccggggtgctgacttccggcgacgcggtgcttaactcggtgaaaggcaagaaggagcgggtcgggcggatggtgcagatgcacgccaaccagcgcgacgagatcaaggaagtgcgcgccggcgacatcgccgcgctgatcggcatgaaggacgtgaccaccggcgacaccctgtgcgccatcgacaagccgatcatcctcgaacgcatggacttccccgatccggtgatctcggtggcggtggaaccgaagaccaaggccgaccaggagaagatgggcatcgccctgagcaagctggcccaggaagacccgtcgttccgggtgaagaccgacgaggagaccgcgcaaaccatcatttccgggatgggcgagttgcacctggacatcatcgtcgaccgcatgcgccgcgagttcggcgtcgaagccaatatcggcaagccgcaggtggcctatcgcgagaccatccgcaacacctgcgagatcgagggcaagttcgtccgccagtccggcggccgcggccagttcggccattgctggatccgcttcgctccggccgacgaggggcaggaaggcctggagttccacaacgatgtggtcggcggggtgattccccgcgaattcatcccggcgatccagaagggcatcgaggaccagatgcagaacggcgtgctcgccggctacccgctgatcggcctgaaggcgacggtgtacgacggctcctaccatgacgtcgactccagcgagatggcgttcaagatcgccgcctcgatggccaccaagcaactctcgcagaagggcggagcggtgctcctggagccggtgatgaaggtcgaggtggtgaccccggaggactacatgggcgacgtgatgggcgacctcaaccgccggcgtggcctgatccagggcatggaggataccccggcggggaaggtgatccgtgccgaggtcccgctgggcgaaatgttcggctatgccaccgacgtgcgctcgatgtcccaggggcgcgcgagctactcgatggagttcgtccgctatgccgaggtaccggccagcgtggccgaggcgatcgtcgccaggcagggccgctga

SEQ ID NO: 330339 - DNA, 1455 bp, Pseudomonas aeruginosa
atgctgtcgaagcgactcctcgttgtactgatcagtaccgacctggtggcaggctgcgcggttggccccgattaccagcgtcccgagatttccctgtccgagcgcttcctggggcaggaggctgtcgagcagcggcctgtgagttccatgggcgatttgatcgattggtgggcgggctttggcgacccgcaattgactcgcttcgtaacgctcgcactgcagcagaacctggatctggcccaggccgaggcacgtatcgcccaagcccgcgccggcctgggtgcggccaatgcggcactgttgccgtccggctccgtcagcggccaggcggcacgcgcctaccaatcggtggagacgccgttgggccaggtactcgattccacgccaggattcgaccgctatggcaacagctatgaagccgatcttggcgccagttgggagctggatgttttcggaggtcggcgtcgtgatcgcgaggctgcgctggcggaatatcaggcctcgcaggcgggagtcactgctacccgactggctatcgcagcgcagaccgccgatacctacatcagcattcacggcctgcaaacccgtatcgccgtggcacgtcagcaggtgaagacgcaacaggaactggtggccaccatcgagttgctgcaaggccaggggctggctgccgaattgcaggtgcatcaggcccacggcgcactggctcaggtaagcgcctcggtaccggtgctggagaccggattggatgctgcgatgaacgctctcgacgtgctgcttggtgcgcaacctggcacgtatcgcgccgagttggtcgggagcgaggctatcccgatgacaccgcagatcgctgcgagcggtacacctggcgacctgctgcgtcgtcggcccgacctgatcgtcgctgagcgtcgcctggctgcttcgaacgcccgcattggtgcggccattgccgagtactacccgaagttttcgctgagcgggctgatcggcagtgccacgtcggtgtccgatggcaacctgttcagcagcggcgccagccagatgagtggtgtgctggggctacgttggcgcctgtttgacttcggccgcatcgatgcccagatcgacctggccaaagggcaggaagccgagcaactggcggcttaccgcctcgccgtgctgcgcgccaccgaggacgtggaaaacgccttctcggcactggtcaagcgtgagcagcaagccaacgtgcttgagcagggcgtggattcgctcagccgcgcgcggcaggcatcgttcgaggcctaccagcagggcgtcgtcagcttgatcgaagtgctgcaggccgacgacaacctgctgcgcgccgccgatgcccgagcccaggcgcaaaccgagtcggcccgcactggcgttgcggcattcaaagcgttgggcggtggctggaaggtgcccgaggcgcttgcggccaagtga

SEQ ID NO: 330340 - DNA, 291 bp, Pseudomonas aeruginosa
atgctcaacctgacctggatgcggccgttcaaggtcggcaaccgtgcggcgaagttccagggcttcgtcaactacgtgggagagaagggcgaggactacaacgacaaggacaccgcggcggaaaccctggtccgcaccgccctgatggtcgccgccctgccaggcgacaagcgccagccgaacctgtggctcggcgtcggctacgagtattggcacaacaagttcggcgtcgacggcggcaccggcagccgaacctcgacgccgacgttgaacatggaattcaccttctga

SEQ ID NO: 330341 - DNA, 192 bp, Pseudomonas aeruginosa
atgcagaagtccaaccccttcaatcaccccggacagagctacggcgccgtagacgtcgatagccgactccgcgccattgccggcttcgacctggagcaatgccgcgccgcgctcgcggtcaccggcctccagaagatcgtcgagaagaagctgcacacccgcattcgtcagctcgaaaaggaggcgcagtga

SEQ ID NO: 330342 - DNA, 270 bp, Pseudomonas aeruginosa
atggccgtatacaccatcaccctcagtgacaccgaaggcggagtagatttctccatgcaaggcctgccgctgcacgactccgaagcatcgaagatcgcctatgcccttatgcaagcgacgatgtccctcggccaggaactcgcaaagcagaacggaactggtaacggcgtttcctgcgcctgcgacgagtgcctggcgcgccgcgctcgcggcgagggaccgcaacgggaaatacaccccaccaaggccaagaaccgcaccgtccattga

SEQ ID NO: 330343 - DNA, 501 bp, Pseudomonas aeruginosa
atggcgcacccgaaggaaacccgcgacgccctgcgccgcgcctacgtcctcgaccgccagtccctggaggtcgcggccgccatgttcggcgtctcctatggcaccgctcgccgctggaaacagcaggcggaagccgagggggacgactgggacaaggcgcaatcggcgcagttgctggccggtggcggactggaggacgtggcgcgccaggtgctggccggcctggtgacccagttccaggccaccatggaggcgatccaggtggacagcgcgatcacgccagcggtcaaggtgcagatgctcgccagcctggccgacgcctacaacaagtcgatcagcgcatcgaagcgggtactaccggaaacctccagcctggccaccgcaatggaagtcatccagcgcctggcggccttcatacgtgaacagttcccgcagcacgtccaggccttcgccgagattctggagccgttcggggaagtagtcgctaaggggctgaaatga

SEQ ID NO: 330344 - DNA, 1689 bp, Pseudomonas aeruginosa
atggtggatcaccagcaacaaccgctggctgccgtctccgagcgtcgccagcagcgcgcgcaacagtggcccgcggcccaggtcgagactgcgctgggcctgctccgccaaggcttccagcgcttggccgtcggcgaccgactgctgccacaacaacgcctcgccggcctcgaccgcgcggtgttcggcgcaccaggtcccgtcttcgaggcggaagcccaggcgcaacgcatcgtggtgcgccagcaaggcctgcagcgccgtttccagaagcgtaccgtcgagcgcctgccccggctccagcaggaccgactggttccagtgctggcgccgcgggatatccagttcgaagaacatctgctggatcggcagcagcggcgtgctcccgctgatcggcccctgttcggcgctggccaagccgcgaccctcgacggccacgccggccaggccccggatcgtctggtgcaggaacaggtccctgggcgccagccggatcccggcctggcgcgcgcggctgaccacctggatggaaatgatcgagtcgccgccaagttcgaagaagttgtcgtccaggccgacgcggccaagcttcagcacatccgcccagatcgccgccaggcgctgctccagctcgctgcgcggcgcggcatagtcctgctgcaggcggctggcgtccggggcgggcaaggcgcgccggtccagcttgccgttggccgtcagcggcagacgctcgaggaacagcaagtgggcgggcaccatgtgctccggcaggctcgccttcaaggcctggcgcagcgtgtcgcgcaacgcggcggggtcgcttggcgccgcctgcgtcacgacatagccgaccagttgcgtagcgcccggcccctcgtgaggcagcacgaccgcctcggccacgcccggctgtgcgagcaggcgggcctcgatttcgcccagttcgatgcggaagccgcgaatcttgacctggtggtcgatccgaccgacgtactcgaccaccccgtcgcaacgatagcgggccaggtcgccggtccggtacagacgtcccccagtcgtggagaacggatcggccacgaagcgcgtgcaactcagctcggggcgattcagatagccccgcgccaatcccgcgccccccacatacagctcgccgatgcagcccctgggcacagggttcagcccggcgtcgagcagataccaggacaggtccgggatcggttcgccgatcggactggccgccccgccgtcgagatccgccagcgacagcggacgataggtcacgtgcaccgtggtctcggtgatcccatacatgttgaccaggcgcggcgctcgatcgccgaaacgctcgaaccatgggcgcagggcctgcacttccagcgcctcgccaccgaacaccacatgccgcagggccagcggcggaacctcctggccggcgcaggcgacctgcatcagttgcttgaaggccgacggcgtctggttcagcaccgtcacccgttcccggcacagcaggcgcaggaagtcctctggcgaacgactggtctcgtgcgggacgatgaccagcctgccgccatgcaacaacgcgccgaagatctcccagacggagaaatcgaacgcgtaggagtggaacaggctccaggcgtcgtccgcggagaaaccgaaccagtgccgagtggcatcgaacaggcgtag

SEQ ID NO: 330345 - DNA, 9567 bp, Pseudomonas aeruginosa
gtggtgctggagagcgagggcggcgactggcgcgaagccctggccgcgcacctggcgaaaagcctgccggaatacatggtgccggcgcagtggctggcgctggagcggatgccgctgagtccgaacggcaagctggatcgcaaggcgctaccggcgcctgaagtaagcgtggcgcaggcaggctacagcgcaccgcgcaacgcagtggagcgaaccctggcggaaatctggcaggacctgctgggcgtcgagcgggtcggcctggacgacaacttcttcagcctcggcggcgactcgatcgtctcgatccaggtagtcagccgtgcgcgccaggccggattgcaactgagcccgcgcgacctgttccagcaccagaacatccgcagcctggccctggcggccaaggcgggtgcggcgacgacggaacaggggccggcaagcggcgaggtggcgctggcgccggtacagcgctggttcttcgagcgggcgattcccaaccgccagcactggaaccagtctctcttgttgcaggcgcgccagccgctcgacggcgaccggctggggcgtgccctggaacgcctgcaggcgcagcacgatgccctgcgcctgcgtttccgcgaagagcgcggcgcctggcaccaggcctacgccgagcaggccggcgagccgctgtggcgccggcaggcggggtccgaggagacgttgctggcgctttgcgaagaagcccagcgcagcctcgacctcgaacaggggccgctgctgcgtgcgctgctggtggacatggccgacggcagccagcgcctgctgctggtcatccaccacctggcggtggacggggtgtcctggcgcatcctgctggaagacctgcagcgtctctatgccgacctcgacgccgatctcgggccgcgtagcagttcctaccaggcctggagccggcacctgcacgaacaggccggcgcgcgcctggacgaactcgactactggcaggcgcaactgcacgacgctccgcatgcgctgccatgcgaaaacccgcacggagccctggaaaaccgccatgagcgcaagctcgtcctgaccctggacgccgagcgtacccggcagttgctgcaggaagccccggcggcctaccggactcaggtcaacgacctgctgctgaccgccctggcccgcgcgacctgccgctggagcggcgacgccagcgtgctggtgcagctcgaagggcacggccgcgaggacctcggcgaggccatcgacctgagccgcacggtgggctggttcaccagcctgttcccgctgcgcctgactccggccgcggacctcggcgagtcgctgaaggcgatcaaggagcaactgcgcggcgtgccggacaagggcgtcggctacggcctgctgcgctacctggctggagaggaggctgcggcccgcctggccgcgctgccgcagccgcggatcaccttcaattacctgggccggttcgaccgtcagttcgatggggcggcgctgctggtaccggccacggaaagcgccggcgccgcccaggatccgtgcgccccgctggccaactggttgagcatcgaaggccaggtctacggtggcgagctgagcctgcactggagcttcagccgggaaatgttcgccgaggcgaccgtccagcgcctggtcgatgactacgcgcgggagctgcacgcgctgatcgagcattgctgccaggagggcaacgtcggtgccacgccgtcggacttccccctcgcgacgttgcgccaggagcagttggatcgcctgcctctggcgcggatcgaggacatctacccgctgtcgccgatgcagcacggcatgctgttccactcgctctacgagcaggcttccggcgattacctgaaccagctccgagtcgacgtccatggactcgatcccgcgcgcttccgcgccgcctggcaggcggcgctggacagtcatgacatcctgcgcgccggcttcctctggcagggcgatctggagcagccgctccaggtgatccacaaacacctcgaactgccgttcgccgagcatgactggcgtggtcgcgaagcgctcgccgaggctctcgacgagctggccgcgagcgaacgccggcggggtttcgagctggagcaggcgcccttgctgcggctggtcctggtgcgtatggacgaagagcgctaccacctggtctacacccaccaccacatcctgctggatggctggagcagcgcgcagctgctcggcgaggtgctcgctcgctacaccggcgaacaggccgagcgcacgggtgggcgctaccgcgactacatcacctggctgcaggcacaggacaagcgcgtcagcgaagcattctggaaagaacaactggcggaactgctggagccgacacgcctggcccaggcggtcgccgccgagcgcgagcaggtcggcagcggccagttccagcgcagcctgccgccggcacgcaccgcgcgcctgaagacgttcgcccagcggcacgcggtgaccctcaataccctggtgcaggccgcctggtcgctactgctgcaacgctacaccgggcaggatacggtggtcttcggcgccaccgtcgccggccgtcccgccgaactggccgggatcgaaaggcagatcggcctgttcatcaataccctgccggtggtcgccacgccgcaaccgggcatgcgcctcaccgactggttgcaggaggtgcaggcgcgcagcctggcgctgcgcgagcaggagcacacgccgctgttcgagatccagcgttgggccgggctcggcgaggcgctgttcgacagcctgctggtattcgagaactaccctgtggccgaagccctggaaaagggggcgccaggcggcgtgcgcttcggcccggtgagcaatcatgaacagaccaactacccgctgaccgtcgccctgggcgtcggcgacagtctgtcgctgcaatacagctatgaccgccaggcgttttccgatgccgcggtcgagcagttggaccggcacctgctgaacttgctcgaaggcttcgtcgacaacgccgaacggactctggtcgagctgagcctgctggatgccgaggagcgcgcgctgatcgattcgctgtggaaccgcagcgagtcgggcttccccgcttcgccgctgatccaccagcgggtggcggagcgcgcacgcctggccccggacgcgccggcggtgctgttcgacgaccaggtgctgagcttcgccgagctggacagccgggccaatcgcctggctcacgcgctgatcgcccgcggcgtcggtcccgaggtgcgggtggcgatcgccatgcagcgcagtgcggaaatcatgattgccttcctcgccgtgctgaagtccggcggcgcctacgtgcccctggacatcgagtacccgcgcgaacgcctgctgtacatgatgcaggacagccgcgcgcacctgctgctgacccagaaccacctgctcgaccgactgccgattcccgacggactgtcctgcctgtgcctggaccgcgaacaggagtgggccggtttccccgcccatgatccagaggtggcgctgcatggcgacaacctggcctacgtgatctacacctccggctccaccggcatgcccaagggcgtggcagtgtcccacggcccgctggcggcgcacatcgtggctaccggcgagcgctacgagatgaccccggcggactgcgagctgcacttcatgtcgttcgccttcgacggctcccatgaaggctggatgcacccgttgatcaacggtgcgcgggtgctgatccgcgacgacagcctgtggctgccggagcagacctacgcgcagatgcatcgccacggcgtcaccgtcgcggtgttccctccggtctatctgcagcaactggccgagcacgccgagcgcgacggcaacccgccggcggcccgggtctactgcttcggcggcgacgcggtggcgcaggccagctacgacctggcctggcgcgcgctacgcccgcaatacctgttcaacggctacggaccgaccgaaacggtggtcaccccgctgctctggaaagcccgcccggacgacccctgtggcgccgcctacatgccgataggtacgctgctgggcaatcgcagtggctacatcctcgatgcccagttgaacctgctgccggtcggtgtggccggtgagctttaccttggcggggaaggcgtggcgcgcggttacctggagcgtccggcactgaccgccgaacgtttcgtgccggatcccttcggcgcgcccggcagccgcctgtatcgcagcggtgacctgacccgtgggcgggcggatggcgtggtggactacctgggacgggtagaccaccaggtgaagatccgcggtttccgtatcgagctgggcgagatcgaggcacgcctgcgcgagcaggcggcggtgcgcgaggcggtggtggtcgcccaggcgggtgccagcggccagcaactggtcggctacgtggtcccgcaggatccggcgctggtcgaggatgccggtgcccaggcggcctgccgcgacgccttgcgcaaggcgctgaaggaacgcttgcccgagtatatgttgccggcgcatctgctgttcctggcgtgcatgccgctgacccccaacggcaagctggatcgaaaggccctgcccaagcccagtgccgaccagcagcaacgcgactaccaggcaccgcgcagcgaagtggaaagacaactggcgacgatctgggcggaggtgctgaagctggagcaggtcggcctggccgacaacttcttcgagatcggcggcgattccatcatttccctgcaggtggtcagccgtgcgcgccagctcggcatccatttcactccgaagatgctcttcgaggcgcagaccatcggtgccctggctccgctggccgagagcggtacgcaggtgctggcgatcgaccagggaccggtgaccggcgtcacgccgttgctgccgatccagcagggtttcttcgccgaagaggtcgccgagcgccactggtggaaccagtcggtactcctggaagcccgcgagccgctcgatgcccggcaccttgagcaggccctgcggggcgtgctggcgcaccacgatgcgttgcgcctgtccttcacccgcgaggcggccggctggacggcgcgccaccggggtgtggaagagggcgctgcggcgctgctccgcgtcgctcgggtcgccgacctggcggcgctgcgggcgcttgccgacgaagtccagcgcagtctcgacctggccgatgggccgttgttgcgcgccctgctggcgactttcgacgacggcagccagcgcctgctgctggttatccaccatctggtagtggatggcgtgtcctggcgtattctcttcgaagacctgcagaccgcctaccggcagttgctggcgggtcaggccgtcgagctaccggccaagaccagcgccttcagggattgggccgagcgcctgcgggcgtttgccggtgacggcggcctggatggcgaactggcgtactggcaagggcaattgcagggcacctccagcgacctgccgtgcctcgacccgctgggcgaccagagcaaccgccatgcccgttcggtcagttgcggactggacgccgaggcgacccggcaattgctgcaggaagcgccggccgcctaccgcacccaggtcaacgacctgctgttgaccgcgctggcgcgggtgatctgccgctggaccgggcaggtcgatgcgttgatccagttggaaggacatggtcgcgaagaactcttcgccgagatcgacctgacgcgcacggtgggctggttcaccagcctgttcccgctacgcctgacgccggccgagggcatcgccgcatcgatcaagggcatcaaggagcaactgcgcgcggtgccgaacaagggcatcggcttcggcgccctgcgctacctgggcagcgcggcgagccaggcagccctggccgggttgccggtgccgcgcatcaccttcaactacctcggccagttcgacggcagtttcgccatggaggagggcgcattgttcgttccggccggcgagcgtgccggcgacgaccagagcccggacgcgccgctggccaattggctggcgctgaacggacgcatctatggcggcgaactacgcatcgactggagcttcagcggcgagcgcttcgaaatcgccagcatccagcgcctggccgacgcctatcgcgacgaactgctggcgctgatcgcccactgccgcgtggccgagggccagggtctgacgccctcggacttcccgctggcgcgccttgaccaggcgcgtctcgaccaattgccgctggcgccctgcgaagtcgaggacctctacccgctatcgccgatgcagcagggcatgctgttccacagtctgtaccagcaggaggccggcgattacatcaatcaactgcgggtcgacgtcgacggtctgcatccggagagcttccgcgcggcctggcaggcggcgttggacgagcacgatgtgttgcgcagcgggttcctctggcagggcgccttcgagacgccgctgcaggtagtgcgcaagcgtgtcgaagtgccgttcagcgtacttgactggcgcggtcgcgaggacctggcggcggccctcgacgagctggctgccggcgaaggccggctgggcttcgacctgagcgaggcgccgctgttacgcctggtactggtgcgcacggacgaagagcgctaccacctgatctacaccaatcaccatatcctgatggacggctggagcaactcgcagctgctcggcgaggtactgcagcgctaccgtggcgaaacgccgccgcgctccggcggccgctatcgcgactacatcgcctggttgcagcgccaggacgccgcgctcgccgaggccttctggctgccgcgcctgcgccaactggacgagccgacccgcctggggcagtcgatcgcccaggccaggcagcgcggcaagggctacgcggaacggttgcgcgagctcgatggcgagcagacccggcgcctggccgagctggcccgcgagcagaagatcaccgtcaataccctggtccaggccgcctggctgatgttgctgcaacgctataccggacaggacagcgtggccttcggcgctactgtcgccggtcgcccggcggaactgaacggtatcgaggagcagatcggcctgttcatcaataccctgccggtcatcgctaccccgcttccgcagcagagcctggcgtcgtggctgcaggcggtgcagggcgagaacctggccctgcgcgaattcgaacacacgccgctgtacgacatccagcgctgggccgggcagggcggcgaggcgctgttcgacaatatcctggtgttcgagaactaccccgtttcgcagatgctccagcagcaggcctcgcaaggcctggctttcggtgccgtgggcaaccacgagcagaccaactacccgttgaccctcagcgtaagcctggggcagcgcctggaactgcagttcgcctatgaccgcgagcatttcgacgacgccagcgtggcgcgcctggatcgtcacctgacgcacctgctggcgcagatggtcgagcgtccggccagcacctgcctggccgagttccagctgctggaagcagcggagcggcgccaggcgatcttcgactgggggcgcaacccgggacgctatccggacgagcgcagcgtcgagcagctgttcgccagccgcgcggcgatggagcccgagcgggtggcattgctcttcgaggagcgccagctgagctacggcgagctcaacgcccaggccaaccgcctggcccaccgcctgatcgagctgggcgtggggcctgacgtgctggttggaatcgccgtcgagcgcgggctggaaatgatcgtcagcctgctggcggtgctcaaggccggcggcgcctacgtaccgctggacccggaatatccgcaggagcgcctcggctacatgatcgaggacagcggcatcgccctgttgctcagccagagccacctgctgcaacgcctgccagcggcctccgggatcgcctgcctggcgctcgaccaggcgcgggactggcaggaccgtccggcgagcgacccgcagttgcgggcgcatccgcagaacctcgcctacgtgatgttcacctccggttccaccggccgtcccaagggcgttggcatcagccgagagagcctgtcgcggcatacccacgtttcgctggcgttcttcggcatcgggccggacgaccgggtgctgcaattctccaccttcaatttcgacggcttcgtcgagcagctctacccaccgctcgcctgtggcgcctcggtggtgctgcgcggcaccgagatctgggacagcgagacgctgtaccgggagatcgtcgagcgacgcatcaccacggtggacctgactaccgcctactggaacatgctggccaaggacttcgccaaccagggcgtgcgcgactacggcgcgctccgtcaggtccacgccgggggcgaggcgatgccgccggaaagcctggtggcatggaaggccgccgggctggagcatgtgcgcctgctcaacacctacggccccaccgaggcgaccgtcacggtcaccaccctggattgcgcgccctacgtcgacggcagcaaggcgatcccggcgaccatgccgatcggcaaggtgctgccgggccgcgccatctatctgctggacgatgccgggcaaccggcgccggtcggggcggtcggcgagctggtgatcggcgccgagctgctggcgcgtggctatttcaagcgtcccgacctgacggccgcacgcttcattcccgatccgttcgacgagcagggcggcggccgcctgtaccgcaccggcgatctggcacgctacggcgccgacggggtgatcgagtacgtcggccgggtcgaccatcaagtcaaggtccgtggcttccgcatcgaactgggcgagatcgaggcctgcctcggcgagcacccggcggtgcgcgaggccctggtcatcgccgtcgagggtgctgccggggcgcagctggtggcctatctggtgccgcaagcggaagcgctggctagcgccacgctggaggtacaggccacgctgcgcaacgagctgaaggccctgctgcgcgacagcctccccgaatacatggtgccggcgcacctgctgttcctcgaacgcctgccgctgagccccaacggcaaggtcgaccgcaaggctctgccggcgcccgacgccagtctccttcaggaggcctacgtggcgccgcgcagcgagctggaatgccaggtcgcggcgatctggcaggaggtgctgaaactccagcgggttggcctcgacgaccatttcttcgaactcggcgggcactcgctgctggccatcaacgtgatttcgcgcattcaactggagctgggcatgaagctcaccccccaactgttgttccaattcccgaccctggggcttttcgtcagcaatctggaaaaggccggtgggcaggtcgacacatcgaaactgaacaagctggaagccctgcttgatgaaatggaggaagtttga

SEQ ID NO: 330346 - DNA, 276 bp, Pseudomonas aeruginosa
atgcatctggtcgcaaccatgcgcggcaagcgctttcgggatggcgttgaggaggagtttctgggcggctttatccagctcgcgaacaacgggcagccggtcagtaaggtgtcgtttgacgacctgcgtactgcgggctattcgatcacttgggaatcgccgacggtcgtttcgctgacgtacaagggcttcgatatcggttacgtggtaacggatatgccgctggtatccgcagcaaaggacatcgcagtaaccacgcctgtgcaggcgccttga

SEQ ID NO: 330347 - DNA, 822 bp, Pseudomonas aeruginosa
atgcttcttttcccgcgtaacgttccacgtcgacagacagatgacgatcaggaagcacagcgcagcacctttgaacggccagcgcttccagatcggcacaatgtcattggcggccagttcctggcctgcggccgaagaccgcgtatgcgacttccagaatccgtagaactgtttctgatactcccggatgctggtattcacgacctcaccgcgcagaccgtcctggaccttgcggatatagcgatcattggtgccgaaagctgtggctttcttacagcgatacacgacctggacaagatcacgaattgcacggttgatcttgccgtaactctgagtgatcaacagcacatcagccagttcgtgacgatgaagcgaataccactcttcaaccggcacaggcgtgccgcgcagcggtatcgaaaggtgacattcatcaatcacatacagcggaccgaatccttcatcaggatgccgccaagggtccgcataatgatcaaccctactaaacgggcgtactaccctactctcctcctcgccactctcattgttgaacacctcaacagtagaatcccgaagctcgatcaaatgccaagactccggaaaaaacgccttgaacttatccatatccaaggccaggttcgtgatgacctttcgcccttgattcaacgcaggaacaacatgatagacaacagcctcatgagactttccgccaccaggctgccccaggatcaagttaatcattacgacccccagcggacaaacgggatagtttgtaacaggaatcggacgaccagagcgccgacaataagcgttatagcctga

SEQ ID NO: 330348 - DNA, 1377 bp, Pseudomonas aeruginosa
atgggcatttatcgccggtatgcggcagcgtttctagcattcgcgttttttctctcctctgaagtttcgtattccgcgactcgaaagagcgtcaccgtgcctagtgcaagtcttgttgcgcgcggtggcggctctccttctgtttctggtccatctttaaagattcctggccagcctggtgttgaatatatccctcgttctggcggcggggcttctggtgttccgataaagatcatcccgacgattgatttctctatcccaaggactattaaaggcagtgtttcttcgctcaagggtggaattgctggtgttgctgcaactgcggccatgtcaatggctcttgatagtatcgggggctttattgacgagaatggcaagccggttaagaaagtaagtgacgccccttcaggggccgttgcgggcgtttattacactagaccgccacaaaatgttggcggtgtttatcttgatcttaagtatgggttaactcgtcaacaggcttgcgaatatgaggttactcagagtggcaactgtgtaattagaattaatggcattgtgggttcttctattatttacgctaatagttgtgaccctggcgtgtggtttaatgtttcaactggcaagtgcgatagtttgtggaagcctggcgagcatatagagtcgttgactgatccggattatgacgatattacggattcgctgtctggtgtggttgatccgaattggcttaaagatttgctaacggcgacgtgcgaagggtctttgaatcctgccgcgtgctatgagcagatgtctgaaaccacgcatcttagcggaccttcatcggtaaacggacccaagacctcgacgacgacgacgaccacgaatcctgatggcactaccagtacgacgacgaaggacactcaaactaagtatgagattaagtatggcgataactatatcgactatacggaaacgaccacgaccacgaccacgaaagacggtgataaaaccgaagagacgactacgaccgacactgatgacgtgacggcagaaattcctcccgaagagaaagaggaggagggcggtagttttgaagatgccgaatttccggaagttaagccgttctatgagcaaaaatatgaggatgggttagagggtgtatggcgtgacaagcgcgccgaatttgaagatacggaatttatgaagtttctccaggggttcatcccgtcgttttcggggcggtgtccggcatttgggctggatatgaatattgcttcctgggcgaactatggttatcagcaattcgggtctatctgctatgtgcttgatttcgtgaaggcgattcttatggtttcggccttgttcttgtgtcgcgctctgatttttgggggttga

SEQ ID NO: 330349 - DNA, 135 bp, Pseudomonas aeruginosa
atggctgatattttcggtgcggtagacttttccagcgtttccacctgggtcgtaagtgccggtgttgcgatcatcggtattgcgatggcgttcaaagggatcgatctgggcaagcgcggcgttaagaaggcctaa

SEQ ID NO: 330350 - DNA, 264 bp, Pseudomonas aeruginosa
atggctatcgagatcaaccgccagtcgtacatggctctgcgctcggccctggagctggaactgctcgatgccggcatcgactcgccggacctgctgagccggcttatgcgccacgtgcttgccaccgaatccgcgacccgtaccgagtcgcaaaccgttcgccgggccttcgtcacggcccgtagaaacccgctgctgggcgcaatccctcagcactcccaggggcgcacaaatcgcccgtatatccgtaagaggaaaccctaa

SEQ ID NO: 330351 - DNA, 177 bp, Pseudomonas aeruginosa
atgaacatgaaaactcgcatcttcctgcgcacgctgcgcttcgttgcctacaactggtggcttccgttcctgctgggcaatgtttccgcgctggtcggctttgccttcactgctgatctgatcaatgacgcgttcgtctcgtcgctcgaaacggtggtgcagtcatgcgcacggtga

SEQ ID NO: 330352 - DNA, 708 bp, Pseudomonas aeruginosa
gtgctcgcctacctgcgcggcctgtctacccagcgtattggccattccgttggctacctgtatccgaatggccgcactgtcgattggactgctgccggcaaaaggaaaggtggtgtccgcctccagtatcgaaaggcgtacgacaaagcctttgaaatgggcgagcaccttcgcccgcgcgttctgcgcatgttcggcgatgaatcgccagagctggcctacgtggaccagctgatttcgtactgcaaccagcatggcgttgtgcggcaagaacaggaactgaaacaggagttcctgagccgcgagggtcttcgctactggggccttttcaacgaaaaacgtctccgcgatatacacgatgaatttctggcggtggacaagaaactgaaggtaacggccatggaccttgcgaccatttcccagcaactgattgccgaaggtgttgttaccagcacctacgcggccaacatgaccgcgatggtcgctatcaattggagcaacgggcagcctttcgacaagaacaaccggtccctccagaagcatcgcgcacgtcttcgccagatcggtatcgacatcgctaacccttgcgataccagccgcttcacgcccgttatcgtgcgccaggctcgcgaggtcaccaagacttacgaccttccgattccggactggtatcgccgtcctgtcggtcatctgcggttggtggcctga

SEQ ID NO: 330353 - DNA, 330 bp, Pseudomonas aeruginosa
atgacccttgcagcaaacctgaaaaaatttcgggccgcccgaggcttgacacagcagcaggtgtacgaggccgcaggcgtgagcaaatcaagctatacgggctacgaagcgggccatggaatgccgtccgcagacaaagccctggccatggccaaggtattgggcgtgaccacagacgaactcttgatggacgagagcgaactactgatatctgacgacatgcgtccgatattgcggagattcgaagccttgccggcagagatcaggaatcaagcaaggatagccctgaaaggcgtgctgttcgggtacgagcaagaagcactacgctag

SEQ ID NO: 330354 - DNA, 1125 bp, Pseudomonas aeruginosa
atgttctacgactggatatccggctatcaggatttcccgttcgacattccgcaggtgggcaaggtcattcgactgaacgtcgactcagagaccaatgaggtgctgagccagtcgtgcccgcccttccatgctgagggtagctacagcacgaagtttcgcattcaggtggcagggcgtcgggtgtacgtcgacggcaatgcgagccgcgttaaccgcctggacaacctctacggcctgaccacgctcgcggacaacatggccgtcatcaattcgatcttgaccgcaccggaaatcggtcttccgcctctcactcgatgcacccgtcttgatcgtctgcaggacggttcggcggtggtggacgggtttactttcactcggatcgatgcgacccggaatctcttcgtagggaagggtaacgagtcggcatatctgcgggctctgtcgagccagcgtttccggaactccatcggctacttgtacccggacggcggcaccgttgtgtggacgcccagcgggggagagaaagccggtcgcctggtttacccgggttactacaacaagggactggaactgactcggcatttgctgccgaaggttctacggcgttacggcgctgagtctgaggagtatcgctacgtcagccaggtgcgcgactggtgcgtagaagtcggagttgtccgcgctgaaatcaagctcaagagcgagctgctgaagagggattgcctctgccattggggcctgttcgacgaacagcgcatctgggatcacctgggcgaatttttgaaggtgggcgacaaaatgaccctgaccgcacatgacattgccagcatttctgaagaattgatgcgtgtaggcgtctgcgactccatgcaggcggctgggcgtactgcgacttacgcgatggagtggatgaacggcaagacgttcgatttcaacaagtctgccgtgaaaacgcatcgcgcccgtcttcgggctatcggcttcgatatcaagctgcctttcgacgcgtcgcggcacatgttcttcatccacaacgtgcgcgaagtctcccgcaccttcgacgtgcccgcgccgagcttctaccgacgtccggacgtgccgcgccatctgcggttggtggcctga

SEQ ID NO: 330355 - DNA, 459 bp, Pseudomonas aeruginosa
atgatcgacccagcagacaagcaaacccaagcactccccctggagcagccgaagcgcgggcgcggtcggccagccaccggcaaggccctgtcggacgcagagcgggcgcggcgctaccgggcgaacaagaaaaagcgtgacgatcaaccgtcacgaaaagatgccccatcgatccccgccgatagcgtaaaggagatcctcgacggctggcagcgcacccaagaggaactagaccaggcactgcaacgaattgccgagctagaagccgaattagcgtcacgcgtcacgaaaaaagaagaagccgaggcgaagacttgggcaattcaagagcgcaagggcaaggcgcgctggcagacaatcagcaagggcctgacccggaaggccggagaacgccagttcgacaagctgctgtcgggcctgagcgacccgcgctacacctaccgcatggttgaagaataa

SEQ ID NO: 330356 - DNA, 186 bp, Pseudomonas aeruginosa
atgctcgatatcttcgtcatcgccatcctcgtggcgctggtgaatttcggcaacctggcgagcatcgaggccaacctcggcgccgccgccttcgccagcgtggtggtgctcaccatgctcgccgccgtgacgttcgacccccggctgatctgggacaacaccaatctggatgacgagaatgagtga

SEQ ID NO: 330357 - DNA, 375 bp, Pseudomonas aeruginosa
atggcacgcaagcccaaaaaagccgaacagagcttacctcaaccaagtcaggtacctgtcgccttctccatccctctgaatatagatcctcaaaacgatacatacgtcatcaaaggcggtgccggatatggtgtggcgcatgtgaagaagcccgacggccgcgtgctttcagtacacgtgcacgccaatggcgcgcttcagcagatgacaacgtttgatcccgctctgctcactgtcgatgaacgtcgcaggctggaaggcaccttctacaacaaaggcatgactcagagtgagattgctgacctcgtcggtaagagccaaccgacggttgccaacgatcttcgaattctgcgagagaggggggagatcaagtaa

SEQ ID NO: 330358 - DNA, 1650 bp, Pseudomonas aeruginosa
atgtcagaaggcctaactgctctagcatcagagaacctaaaccctagcctccgcagcctgcttgaggacgttcagaagggtcacatacgcgtaccccgcttccagaggccttttgtatggctagacgcacaaaggctagatctcctgcgctccattcgtgacaacatgccaattggaagtcttttggtatggagaacagtgaaatttaagcttgcgtcctttaataatgtcggcccccatctcattccgccaattgtagagatcgccccagctactggctggcaatacctcctagacggacatcagcgtgtttcaaccttacttggacttctgctacaagccgcccaccccatttcccttaatataaatcaagatagcgacaatattgactgggacatccagtacaatcttctagagcaagattttgttttccaccgcaaagcaaatagaggcaagacaaagcatcctttgcttccactatggacgttactagacggacgactagtcaataaacacatgcgggatcttcgcaagaaagccgagcaagaaggctggaccgagcaggatcttgacgactgggaagaacgcgcagaccaactatcctatcggtttcaacaatgccgcgtaccgatagtagtcatggtctctgacgaccttgaacttgcagccaagacatttcagcgtatcaatagcctaggaacaccgatgggcgaagcccaccttgttgcagcgctaacatggagggacgactttgatctaagggaccaaattgcacagaggcgacgcgaactacccaccggctggaggaacatagacgagggtctatacctacaagtttgcaaaggcttatcaggactggacgtaacaaaagcaggccaaacagaactcgtcaagaaactttccgaagacgcatcgctacttgatagagcaagcaatgcaattagctcagtagtaaactggctatccaatgaaattggcgtatcacatgatgaccttcaaccgtatattcttcaagttgtaattctggctacagtttttgacaagaccaaacaaaatgaaatacccaatagtctttttgcagcatggctatggagaactagctggtcagaggtatttgcaaccgccgcctatagagatgttcgctttgaaatagaggcactaagcaatttagtacaacataaaaaaaatgcatcctggtctcgcgagtcgaatcttccagacagattcgacttcagatcagctagagtccgactattcactcttagacttgcaaatcgacaaggactaactgattcaaatggccaaacagtatcaggaatagaacttctgaaaaatcatggaagggatgcattagcgagagtatttaacacttctaggaatgcaacaccaactttaaagaaactaatccaaggccctggtaatcgcttccttatagatccatctactgacgtcatttttcgcgagagactaaaatttggtccagactactctgaagaggcgctttcagcccacttcataagccctgacaatcttagggttcttcgccaaggcaatctagaagaatttctaagaagtagagccgccgctatggagcagtgggattgtgagcaatggcaatcttgtcaggaaaaggccgagaccctaatttaa

SEQ ID NO: 330359 - DNA, 996 bp, Pseudomonas aeruginosa
atgatagccatactctccgaaggcgtaataagcgccatctcaaaaacaccggaagttttaaagcttcacaaactattatggtttgcttccgaaggacgccatgcattaatcccggagtccgacaaggaaatttctggctggctaaacaccttagaccagccaacacgaagcgcctacgagcaggctcttgcgctatctgcaagaaccattgcaaccctacccaacgatatagcaactgtcaaaatcacaagcagcagagcagctatatggcgccacccactagctgagctcggcattgatgacgccatcaaactattagaagagccacttggcatcctgctggaaaatgcgaagaacgattggcattttttgaagcgcattatgagaagccccgaaagaacaagactacagcgcgcaattgacgctcgctgggcagagccgcttcacggtggaggtagtgatattacccaacgccttagcgagcgcacatccactgagcccaagcgacttcgaacatttgtgctattcgatagcgaccgccgacacccggatgaactgcaccctgactgggctcctcagcccccggaggcatgtcaaggattcaaaaccgaaatagcagtagcccattcaggaattggcggttattggagactcaacaggagatttattgaatcctatctaccaagacaagaactagtcaaagccgcaccagccaaagcagacagtattagtgcacttttccgccttcaccaatatggtcaatggtatttcaacataaaaaaaggctttaaagatgatgcaaaaatagaaaacgctcatcgagccaaagacctatatgccaacattacccatcaagatgcgcagctgcttgaggatggcatagggtccagaatcgccaatcaatacagcacgtctgatacaatcgaattcgactgggatagtgaggcacgacaagaagcgctatctgctgtgccacaactaatgcgcctactgtaa

SEQ ID NO: 330360 - DNA, 1173 bp, Pseudomonas aeruginosa
atgctcaagtcattctccgttgagaactacagatccttttcccgaagacaggatattgaactacgcccactaacactattctttggatggaatagcggcgggaaaagcgcactggtcagattcctacccctactggcagagtcaatacaagctggaagctcccccatctggctcggaggagaaattgggcgacaagcaacatggccgtccttagtgtccaaagcaacaggacgcgacgcgctatcgttctcacttgcatgggagaccccaagtaaactttcaacagaatggaagataaaaggcgatctccaaggacgctggcaagaaatcgagtccctatcaattaacgacagcgcacacgacctcacaaaaaacaactggcaaggtcttgtaccagaaataaaaaccgcctcaggcaacccttcccccctagcggaactacacaacaacctcattgaaatcaaaaacgaagtacaatggattagcggcatccgcaccaaaatcccaagagcaactatatctagcggatcagcacgattccacatgcgatcaaatggttctgatgcggtagaacacctgatatccgaaacattaaaaagctccaccaacccactactagaagcaaccaatagctttttcaatgcattgaatgagcaacttctattagacaaccccgcagatggaatctggaggactgtagtccagcccataaatagctcaaatgtcagagtagacttatgcgacacaggtgagggctactcacaagttttgcctgtactggtagcgctagcccgcgcgcgcgccgatggcccaaagatactttgtattgagcagccagaactgcacctacacacacgagctcaagcagagctagccagacaactagtaacgactgccactgacaaaagcaaaccacaaatacttgttgagacccactcggaagtcttgttaaccagtatacaactagccattgcaaagggcgaaataccagccgacctagttagagtctactggatcgagtcatccctagacggtaccagcgacgcacttccagtaaactttaacagtaacggacaagcagaaaattcaacactatcagaagcctttagcgaagcagtgcaactcagccacgaactcatcagcatgcaactgtctgcactaaaaaaacaatga

SEQ ID NO: 330361 - DNA, 990 bp, Pseudomonas aeruginosa
atgactgcccaaccccaacgcatcggtttcctcctctggcccgccacccgcgcgctgacgctatcgcttgccgaggaagccctgcgggcggcccggcggttgcaccccgaggcgctctacgagccgctgttcctgctcgccgaagcgccggccgaagaggagggctggcgcctgccgggaacggcctggaacggcaggctggagcaatgctcgcggctgttcctggtcgccgacgaggcgccggcggcggtgtcgccagcgctgggcctggcgctcaagcaactggcgcgttcgggagcggcgatcggcgcgctgtccgccggcatctacccgctggcccagctcggcctgctcgacggttatcgcgccgcggtgcactggcgttggcacgatgacttcaccgagcgcttccccaaggtcatcgccaccaaccacctgttcgagtgggatcgcgaccgcatgaccgcctgcggcggcatggcggtactcgacctgctgctggcgctgctgtcccgcgaccatggcgctgaactggccggcgcggtctcggaagagctggtggtggagcgcattcgcgaaggcaacgagcgccagcgcatcccgctgaagaatcgcctcggctccagccatccgaagctgacccaggcggtactgctgatggaagccaatatcgaggagccactgaccaccgacgagatcgcccagcatgtgtgtgtttcgcggcgccagttggaacggatcttcaagcaatacctgaaccgcgtacccagccagtactacctggagctgcgcctgaaccgcgcgcggcagatgctgatgcagaccagcaagtcgatcatccagatcggcctgtcctgcggtttctcttccgggccgcatttctccagcgcctaccgcaacttcttcggcgtcactccgcgcgaggaccgcaaccagcggcgcggcggcagcgccttcgagacgaccttcactcccgtcgaacgcggctga

SEQ ID NO: 330362 - DNA, 2520 bp, Pseudomonas aeruginosa
gtggccatatttaggaaaaagttcgacttcgagttgtccgtctattccaggtcttcctgtctcatggccttgggattggctttgcctgccgtaactttcgcggtggaattcaacgccgagttcctgaacaacgagggcggggcgcccgttgaactgaagtatttcgagaacggcaactcggtgtcgcccggcacttacagcgtcgacattcatttgaaccagatcatgatccggcgcgaagatgtcgtgttcagtgccgatcccgaaaccggaagcgttcgtccggtcgtccgggtagggctgctcaaggagatcggggtcgatatcgcccggctgacgcgagacaaactcattccggataatctggaaaacaatacgcccctgaatgtcgccgaactcatccccggtgcatccatcgagttcgacgtcaacagcctttccctgctggtcagcattccacagctgtatgtacagcggcactcgcgtggctatgtggatccctctctttgggatgacggtgtcaccgcgttgttttccaactaccaggccaacttcacgcgcaacaccaactttggccagaacagcgattatcgctacctgggcctgcgcaacggcttcaacctgtttggctggcgtctgcgcaacgactcctctctgagcggaggtaccggcatgcgcaacaagttcagtagcaaccgtacctatgtggaacgtgacattcgtgccctgaaggggaccttgtccctcggcgagttgtatacctccgctcagggggatgctttcgagagcgtgcgtatgcgcggcgtgcaactgcaatccgatataggcatgctgcccgacaacgagatcagctataccccggtggtgcgcggtatcgctgaaaccaatgcgacggtcgaggtgagccagaatggcttcgtgatctattccaccaacgtaccgcccggtgcgttcgagatcaccgacatctatcccagcggctccaatggcgacctggaggtcaagatcatcgaggcggacggacgccagcggtccttcaagcagtcctattcctacctgccggtcatgacccgcaaggggaacctgcgctatggcctggctgccggtgaataccataatgatggccagccgtcggtcaacctgctccaggggtcggctgtgtatggcttgtccgacagggttaccggctttggcggcctgctcgctgcggagaagtacaatgccaccaacctgggcctcggcttcaacacgcccctgggcggtttttctgcggacgtgacccatagccagtcccgcacgcggcggggtgggcgcaaccagggacagagtctgcggcttctctattccaagaccatcaacgccaccgaaaccagctttaccgtggtgggctatcgctattccacggaaggctaccgtactctcagccagcatatcgacgacatgtccgaagagagctacctctatggctcaagttccagtcggcagaagagccgcatagacctgacggtgaaccagacgctgttccgacgcagttcgctctatctcacggcgggcgaaaccacatattggaatcgccccggcagcagccgtcgcgtgcagttcggcttcagcagcggcatcaagcgcgcgagctatagcctggcggtttcccgtacccaggagacgggttcgttcgggcgctccgatacccagttcacggcctccgtcagcatccccttgggcggtagcgcacgctccagtcaggtatatgccaatgccgtgagttcacagcatggtgattcgagtctgaacaccggtatctccggatacctggatgaagccaatgcgttcaactacagcgcacaggccaactacagcaaggacggcggcaactccggcagcgtcggcctgggttgggacacgtccaaggccaagttgtccgccaattacagccaggggcgcgacaacaagcagatcaacctgggagcaagcggttcggtagtggtgcattcggggggagtgaccttcggccagccggtgggggaaacgttcggcctggtggaggttccggaggtcggcggcgtcggcctcgacggctactcttcggttcgcaccgacggccgtggctatgccgtgctcccctacatgcaaccctatcgttacaactgggtgaacctggataccaatacccttggaagcgataccgagatcagcgacagcacgcaaatggccgtgccgacgcggggcgccgtgatcgccaagcgtttctccgcggagtccggtcggcgggtgcagttcgacctgagcatggactctggaggaaagattcccttcggtgcacaggcatacgacaaggaagagcgggtcgtgggaatggtcgacaacctgtcccgtttgctggtgttcggtatcgaggaccaggggcgcctgtccattcgctggagcgatggctcctgttccgtcgactatcagttgccgcccaggaacaaggacctgacttacgaacgagttgcgctcagttgccgtcggtcctcgatctga

SEQ ID NO: 330363 - DNA, 1554 bp, Pseudomonas aeruginosa
atgtccacattggccaacctgaccgaggttctgttccgcctcgatttcgatcccgataccgccgtttatcactatcggggccagactctcagccggctgcaatgccggacctacattctctcccaggccagccaactggcccgcctgctcaagcccggcgatcgcgtggtgctggcgttgaacgactcgccttcgctggcctgcctgttcctggcctgcatcgcggtcggcgccattcccgccgtgatcaatcccaagtcccgcgagcaggccctggccgatatcgctgccgactgccaggccagcctggtggtgcgtgaagccgatgcaccgtcgctgagcggtcctttggcgccgttgaccctgcgtgcggccgccggacgccctttgctcgacgatttctcgctggacgcgctggtcggtcctgcggacctcgattggagtgccttccatcgccaggacccggcggcagcctgtttcctgcaatacacctcgggttccaccggggcgcccaagggggtgatgcacagcctgcgcaacacgctcggtttctgccgggcgttcgctacggagttgctggcattgcaggcgggagaccggctgtattcgattcccaagatgttcttcggctatggcatgggcaacagcctgttctttccctggttcagcggagcctcggcgctgctcgacgatacctggccgagcccggagcgggttctggagaacctggtcgccttccgcccccgggtcctgtttggggtgccggccatctatgcctcgctgcgtccgcaggccagggagctgttgagcagcgtgcgcctggcgttttccgccggctcgccgctgccgcgcggcgagttcgaattctgggccgcgcacgggctggagatctgcgacggcatcggggctaccgaggtcggccatgtgttcctcgccaaccgcccgggccaggcgcgtgccgacagcaccgggctgccgttgcctggctatgagtgccggctggtggaccgcgaaggacacactatcgaggaagcgggccggcaaggcgtgctgttggtgcgtggccctgggctgagtccgggttactggcgggccagcgaagagcagcaggcgcgcttcgcaggtggctggtaccgcaccggcgacctgttcgagcgcgacgagtcgggtgcctaccgtcactgtgggcgggaagacgatctgttcaaggtgaatggccgctgggtggtgccgacccaggtcgagcaggcgatctgccgtcatctgccggaagtgagcgaggcggttctggttcctacctgccggctgcacgacggcttgcgtccgaccctgttcgtcaccctggccactccgctggacgacaaccagatcctgctggcgcagcgcatcgaccagcatctcgccgaacagattccctcgcacatgctgcccagccaattgcatgtgctgccggccttgccgcgcaacgacaacggcaagttggcgcgcgccgagctgcgccacctggccgacaccctttatcacgacaaccttccggaggaacgggcatgttga

SEQ ID NO: 330364 - DNA, 930 bp, Pseudomonas aeruginosa
atgcatccctgggcacgacgcaacattccacaactggccgggcgcctggcgctggtcaccggcgccaacagcggcctgggttggcaggcggcgcgcacgctggccggcaaaggggcgaccgtggtgatggcctgccgcaatcgcgaacaggcggagcgggcgcggcgggcgatcctcgacgagtatccccaggcacacctggagctggccgatctcgacctggccgacctcgcctcgatccgcgcctgcgccgccggtttccgtcagcgccacgcacgcctcgatctcttgttcaacaacgccggagtgatgttcctgcccctgcggcgtacccgcgacggtttcgagatgcagatgggcaccaatcacctcggccacttcgcccttacgggactgctgctggagtcgttgctggccgctccacggcccagggtggtgggcatgaccagcggtttcaaccagttcggccggctgccgctcgacgacctcaacgccgagcgcggctacaaccgctatctcgcctattgccacagcaagcaggccaatctgctgttcagcctggagttgcagcgccgcgccggccagcggggcgtgcttctgcagagcctggcggcgcatccgggctacgcggcgaccaacctgcagtacgcggcgccggcgatgtccggttcgcgcctgggacgctgggcgatgaaggtggccaacggagcgttcgcgcaatcggcggagatgggggcgttgccggcactttccgcgctgaccgaacagcgctggtatggcggcgcctatgtcggcccggatcgctggctggaaacccgcggttatccggcggcggcgcggattccgcggaatgcgcgcgacctggggctggccgcgcggctgtgggcgcgatcggaggaactgaccggagtacgcttctggtcggagtga

SEQ ID NO: 330365 - DNA, 390 bp, Pseudomonas aeruginosa
ttgaagctggtcggcgccctgccgatcgagccaggccccctggccatcggttccacggtaaagaccccgaccctgctgctgaccggactggccgatgtggtcgtgccgccgctcagttggccgatcctctggcagggcccgttgatccgcgacgtgcccgcctggggcgccacggccaccacggcgacccacttcagcccgctgcgacagatcgagtacaacgagttcgccggcatcagcgtcgcctgggtgctgtaccagggaaagaacgatgcccaggcccgcgactatttcgtcgggcgctactacaagctggccagcgacatccagttcaacgatccactgaggctgctccgcccctcgcgcaacaaactcgccgctgccctttga

SEQ ID NO: 330366 - DNA, 1182 bp, Pseudomonas aeruginosa
atgatagagtttgtttccggagattttttcgattttgatgcggatatcatgatcaatacagtcaactgtgttggtgtgatgggtgctggtgtggctctcgcatttaagaaaagatttcctgaaatgtttgatgactacgctgaaaagtgtcgtttgggcattattcgccccggtctgccttccgtttggttgcaaaaggatatgctctcgaaagacatcgagatcataaattttccgactaaaaatcattggaagaatccatctgagtatcattatattaatgatggtttagaatggctttctaagtatcttgaagataagagtggaaaagtagtaactcttccagctctaggctgtggtcatggcggtttggactgggacagggtccgaaccatgattgctgagaagctaaagaattctccagcgcatatatatgtctttgagcctttcgattcagtgaaagcgggtaatgtcaaagcttcggagccagactatgagcaactgcttggttcggttggggctggggttgttaaatatgcgtcggacgcatacccggaaaaattgcgcatctacacgaagaaggatgtgtattactatccaaaacagcacaacaaatttagatacgatttttcagttgtgtgcagtagcaagcctgacttaagcgagataaatgctatacggaagtttgttgatttttgcgttcttgagaagttcagtattttgttgggagggacagcctttgaaaaaaaactcgcgcttgaactttcggcccaaggtataacttgcggctgtgttctgccatccggaatctacgagtccataaaaaaagtatcctcatcaaagcgtaaagaaaaacctaatcttctctcgataggcaatccagtggttgccttcgataagaaagaatttatgccttctgtctttgcgaggatgtatctttctgagaaggtagtgttttttgctagcaagcttgcttggttagaaaaatataagagtcaactcaaacggatatctgtagacgcgtattactacgtttctgaaatcagctcaccagaggatgtaaaggcggtattagacattcgggcaaaagggtttgacttggatatgcccctaacaagcgttttcgcggatgatacccacaagcctgatgcggttgagggagggggggcgaactctgcttga

SEQ ID NO: 330367 - DNA, 1344 bp, Pseudomonas aeruginosa
atggcagttcctgtacaccatagggctcgcaacgcatatcatttcacctcgatacaaaatctcgaatcaataattgatcacggtattttttcgaccaatcagaaaattgctcgcggtattctgcacgttaacgtcgctgaggaaggaatacagaggcgtcgggcggttatgcaggtgcctggagccaacgggcggtgtgttcatgattatgtaccattctatttcgcaaagaaaacgcctatgcagcaggcggtgctctataagaagaacgtagatcagcagttcatcatttacctttccgtttcggttttgttgatggagacaagagctggggcctattacacaaatgcgtctgcaaatacggacgttcccccagctttcttttctggaaataatcagtctgatcagctagaccaacttgattggcagactatcgataacggtcggtggggatatgacgacgatgctcagaagcatcgcaaaatggcagagcttttgttgccagatcatgtcccattgtctgaaattaatcagatagttacatttaatcgcagcgtatctgactgtgttaggcaaatttttcagaacaaagggattgtcccgccgaacattgttgaagcgggaggggagcattattatctagatcctggtaattggaagacttctttggttacagggccttttttcctcaagcgctttgtggatgaggctgtttctcatgtggtctcatttcagcgtcaggtgatgccgaaataccagaccttaagtgacgccttgcgtgctatccgcgctaacttcgcggccatcagagagctagaagatatcgatggtctcggcgcgaactacgggccacatcgcgaagatgttggcgctcattctcgacgtgttgcgggtctggtgctgaactcgccagaatatattcagttggacgcgactcatcgtgaagtcttggagcttgcagcttatctccacgatataggcaaagggcccaaaacacgctggcccaatagctttatgaataaggctgatggtgaacatcccaaaaaatccctgcctatgttgcaaaggattttgactgaggatttacctattctgccaccagatatcgtgcgaaaaattataatgctggtgacgtatgatgacctactgggtgagatcgttgctaaaggtcgggacaaaagtcagttgttcgatataattacttgtccggaagacatcactatgttggtggctttgagtaaggctgatattggtgcgttaaatcaaatttggttgatgcaagtctctgctggaattgatgcccttagagttgaggctcttcaaaaattgcaaggtaatatttaa

SEQ ID NO: 330368 - DNA, 1323 bp, Pseudomonas aeruginosa
ttgaccctcctccccgcagtacctgcattccccggagagccgccgcaaagtcggctttccttccccagtcctcggcagatcaactcatccctgaccctggcgccggctccacgagccggcgcccccttggcgttcgtccgctcattcagccaaagagaacatcatgaaccagaaaatttccccgccttcacagaagctcgacggcctgttcctgctggccctgtcgatggccgtattcttcgtcggcgtgaccgagttcatgctgtcctccatgctcgggccgctggcgcaggcgttccacaccactaccagcggcgccgcctggctgatctccagctacgcgttctcctatgcgatcgccgcgccgttgctgggctacttctccgaccgcatgcaacgcaggaagctgctgctgctcgccctggtcctcttcgcggtcgatactctggccatcgtcatcgccccgaccctggaaattgccgtcgtcctgcgggtgatcgggggcatcgcctcggcaatcatcatcccgaccaccttcgccctggtcgcggaggtggtcgccccgcaaagacaggccggtgccatgggccaggtgatgctcggcatgaccctcggcattgccgccggcccggcactggccggcctcctctcggacttcttcggctgggcggcgcccttcctgatggtctcgtgcggttgcgtgctggtcttcctgatggcacgccagcgccttcccgtgcaagccgtggcaccgcgcgccgagggccatgcgctgggctggtgcaggcaatggagcatcctcaggccactgatcgccaagggtgcctggaacggcaccggggtcgccggcctgcttctctcgggagaggtgctgcgccagcgctacggcttcagcaccgcgcagataggcgtcagcatcgccgccttcggcgtgggcctggccgtgggcaacctcgccgcgggttacctgcgacgttatctgaagcgcgacgaagacatgctcctgctggtgctggcgctcctggtgctatcgatgtcgaccttcatgctcctgccgctaccgttacccgtggcgctctgctgcctgggcgcctggggcgccgcgctgggcctgggcgcgccggcgggcacggtggtactcgcctcgcgctccgggccggacaagggcatggtgctgtcgttcgccgagacgttcaacaacatcgccattctcgccagcgtgcccctggctgtgcgactgctggagctgaaggggccgcccgccaccctgtggcatgcctgccccggcttctcgggcacgcggccggcgttactcgacggtga

SEQ ID NO: 330369 - DNA, 426 bp, Pseudomonas aeruginosa; identical to SEQ ID NO: 326673

SEQ ID NO: 330370 - DNA, 1080 bp, Pseudomonas aeruginosa
atgcgcttccgtaccctgtacctcgtcctgtgcggcctgctcctgggccacgccgcgacggccgccgaaccgccgaccgcgcccacgccgccgacgcagccggccgaagggccgggcggcgcggactatcgccatgccagcgtgcatcagtggcacttcggcgaaggcgctcgcgaatactgggtgttcacccccgagcaaccggtccccggcaacgctccgctggtgatcttcctgcacggctggagcgtgatgcagccggacctctaccgcgcctggatcgaccatatcgtccgccgcggcatggtggtggtctacccgcgctaccagccggacctgaagacgcccaacgcagacttcctcgacaatgccgccggcgccctcggcgacgccctcaggcgcctgcaggccggcgagctgggggtgcgcccgcggctgaaccaggtcgcctacctcggccactccgccggcggactgctcgccgccaacctggcggccgccagcgaacgcctgaagctgccggcggcgaaggcgctgatggtggtcgaacccggcaagagccagggcaagcgctgggacggcgtggcccaggaacgcctgtcggggctggccaagggcaccctgctgctggcggtctgcggcgacgaggacagccacgtggcctgcaccgacgccaagcgcatctaccgccagagccggcacattccgcccagcgacaagaacctgctgctgctgcgcagcgatcgccacggcgctccgccgctgctggccaaccacgcggcacccaccgcgccggtattcggcccgcagtatccgaaggaagaagacagcgactggttgctcgaccgcgtcgagaagcgcctcgaagtccagcaggccgaaggccgctataccggccacgacccgctggtgatcgacgccctcgactggtacggcacctggaagctgttcgatggcctcaccgacgcggcgttctacaaccgcaaccgccagtacgccctgggcgctacgccggagcagaccggcatgggccagtggagcgacggcaccccggtgaagccaatcaaggtgctcaagtag

SEQ ID NO: 330371 - DNA, 4863 bp, Pseudomonas aeruginosa
atggcgttcttcaccgcggccagcaaagccgatttccagcatcaactgcagacggcactggcgcagcacctcggcgacaaggcgttaccacaagtcacgctgttcgccgaacagttcttcagcctgatctccctcgatgaactgacccagcgtcggctttccgacctggtcggttgcaccctttccgcctggcgcctgctggagcgcttcgaccgcgaccagcccgaagtccgcgtatacaaccccgactacgagaagcacggctggcaatccactcacaccgcggtggaagtgctgcacccggacctgccgttcctggtcgactcggtacgcatggaactgaaccgccgcggctacagcatccataccctgcagaccaacgtcctcagcgtgcgccgctcggccaagggcgagctgaaggaaatcctgcccaagggtagccagggcaaggacgtcagccaggaatcgctgatgtacctggagatcgaccgttgcgcccacgccggcgaactgcgggcgctggagaaggccatcctggaagtgctcggtgaagtacgcgtgaccgtcgccgacttcgaaccgatgaaggccaaggcccgcgaactgctgacctggcttggcaaggccaagctgaaggtgccggcggaggaactgaaggaagtacgcagctatctcgaatggctgctggacaaccacttcaccttcctcggctacgaggaattcagcgtcgccgacgaggccgacggcgggcgcatggtctacgacgagaaatccttcctcggcctgacccgtctgctgcgtgccggcctgagcaaggatgacctgcacatcgaggactatgccgtcgcctacctgcgcgaaccggtcctgctgtccttcgccaaggctgcccatccgagccgtgtgcaccgcccggcctacccggactacgtgtcgatccgcgagctggacggcaagggccgggtgatccgcgagtgccgcttcatgggcctgttcacctcctcggtgtacaacgagagcgtcaacgacatccccttcatccgcggcaaggtcgccgaagtgatgcggcgctccggtttcgacaccaaggcccacctcggcaaggaactggcccaggtgctggaagtactgccgcgcgacgacctgttccagaccccggtggacgagctgttcagcaccgccctggcaatcgtccgcatccaggagcgcaacaagatccgcgtgttcctgcgcaaggacccctacggtcgcttctgctactgcctggcctacgtgccgcgcgacgtgtattccaccgagacgcgcctgaagatccagcaggtcctgatggagcgcctgcaggccagcgactgcgagttctggaccttcttctccgagtcggtgctggcccgcgtgcagttcatcctccgcgtcgacccgaagtcgcgcatcgacatcgacccggcgcgcctggaggaagaagtgatccaggcctgccgttcctggcaggacgactacagcagcctggtggtggaaaacctcggcgaggccaagggcaccaacgtcctggccgacttcccgaaaggcttcccggccggctaccgcgagcgcttcgccccgcacttcgcggtggtcgacctgcagcacctgctcagcctctccgagcagcgcccgctggtgatgagcttctaccagccgctggcgcagggcgagcagcaactgcactgcaagctgtaccacgccgacaccccgctggccctgtccgacgtcctgccgatcctggagaacctcggcctgcgcgtgctcggcgaattcccctaccgcctgcgccaccagaacggccgcgaatactggatccacgacttcgccttcacctacgccgaagggctggacgtggacattcagcagctcaacgagatcctccaggacgccttcgtccacatcgtcagcggcgacgccgagaacgacgccttcaaccgcctggtgctgaccgccaacctgccgtggcgcgacgtcgccctgctgcgtgcctacgcgcgttacctgaagcagatccgcctgggcttcgacctcggctacatcgccagtgcgctgaatgcccacaccgacatcgcccgcgagctggtgcggctgttcaagacccgcttctacctggcgcgcaaactcaccgcggaagacctggaagacaagcaacagaagctggagcaggcgatcctcggtgccctcgacgaagtccaggtgctcaacgaggaccgcatcctgcggcgctacctcgacctgatcaaggcgaccctgcggaccaacttctaccagcccgacggcaacggccagaacaagagctacttcagcttcaagttcaacccgaaggccattccggagctgcccaggccggtgcccaagtacgagatcttcgtctactcgccgcgcgtcgagggcgtgcacctgcgcggcggcaaggtggctcgcggcggcttgcgctggtcggaccgcgaggaagacttccgcaccgaggtgctcggcctggtcaaggcccagcaggtgaagaacgcggtgatcgtgccggtcggcgccaagggcggcttcgtcccgcgccgcctgccgcttggcggtagccgcgacgagatccaggccgaggcgatcgcctgctaccggatcttcatttccggcctgctcgatatcaccgacaacctcaaggaaggcgaagtggtgccgccggccaacgtggtccgccacgacgaggacgatccctacctggtggtcgccgcggacaagggcacggcgaccttctccgacatcgccaacggcatcgccgccgagtacggcttctggctcggcgacgccttcgcctcgggcggctccgccggctacgaccacaagggcatggggattaccgccaagggcgcctgggtcagcgtgcaacggcacttccgcgaacgcggcatcgacgtgcagaaggacaacatcagcgtcatcggcatcggcgacatggccggcgacgtgttcggcaacggcctgctgatgtcggacaagctgcaactggtggccgccttcaaccacatgcatatcttcatcgacccgaacccggacgccgccagcagcttcgtcgagcgccagcgcctgttcaacctgccgcgttcgagctgggccgactacgacgccaagctgatctccgccggcggcgggatcttcctgcgcagcgccaagagcatcgccatcaccccggaaatgaaggcgcgcttcgacatccaggccgacaggctggcgcccaccgagctgatccatgcgctgctcaaggcgccggtcgacctgctctggaacggcgggatcggtacctacgtgaagtcgagcaaggaaacccacgccgatgtcggcgacaaggccaacgatggtctgcgcgtcgacggccgcgagttgcgcgcgaaggtggtgggcgagggcggcaacctgggcatgacccaactggcgcgggtcgagttcggcctgcacggcggtgccaacaacaccgacttcatcgacaacgccggtggcgtggactgctccgaccatgaggtcaacatcaagatcctgctcaacgaagtggtgcaggccggcgacatgaccgagaagcagcgcaacgcgctgctggtgaagatgaccgacgcggtcggcgccctggtgctgggcaacaactacaagcagacccaggcgctgtccctggcgcaacgtcgcgcccgcgagcggatcgccgagtacaagcggctgatgggcgacctcgaggcgcgtggcaagctcgatcgcgccctggagttcctgccttccgacgaggagctggcggaacgcatcagtgccggccaggggctgacccgcgccgagctgtcggtgctgatctcctacagcaagatcgacctcaaggaatcgctgctgaaatcgctggtgccggacgacgactatctgacccgcgacatggagaccgccttcccggcattgctggcggagaagttcggcgacgccatgcgccgccatcgcctgaagcgcgagatcgtcagcacgcagatcgccaacgacctggtcaaccacatgggcatcaccttcgtgcagcgcctgaaggagtccaccggcatgagcgcggccaacgtcgccggggcctacgtgatcgtccgcgacgtgttccacctgccgcactggttccgccagatcgagaacctcgactaccaggtgcccgctgatatccagctgaccctgatggacgaactgatgcgtctcggtcgccgcgccacccgctggttcctccgcagccgccgcaacgagctggacgcggcgcgcgacgtggcccacttcggcccgcgcatcgccgccctcggcctgaagctcaacgagctgctcgaagggccgacccgcgagctgtggcaggcgcgctaccagacctacgtcgacgccggcgtgccggaactgctggcacgcatggtggccggtaccagccacttgtacacgctgctgccgatcatcgaggcgtccgacgtgaccggccaggacaccgcggaagtggccaaggcctatttcgccgtgggcagcgcgctggacctgacctggtacctgcaacagatcaccaacctgccggtggagaacaactggcaggcgctggcccgcgaggcgttccgcgacgacctcgactggcagcagcgggcgatcaccgtctcggtgttgcagatgcaggacggaccgaaggaggtcgaggctcgcgtcggcctgtggctggaacagcacctgccgctggtcgagcgctggcgggcgatgctggtcgaactgcgtgccgcgtcgggtaccgactacgccatgtacgccgtggccaaccgcgagctgatggacctggcgcagagcagccagcacggtgtctgcatcccctga

SEQ ID NO: 330372 - DNA, 2847 bp, Pseudomonas aeruginosa
atgcggttcagcaagaaaggaatcgccgtgctgcgtctgccgtcccgccgtaacacccttcgacccatcgagcgcccgctcgcctggcttgccggcctggcgctggcgctttgtgcctgcactgccgcaggggctgccggggggccgtccagcgtggcgttctggtacgccgagcggccgccgctggccgagctttcccagttcgactgggtggtgctcgaagcggcgcacctcaagccggccgatgtcgggtatctgaaagagcagggcagcacgcccttcgcctatctgtcggtcggcgagttcgacggcgacgccgccgccatcgccgacagcggcctggcccggggcaagagcgcggtccgcaaccaagcctggaacagccaggtaatggacctcgccgcgccgagctggcgggcgtacctgctcaagcgcgccgcggagctgcgcaaacagggctacgccggcctgttcctcgataccctggacagcttccagctacaggccgaggagcgccgcgagggccagcgccgggcgctggccagtttcctcgcccagctgcatcgccaggagccgggcctcaagctgtttttcaatcgcggtttcgaagtgctgccggagttgcccggcgtcgcgtcggcggtggccgtggagtcgatccatgccggttgggacgccgctgccgggcaataccgcgaggtgccccaggacgatcgcgattggctgaagggccacctggatgccctgcgcgcccagggcatgcccatcgtcgccatcgactacctgccgccggagcggcgtgacgaggcgcgcacgctcgctgcgcgcctgcgtagcgaaggctacgtgccgttcgtcagcaccccggcgctcgactacctgggggtgagcgacgtcgaggtgcaaccgcggcgcatcgcgctgctctacgatccgcgcgagggcgacctgaccctgagccccggtcacgtctacctcggcggcctgctcgaatacctcggttatcgggtcgactacctgcccaccgaccagccgctgcccgaacgtccgctgagcggtctctacgccggggtggtgacctggatgaccagtggaccgccgctggccagcgacgccttcgacaactggatcgctgcacgtctcgacgaaaaggtgccggtggcgttcctcgccggcctgcccacagagaacgacggcctgttgcagcgcctgggtattcgccgactgtcgcagaaactcaaggtcaagccgagtaccgagacccacgaccaggcgctgcttggttccttcgaagcgccgctggtgatccggatccgcgacctgccggcgctcaccgtactcgatccggcgcgggtgaccccggcgctcaagctcaagggcgacggcaaggagtacgtgccggtggcgaccgccgactgggggggcttcgccctggcgccctatgtgctggaggagggtagcgagcaccggcgctggatcctcgatccgttcgccttcctgcgcaaggccttgcgtcttgtgccgctgccgagtcccgacgcgaccaccgagaatggccggcgcatcgccaccgtgcacatcgatggcgacggcttcgtctcccgtgccgaggtgcccggcagtccctatgccggccagcaggtgctggaggacttcatcaagccctatccgttcctcacctcggtctcggtgatcgaaggcgaggtcgggccgaagggcatgtacccgcacctggccagggaactggagccgatcgcccggcgcatcttcgccgacgacaaggtggaggtcgccagccataccttcagccatccgttcttctggcagccgcaactggccgagcagggcgagaacttcgaggcccagtatggctacaagatggccatcccgggctacgacaaggtcgacttcgtacgcgaggtgatcggcgcccgcgactacatcgagcagcgcctgaccaccccgcggaagccggtcaagatgatcttctggtccggcgacgcgctgcccgacgccgccaccatcaagctcgcctacgacgccgggctgatgaacgtcaacggcggcaataccgcgctgacccgggcctttccctcgctgaccggactctacccgctgatccggcccacccgcggcggcgtgcagtactacgcgccgatcatcaacgagaacgtctacaccaatctttggcaggggccgtactacggcttccgcggcgtcatcgataccttcgccctgaccgacagcccgcgccgcctgcgcggcctgcacctgtactaccacttctattcggggaccaagcaggcctcgatccgcaccatgcaccagatctacgcggcgatgcaggcggagcatccgttgtcgctgtggatgagcgactacatcccgcgcctggaaggcctgcatcgcgccagcctggccaagcgtgccgatggcagttggcaactgcgtggcttcgccgccttgcgcacggtgcgcctggacccggcgctgggttggccggacctcggccgctccacgggagtcgcgggcgtgcgcgacctgccccaggggcgctatgtgcacctgagtgcggcgaatgcgcgcctggtcctgcgcgacagccgcgatccgcggccggcgctggaggaggccaacctgccgctgaagcactggcgctaccgcgacgatggccgcgtcgagttcgccttcgccgggcacctgccattacgcctggtggtgcgcgcggcgggcgattgccggctgagtgcggccggcaaggccttcccgggaaaggccggcaacggcctgtggacgttcgagttgccgatggagcaggtgcgcgatggccaactcgtctgccgctga

SEQ ID NO: 330373 - DNA, 261 bp, Pseudomonas aeruginosa
atgagtgaggtcatcaacctgcaggcgctactgcgccgcttggacgagcacgcctacgaccagctctgcgcagaagtcgcgcgcctcgccgaagaaaacgaactcctgcgcaccgagttgacccgcatggaggaatgcgccgaagggtggtgcaacgaggcccagcgtctccaccagcaactggcggaggccaccggtggccaggccgctatcacccaatccggcgcactggtcgtcatcccgatggagcgctgcgcatga

SEQ ID NO: 330374 - DNA, 231 bp, Pseudomonas aeruginosa
atgaacgtcccgtatccgccccccactcgcacgccgtacaccggcgagcgcgttaaggaactcttccgcgccgccggtataacgatctcggcctgggccgaggccaacggctatccccgtcaccaggtgtacatggtcatcaacggccagttcaaaggccgccgcggcacctcccatgaaatcgctctgaagctcggcatgaagctctccgtcgagcaactcgccgcctga

SEQ ID NO: 330375 - DNA, 504 bp, Pseudomonas aeruginosa
atggacttcaaagtactgcttggggcagtgatgctggtcagcctatcggtggccggatgctccacgaaaaactatggccgacagccggaactgactgacttcgaacggcagaccatgagctgccgcgagattgacctggaacaggccaaggttcagggattcctgacccacgtgcgtgaggagagcgagttcgacgggcgctcggtgctgtctttcctgggcgacttcgggatcggcaacctgatggagaaggacgcagcggtcgacagtgccaatcagcgcctgacccagttggcaggtgccaagatgcagcgtggctgcacctatgcctatgaggctgaggccccagctcagcagccgtacgcgccaccacgcgcctatgccccaggcgcacccgtatcagcttctgcccgttctgtcgacgcccagctcgacgagctgaatcgcatgcagttgccctacgaggagtaccagcggcggtatcgggaaatcacggggcaatga

SEQ ID NO: 330376 - DNA, 159 bp, Pseudomonas aeruginosa; identical to SEQ ID NO: 330260

SEQ ID NO: 330377 - DNA, 990 bp, Pseudomonas aeruginosa
atgatcagcaagtggctgtttagcggcgccttcctgttcgagctgagcagttgggcgagcgtcttcgccgacctgccgttcggccaggcgctggcgctctacctgttcgcccacggcctgggcagcgcgctgctgtgcgtcggcgtatggctgctgctgccgcggcgctacaagttcccgctgccgtggagcccgctgttcctcttcagcctggccttcttcgtgccgctgatcggagcggtcggcgtcgctgcggcggtattcccggcgctgtacctgccgcgccagcgtggcgagcaggcctggcaggcgatgggcgtccccgagctgccgttccggccgaaggaaaagcgcctcgacatgatgttcagcgacggcggtctgcaggacgtcctgcgccatgcgccggacccgaaccagcggctcacggcgatcttcgccacccggcggatgcccggcaaggaggcgatcccgatcctcaagctggccctgcgcgaccccgccgacgacgtccgcctgctggcctactcgatgctcgaccagaaggaaagccggatcaaccagcgcatcgaggccgccctcggccgcctcgccggcgccacgccggcgcgacgcggcgcgctgcacggaaccctggcgcgctggtactgggaactggcctacctggggttggcccagggcagcgtgctggagcacatcctcgagcaggcgcgcgagcataccgaccaggcgctgcgcggcgcaccctcggccgacctgcatctgctggccgggcgcatcgccctcgaacaaggccgcctggaggatgccggacgcgccctccaggccgccgaggaggcgggaatcgatagcgcccagctggcgccgttccgcgccgaggtggcgttcttccagcggcgctaccgggacatcccccgacttctcgccggaatgcccgacgacatgctgcaacggccgcccttcgcggccctggcgagatactggacatga

SEQ ID NO: 330378 - DNA, 702 bp, Pseudomonas aeruginosa
atgagcgaccagcccagcctgtcccggggaggcatgagccccgaaggcaggaccaaccccgtcggcaccctggaacccaggctcgatccgcaggacaagaaggtgctgtgctcggcggtctgccattgcagcagcacgcccaacctcagccaggatggcaaaagcctcaagcaggcgtgcgtggcacagcggctgggagagttggacgaagttctccagggacgcagcccctacaagcccgaggtcagctacgacatgaccaagaacccaccgcagccgattctcgatagccagaccggtaacagtccacatggctggataccgggatggatcagcaagtattgggatgaagatccggagcatccgccgttcaagccagggaaaggaatgattcgcaggcccgacgtgatcatcgttcagaatcccaacaggccgccaacccaggacaatatcaaacaggtggtggagatgaagtttccgcctgacccacataatagggaacaacttgaggattatgcagcgattgccggcaacaagaacaagattgttgaaatgaagccctccgactgcgactgtggccaggaaaatcaacgatccaaggtgccagtagagcaagtagggtgggccgccgccatcgcaggtggggtgatgttcgtcttgacccgaggccgttcccctcgcccgatgattcccgcctattga

SEQ ID NO: 330379 - DNA, 327 bp, Pseudomonas aeruginosa
atgagcgccttcgttcgagtgtcgccgatcctggagaaggctgacggtaaacttttcttcgagtgtccgggttgcaagatgctgcacggcgtcaacgtcgaggtcgacggtcagccccgctggacctggaacggcagcgtcgacaacccgactttccagccgtcgatcctggttcggtatccgtggcgcctcctggagagcggagagcgtgagcaggttgtctgccactccttcgtcaccgatgggcgcatccagtacttgagcgactgcacgcaccgcctggctggccagacggttgatcttccgccgcagggggatgacgaatga

SEQ ID NO: 330380 - DNA, 795 bp, Pseudomonas aeruginosa
atggcttggtattccacaggcacggtcgctgtcacgctgaattcgccgacagtcaccggcactgggaccacattctccgcgaacgtccgggtcggcgatgcttttcgcggccccgatggtcgttggtacgaggtcacaaacgtggccagttcgacggtcatctcgatcaaacccaactaccagggcagcacggccagcggccagtcctatgcggtggcgccgatcctgggctacgacaaggacctgtcagatcgattcaacctgatcgccaaccagtggggggcaaccctggcggggatcaagccctgggcgctttctgcaaatgcggcggcagcgcggggggatctcggcctcggcagtgcggcggtacgggaggcacttggtggttcgggcgcgctgtactcgcgagatagcatcctcggtgctgtggctcaggctgggggcgtgccgactggtgcgatcattgagcgcggcgcgaatgcaaatggcgattacgtgcgatatgccgacggaacacagatgtgttggttcaacgccagcgttactgatcaggcgattgatgtcccatatggaagtctgtttaccggaacccgttcgtggtcgtttcctatcgccttctcgggcagcccaaccgtgaaccccggcctatttcgctgggggactggagcaggctggggcactgttggcggtatcgcaagcgcgacggcggctacgttgcgcggatttgacattgtgtcgcgcgcggctggaacagcgacagtgatctcggcatccgcgatggggaggtggttctga

SEQ ID NO: 330381 - DNA, 3663 bp, Pseudomonas aeruginosa
atgggcgcagttcaccagcacctggccggtcgcaagggcggcagtagcaagccgaaacagccgtcgatcgcgccggatagtttgcagtccgttgcgaccgcgaagatcctgatcgctgttggcgagggcgagtttgccgagggccctacggagcgcggcatctacctggataacacgcccctgatggacgccagcggcaacctgaacttcccgaacgtgaagtgggagtttcgccctggctctgtggatcaggaatacatccctggcatccctgcggttgagaacgagacgtctgtcaacgtcgagttgcgcggcgagtccccttgggtgcgctcgctcagcaatacccagctttccgcagtgcgcctacgcttcgcctggccggcgctccagcaacaggacaccaacgggaacatcggcgggtaccggatcgaatatgccgtcgacgtagccaccgacggcggcgcctatcaggaggtgctgcgcgaggccgtcgatggcaagaccactacccgttacgagcgctcccgccggatcgacctgccggcggccaccaatggctggcaggtgcgcgtccgccgcctgacgccgaatcagaacaacaaccgcatcgccgacaccatgctgatcgccggctacaccgaggtgatcgacgcgaagctgcgctacccgaacacggccctgctgtacgtcgagttcagcgcagagcagttcagcaacatcccggctgtcacagtcgactgccgcgggcggaaggtccaagtgccgagcaattacgatccggagacccgggcctacctcggtatctgggacggcacgatgaaacaggcctggaccgataacccggtctggcacacctacgacatcgtgaccaacgatcgcttcggtgtgggtaaacgcatcaaggcctggatggtagaccgttgggagatgtaccggatttcccagtactgcgaccagttggtgccggacgggaagggcggccaggagccgcgacacacctgcaacctgaacctgcaaagccgcgccggggcctgggagctgctgcgtgacctcaccgcgatctaccgtggtatggcgtactgggcccagggccaactgaagatccaggcggatatcccgcgcgccaccgacgtcgatttcgcctacacccgggccaatgtcatcgacggccgcttcagctacggctcggccagtgagcgtactcgctacagccgcgccttggtcagctacgacaatccggcgaacaactacgacaccgacgtggctgtggccaccgataagcgcctgcagcggcgttacggcgacaacccggtcgaggtggcagccatcggctgcacccgcgagagtgaggcccagcggcgcggaaaatgggcgatcctgaccaacagccaggatcgcacgataacgttccgtaccgggatggacggagcaattccgctgccgggatgggtgattccggtggctgacgcgctgctggctggacgggagattggggggcgggtttctgcggttgctggccgagtgatcaccttggatcgcgatacccaggcaaaggctggcgaccggctgctcctgaacctgcccagcggtaaggctgaggcgcgaaccgtgcagtcggtcgccgggcgcgcggtgaccgtgacgacagcctacagcgagaccccgctaccggaattggtctggaccctcgatgccgacgacctggcggtgccgctctaccgtgtgatgaaagtcagccagccggagcggggtgtcttcgagatcaccgctctgcagtacgagcccgggaagttctcagcgatcgacactggtgccaagttggagagccggccgatcagcgttatcccgatcaccaccgtggcgccgccggcgagcgtcacgctgacctcgcactaccagttcgatcaggggttggcggtcagcacgatgaccatcgcctggcctgctgtagaaggggcggtggcatacgacgtcgagtggaagaaggatagcggcaactggatccgcctgccgcgtgccggcacgaccagcgtcgatgtgaccggcatctacgcaggtggctatctggcgcgagtgcgtgcggtgtcggccttcgacatcacgtcggtctggaagagttcgatcctgacccaactcagcggcaagaccggcgcgccgccggcgctggcgttcctgcgtaccatcagcgggccgtggaagatcggcctggagtggggattcccggccagtggcgcggcggacaccgcctacaccgagatccaacagtcggttacccccggcggcagcgaacagaacgcaactgccctgggcttgtttgcctacccgaccgacacccacacgctgacctcgctcgcggccggcgctcgcttggccttccgcgggcggctgatcgacaggaccggcaacgtcggctcctggtcggcctgggtcgacggcataagctcgacggatgcgagcgagtacaacgagctgatcaccaaggagtacgtcgagtccgcgctgggcgaacagttcttcgccgacatcgatcagatgcaggtcgatatcactggactgcaggaccagatcgacaatctgaccgatgtgctggcctacgacccgacgaagacctacgcgaagaacgatatcgtgcgggtcggcaaccggctgtatcaagcgaagcaggcggtgccgctcaacgcctcgccgccgaacgcgacctactgggccgacatcggacagtcgatcgagacggccaacggcctggcccagcaggtggccaccaacaccgcggatatcaccgagctcgacggcaaggtcgaggcggctgcttcgagcctggatgttctgcaggctgctgcccgccgggagccggcgacgggagagaaggcggatgcgctgaagggctgggacaccattgctcgagccgccaccgaagtcaccgtgcgggcgaacgaggacgaggcgcaggcgaagcggacgagcttgctggaggcgcggaccgagacggcggaaggcaggatcgccaccgtcgagtcggtcgttgcgtcgaacaatgctgtaaccgtccagcgattggatcagatcaccggccaggttgcgagtaacgcctcggcgatcagcaccgaacagaccgtccgcgccaacgcggacagcgccctgggacagcgggtggataccgtcagcgcacgcaccgataccaacgaggcgaacatccagaccacatctcaagcggttacctcgctggatggcaacgtcaaggcgctctacagcgtgaagctccaggcgcatgccaatggccagaagtacgccgctggctggcaactgggcttcgacagcggtacgagcgtgacgaccatggcgttccaggctgatcggttcctctggttcaacagttccagcgggcaggccgtggcgccggtctcgatcgtcggcgggcagatgttcatcaacaacgcgatgattcaagacggttcgatcaccaatgcgaaaatcggcaacgtgatccagtcgaccgcactcggtgccaacggcgagccgctgtggaagcttgataaagcagggagtttgacgatgaacagcgcaacgtccggaggcttcatgaggcagacagcggaggccgttaaagtctacgacgcgaacctggtgttacgggtacagatcgggaatctcgacgtatga

SEQ ID NO: 330382 - DNA, 612 bp, Pseudomonas aeruginosa
atgaccaccgcagcgcaccacactccgatgaccaccatcaagctctatggcgcgctccggcagttcggccgggagtaccgcatgctcgtcgggtcgactgctgaagcgatcaaggccttgtgcgtgcagattccaggcctcgagcgcttcctcgccaatgcccacctgcgaggtatggagttcgctgtattccgtgggaaacggaacatttcccaggatgagctgcagttcgggggcgccgaggagattcgcattgctccggtcatgcgtggccggaaacgtggcgggttggtgcagacgattgtgggtgttgcccttatcgtggcggcgaccatcatggccggccctggtggtttcgccgctgccggtggtctgacgggggctatggggacagccggtgtggcgatggcgatcggcggcgtcatccaaatgctcagcccccaggccaaggggctttcgatgtccggggcgccggagaacctaccgtcatacgccttcggcagcgccagaaataccaccgccagcggtaacccggtaccgatctgcatcgggaagcgccgatggggcggggcgattatctcggcgtcgatctacgccgaggacaaggtgtaa

SEQ ID NO: 330383 - DNA, 225 bp, Pseudomonas aeruginosa
atgatcgtgatggcggtggggcgcaccgcgcacccgaaccacgctgggatctacctggcggacgatccatcactacctggcgaggatatgcaacacttcggcgccgggccgttcctgttgcaccacctgtacggcaagcccagcgaaatcatcgtgttcggtgggccgtggctcgaccggatgcgactggtgctgcgttatcgagaacgctccttgtccgcttga

SEQ ID NO: 330384 - DNA, 339 bp, Pseudomonas aeruginosa
atggcaatcgaaaccttcacctgggccaccgagagcggtggcgagggcgacatcaccttcgccaccaggtccgcgcaattcggtgacggctacaagcagttggtgagcgaaggcctgaacagcaagtcccagagctgggctgtgtccatcaccgggccggcggcgactatcaaggccgcgatggacttcctggaccgccacgctggagcgcgggcgttcctctggacgccgcccttgggcggcctgggcttctacacctgtgcgggctaccggcccgtcaacctcggcggccgggtctaccggctgaccgcgacctttgaacaggcattccatccatga

SEQ ID NO: 330385 - DNA, 3225 bp, Pseudomonas aeruginosa
atgagcaatttcgccgaactgggcatcaaggtcgattcgagcccggccgccaaggcggccgaggacctcgacaagctggtcgactccgccgatcaggccgaacaggcgatcgacaacctgtccgacgccagcaagggcctcgagcaggccaccaagggagtgtcgcgcgcggaggaggacgctgcccgcagtgtcgagaaggcggccggtgcgcgtgaacgccaggctgctgccagtcggaaggtatacgacagcgctgctggcgagatatccatcatcagccagttggaacgagcgctctccggcaacgtcgccaacatcgacgatctgattcgcgccgagagcttgctcgagcgggcgcgcaaggccggcctgaccacgctgcaggacgaagcgcagtatcaggatcgcctgggtgcggcctatgaccggttgcagaaggcggaaaccaaggaggccgccgagaagcagcgcctggttgcggcgcagaaccgtcagatcgaagcgatgcagcgcacggtcaacagcatcgatccggtgaccgccgcgttggcccggcttgagaagcaggaagccgcgttgcgtgggctgcgcgccgccggcgggctggatgacgccgggctggccgccggcctggagaagatcgcggcgaagcggcgggacatcgaagggaccggcggcgcgatcaacaagctcgggctgaccagcaaggaagcgcgcgagaacgtgctgcagttgggtaacgccctctccaccggtaactggcgggtcgccgcccacaacatcgccgagataggtgtgaacgccggcggcgccgcgtctggtgtggttggtgtcttggcaccaattgggttgctggcagcggcgatcggtggcttgagcgtcgcttatcttgctggacagcgccaagctgatgatttcaacaaggcgatcatcagcactggcaatgcctctggacggacagctcagcaactgaccgacatgctcggccgacttggcaaaagcggaaacttctcagaggcatctgaggcccttctggcgctggttcggtcagggcggcaagtaggaagcgctttcgaggatgtcgcgcgcgcggctacggagatgtctgccgtaaccgggcggagcgctggggacatcgcaactgaactggcgggtgccaagggtaaggttgcggacttggcggctgaatacaaccgccagtaccacttcatgaacgtcgacaccttcgctcaaatcgaagctctggagcggcaggggcgttcaatggatgccctgaagctgcttgcagggacgctggcctcggagatgagcgctcgaaaccgagagattgaggcgtcgacccgcggaatagtaaaagcctgggacgatgcgacgaaagctgtaaaacggtattggcaggagctgaaaagcctgaccgctgcagatccggagacattcaagcttcaggttttgcagggccaactggaggactcacggaagctcccggattccacgctgaaccggaagaacattgagttcctcgaaaaagagattgccttgcttcagaagcggatcagcgtccgtgaggaagggcgacgggctcaggcagaaggtcaagaggaccaagatagcttcatccaggccagcaaggacctgaatgctcagcttgataacgtatcgcctgcgaaaaagcgggcagcagccattcgcgagctcaatgcgcagtttcttgagctgctgaaatcatcggaacggcttggtaagagaagccctctgctcgagggggttcagtacgatgggcgttctttctctggcggtgcgtacgaccaactgcgcaaggggattgaggagcgcctgaaggaccagaagggctccgccggttcggtggacctacgcgcggccaacgccgcgaagaacagcctggccgagatcaccgcgacctaccgtaatgcgcaaaaggaactggaggcgtcccaacgcgcaggcgtgatcagcgcggaaagctacgcgcagcagcggatctcgatcatccagcaggagcgggatgaggtcacccatgcctacgagcgcgaaatcgcagcgctggaggctgccagggcgaagcaaggaacctcggcagcccagcgaatccaactcgaccagaagatcgccgacgccaggacggcgctggtcaaggcgcagcaggacgccgattcacagctcaaccagatcgaactcagcgagcaggggcggctacggcgacaggagcagtcggtgcagcgctatacgcaggcgctgcaggcgcaggtcgatgcgttgcgcctggagggcgagcgcgctgcggccggtgtcagcatgggcggacgagagcggtcccgcttcgagcagttgaacagtctcgacgaccgctacaaccagcaactgatggacctggagaaccagcgttccgatcccagtcggcaaatgtcggacgaggagtacgagaaacgtctggctgcgctcagaaaggcgcatcaggacctgcgagacaccgtggtcagcaactacgaccagatgaccgctgcccagtcagactggagcaacggagcgagcggagcctggaacgactatctcgaaagcgccaggaatgttgctgggcagacgcatgatctgttcaccaacgccttccgcgccatggaggatgcagtcgctaccttcgccacgaccggcaagttgtcgttctccgacttcacgaagagcatcctggccgacatggcgcggattgcaacgcgcgccgctgcttcgcaggccctttcgtcactcttcggtggcttcttcgggggtggaaacgctgccgcgcagtctggtgtcgacaatctggtgagcaacagcgggctgttcgccaacggtggtgcgttcgccggcggggtgcagatgttcgccactggcggggccttcaccaacagcgtggtcagcacgccaactgcgttcggcatgagcggcggccgtatgggtgtgatgggcgaagcggggccagaggccgtgatgccgctgaccagaacctcgtccggggccctcggtgtgcgcgctatgggcggcagtagctcgcagatcaacgtcgaggtgaacattgcctcggatggttcggccaacgtctccagcagccagcctggcctggaccagttcggtcgcgacatcgggacattcgtcgagcagaagtaccgacaactcctggcgcgtgatctgcggcgtgacggtgcgatcggccgcgccatcaacgggtag

SEQ ID NO: 330386 - DNA, 381 bp, Pseudomonas aeruginosa
atggcgaagaagttcagcatcgcgcaggcgcccaccttcgaatccagtgtggagattccccgcctcggcggggagtccatcaaggtgccattcaccttcaagtacctagatcgtgaagcgctggccgacctctacagcagttggggagagcggttcaagcgcttggtcgaggagactcgcgagcagtctctggaagcgttcaccacggctcagatcgacctccaggtcgagcaggtacaagccgttgtggccgggtgggggttcgacgaggcgttcaccgaggccaacgtccggctgctggtgtcctccctcgtcagcgtgccggaggccatcctcgcagcctaccaggacgcctacagcagagggcgcttgggaaactga

SEQ ID NO: 330387 - DNA, 654 bp, Pseudomonas aeruginosa
atgtccgcaagcctccccaacggcgcgctgctggccattgctgccacctacggcccggctattccggttaccgctgtctccaacgccaagccagcggttgctaccgcagatgctcacggcctgctggtcggtgacgtcgtgtcgctggtgtccggctggaccggcctgaacggccgagccgtcaaggtcgcagcttccaccgaggacaccttctccctgggcaatatcgataccacggatgtgatccgctacccggccggtggcggcatcggttcggcgaagaaggtcctcacctggcagcagatccagcaggtgatgaacccgaccacctccggcggcgagcagcagttcgtccagtaccagtacctcgaggacgatgaccagcgccagttgcctaccttccgcaacgcgcagtcgttctcgatgccgatcgccgacgaccccaacttgccgcagtgggcggtgattgaggcggcggaccagagtaaggcgctgcaggttatccgcctgacgctgcgcaacggatcggaggttttctacaacggctacgtctcggtcagcgacactccgaccctgaacgtcaacgaaatcatgacccggaccctgaccatcgctctcgatggtcgccctgttcgctacaacccggccccctaa

SEQ ID NO: 330388 - DNA, 411 bp, Pseudomonas aeruginosa
atgagtcacgagatcattcagcaactgttcgaggctcgcctggacgtctgggcgaaggccaagggaatcccggtcgcgtacccgaatgtggcgttcgaaccgacgccgggtgccatctatctgcgctgcttcacgctgcccgctggcagtaccagtagcgacttgggcggctaccaccggggcttcaccggtgtgttccagatcagcatcgtggtccctggtgggcagggcaccggcgttgccgcagacatcatcgccgggttgggtcagcagttccctctctacagcgagttgtcccgccccggtttctctgtgcaggtggtgagccccccagcgccgggaccctggatatcgggggacatcgccgataccaagccagtctccatcggctatcgcgccgacatcttctga

SEQ ID NO: 330389 - DNA, 675 bp, Pseudomonas aeruginosa
atggcccgtggctctcgcatgcgtcaacgctactcagggcgccagggcagcttcgctgcagcggtggcgcagttccgcgaccaagccttggctgccggcgatgcgatctaccagcggatcatgttggacctgtccgtcaaggtgatcgagaaatctccagtcggtgacccggagcggtgggccgcgaacgtcgcctaccgccagcgagcgagtgctgcggcggaccgctacgacgagaacgttgcgattcgcaacaccctgatcaacctgaatccgagcaacttcaccaggaacgggaacctacgtcgaggcgtgaagcacgcgaagccgctgaccaaggcggagcgtgaccagaacttcgacgtcaacgggatggtggtcgggcgcgggtatgttggcgggcgctttcgggccaactggcagttcagcattggcacggccgcgcagggggagattgatgacgtcgacccgactggcagcaaggcaatttctgcagtgaccgctggggtccagccgctgaagctcggtgataccgcctacctggtgaataacctgccgtatgcggtaccgctggagtacgggcactccagccaggcgccggctggcatggtccgggtgaccatcgccgaattccagcagattgtggaggccgccgtcagggcgaaccaggtatga

SEQ ID NO: 330390 - DNA, 390 bp, Pseudomonas aeruginosa
atggccgatatctacgaccgttcccgggcgatggccatacgcatgctggcaccgcggagtaagggcggtaaggggcttgagctacgcctgaccaagttcgagcagggcgagtacgacccggcgaccggtggaagtccaaccatagagcgccgcttcgatggttccggcatgcgccaggactacgatgtgcgggttatcgatggctcgctgatccaacagggtgatgtcgagatcatcatgtcaccagtgcagctcggggggcaggacatgccggcgccgaggaacggcgaccgtatcgagttcgacggcgaggccttcaaggtggtgactgcgaaagcctggaactacgccggactggacatcggcttcgtcgcgcaggcgaggaggtag

SEQ ID NO: 330391 - DNA, 465 bp, Pseudomonas aeruginosa
atggcggtggtgactgagggtgacggcgccaacagctacgtctccgtcgaccaggctaccgagtatcacgctcagcgcggcaatgctgcctgggcgtcggcctccaatgacagccgctcctcggcactgatcagggcgaccgactacatcgaccgtagctatcaattccgaggctcgaaggtcgacccggaccagccgttggagtttccacgcaccggcctggcatggccgaaccggaaactgcaggccgcaacgtgcgaactggccctgttggcgcttgacgggccgctggatacggtacagcaggcctccgccgtgaaatccgagacggtggggcccctcaccacggtctacgccgatccggtgaaccaggggcagccgcgctacgttgcagtggatcggcttctggaggcgctgaccgtcggcgggggcatgttcaacgtcagggtgtcgaggatgagctga

SEQ ID NO: 330392 - DNA, 486 bp, Pseudomonas aeruginosa
atgaccaagaagattctgtggttcgtagcgggcccggcgacctcggaccagatggagttcgcccagcgcaatgggctgacgattcgggatccgctcgcctatcgccagggcgacttcctcgaacaggccgatgcggtggctggcgaggtgccgcgggcatactcggtggcctacgacctgatcgaactgcaaaccagcggtgctgcgaaggcttcgggcggccaggacggcgagccgaccctcgacaaaatcaaggctgacctgaagaccctcggcgttgcgtttgatgggcgtgcaggcaaggctgcgttggcgaaactgctcgccgaggcgaaggcggcccaggagccctcgccgttgaacgacgaacaggtgctggcgcgtctcgttgaactgggtgtcgaggtgccggaaggcgccacgcccgattcgctgcgcgagctcctgaaggcgaccgaggagaaagccaatggcggtggtgactga

SEQ ID NO: 330393 - DNA, 972 bp, Pseudomonas aeruginosa
atggctttcgatctcgctgtattcaacaagcagacctacacggctctgaccgaaaccgtcgcccaggcgatcgacaaattcaaccaggcatccgccggcaccatcgttctgcagaacgcgccggcgcagggcgacttcgacatcaaggccagcttcaagctgatcgccaatctggtgcgccgccgcaacgtctacggcaacggcgacgtggctgcgactcgtctgacgcagttgctcaacgccgcggtgaaggtcgccgccggcacgccaccgatcgagtatgaagcggcccagtacaactgggtgttgcagaacccggcgttggcggccctgaccatcggtgagcaactgggtaaagcacgggtcgcggacatgctgaacaccgccatccgcggcgcggtggctgcaatcagcggtcacaccgacgcgacccatggcagcgctaccgagaccgcaaccttccgcaccctgaacaaggcggcgttcaagttcggcgaccgcgccaacgccatcgcggcctgggtgttccactccagcgtggtcagcgatctctacgacaacgctcttgcgaacgccgagaacctgttcacctacgacggcgtgaacgtgatgcgcgacccgttcggccgcctgttcgtggtgaccgacgccgactcgctgatcgtgccggcgggcgccgaccccgaggccaacccagcttcgttccgctccctgggcctggtgcagagctcggtgctggtgaccggcaacaacgacttcgacgcggtcctgaaccgcaccaccggcaaggagaacctgggttcggtctaccaggccgagtggagctacaacctgggcgtgctcggttacacctggaagaccggtgcgggcggcgcttcgccgaacgataccgcgatcggcaccgcggcgaactgggagcgcaccgccaccagcgtcaaggacaccgccggcgttctggtgctgagcaagtaa

SEQ ID NO: 330394 - DNA, 744 bp, Pseudomonas aeruginosa
atgaaactgaagactgtcgaagtcgatggcaagcaatacgccgaggtccaggatggcaagccggtctacttggaggatgacggcaaggagatcgctttcgatgcgatcggcacccgagccaccatcacccgcttgaacggagaggccaagcagcaccgcgagcgggcggagaaggccgagaaaatcgcaaaggacttcgaaggcatcgaggacccggccgcagcgcgcaaagccctggaaactgtcgccaatctcgacgcgaagaagctggtggatgccggcgagatcgagaaggtgaaggcagaaatcggcaaggcctacgacaccaagctgaccgaggccaccacgcgcgcggagcagttggagcagcagctctacgccgagaagatcggcggcagcttctctcgctcgaagttcgtggcagaccgcctggctgttccggccgacatggtgcagtccgtgttcggcaagcacctgaaaatcgaggacggcaatgtcgtggcctacgacgcccacggcaacaagctgtacagcaaggcccgtcccggcgaggccgccgacttcgatgaagcgctggagattctcgtcgaccagtacccctaccgcgaccagatcctgaagggctctggccactccggcggcggaacgcccccgggcggcaagccctccggcagcacggccaagtcgctcgccgactgcaagaccgaggccgagaaggtcgcctacctcgaaacgatcaagtaa

SEQ ID NO: 330395 - DNA, 1356 bp, Pseudomonas aeruginosa
atgagcgattccgtttgccagtgctgcgctgctgtcgaggagatgcgcgagcactggaagctgatcgattgcatcaagggcggcacctcggccatgcgcgaggcgggggaggcgtatctgcccaagcggcaactcgaggcgagggaggactatgaagctcggctgaagctggcgacgctgcaccccgcgttcgaggaaacggtcggcgccatggtggggcgagtgtttgcgaagccggtcgtgatcggcgatgacgtgccgcaggagatcgcggacctgctgaccgacgtggatacggagggacgtgacctgcaagtgttcgcccaagactggttccgcggcgggctggagtatggcctgaagttcgccctggtcgagataccgcaacgaccagaggatctgccgaacacacggcaggccgagcaacaagccggcttcaggccctacggggtgctgatcgagcctggccaggtgctggggtggaagaccggcaaggttgctggtgtcgacagcctgacccagttccgcttccggacgtgccgggtggaggaggtggacgagttcaccgacgaaaccgttgagcagatccgcgtgatcgagccccaccggcatcgtgtgttcgaggagggcaaggacgggtgggagatggtgtcggacaccccgaacacgctcggcttcatccccttggtgccgtattacaccgcgcgtaccgggttcctcacggcaaagccaccgctgctcgaactcgcccacctggtggcgaagcactggtggctccagtcctccctggacagtctggttgatgtcgcctgcgtgccgatcctggtgatgactggcgtcgactccggcgacgaactggccatcggcgcgcgctccgcggtgaagttgcctcgggaagccgacatgaagtacgtcgagcacaccggcgccgccatcaagaccgcgcgggaacagcttgactcactgcaagaggagatgaggcaggccggtgcgaagctggtggagaagtccacccaggtcatgacggcgaagcagtctggcgaggaatcggctaaggagaccagcaaactggcgatgatgtgccagggcctgcaggacagcctggtgctgttcctgtcgtacttctccctcgcactgaacaaccgcgccgagggcggcaccgtgcagctccagccgaatctcgacccggattatgctccggccgagaccatgggtgtgctgcagcgcatgcgtgacggcggctcgctgtcagaccagaccctgttcaacgaggcccagcgccgcggcatgcttgccgaggacctggactgggagtcggagcaggagcggatccgcaaccaggagcctgcgatatga

SEQ ID NO: 330396 - DNA, 1296 bp, Pseudomonas aeruginosa
atgccgacgctgaataggcctcaggcgaagttcctggccttgccgaacaagttctgcggcttcgtggctgggttcggctccggcaagacctgggtgggctgctcagggctcgcccagcacgcctgggaatggccgcgcatcaacgccggctacttcgcgccgacctacgcccagatccgcgacatcttctacccaacgatggaggaggtggctttcgactgggggctgcggaccaggatcaaccaggcgaaccacgaggttcacctctacagcggcagcgcctaccgcacgacgatcatctgccgctccatggagaagccgcaaaccatcgtcggcttcaaggtcggccggtccctggtggacgagctcgacgtcctgtcgctggtcaaggcccagcaggcctggcgcaagatcatcgcgcggatgcgctacaaggtggacggcctgcgcaaccgtgtcgacgtcaccaccaccccggaaggcttcaagttcgtcttccagcagttcgtgaagcagttgcgcgagaagccgcacctgcaggacctgtatggcctggtccaagccagcacctacgacaacgaggcgaacctgccggacgactacatcgattcgctgatggagtcgtacccgccgcaactgatcgcagcctacctgcgcggccagttcgtcaacctgacgtcgggcacgatctacaccgcctacgaccgcaccctcaacgcctcgcaggagaccgtacagcccggcgaaacgctgttcgtgggcatggacttcaacgtcggaaaaatgtcggcaatcgtccacgtcaagcgtctgggcctgccgcacgcggtcgacgagatcgtcaacgggtacgacaccccggacatgatccgccagatcaaggagcggttctggctgtacgccgatggtgactaccgaccgacccgccagatcaggatctaccccgacgcctccggcgactcgcgcaagtccgtccgggccagcgagaccgatatcgcgctgctcaagcaggccggcttcgtcgtatcggctccggccgccaacccgccggtcaaggaccggatcaactccatgaacgccatgttctgcaacgccaagggcgagcgacggtatcgggtcaatcccgaccgctgcccgacctacgccgatgccctcgagcagcaggtgtggggcaccaacggtgagccggacaagtccgccgacatcgaccaccccaacgatgctgcgggctacttcattcacaaggaattcccggtcgagcgacctgcggccgttgttaccaccctgaggttctga

SEQ ID NO: 330397 - DNA, 600 bp, Pseudomonas aeruginosa
atggcgctaacgaaaaaacagcgcctgttcgtcgacgagtacctgatagacctcaacgcgacgcaggccgcgattcgggccggctacagcacccggcgcgcgacggagatcggctatcaactgctccagcggccggaggtcgcccaggccatccaggccgccatggccgagcgctcgaagcgcaccgaggtcgaggccgactatgtgatccgccgcctgcgcgagatcgacgagatggacgtgctcgatatcctcgaggacgacggatcgttccggtctatccgcgactggcccagggcctggcgccagttcctgtccggcatcgagatcgccgagttgttcgagggccgcggagacgaccgccgcatcgccggcgtgctccgcaaggtcaagtggccggacaagctacgcaacctggaactgctgagccgtcacgtcggcaccgagtctgccgcgctcgacttggagctcaagcgcctggatgtcgcgaagaagcgcgccgaactgaagctgctggagaaccctgaggaagaagcgccgccaaccagcgtcgcggtgaccatcatcgatgcgagggtgcgcgatgccgacgctgaatag

SEQ ID NO: 330398 - DNA, 327 bp, Pseudomonas aeruginosa
atgccgaaaatgcccgaaaaagaccctagcctgtgggctgcagtgctggcctggctgtccgcgcaccagtcgcaggtctacgcattcctactttccatcggaatcgctgtgctgcgagtcatttacggcggtggcccgacgcggcaggtctggctggaaggggcgctatgtggcgcgctgacgcttgctgtgctgtccgggtcgagctggctcggcattcccgaagatgcgtcagcgttcatcggcggcgttgtcggcttcgtcggtgtgaagaagatcggcgagtacgcagaccggtggctggggcgtaaggccgactcggcctga

SEQ ID NO: 330399 - DNA, 870 bp, Pseudomonas aeruginosa
atgagactgatcagcgcgcgccaggcttggcacgacgccttctacgagagtcggagctcagcgctggcggtggcggccgacaaggccgcgctgggcaagaaggggcgggtggccaacgagacgtaccccgaccgcaaggacaccaacgggcgtagcgcccacatgctggccgcgggcctggtgcaggctgccatccgctcgctgccgaagccgctgcagcacttcggccacacgctgtactcgccgctggccaccggtgacgacgtggcgatcgctcacggcctggtctggatcggcgccggcctcggccaactgactcagcgccagggcgagcgggcttactggatggcgctggcggcgatcaactcgcacaagcgcgccgtcaacggccgcgacactctgcgcccgggcgaggtctgcctgttcatcgaggagcgcctgggctgccgcatcgaccccagccactgggctcgcgactacgccagtacctgggagcggctggcgcgccacgtggacaagctggatgcccaggcgctgaggccggtcgccgaggtggtggcgaagcagtgcggcttgcggaaggggccgggctggcgctggcaccaggtcgaccgcgatgtggtggcggtgcagcgcgccgaggcctacgccgagcgccgggagcatcaccagcagcgcctggcggaacgtctgcgcgggatgtcggaccaggagctggcgcggtgggcggcgaggatgaagcggtacgcggaggcataccgggaggagtggggcgaggacatcctggaatgccccggtgtccatcagcgctaccatgaccgcgtggcggcctactgggcccagcgggagcgcctgaaacgggtcgcttga

SEQ ID NO: 330400 - DNA, 444 bp, Pseudomonas aeruginosa
atgcatgacctccgcccggtgatgttcaccgtacccggcgagccggtagggaaggggaggccgcgcatcggtcgcgtcggcgcccacgccaggatgttcactccggcgaagacggcgaactacgaggggttgatcgcgcacagcggacagcaggcgatggcaggtcgcgcgctgttcgagggcccggtgctggtcgaactcgacatcgcgctgagcatccctcaatcgatgtcgaaaaagcggaagtcgctggccctggccggcggcctgtaccccaccaagaagcccgatatggacaacgtgatcaaagcgatctacgacggcctgaacggcgtggtctggaaggacgacgtccaggtcgtgaaggcggtggtggggaagcgctacggcgaaacgccgggcgtgcgagtgaaagtcgtccctctcctcgagggcgagcagtga

SEQ ID NO: 330401 - DNA, 492 bp, Pseudomonas aeruginosa
ttgaaaatcgatcgcacgactcagaaagccgttctggaccgcttggcggacgcgtatcccaatccggtacataccgatgggctctccgacctcttcgacgacaccaggatgctcactgcctgctgcgcctacctgcacgagcacggcctggcaagggcaaaaatctcggaatttttgagtgaaggccgcgaactgctgtacgcggaaatcacagccaaggggatcgactttctggcagatgacggcggcctgagcgcaatcctggggccggtgacgatcaagtttcatgaggactctctccgtcagatgatcgaactacgtctcgccaaggcgagtgaccagcaggtgacgccggaggagaaaacccagcttgttcaagcgcttcgaggactgcccgccgattccataaaacacctgacaacgcgactactggacctgggcatggacaatctgcctcgagcagtcgagatagttcgtacgttcctgtcgtga

SEQ ID NO: 330402 - DNA, 207 bp, Pseudomonas aeruginosa
atggaggaacccgatccggggtccacggctggcgtgcagtggtgtgtagaactcgccaggtatgatctgggcggtaacgcggaggaacagctcggtgctggccggctcgcaccgattggcaagcagcaccaggccaagctgggactgcgtgaaggtagggccgcctaccaccccgccgaagctagagctcgattgctcgggagttaa

SEQ ID NO: 330403 - DNA, 255 bp, Pseudomonas aeruginosa
atgaccccattgaagaaagctcgcctggatcgaggatggcgcctggctgatgtagctcagcgcctacgcgatctcggtgaaaccatcgacaccggcaatctttcgaggatcgagcgctgcgagcagcgcgcgtcgcccttgatggccgaaaagctcgttcgcgtcttcggtgacgcgctcacggaaatgcatgtgctgtatccggagcgctatctggaaccgaaacctgacacgccagagcaagcggtagcctga

SEQ ID NO: 330404 - DNA, 624 bp, Pseudomonas aeruginosa
atggacatcggatctatcatcagaaaagcgcggaaggcacgaggcctgacgctcgaagctctcgcccaccaggtggactcggacactggaaacctctcgcgcatcgagcgtggcaagcagggagccagtcaggaattgctttccaagattctctcgattcttgacctctcactcacgggtctagcggaagagcccgcgggcaatgtaggccccacagagcagccggggcgcctctaccgctacccggtggtcagttgggtcgccgcaggcgcttggcgcgaagcgatagagccggccggcttcgatacattcgaactcagtgactacaagggtaagggaaggtcattctggctggaggtgaagggggactctatgacggccccggtcggcgagagcattccggaaggcatgctgattctcgtcgacaccgggctcgagccgaggcctggcgatctggtggttgcgaagctggccgacagcaacgaggcaaccttcaaacagttcgtgtccgacgcaggccagaagtacttgaaacccctgaaccccgcatatcgcatgctatccatcgacgacaactgcgagatggtcggcgttgtcacccgagctatccgcaagttcaggtga

SEQ ID NO: 330405 - DNA, 933 bp, Pseudomonas aeruginosa
atgagtgagaagtaccagcaccaatacagaagcattcgtacacctgcagatttgcgcgcaatccctggatacgaagaaattgtcgacttcagcgagtcctctgggcgaaaacttcttgagatgctagatgattaccagtttgcaaaaattgatgagtttccttgcggaatcaaaggctgccggacgccgcatcagtacggctatctcgttcgcacaactgacggaaaaataaccaacatcggcagagactgcggaaagaggcatcttaagctagagtttactaaagctagaaaagcattccgagagaagcgaaaggccgctgacaaccttaagtccataatgacaattagagatggactatctccatatgaagacagaattaacaatctactttcattgagccgcgcacttaacgactgcagagaggtacttcgcgaaaaaatgccactaatacatggcgccgtcgtcactatggcggagaaaggtacgaatcaaataatccagtcccggcgcatgaataagcgagaggcagagatacattatcttcacacaggaacgtcacgcaaggactacgaaggtgggcgccccacgattgaagaggcagttgctcgccttgacggctgcggctatttccggaccagcctgggattgacactcagaaaaaaattaacgcctccaatagacgaactaaagtcacttacgacagagcagatagagagaattaagcccaaagaacttgagaacctatcacgcaacataaacaacgcattaaggctcatagattgggcggaaagccttgcggaaattggcctgaaatttttctcccaagataacattcaaaagctcagtctaatgggggcaacccctgaacagatatcccgtcttgtcaaagagatcgagaagttgcaaactcctcgcgttcatcagcgctag

SEQ ID NO: 330406 - DNA, 315 bp, Pseudomonas aeruginosa
atggccaaacaacagaagaagcaggacgcgaaaccgatggctccggttgagaaattggggctccgcatatcggagatgatcaactcaccgaaagcccaagacctgcgaagggtgacgatccaccgcttggacacggatccggatgaagcgtgggatcaggtgatggaactgctatccgagacggacggcatcgacatggtcttcaacgacgacggcacggtaacgctgaagtgggaggagcgggagggaaactccgaccaggtggatagccagagccgggatatggccgcttaccgggtcaagagacgatactga

SEQ ID NO: 330407 - DNA, 240 bp, Pseudomonas aeruginosa
atgctgttctctccatggtccgaaaccacctatatcgctgtcgtcgaccgagtccgggcgctgattgaaagccctcaggcacaagtccaacagtccgtgcggatcaagcgcgtgagcaacgaaccggaatgggcctggcttcgactggaacgagacctccgcagtatcgacggcgtaagtgtcgaggctcgggatgacgggagcttgttcgtttactggtacgtcgacttaccccgctga

SEQ ID NO: 330408 - DNA, 168 bp, Pseudomonas aeruginosa
atgaagcagttcgcgaagctgttcgagttcgaagacctgggccaggtgctcgtgatgcttgatcgcggggatgacggcccggaggtgcgcctctacttcaagcccgacgggcttggcgtctgttcagtggcgtgcagcaacttccccggcgatgaagacgagcagtag

SEQ ID NO: 330409 - DNA, 1329 bp, Pseudomonas aeruginosa
atgcctgatcaccttccctacaccctgcacctgggcgactgcctgctggtgctcaaaacatttcccgacaacagcttcgacagcgtggtgactgatccgccctacggcatccgcttcatgggcaaggcctgggacggcgccgacattgaggcgcgcgcagctcgacgggcggaaatgccgagccacgcacctgatgccgggccgaacggtggccatcgttcagtcgctgcggaagctgggaagtacgacctcaccccaaagggcatgcttgccttccaggccttcacgctggaatgggcggccgattgcctgcgcgtgctgaagccaggtggacacctgctgtccttcgcctcgccgcgcacctaccaccacatggcggtcggcatcgaaatggccggcttcgagatccgcgaccagatcatgtgggtgttcggcagcggattcccgaaatcgcacaacctgtcgggcgagtacgaaggctggggtaccgctctgaagccggggcacgaacccatctgcatggcccgcaagccgcttgcaggcacggttgcacgaaacgtcctggcgcatggcactggggcgctcaacatcgacgggtgccgcatcccgtccgagcccatgccaccgaacaccggcgctggcggtctgccgcggcgtcgcgaggacgagcagcgcggccctggcgcggtttcccagccgcacgctggcggccgctggcccgcgaacctgatccacgacggcagcccggaagtggtggcgctcttcccgcatacaaagtccggcgtgatgaagggcggcacaatccgcgcagctcaagatgcaccggggtccgtctgttacgggacgtatggcggcaacgctacaagcgaagacacgttcggcgatgaaggctctgccgcccggttcttctactgcgcgaaagcaacccgccgagatcgcaacgaaggctgcgagcacatggagcgcaagccgctgcactggtccagcggaagccagaaccccggaagtctccagtccgaggggaccgacaagaccagccagaacaaccaccccacggtgaagccgacggatctgatggcctatctcgtgcgcctggtcacccctccaggcggcaaggtgctggacccattcacgggcagcggtagcaccggcaaggcagcggtacgcgaagggttcgagttcgttggcatcgagcgcgaggcgccctacctggccatagctgaggcgcgcatcgcacacgaacttgagcgcatcaccgccgctgcagaggacgccgcgaaaggctcggcgcagctcgacatcttccacgacaccaaggagcccgcatga

SEQ ID NO: 330410 - DNA, 852 bp, Pseudomonas aeruginosa
atggaagcggcggctacggccgacgccgcaacaggcggtggcggcgtgaacgcggaactgtcgcagtacttcacccccacctgggcggcagagttgctggtgaggcgccacttcggccacctcacctgccaggacacggttcttgagccggcatgtggggacggtcgattcctgatggccatccctgcggaagtcgatgcctacggcgtggaactggacccggcccaagcgcaggccgcccggcagaactctggccgggaggtgctggctggggacttcctgaccgctcgcctgcctcgccggccaacggcggtaatcggcaatccgccctaccaggcggacctgatcgacggcttcctggcccgctgctacgaactgctcgagtacggcggccgcatcggctttctgctgccggtctactacctgcaaaccgccagcaaggtgatggacctgaaccgccgcttttccatcgcgcaggagctgctaccgcggaacctgttcgagggcctgacgaagccgatcatgtgggcgacgttcaccaaggcgcgccggaccgtgctggcaggcttcttcctgtacgcggagacccacgccctggcggatgttcaccgcgatctgcgcgccctgctgctgggtaaccgctcccgcgccacctgctggcgtgacgtggttggggctgcgctcgaggcctgcggtggccgagccactctccagcagctctatgcctgcatcgaggggaaccgtcccaccgcgaacccatggtggcgggagaaagtgcggcagatcgccggccagcacttccgacggatccgcccaggtgaattcgaaatcatcaaggagcattccgcatga

SEQ ID NO: 330411 - DNA, 648 bp, Pseudomonas aeruginosa
atgacgacgaaccagaaccaccccgacgatcaccttgccattgaagcgctccacagccgctatctcgatgtcctgaccggacgcaccagcgatcacctcctgatgttccaggacgaggcctacgcgcttggccgcgcccggggccgcctggacgtgttccgtttcgacctgcacctggagcgccagcgccggttcagcgaacgcacgttcgggcctgggtcgcgcgccgccggcgtcgtcgaccacatccgcaaggaactgcgcgagatcgaggaagcccctggcgacctggccgagtggatcgacgttgtgattctcgctctggacggggcctggcggaccggcgccactccggcgcagataatcgacgccctggtcgcaaagcagacgaagaacgaggcgcgcacctggccggactggcgcacggcgccggccgacaaggcgatcgaacacgtccgagcggacgagccggtcgacgacaacacctacttcgtcatgcgcaacgccggcggcgccgtgttcgtgaagcacggcccgttcttcgtgagccagggcggcctgacggaggactgggggaagaactggaagcgcatcagggccggcagcctcaagcatgcccgccaggtcggggaggagttgctgccgtga

SEQ ID NO: 330412 - DNA, 762 bp, Pseudomonas aeruginosa
atgaccagatccaatgcgccgctggtgcagagcgaggccgaactctgcgcggcgttcatcgacgagttcaaccgagtccccggctggacctgctacccggagactgccgggttcgacatcctggtggtccatgaggatggccggcagttcggcgtcgaggccaaattgcagttgaacgccaaggtggccgaccagatcctgccgcagcactggcaggaccggtacggggcgcccggtccagatcaccgcatggtcattgtcgggcggatcaccgaggccagccagggaatcgcgcgcctgcttgaaatgtgcggcatcgcagtgctcgcgccgtcccgcggacaccgtcggcgcgacggcaagttcgtcgacttccccgagttccacttgcgctactggctccagcacttgagcgggccgcaactgttcgactggaaccccgctgaacgctgccacgtcccgatcgtggtccccgacgtgcccgccggcgttccggcgccgctgcgcctcaccgagtggaaggaaggcgcgttgaaagtgatcgccacgcttcgccgccagggcttcatcaccacgaagcagatcgccgaatgcggcgtcagcgcgacgaactggacacgatcctggctcgacaagggggccgagcgcggcacctgggttgagtcgccccgcatgccagggttcgaccagcagcaccccgaggccttcacaaagatccagcaggcgctggacaagagcgcccagcccaacctcttcacctga

SEQ ID NO: 330413 - DNA, 747 bp, Pseudomonas aeruginosa
atgtcatctacccaacaccaactgatcgagcagtgcgccacccgcctgcgcggcatcgtcgaagccctggacaacatccacgacagcacccagcaccgctccccgcaccgctggtcgacggacctcgacgacgttcactcctcagccgagagcctgctgtccctgatcaaggaccaggcgccgacgcaagccgcccagggcctggccggcgccgccctggcgcaaccctccccggcgctaccgcccttcgcggagaaggtgctggccaaactgcgccgcttctatgactgcgccagcgacttcgaatcgggcggcgtcgatatcggccggcgctggttggacctgctgactcagctcgggctgctcaatcgcgttcagcgcagcccggcactctgggagatcagccagcagggagaggatttacttggtgcgccgcaacacttcccggcgcggaccgagcaggcaaattccggctacgaccagctttgggcctggtttggtctgagccgcagtgcatacgcagtcctgccgcgcgtgatgatgcatgcgatgccggatgagtggcagggccgattcgctgaactgatggacgaatgggacgaccactggccgaaccagccggacatcaccgcccacgtccagatcaagcagaacaaccggtttatcagcacgccgccgtggctgctcaactaccggcatcccgaccacaaccaactgaacgccatgcgcggcaaggatgaactgtga

SEQ ID NO: 330414 - DNA, 564 bp, Pseudomonas aeruginosa
atgcaacagaatgagaatttcgcaaagcagcccgagcaggcagaggcggagcggccggaggttgtgggctaccgcatcatgcgcgctcaggccgataagatttatcagcgcgtggacaaggccgccgccgaatacgaagccggccggagcgcgctgggctacatggaggacatcgcagaagccgcgctgtgccttcgcaataggctcgacgatctgctcgccgccgcgcccggcaactcggtgccgcaggcatggctcgacgtgcaggcagagcgccgccggcagatcaccgccgagggatggacgccgcagcatgacgacgagcacgccgatggacagatgtctcaggcagccggctgctacgcgctccacgccggcggaatcggcacggactggccggacggtcgtcagaatggctctgcactgttctggccttgggacaaagattcgtggaagccgaccaccccacgccgcgatctggtcaaggcctgcgccctggcgctggccgagatcgagcgcctggaccgagcagcggcgactcagggagggccaagcgatgcgtag

SEQ ID NO: 330415 - DNA, 387 bp, Pseudomonas aeruginosa
atgaagcagaaaccaggcatcgcacttccccgctggctccttcgcacaaccacgatgcagatgcacagcgtcgacgtggtactggtcatggccctggtgctccagcaccacggtacggccgacgctgttcgccgcgccgccggtcagcttcgcgacagagtatgtgccgagcaccggcccaagatgaccgcactcatgcgcatgcaagatgacgcggcggcgctgcaggtggcgctcaacatcgtccagcgcgccaccgacgccctgggcatcctggcgggaaagccgtttccggccagaccttcgcccagcgaaagcccaccggatcaggggcacatgcccgccaaggctggtcccgtcaccggtgagccggtacatcctacctga

SEQ ID NO: 330416 - DNA, 1344 bp, Pseudomonas aeruginosa
atgtccacgctatacggtaagcgtttcgactcgtacggccgcggtggccaaagacaagacggcgttgatgcttactgccggctggatgatggccgcctgatcgctatccaatgcaaaggacgcagcggtagttatggaaaaccactaacgcctaagggcttagacgatgctgtggcggaaattgcaacgtttccccacgaaatcgatctgttcttggtgctgaccacggggccgcatgaccggaaattgatcgaccatgcactgataatcaccgagcagcgccaagcgacgaatcactgccctgtcgaaatatggggctggcactcaatcgaaaatcttatccgtcaacacaaagacatccaagacgctttctatcctcacttcaaaccacaggtgtccagccggcactgggcgtttcgtgctggactcgccgctgcactgatgctgacaagcgtcatcggcgtccatcagtacttttcctacgagaacaaagtaactctgcaacgcgacgccacgaataaagggctcgacgaattcatcacactcaatgaagagctgattgatatttatgaccgatgcctaggcgcgttgaataacaacgtgtttaccttttcgtatgaattccaacagttctgcacggtacctgtggagaaaaagctgaaggctattgagctgcacgtgaaacaagcaggcgtcaagatcaacgcccaggcgttcgaccaactgaacgagctgctgggcctactgcaagaagattaccgtcaaggactagtcactgtgatgatgacgcaggcctttgaagacggaatgatccgcagccacagagcgttatgcccacccgcgaatcaggatgtctcaacggaaatactaaaggggttgcgagctccggcagaggatgcagaaattcagcaactccaattctatttcacgcttcgagactttattcttccagggctaaggtcgatgcaggcaaatgtgttggtggcggctcgacaaaacaataatcagtcagtgtctgagcttatgctcgcgcaagcccgagagctatccaagttactgagtcagcggcataactatgaactggtgaagccggaaagcccgttttcactctcagcagtcaaatccaggagcgctcgatcaataaccatctctggagatgcagggaattatgtcgaagacgcacgttactcagaaattctcctcaagagtatttcagcctcatattacggcagacccaacgaagcgcaggaaatgattgcctgcggcgttttcgagacaagtgccaaagagcagttggagcaacatgaaaacgacatcaggagtgccgccaatacgagctattaa

SEQ ID NO: 330417 - DNA, 1617 bp, Pseudomonas aeruginosa
atgagcaccggtcagctactcagtatattgaagccgaggggctttgttcgcaaagcccctcagctcctcccggagtacctgacagtggaaggcacgctgtcgactcgctttgggaatgttccatgcgaggtacacatagatcggacgttccacaaattcccaatcatcaatctgctcccgcccctgccagaacgccttttgccaatcgcaccccatattggtcctaaaggcaatctttgctatatcgcgtcaggtgctgcggcagtggatatatacagccccatcaaccagaccttagcagccttagaaagagctgccgaagttctcgatcagatcatggccggagaacgcgtaggtgacctgcaagaagagttctacgctttccttcctcatggcgcgctgtataccgatctcgcgaacccagaaaccgggcgcatatccatgcttagcctgaatggaggccgaggtcttgtctgcacggacgatatcgaacggactcaggctaaactttcaggtctcgcacaaagattttccgaattcactggtattactgagaaaatcaccacgaggcaaccacctcgtccacttataaacgcatggccgccagaaactgtaggccagatgctgcaatggcagagcaagctggatgacgcctgtaggcgaaagattcaggcaagcattgtcaaagcatatagagctcaagaagacatgattgcgatggtcatcgagtccccgacctcccaatacgcaatcgccgcgctagatcttcagaaatgcaaacgccctacaaaaacgaatcagggtatccccatttttgaagcacctgtattgctcatgcaggtgatccaactggatgatcgttatctcgtgcaacgaaacatacccaagcgcagaacactggccggactgaacatcaatcagattggttgcggcactatcggtgggtatctggccgaaatgttggtcagagcaggagcaggctcagggggaggcacacttcgactcatcgattttgacactttgcaaccgggcaatattggtcgtcatcgtttgggcgaaaattacctggaggcaaacaaagccgaagcgttggctactgaactcaaaatcggcatgacctcagccaatgtctgtgccgcaccacatgatgttaggacggtgaatttggctggatctgacctcattattgatgcaacgggtgagcaagcaatagggcactggttagcaggcctagggcaacgatcctccacgcctacacccctaatccatgtatggattgacggaccaggagctgcagttcgcaccctcaccaaaacgcatgcctcagaaggatgctttcggtgcctctgcgactatgaaagggaaggcgatttcctatcggtagtaggtggcgtaaatccaatcttcgctggagaggggtgcgaggggccttacgttccgttcccagcgtcagcatcagttcaggccgcagcattgggcctggacactgcattggcatgggtcggccaggaagcatggccaagcctagctactcgcgtcattaaccgagcgttcgacccattagacgcggatctatcgattctacctcggccaggctgtcccgcatgcagttcatga

SEQ ID NO: 330418 - DNA, 1182 bp, Pseudomonas aeruginosa
atgcttaaccttagccccctgttttacagcaccaaagaccgcaccggggaagaccatcctaccttcctgaaatccctcgatctctccgatgatgagaagcaggaaatcaactcggctcgtatcgccattcgcagcgctctgcgtgagcaactgccaggagtgcttcgagcaaagggttacgaaggaggtatgtgtgaacctaagttctttatccaaggttcttgggcatacaaaacacttaaccgtccttgccacactcctcctcagcagtccgacgttgatgatggagtctatctccccctcagcatcattcaggaggagaacaagccacacctcgcgatcgaagatttctttgatggggttcaagaggtgcttgagcccctttgtcgagccaatggctggaaggtggggccaaagcccaattgcatgcgcgtagagatttcatatctcgcccacattgacttgccgctctacgccattccggatgatcagtacctgcttctgaagtccgtaatggaggcccgtgcagcattgacgatggatggaatcgcggctaactcagaggttcagagctggaagaagctcccttcggacaagatcctccttgcatgccaaagcggctggaaggtgtccgatcctctggcgatgaaagagtggttcgacaacgaggtcgaagatgcagacggcgacggtgaaaagcagcttcgccgcgtaatcaggtatatcaaggcgttccgtgacaatcagtggaatggtcggggaccaggtaatgcgccaagctcaatcctgttgatggcagcagcctgcccgctttttgagttcaaatacaaacgagatgatgaggctctattaacggtgctgaggggcattccaaaggcgttgcgcgatggcgttcgcagccccattgaccctgaggtctacctgactgacgcgctctcttatgaagatagagaagacgccgcgaataggtttgaactcttcgccgggtttctagatgctgcgatcgccgcaagtgacaaagttgcagcctgcaactggatccgtagcaaactgggggatcgcttcccgaatcggcctgatttgatcgacgacaaaccagcgaacgcgctacctgcagctatggctgcattcgcaccagagccaggcgccaaggagatcgtgaagaaaaccaaggcaggttaa

SEQ ID NO: 330419 - DNA, 666 bp, Pseudomonas aeruginosa
gtgtatcaggttttgggcatcaaggcgacgctaagggtcttcggacttagctgcctattcatttttatattgatcttgttgggatatgcatatttctatcccagtgccttgacagatttcggagcgtactggcgcgcagcaagtatatcggtgagcatcgtcagcgcagctgtaatcgtcctcggcgaaagttttgtattcccttgggcctgcagaaaaattccctttatcaggagctacttcccccccattgatgggctttggagcgtcacagtgaaatctaactggggcgccatccagagactgatgggtaacaacgatgttgaatcactaatttcgaagaccggtacgatccgcatcacttcccgctttttcagggtgcgcctagtttttcaaagcgacgacaaatattcctcctcgtactctgtttgcgtaagcgtgctgagagatcctgaccatggcacaacgcagctcaattacatctatcacaacaagacacttgtgccggagacaactgatgccagctctcataatggtgccgcaagagtaaacatccaagacgatggaagcgtcgtgacgttggagggagtgtatttcacggatcggaaatggaccgaagggctgaacactgctggcctgatttgcttcgaaagcattaaggaatag

SEQ ID NO: 330420 - DNA, 834 bp, Pseudomonas aeruginosa
atgcaacttggcgcaattttcctggaccaggcagtcttcaatctcgagcttcccaaggcagaggaagaggtcattcctggcgtcccgtggggcgctatggaggcgtttccgacgcctgcctactgggcctaccaagtctatgcccgccgacttaccggcaatcggatcaactataagctcggggcgaccctgaaagaggaggtcggggcatgcctgttgggtggacatggcatccctgcgaacgtcggcatcgccgcatttcatcacgtgaaagagcgtggtgcgtttgacgagcatcccccgtcagaggaaacgctgcatgagtggctaagtgaacccctggaaattgatggacgccaagtgcggtaccgctttgccaagcagaaggctcgctatctcagcgcagctctacaaaagctgtcagttgagcagccaccgatggccacgggcaaagagttgcgtgattggctgctggatgtccctggtatcggctacaaaactgcttcgtgggtagctcgcaattggctggacgccgacgacgtggccatcctggacattcacattctacgggccgggctcttggccaatttctttgagagccatctgactgttgagcgcaactacctggaactcgaggagcagttcatccgctttagcaaaggacttggtgtcagggcatctgagctggacgcactgatgtggctggaaatgatgtcctctcccgccacggttcacagcatcatggggatgggacaccacaatcctgagtcagcagttcgcagccgaaccaagaagcgcaagaccaactccagccagcttgccttgatcggctaa

SEQ ID NO: 330421 - DNA, 681 bp, Pseudomonas aeruginosa
atgacctggatcgacctggctgatccccaacctagggagactcccgaaccctatgccccaatcgagtgggatgtgggagaaatctgctcactcccaactttctcgggagcgcctgatcggcccttcatagaggtgctagatgcacgagcctcacaccgggagttcggttctatcgacgaccatcagctaggctcgttcctttggatggcgtgcagaacacgaggcgtgggtgcttcgaatcttggattcaatcttgaacatcgtgctgcgccatctgccggcgctattcacccgattcacgttgtcgttaaaaaacctggtgatgatcgatggtggctgtacgagtccaggggccaccagttacacgagctcaagcacgcccccgacaagcttgcagacctctatcaccttagcctgcaggttctgcaaggcgaccaagcgatccgcttcctgtttctagccgagcccggaaagacactgggcaaataccaggatggctgcagccttgtttggcgcgacgcgggggctctactcggagtgatggcactgacagcgacagccttgggactcaacttctgtccactagggatcaccggcgagccgtgggccagtgccttagccgatcaaggcaagctggctggagttggtcttgcgcttcttggttcggctgcgaactgctga

SEQ ID NO: 330422 - DNA, 1215 bp, Pseudomonas aeruginosa
atgatcaccatcgcaggtggcatctaccgggagcgatgcatgcgcccggcttgggacgatatctatggatcggcagggcgcgcagcgacggcaattgcacgttttggcgggcaggctgaattgcatgcctacgtggacggcgatacccaggttgttatggaggctcgtgcagccgcagagggtttcgcattcaatcccacagtttctcctcaggccggggtgaccttcgagtacatccacggtctcgccaccccagatattcgccgtggcgtccacgccagctcgcagctccaggtcaccgctgagaaggtgcttcggttcggcatgatcgatggaaccgcagtagtgaatgctgaatatgcggtatttgacccccaaaacgcagaaggccctgaatccttcagtgccaatggctccacagccaaacacttggcgcttgtcctgaatcgccacgaagccaacctgctacttccagactccaacggactgccccccgaggaaatcgcagcggcattggcaacgcaagagcgcgcggaggtggtggtcattaaaatgggcccactgggcgcccttgtgtatgacaacggcattatctcgagggtaccggcgtaccgaactgagcgagtatggaagatcggctctggtgacacctttgctgcccactttgcactggcctggttggacaacgggctgtcagctcatgaggcggcctcgattgcctctatcgcaacggctttctactgcgaaacccaaggtttcccagacaaaactttgttcgatggattcaaacccaaggccctgcagccctccgagcgataccgcaatggctacgccccgaaggtctaccttgccggcccattctttacgctagctgagctctggatggttgggcaggctcgccgagaccttatagacatgggcctgaatgtgttttccccctaccacgatgtcggtctgggtactgctgaagacgtagtggagaaggacctagaaggcgtgcgcgattgcgacgtcctcttcgcgatcggcgatgggctcgattcaggcacgatctacgagattggctacgcacgagcactgaacaagcctgtcgttttctatgcggagaatgagtccgcccaagacaagaagatgatggaaggctccgactgccgtatcaccgatgactatgtcagtgcggtctatcagatggtttgggaagcggtggagctatga

SEQ ID NO: 330423 - DNA, 318 bp, Pseudomonas aeruginosa
atgtcaggttcaggcggcagctatctgggcccatccacccccaccaattcatgcgaaaccctccagtttgatacccagcttgcatcgccgaaggcaccggtggttggccagctgagcgtcggcgacattcttgatatcgcctttgcagcgacaggccaccaagtcgtcatagcactgtggagcggcgcagaggccggcggcatcgtccactcgcttttgacccaattgcgcaactgcatgacccagggggagcaatttcaagcgcgtgtgctacagatcaacggcgggcaagtacgggttcgggtttaccacgcttaa

SEQ ID NO: 330424 - DNA, 4833 bp, Pseudomonas aeruginosa
gtgagtgccagtcagggacaggatggggaaaaaatggatcaaatggccaaaccgcacatcagcggctcgtacaccgcgaacctgcttggaaacatcagaagtcacctggcgggacttcaaggctatgacgtcatggcccttgaactcattcagaatgcggacgacgccaaagcggagtcggtgatttttgacgtcaccgaccaagggctcgttgtattcaatagcggtcagttcacctactgtggcggcctggacaggccgtgcgcctttcttgccgaaggtaactacaagtgtgactaccaccgaatcacggatgtcggcagcggtggaaagctcactcgtggtgagaacattggccgctttggtatcggcttcgtctcgacctatcaggtcacggatcacccagagatccgatccgctgggatcagactgacgttgcaccccgaaaaagggcaatggtccatcgaaccactccagcagcccgagggcaccactttcttcttgccctgggcagacgacccgaatactgaggcacgcttggcgctcggggtgtcacacgtcagcaccgcacacattgatcagctcgtcgacgattttcaaaaggtcctgcgcaaaagcttgttgttcctgaggcatgttcggactgcggagctgcggcgaaatggcgaactgctgttggcttgtgatttggagcgcggggatgggtcggatctgatcgttagttttcgcccgagtggtgaggtggagcagtggcacatcttgcgggctgatgctgcggagtctgcggctcatctgtatgcctcacacccccgacttgaatcccttggtcggggcaccaaggtcagcattggcttgaggatcgatcctgagccgctcgccgagggactgctctacgcgttcctgccaaccgaacagtcgaccggtctgcctctgcatatcaatgcagacttctttccagagtctgatcgaaaggccgtgatttttgctgggcaccagcatgaacaggcctggaatgagatgctcattgacgtcgcggcaacagagctggccagagatcccgagggtcttctcaggatgctcggcgacgttcagttttggcagatcatggcgcgaacgtttgatttgtcgagagcgccaaatcacccggcttgcttcaagcggttttgggaacggatgctggcgacagcctctcaagcgcgcattgctcctgcacaggatgggagtgttcacgttcccagcggcgtattttttcctgataaagcactgaactctgctcaagtcagtgcgttgaaggaagttggcgggcaagtcatcaccgaggatttgcggcctttcagaacggcagtcaatcagttgggagccccatttctgacgtttgaacgccttgttgggctgcttgaacaagccatgtcacctcaggcggctgtcgcactacgggtggaagaagaacgccttgagagcttctatcgtccgctatggggaatgattaacgagttgttcccagaggcaataacgccccctcctgctacgaaggcagtcattcagcggttgcaggcgatttcctttgttgtcactgaagacctgtacgccgctacgatcagtcagtcctttgtcgcgcccgctgcgctagatgttgggcgggtggcgtcgctactgccaaggctgttcattgcgtcgcgccacatccttggattcccgaagatcgcacgacaaattcgacaacttgagcttggtgctgttgtccgccacatcagctcgttatgcgccaccgatgccatcgaggatgtcatcggcgttgagcaacaagagttgcgtgacctgtatgcgatgtttgctgatctggatcgctacggcagtgttgacgcagcggtgtaccagtctcttcgaaatctgccaatctggctttcaagccgaggtctgatcaaagcgtcacaagcgctattgccagggaatttcaccgaccctactggccaggccgatcttctagaaacctctgttctatctgcttccgcgagagagttcgtgtcgagcaaactcggcgttcagacgcagactattgaagcgttcgtacaaaatgtcttgccgagatttttcaatgaggaaggacctctggatgcatctaaatacgcccgcctgattggcgaaatagccaactatccggcgctcgtgaatgatgaaagcattcgtcgactattgggggcactgccgataattcccacgcaggacgggaattggtcacgacccacggaaacctacagacgcaccgatgatttggtgaggattcttggcgatgctacgagtctttggctcgacaccagtcgtgtaccaaacacccggtcggtccactctttcattgagagcattggacttcgtcgctcccccatggcagagcatctggttgagcggatgcttttcatcgcagaaaaattcctgccgaccgaagatgcaaaaagagccagcagcgaggccttctatgtcctgtgcgaccggttcgatgaatggaaggaacagtcgttttttcaggacgccataagcagtctcaaaagatcggcatgcttccccgcgattgatgacgacgaggactggtatttcgcgaactctctgtatgcgccttaccgtgccgaagccttctcatcacaagcgtcagtgctcgactttcggaatatggcaagactcaaccgggacttgctgaagaaactgaacgttgcgctggagccagaaacttcgctggtcatcaatcaccttcgtcattgcgtagcaaaaaaatcaccagcacctttcaccacgtatcagatactcaacgagagatcgaaagacgaaggctcttccatttcgacgttgaccggggaaccgttcatctacatcgaaagccagaagagctatgtgagatccaatcagcttttctggatgcctcagcagcttgggcgctatgcgttcaccattccaggcaacctcgaagcgttcaagcccttattcaatgcgattggggtaaagaatgcccccgaaggtcgggactacgtcgacatcctgctggacatcgtagcggagtatttcgagcaatcgaagcccgttacaggggtagatcgatctgtttacgaagcctgccttatcggcatcgcagcctcagatgagcgcgaagaactgggcgcctcggacattcgaagactgcaggaagcgccgtcgatactgaacctgatgggacagccaacgcaccctgacgaagtgcttcttcaagacagcgagtggcacgcaggtttcttcaacggggagcttgacttggcgctgtgcaaacccgccccggagctgtggccgatccttgagaagatcggcgttaggcggctcagtgagagtgctgaggtcgcacttgagttcgttgatggtcaaaaggcagaggaaccgcagcttgccgagaagctgatggagcgtatcggcatccttgcccgattgctccacgacaaaccgaccacggtccagaagaagattcgagaagcaatttggaagctgaaggccataagccacgaagttgtccgtgttcaatcgtctgtttgcgtcgttggagatggagacgcggctccgccgagattgtcagaacctaaacgcacccaagcgttttacgacatagagacgcaccagttgatcgtggagcggccagtggttgatcggagttggccgcatgttctgaatgccatcttccaccagctgatgccggaagagtcaggcaatgaaatactaaaactcactggcatggcggggccacggatgcggatgtcagtcgaggaggctcatcaagatctaacagactcgggttttccgcaactcgaagcacaggaggactccagccccgaagatgatctgacctcgtcgagcttggacgatttgggaggcacgacagagccggggtgccagccagagagcaaaccggatggcgcgtcagtcgatgtgacaaaaggtggagagcgcgcaccgaatatgcctggtacgaatgagccgacagatgattcgaatgctcctcccaagaatgtgccgccacccaataaagggcgtccacagaccggttctaacgacgcacgagaaatggatgtacctgatggtgaccgggctactgggcacgaccacagaaccgattcgccgattggcagcgcggagcgcgctaagagaccgcgtccaaagcacaaggagcaatgggatcgacgactgctttcttatgttcgaagaaggcaggtggagttttccgatgcggacgagcaggaaggtccgtctgaacacaaccttaccgttgaggttatagctcgcgcagctgtctgcgcctatgaaaggtcccggggacgcgtcgctgaacagatgccccaaacccacccgggctacgacatcatcagccgaaatccgttgacaggcgaagaccgtttcatcgaggtgaagggcgtcaacggcgagtggaatcagacaggtgtgggtttgtccaggctgcagttcagcaacgcccaagactacggtgatcgctactggttgtacgtggttgagtttgtttctgaccctgagcacacccgcgttcacgccattcgcagtcctgccacgcaggtgatatcgttcatgttcgacggcaactggcgcgatgctgttgcagaggagcgcgatgacccagcacttgcatttatcgcgggagcaagggtcaaacaccagcactttggcattgggcgaattgaatcaatggatttacgaggttcaactcgtgtgatgtccatagagtttgagaccagcggtcgacgcacggtcactttaaatctgcagacgatgacggtggttgaagataccgatgacaacgatcattcctga

SEQ ID NO: 330425 - DNA, 915 bp, Pseudomonas aeruginosa
atgtcaataacacaacttgccgacttgacccaaccgcaacgcgaccgtctcgcgtttgtggagttgcgcatacgcttcatcggggagattcgccgtcaggacctagtgtcgcggtttggcatccaatctgccgctgccacacgggacttggcgctgtacaaagagatcgctcccggcaacatcgactacgacgccaaagcaaaggcttacggtctgggcccgactttccggccggtctttgattttcccccagagcgagtgatgtcgtggctgactcaaggtttcggcgacggcgagcccatgcacatcagtgcctgggtgatcagcgagcgcccgtcttgccttacctacccagatctggatgtgctggctagcgtgacccgggcaatccaccaggaatgtccacttagcattgagtaccactcgatttccagtggccgcactgagcgggaggtagtcccgtttgcgctcatcgacaacggcctccgctggcacgttcgcgccttcgaccgaaaatctcaggagttccgggatctcgtcataacccgtatcaaaagtcctgccgtgctcaaggagctgtcggtagcgccgcacgagagaaacgaccaagacattcaatggactcgggtcgtcgagctggagttggtgccacacccggatcaacctcgaccagagatcaccgagatggactacagcatgcagggcggcgttctgcggatgaagctgcgagccgcgacagccggatacattctgcgtagatggagcgtggactgctctcctgaccatagcctgcgtgggcatgagtaccggctctggctaaaggaccctctggcgctttatggcgttgcaaatgcaacgcttgcccctggttatcgagccccgacaccccacccaatcggcggaggggctgcatga

SEQ ID NO: 330426 - DNA, 2124 bp, Pseudomonas aeruginosa
atggcaaccgaacaaacactggaccaacgctaccaagccatccgcgccaattacagcgactacatcgagcacaccccgcttaatagcgatcacgatttcgtcaaagccgggctgatctggggagaagaccaaggcaaccagactccctcagtattgttgatcgccctggagccggggcattgggactattcgcgcgaagacaagctggatcaactggcttacgaactgctggccagcgtcagtggggattggcctgtgtttgcccatctacaagacgacaaaaacacccgctgctacagcctgtttggcgtcgatggcagtgatggcacccactcggtggacgaggtgccttccatcgagctaattcgcaattacgaaaagctggaaaaagacccgaccttccgctggtcgatgcgtatctacacccgtctgatgcaccgctttgacgccttccatgaacaggtcttccagaccgtcaaggatcgcgtcaacgacaagaacgacatcatcgaggaagtggccaagctgctattccttgaaaccttccgcgttcatcacggtgatgagctcagctttaccgaccacgaaggcaagacccagcgctttcgcgaggtgtttgaccatcgttacgtgaccaagcacggtgccaaggcagtcgagcaaatcaaggccgcctttgaagcctttaaagcacacgaagactacgtggtggtcagcgatgacggtactcgcaacgccatcttccccagcgactcccacctacgcctgacgcagccggaaaactaccgcaccttgctggaagccatgcaagaccttgggccggtaacggacaaccagggccgaatgatcgctggtaaagaagtgggcaccttggccgatgtggcgggggatctgctgggccgggtattcgatgtgttcctgcgtgcaaactttgaatccaaaggcggcctgggggtgtacctcacgcccaacccggtcaagcaggctatgttggaaatcgccatgcacgatatccagcaagacaacgccgccatggagcgcctcaccgctggtgccttccgcttttgcgaccccacctgcggttcgttcggctttggctccgtggcgctcagccacatcgagagcgtgatcgatcatctgggcggcatgagcgatggtcagaaaaaggcgctcaagcaaaccctgcgcgacaccgccttcaccggtgccgatgcggccccacgcatggtgatgctggcccgcgtcaacatggctctgcaaggggcacccaaggccaagattttctacaccgacaactcgctcaccaccaaggcgttcaaacccaacagctttgacctgatctgcaccaacccgccgtttggcacgcccaagttcaccagcgacaaaaagggtaaagaatccaaagaacgctacgaagcgcagatggagcaagtcttgggcggcttccgcccggccaaactcgaaaccgagtacgttgcttattacgattacgtcaagaaaacctggcaagacctaggaaatctcgacctagatgaagacggctgccccaggtggcctggctaccgcaccgatttgcgcaatgtctccaccggcaaaaaggcgacctacaacctgttccccaccaccgacggtttggccttgggcagcaagcccgatggcaaaggtaactggaaaccggtgggtgccaccatcgacccggctgtgctgtttatcgaccgctgcctgcaactgctgcgtcccggtggccgtctattgattgtgttgcccgatggggtgctgtgtaactccggcgaccgctatgtgcgcgagtacatcatgggcaagaaggatgaaataacaggccagtttgtcggtggaaaggccatcgtcaaggccgtgctgtcactcccggcggacaccttcaagctctccggcaccggagccaagacctcggtgctctacctgcaaaaacgccacgccagcaatgagcacccagagcagttcctgccggagccgcaaggcgatgtgttcatggccgtagcagaaacgctgggttatgtggtgaaaaacaatattgaggactactcggccggtgtgccgaatgatctcgacaagatcgttggcgcgtacaagcggggtgagtga

SEQ ID NO: 330427 - DNA, 1521 bp, Pseudomonas aeruginosa
atgtttgcaaaacgatatcgcccagatgaactgattgaaatcattgcggcccagtcatatagccctgagatcgttgcatacgtaaaaaaggttgcgaatcaacccacattggcaaattaccttaaatcgaagccaaagcttggtgtcacagggacgattgcaaaagattacgtcgaggcgacaacgccaaatgctgttccctatatctcgacgaaacaggtaaagggcctgcacgcttacattgaggatgctaaatacatctcaaaagaagccgatatcgaatggaaaaaatgccgtgttgatgacggcgatattgtgatcaacaaaagtggcgatgttggtgccgctgcagttctgtgctgcgcgccttacaaatatgtcaattctgtttccgacatcatcagcattaagctatccgagactgcgccagttgatcgcgactttctggttgtttacctaaacagtccctacggtcaaaaacagctgcagcgcttgagtggtggcgcgatctttagccatgtgagcttacatgccatcccgcatatcaatgtttatgcagcggatgtcttggctcaaaaatacatcggcgacaaagtccgccaggctgagcggctgcgggcttgggcgacgacgcgaggagaggcgatcggggcactggtcgcaaatgaggctatgaggtccgcttgtgcagcgactgaaaagcagcacaaccgaccgcaactggaagatctcagccaccggctcgatccaaagtattacggcaatcgcgcggtggccgtgtttcggcaagcaaaagcgcttggaaagcccctgtctagtctcgtcaaaacgatcgcaaacgggtttgaggagcgcatctttttcaatgaggggcgtgactacattaccgttaccgaggtttcgtcggggcgcttggatttatcgtccgcacccaaaatcgcctacacgacagaagtcccggataaggccatcattcatgagcgttgtgcgttgattgttcgtaccgggtcaattggtaccgcagtcaaagtcgatgtgcgggaccgaggcgcggtaataagtagccatctgattcggttggaatttgaggatgaagcagcggcagcggccgtcgctgcgtacttctgttcacctgcaggaaaaatcctgcagcacaagatcagctacggtgcggttcaacctcagattgggcaggatgaactcttggcgttgccgattccccaatttgttctggatgcaaaggagcaaattttggctttggtgaccgagcaagaaagagccatccgtgcatcgaaatcgttaacgacggcagctaaataccttgtcgaatccctaatcgaaggccaactcaccgaagctgaattgctcactgccgaaaaggcattgcaagcgggcaacgaccgactggatcgcgttattttgagccgattgaatactgatggtatcgatggccaaggtccggtgctatttggcgatctgggcgagctttaccagttgctttcacttgctgagggggattga

SEQ ID NO: 330428 - DNA, 1323 bp, Pseudomonas aeruginosa
atgaccagcccccatgccactttggttgccttgatcccgcgcttgcgcgccttgctcacaatgggctttatgcctgacattgccaatgagtgcgacggctcggcgctgttacgcaacctggctcacccggtagaggcagatggggccgacgaccaaggtaatggcaagggggctcaggatcatctgggcactggttcaggttggattatcagccagcgcctactggccgtgcgcctggacttggcgtctgacgctgagctgctttgttccctcctggcgcagcagtccgaggtgcgcgttgcatggctggcgattgccgctgcgcgctgtaaagaggcagggcaaatggctgtgcaatcggctgccgtaacgccggctcaggggaacgcaccgctggtggaattagtatctggcttggggccagccgctgcctgggtggaagcggccctggacagcgcgcgactcactgccagcccttacgctgcacttgagcgggaattgctcggggtgagctttgagcaggcggcagcaacgcctgcactggtgcgtattctggctgtcgccgcccagttggtcgcgtttgccgatgcgctccctcccttacccaaagtggacgccagcggcatccatgcgcagcagaattgggtactgggacgactgttggcattgcccgttgtactggaccttgccgatcaaaagccggccatcgatgcgcacgtgatcttgcagggtggcttggtgcctgcaataccaaaaggccaaaccaccatgaactgggtgttggcccagccctgggcgctgctgctagccatgctggtgtttgcgcaggatgcctggcgcgcagaaaaccgcggcggtttactactggagctgccggcaggtcagaacgcttttgcgcctgctgaaattgccgtcacagtgattggcactgagggcgacgaggtgcgctgtggcacgctggccgacctgctgttgggcatgctggcaaggctgggggtagcctgctttccgcagccgccttcggcttccgaattgaatgcgctactgtcaccgctggtgggcttgttgctcaagcacgcggtctggcgttatcaggacggtgccagtaaccaactaggccagttccagattcatccgcagttttctgatcagtgctacagcctgcccgcgagccgggtgttcaaccgcaccggcaagttgctgtggcaggccgcacgcttggctgccgaggcactttatcaggactacaagaaagtctatcaataccgttccgtccgcgaaccggaggcggcgtatgtggttcagggggaacctactgcatga

SEQ ID NO: 330429 - DNA, 4287 bp, Pseudomonas aeruginosa
atgaataagaacgatcagcttaccgacgccgatatggtcgacctggcccgtctccatagctgggcagccaccggtgtttccgattatccgccgcgtgatcccttggttggccagagtcgcttcttcaaacgctatcgcaccttcatccacacggtggatcaggaggcggacaactttgcccatgtgtttgcggtcgaggcggaatgggggcgcggtaaatcgcgtctggggcatgagctgatagcccagatcaacgattgttccaaaggctggtttgtacgcgaagacggtgcgcagctggaagataaaaagctgtttgatcaggctacgcaagataagtacctggcgctgtacatccgatactcccaagtcgcctctgactaccagaactcggacaactggtttggctttgggctttacagggcgctgctgccgctggcgaccggcaagtttgatggttcgattcaaagcaaaattgccgagcaggcgctgcatcgtctgaatccggcaggcttcgaccctcaacagctggcgcaatgcctagagctggatcaggcccactctgaagaggcactctacgaagaagagggcttggtcgtgcgcctggtgcaggctgcctacagctatctggaaaaatttggcatcggctatgtgctggtagtgctggatgagctggaaaccgtggccgaggcggccacctttggattggagcaagacgacgccaagcgcctcgatggccaagccatccgtctgattggcaaagccatcaaggaggaggacccgcgacgcaagctaccttggctgcgttatgtggctttgtgctcgcccttgctgggccagcagttgcgggagattcaatccgtcgcgcgccgttttgagctggtggagctggagcacaacgcctttgccgatgtgtctgactatgtggcccagctcaaggtcgagcgaaagttggcgcacgactaccccacagggctggttgaagccgcctacgccatgagcggagccaactttggttggttcaacgtgatcatggccaatgtggatgcggtgctggctcagtacgcggcagtgggtaagcaagtcaccgatatgggcgtgctgttcgatgcggtggtagagagctctggccgtgtcgctgagcatgtgctggacaagcacgccatcgagggcatcaagaccggtgatcacgatctgcgcgccatcgcgcagtcgttgctgtacggccaactgcctgtagccctggatgccgcaccagcgcgctgcaaagaactgttgcagctggccaatgaggatggcgaaccggtcgccagcctgtatcgcaagatgccatttaacgcgctccaatgccgccaggcgctagaagaggccaagttcaaacgagaaaaggacgaatggctgtaccccgctgtcgagcaggcactcagcctcacggccttgctgcaaaacctgcgtacctttgccatcaatgaggccgagaaagatgtgctgctgatgccgctgtcgcgcggagagttcaagcatctattgagtttgctctacgaccacccggctgtggagtttgccgccgatgccctttggcaaaagctgattggcggcgaccagttcattccgagtgaagaagccacgcatattggccccagcgtggccatgttgctgagactggacttgcgctaccgcaaccagcaacacaattcgatgatcttccgcgacccggcggatgcggctgtgcacgaagcagcgatgaagaccttcttgcaggccagcggccacaacccgggcctgcgctggacggcacgtctgatgggtttgatgcgtttgctggacaagaactggcagtacgcacagaccggcctctccaacaaagagaatctctacattcaaaccagcccgtgtgggcaaggcgcaggtcagcgtggtggcttgttgtattgcgagggattgaagctgcacccggacaatctggcttggtttgcctgggtgaacaaccgtgaggagctggaccgcctgcatcaattggcggcaacgcgccatgctgatgaaggccgcttcccggtcatggcattcacggcatcgactcacttgatggagcagtacaaccggggcgatgtagaagaaaagctcaaagacgatctactgctctattacctgaaccccagcgaagtggaccagctagaacgcatcggcctctcgcccgagcagtgcaagggcttgctactggatgaggcgcgactgaccagcaagttcaaaaacaagctcagcgccctgcgcgactttgcctatcaagcgatccagcaatggcgtgcccgcttgaatgagcgtggcttaattgcttggccgctcaagcctaccggcaagatcaacacgcaggaccgcgatctgctgttgcaggcttggaccttatttgttttcaaggagccagcccttttgggtctgaatgatctggaaaccaagcacggtattgatgccgaagaagtggcatcgctgatgcagcgcctagccttgccgagcaagctgctcagtctcggttttgctcggcaagagcatacaggcttgtttagcgacttggcgaacccgcagcaggcgcaagccaaaatccccttctttttggcgcgtatagccaacccggccagcacacaggaatggacactggagaaggcaaagcgcgactggtactggggctacttgcaacatgctagcgtgacagccaagaacgtgttcgatgactggatgtggtggtgcggagagttgcatttgctgcagctgcaggacgctacggccgcaacagccaaatggcaaagtctgcctcgggctaagctggataacgccatcaatgaggcgcagaactggtttgatggcaacggtgccgacggctacaaggctgtggttgccaagttagaacgtgttttcggctatgaccgcatccctgggcttttcgcacccttgggcaagtcgcctaccggtactgaaacggtggaagcgcacgaattgctcaaagcggcccgctccgcctttgacgcgctgaaggtcggcgaagaagcgctcgccttgcaaggtgccgatgctttgtctgctattgctgacgagatacccactctgctcgccggacgctttgaggtgctgcagcgcgttgcgggtgtcaagccggagcacgtgcctgaaattaccttgggcaatatcaataccctgcgcctcgacgataagagccaatcgctctatcagcgcatcgaacaggcccggctgtttgcagattacgtggagaaggcggcaactcaaatcaagcaaggcatcgatcatctgatcaccgacatcgaagctgatgcaaagaatctggctttgttcccgcgtagcttgttcaccctatcgctacagacggtgaccaacattcttgatggggctttgcagcaacacaacgccagcggcactgcggcggcagagggtactgcgagctcagacaccttgctgtattacctgcgctcacttcaactggacaaggcggcggatcgcctgcgcctgctcgccgaggaagcgggcgtcaatatcgacaatggaacggctttggggctggccgataaccttggctgcattgccagtagctatcgagcgggcaagaaaaaatttgttgagatcaccgggtacctcgcggaattgcaaacacgatgtgcagaggctgcacgcgttttggagcccatgcctgcggattactcggcgccagaacacgcacaagagctagcaacgctcgctcaaaaactggtgttgattggcgatgcgtttgaggacttggctgacttggccaagaacgagcgtgaaaagtttcgcgagcaagcacgcaaggggcagttcagtgccatccgcgacatccctgaccgtttgctcaaccccattcactctcagttgcacagcgttggtggcgccatcagcaaggttgaaaacaccatcctgtcgcatcgcgaaaccttggtgagtcagaccaatgagcgctaccttccagtgctgatgccactgttcagtgcttgcagcgaagctgcgccagcggcaattagcctaagtagcgtatctccactcaccttgcatgacctgcatgtgacgatagatgtgcagcaaacgcagtgggaaaccaaagcgactcagttgttaagcgggacaggccttgacttcgcgagctggcaagatttggcgaaggcgatagctgagggcaaaagcccagtactgtcgcaacccgctcaagaggctttggtggccaagggcatcctgaaaatgaagctctatttcgggggggatgcgtga

SEQ ID NO: 330430 - DNA, 777 bp, Pseudomonas aeruginosa
ttggccagcttgctgggaatctcccagtcgtctcagcttggcttgccgaagaccggttttgtgttgatgacaggcgaagctttgcaagcctcgagagagactcaggaggaatgtgctgcctgggtacgccaacccggttgttcactgctgctgctgccgccataccaggaagggagtatttttcattttctggactggatggttgagttggcccagtccaattcactagccgccaaacaggcatcgcttgcgagcatgctagagggcgaggtggcgttcaatctgcgtgggatagatggcgcttgtacaggggaaatgacgccgggggagctgaccggccatacacgctattggaaggcacactccaatagcggcctgatcgctgccacaacgctaccgctttggtccatcagtttgttggatcaggcgtcgttggttcatgactttctggccagtattgagcggcattgtgggttgccctctcttagtgtcgaagaaataaagccccaagaaaatgatgcgatacgcccggaggatgtcaccgtgttggtgtgctgctacggattcaatgtcgcgacagccgagggcatgctaagcaggctgaagacatatgccgtgccgctgttgaacttggccagcttcgatttgccggaaagcatggttcgccttagaaatgccggactgatcaatgaacatggattaactgagcagggattagtctatctgatggggtgtagatactgggcatttgccgaaagcttgagaaatgaggcctag

SEQ ID NO: 330431 - DNA, 1143 bp, Pseudomonas aeruginosa
atgaaagcaaaaactcttgcgcaagcattggctattgatagtcagctgggattgccgggcagtgctgggcgtttgctcaaacagattcgtgatattgagcatgtggcccccatatttcgggatgccggcttaattaagggtgtcaagcggccagctgtcgtcaacctcacggtttcaggcattgcgagtcactcatgcattcaccgtgctctggggggctttatctacgcatccgcagctgtgcggacagatctcaccattcaggacaataaggtcggcacagctgggtccgattcagtatcagagttagacgacatagatttcgaagcccagagaaagcgcttggacttggtggagatgaggcactgctatgcccttgtcgagcgactgttaaaacagggtggttctgccaacttgattttgatcgacaccccgttgttcattgaccgggaaatggtgcctctgaagcggaatgcacggcactgggccgagtttgaaaagaccagagatgtaattgaacaattttggcagaaaaaccggaaggctttatttccatggaatccggaaggtcctgtgctcgttagcattctggctgagcgattctctgccattgtcagtatcgctcgtcaggacttacgaactgaagacggccgcaagcacattttgatcaacgatggttttgcaccggaatcggccgccatgctcgaaggcctagaggctcgactgagcggcattggtgatatgcgttttatcaatggaatattaggcaacttcacccgaactattgcttttcggatgactgaaaatcgctcccgaatggaacctgctagtgaagtaagccaaggcgttatcggctttcacttccgcagtgcgcgtgcaagtcaaataaagatggctcaattggccggcgaagagtcggactgggattccgccttgttagataccgtggcatctcgactgatgattctggacatgcaaagccagaaaaaagccatgccactaccgcagctactcagtcggcagcaactcaatattctcgaaaagttctctgcctactaccggcaggggctaaatgaagcattgcggagtaacgacgtggaaagtacgtggttatccggtctcgatgaggggtttgaatcatga

SEQ ID NO: 330432 - DNA, 1686 bp, Pseudomonas aeruginosa
atgaaacacaaggtacttggaaagctggtcggtaacaccggcgacgcggcgcagctgactatggtggttcaggattccttttccgttcgtcgtggagagtttgtccgcatcatgcatcaggagcgcgcggatgaaagcgtggtgccggtgcttgggcgagtcaccaggattacccgaaccaatatgctgttcaacgctggatttggtgatggagtaactgagcttgagttgctccccggtgccagtgtcacaggcgagaacctctacgcaaatgtcgaactggtcggctatcgcgatccggtttctcgccagataaaaattccacgccgtccgctagacccaggtgctgccgttgaaacagtagatttccaatttctaagcgacttctacgagttcaacgaacacaccagtttgcacctggggaatctggttggctatgagcgcggcgataacacggtgccagtctttttagacgtaaacaaactggtcactgagcacatggccgtactggcgatgacgggatcgggaaagtcctacactgttggccgtatcattgaacgattggtagcgttgaacaacggaacggtggttgtttttgatccgcatggtgagtatggaaaggccctggcgaaggggcaattgaatttctcgggaggtctagcggagagcgaagacggacgcgatcgtacggcactacccaaaattcgcgaaaccttggaacgattgcaggaagccggagcaggcgtccatgtttacacgccacaaaatgaatcgttcaaacacaagtacgcaggcaaaaacgtccagcttgcgctgcagttcgatcactttgaaatggatgatgtggcagaaattctgcctgggctgaccgagcctcaacagagggtgcttgatgttgcgttgcgctattggcggacagccgacaagaccgagccacgggacatcaatcgccttcgacatcttctcggagatggtatcgaagaattgcgtgagtgggatgacctttccgaggcagaaggcaaagcattgaatggacgcagtgccgctgtgacatcgatgaagctgtcgcgggtgctcaacgaagcgcaaagcttttactctgctgccatgtccgctccaaccgacatctacaaaatgatcgggcgtccttcgaataagcaagggcgactcgttgtgatcgatctgcaaggactgagtgatacggctaaacaggtaatctgcgcactgctttccagtgaaatcttgcgcgcagcctccagcaaaacagatcctctacgtccttgtttcctggtttatgaggaaggacataatttcgcgccagctggtggaagtgccgtcagccatcgaatcatcaagaaaattgccggcgaaggtcgcaagttcggtgttggtttcgccatcgttagccagcgcccctcgaagctcgatgctgacgtgacgtcgcagtgcaataccttgatcaccatgcgactgaagaacccggatgaccagcgatttatcgcaaaagcatctgacatggtaagtaaggccgacctggatgagttgccaaacttatcaacgggtgaggccttggtctgtggtcgatctattccggcatcgctactagttaaagttggtggcaaggcactgatacacggtggtgagtcgcctgaagtgctgcgcgtttgggggagttttggtgactga

SEQ ID NO: 330433 - DNA, 1230 bp, Pseudomonas aeruginosa
atggggagaattccaccagagaacgaatggttcttcatcgaaatggagtatttcccgagccaaagtcttgcccaaaagcttgagcagagaagtcagaattttggaaatacgtttgagcgcctgtttggcatctacgcgcaggtgctcgacgctgttggttttttggcgaccttgccgacacctatctctcacggcgatatcaagccgcacaatattctcgtgggtgcgggagatttggtgaagttgactgacttcgggagctccgctctgcccgaagaaatttatgttcgaactagagagaacggcggaactgttttgtacgctgcgccagaattttccgacagtgtttcacgtaaggggacttttgatgacttactgagaggcgacatctacagtctcggtgttctcttgtaccaactgctaacgggacagctccctcacgacacgccatctcaagtgcgtcgtcatgcgccatttaagcgccccagcgaaatcaacgccaacatcgtacctatggttgacgccttaatccttaggtgcatggaaagggtcccctccgctcgatatcaagatattgcttcgcttcgcagtgcttttgagtcggcgaggcagcaacaattagacgcgcctcagtattccataacgccatttggcgggcaggcttcggttgattggtcgacagcagttgtcgagtctctggagacaaaagactacctaaaggcggcaagagttgcggaagaggagttcgcccgtacccacgattccgctgcgttgctgcaacagctcaatgccctctatcgcgcaaacaggcttttcgagtttgaagaagtattccatcgagagtacaagggcgacttgcatggcgacgatcaaaagctgattcggttgcttggcattaaggcattcctgacgcttcgtaaaacaaattttgcgaaagatctcattcaagatgccgagaggcaggatggagaatctttagagcttgattttttgcgggcgaccttatttggcttggaggctaacttttccgaggcgcgcgaagcgcttgagagaatcaatagaaagtgcccaagtaggcctcgcattttaatccgcttgatccaggtttgtgagcaaatgcgtgactacccagccgcagtggggtatttaaagcacgcattgcgcataaccaataattctgccgagttgatggcgaaacggcaccgttaccaggggctagggctatggtga

SEQ ID NO: 330434 - DNA, 1458 bp, Pseudomonas aeruginosa
gtggcgaaactgacggctaagcaattggaagcactcacctcggccgacgatggcaagacactacgtgaagatggcggcctggttgccaaggttcgcgctggcgtacgcggcgtcactgtcatgtttcgctacgagttcaaactggatggaaccaagcgcgatcatcgcctgggcagttggcccaagaagtcgctggcgcagattcgcaccgagcgcgacgaagtgaaagcgacagcctccaaagggatcaatcccactgctgcccgcaaggccgccaagatcgaagcccaggccgctatcgccgctaccattgccgaagccgaacgccaggctgcagagaacaagacagtcgccgacctcttcgaggagtggatgcgcgatggggtatcacgccaggacggcaacgcagaactccatcgcagcttcaccaaggacgtgctgccgctcattggcaaaaagcctctacgcaccctgactgagaaagacctgctcaacgtcctacgcttggtaaaagcccgcggtttgaaccgcactgtcgtgatccgcagcaaggacatcggccaaatgctgcgctgggccgagaaacgcaagccttggcgcaccctaatggctgacggcaacccagccgacctaattgatgtcaacaagctgctcgaccatgactaccaggaacagcgcgaccgcctgctctcccccgacgaaatccgcgaactacgcgacatcttcgtccgcctggagcgcgactacgacgccctcgccgccggccagaaatactccggcattcgaccagtcaaccttcgcgtgcaatgcgccgtatggatttgccttagcaccctctgccgtattggtgagctgctcaagtccgaatggcgccatgtggatctggagaaaggcacctggctcatcccggccgaagccaccaaagggcataagggcaaacgccaggaccaccatgtgtttctgtcagcctttgccttggagcagttcaggcgcctcaaaaaagatactgggcatacgccgttttgctttcccagcaaggacggggaaaaccaagtcgacaccaaaacggtcagcaagctaatcggcgaccgtcagtgtcggttcaagaaccgcagcaaacctctgtcaggccgccaccacgacgactcactagtgctaagcaaaggctcgagaggtgagtggacccctcatgacttgcgccgcacaggcgcaacgatgatgcaggagctcggtgtaactctggagattattgaccgctgccagaaccatttgctgggaggttctaaggtccgccgacattatctgcaccatgactatgccaaggaaaaaaccgaggcatggcgcgctctaggagagagactcgaagagatcctgacaaccgatgtagcgagcagctcaaccagccatatcgttttgcaaaattccactttcagccagatgcggaaaccaagtgtctag

SEQ ID NO: 330435 - DNA, 1113 bp, Pseudomonas aeruginosa
atgtcaccacgtccccggaataaggccaacaagggattgccccagaacctttacctcgacgcccgccgagggacataccgctacaagcgccccacggacgggaagtggttccccttcggccccgaccgggctaaagcgatcgacgccgccaagcaactaaaccttgagttcatgcgcggcgccgacctggtgaacaaggtacaaggtgccggatccgacctcttcgtcgcgtttctggacaaatacgaacgagagatactgccgccgcgggaactggcaaaggggaccctggacctctacgcggttaggtttcgccaattccgagcggcctggccgacgcaggctgttgacgaaatcactattcgcatggtcgccgaactgctcgacagcctgactccccgagccgctaaccaggcgcgcgctcttctggtcgacatcttcaaccacgccgccgccaaggggctctgcccagacaacccggcggccagcaccatcgccaggatcgagaagaagcagcggaagcggcatacggtggaggggttgcgagcaatacgcgagcaggccccagcctggctgcagaatgcgattgacctggcactcatcaccgcccagcgacgcaccgacatcctggcgatgcgtttcgacgatgttcgggatggtttcctatacgttgtccagcagaagacggccaaggcgagcgatgccgcctggatccgttttcgcgtcaccgcagaactgcaggccgtcttggcgagatgccgcgacaacgttccctctcctttcctgatccaccgacgccctgagcggaagcgacagaagcaggcggaacagaaagagcactggacgaaggtcgaggagcgctacctgacccgtgccttcaaggatgctcgggatgcggccggctgctactcgggatggtcagaggaggaaatgccgggctttcatgagatcagggcgctgtcactgcacttgtacaagaaagccggaaaggacggtcagaagatcgccgggcacgccagcgaggaaatgacgcgaaactaccagcgcgaccatgccgatgtcgtctggtcagaggctgttccggatctggatattaccgaattcgccggatag

SEQ ID NO: 330436 - DNA, 123 bp, Pseudomonas aeruginosa
atgcgtagagcactgaccgccctcggcatcatcgccgccctcggcctggccatggtagggctggtagagatattccctatcatccgcacgctcgcagcctggcaggcggggtgcttcggatga

SEQ ID NO: 330437 - DNA, 297 bp, Pseudomonas aeruginosa; identical to SEQ ID NO: 325200

SEQ ID NO: 330438 - DNA, 1308 bp, Pseudomonas aeruginosa
atgtcgaaaacttacgaagtacgggtggtcagtacccagaagaaatattccagggaattccaggtcaagaacgaattcgaggatggctggaaatcggtcctgcaacgagcacacggtacccctgtggtctgcctgtgccccggcaagggtaatcgctatctctcggtgaaacatcgggaggggagcgacaactatcaccttgcccggtacgccaacaccggtccggagcatgcaaacgactgccgattccatgctcacgccccagagcgatcaggcctgcagggctacgctgagggagttgtagaggaggccgatgacaacaccctgcgcatccggctagcccatggccttcgagtcaaagaagcgtctcccgccgccgatgacgtggccgacgttccgcgtacgccgggggttaagaagccttcgatacgtctgctcgggctgctccagctgctgtggttagaggctggactggccaactggtacccactgatggaaggcaagcgaacgcccgcgaatgttgcctattgggtatctgaagccgcaaagcgtatccgggccagccgaatgacggtgttcgacgtcttgctgatgtcggccaagaagaactcccgcatggcgaagcgcaatgctgaggtcgtggagctggcgcaggagcattcgcgcaggctcattgcggtgtcgccgctggcgtccttcaactcggaacgacgcaatctcttgacgctttctgtctcgggacccttcgggatgccgacgatggacattcgagcggaggttcggcgccgagttgaacgtagctttgcttctgagctagtcgcgtgggagtctgggcacgaggttattgcgatcgcgcagctgaatctgaagaaggggcgctacgcggatgtcctggatttggcgctgatgcgcgtcagcgaccggatgattccgctcgactccggctacgaagccacaattgaggaaaagctccacgccgagggacgtgccttcttcaagcccccacgctttgaagctgaggatgaaatttttcctgacttctggctgctagacatgggccgtgacacgcaatatcccctggaggtattcgggatgaatacgccgacgtaccaggcgcgccgacagagaaagattcgttggtacaacggtcagttcggttccgctggctggtggcactgggatgccttcatcgataccaaaggggaggggatcccaggcttcccagaacgaacgatcgattaccgcagtagagaaaatgaagaaaccgccggcgaagacgtaccggaatctgtagccgataccgaatag

SEQ ID NO: 330439 - DNA, 285 bp, Pseudomonas aeruginosa
atggcaaacgaacgcgctaccagtgtctgggatgcgctggttgattcgccagaagaagccgaaaacctgcgtatccgttcccaactcatgcgggctctcacccgtactgtcaagggctgggatcttccgcaaaaagatgctgctgctcgcctgcgagtgacgcagccgagattgaatgacctgctcaaaggcaagattgacaagttctctctggacgccctggtaaacctgctgggcgcggctgatctggctcttgagatatcggtgatcccacgcgcagcataa

SEQ ID NO: 330440 - DNA, 327 bp, Pseudomonas aeruginosa
atgcagcaagagcagacgaaggaagtgaagttcgtagacagcagcctggacgatctgcgggacttgcccgctgaagtcatgcaacgagtgggttaccagcttaatctggtccagcatggggatgagcccactgactggaagccgatgacaacggtcggtccaggtgtaatggaaatccgggtgagttttaaaggggcttttcgcgtgttctatgtggctaaccggcctgacgcgatctacgtgctacatgtcttccagaagaccacacagcagacggaaaagcgtgatatcgacctggccaaagccaggctgaaatcactggactga

SEQ ID NO: 330441 - DNA, 1416 bp, Pseudomonas aeruginosa
ttgctggcgccctaccaggggcgctgcctgggcgtcggccagctcaatgcgctgctcaaggccgtcaccgaccattacctggatcgcggctacgtcaccacccgcgcctacctgccacagcaggacctggcctccgggaccctgcgcatcatcgtcgtcgaaggccgcctggagggcctggacagctccgcgctggccagcccgcgcgaactggcgatgagctttccgggcaggaccggcgagctgctcgacctgcgcgagctggagcaactggtcgaccagttgagccgcctgccgtcgcgccaggcgcaactggagctggtgcccggcagcgaggtcggcggcagccgggtgcgtctcaagggcgagcgcgacaagccctggcgggtctccgccacgcgcaacaacgacggcgacgtcagcaccggcgagcagcagatgggcttgggcctggactgggacagcccgctgggcctggccgaccagctcaacctgcgcgccaaccgcgacgcggtgaccgaccgctggcgccattccgacagccagagcctgttctacagcctgccctggggctggtggaccttcacctacggctacagccagagcgactaccgcacgcgcaacgaggccagcggcttccccttcaagctcgatggcgacagccgcagccatcagttccgcgccgaacgcgtgctgcaccgcgacggcatgagcaagaccgccatgagcctggggctcagccaccagcgcaccaacaactatgtcgaagacacccgcctggaagaccagagcacgcggatcaccgagacccagctcggcttcaaccacggccggcggatcggcagcggcttcgtcaacctcgacctcggctggcagcagggcatcggcgcccttggcgcgcagggtcgcggccacccgcaggcgggcgatccgcatgcgcgctacgacaagtacagcctgaccctcagctacctgcagccgttccagctatggggcgagcgcttcagcttcgacagcctggccaccgggcaaaggagcgaggacgtgctgttcagcccgcagcgcatcagcctcggcggcaacagctcggtgcgcggcttcaaggaccagaccctgaccggcgacagcggcggctactggcgcaaccagttgcgctggcggcgcgcggtggaatgggcgccgctgcggccctggctgcaggaatacggcgtggccttcgcctacgacgtcggcgtgatccgccacgaccgctacaacgacggcgccagcgggcgcatgagcggcaacgccatcgaactggatgcccgcggccgctatttcgccgccagcgtcggcttcgcccgctcgctggaacggcccagcgccatcgagcggcgcgagcacccgatctatttccgggtcgacgcgttcttctga

SEQ ID NO: 330442 - DNA, 2274 bp, Pseudomonas aeruginosa
gtgctggatctgaagaatggcgatgacttgaaggaagcctgtgtgcaggcactgcagcaggctcattcgcactcttggtaccaggattggactgccggaatccttagcttgatgaggcgattgcgcgaggtcgagcgctccgagttcatgagcgaagggttccagttcgagttgtggaatagcgaagccgtggcctcgacgggcatgggaagcgtggatatctccgaggtcgcgcggagtagtgagattgccgcgctattgtgggatttgaaggagcagtatttttatgcagagcgggtgcagcaggatgggttgatccgggatgcctgggctgaagtggcgagtcttgttggtcggcttgccaagcgtaatcccaggctcaagatgttccgcgtgtttgctcttctgtgcccaggtgcattcaccaccatcgcccacgttcgcaagcttcgagagcttgcctcggtattgggaatccctcctcgaggagcgccgcacactttgcatcgggcagttctggatcgactggacgaggccctcggccaatcaggcgaggcactgggtttgcaggcagcagagcgtatgacattgccctggctgctgtatgtggatcatgtgcagagcccgcagccagaggctacagagatagcggacgagttgagtggagaggtgaagctaaagtacctaccgccggaacgccggcgccggggcatgctgggtatcggcggtggcgcagccaccgtgctagcgatgatcgagtttgctcgcgaaggctgtacccgtgaggacttcattgagcatctccagtcgctcaatccgcaggcaaagaagtcgacgctgaatacgcagttcaatgcactgctcgccgaatggggagtgctgcacgctgagggcaacaagctgcagctaaccccccgaggggaggcgtatctcgagaccggcgaccctgatgaagtcatcgattggatgattacgcgcattcttggattcgacaatttgctacatgctttcatgcagaatcccatgcctggtagccaggcagtattggctctgcagaaggtgaatccgggttggacatccgactttgcccccaatgtcctgatcaactggttgcgcaccctgcagttggttgagctggatgcccaaaaacgtttgtgtctgaccgaacgtggcgagcaatgggctcgacgtatccactgggtgccgggcgcattgaatgtgcctgccagtccaacggcacttacagtagaggcagatgaaggtggggtggttgaaccccgagttggcaacctggaccggctgccattatcaaaaattatcgaaggctttgatcctgctctccagtttcccaaggagctgatcggtcaacttgatgcgggcctttggagtcatccacgccggcattttgctgtgctgactggtctgagtggggcgggcaagacccagctcgcgcgtgggtatgcgcgtagtctttggcagaattctgacgccccacaggatggtttgttgatcgtgcctgtgcagcctggttggcatgacccggcaagcctgctgggctacgttaatccgctggacaacgacacctacgtcagaaccaaagcgcttgattttctattgcgtgcgagcgccaacccgtcccggccatacacgttggtgctggatgaaatgaacctgtcgcaccctgaacagtacttggctccactattgtccgcgatggagactggcgatgatattgagctgcatgcccaagatgcagaggtgaacggtgttccatgctcaattccctatccggccaacttgatcctgattggcactgtgaacatggacgagaccacgcacggcttgagcgacaaggttctggatcgtgcctcggtgatcgagttctgggatatcgatgttgatgaattcccaggctgggagaagagcagccttcaggaggagcggcttcaagaggttcgacatctgatgaagtcactgatgcaggcgctgcgtcccgtgcggctgcattttggttggcgaacattgcatgacgtgatcggctacctgcaggaagccgagcgcggaggggtgattgaattttcgcgtgcgcttgatcaggcgatttacacgaagatcctgcctaagctgcgcggagaggacagtcctcgcctgcagaaggtcttcacggagacgagcgatatcttgcgtggcgcagaattgaacgaagcatctgccaaggttaccgaaatgctggacgacctccggcatctcggcgcagccaggttctggcgctga

SEQ ID NO: 330443 - DNA, 1578 bp, Pseudomonas aeruginosa
atgaccacgctttcatgcattgatgcagatggtcgacggttcgatgtcgtcgcagaacacctctgtgcaggctttatggagcagggcgaataccatttcctttgtattgctggcgcaggtttatacattgatgatctgcctcttgcgattggagtccgggatggggagagcttctggctctggtctccaggctattttgccggcgaggtatgtgcggagctgttgaatagccagggagagctacttgcccgttatcggctggatgtgtcgccgagtgcccaaaagctggggcgcgagtctttcgagcggatgcttgagcagatctttgaattcgaccctgcgttactgtttggcaccgaaagcgcccagttcggcataggcagccatggccaggagattagcccccacctgcaatattcgcgtctgcgccgctatggggaacagctgctcaggacgttgaagcaggtggcagcaaagccgttggtgtcgctgcggcacgagcgcactcggctgcctgcacagcaggtcaaacgactggatcgtcagtcgttacaccaggtgctgcgcgatcctgcggcgctggcgctattgagtccgaacgcggctgtccggtcctcaccggacgaggtccgcttcgatgtgccaagcgtctatgaagatgaggacaacccagccaaccaggcgctggctatggtgctgcatgaggtgctgcggcgttgccgacaggttatgaccgcttttgagcaattggcgacgagtgaaaaattctccgagtcccgttcgccactggctcccaggctggctaggcgtattgcctatctggagtcattacatcgcggtctgcggaagctccagggcatgcccccattctgcaatcaacggcgccggcaggtcactgctgcggggcttaatgtcatttcggctcatccggcctatgcgcgagcctaccgttttggctggtatgtgctgcgtgcagggctgcaggggagcactcacgacgaaagcttgtggatcacgcctacgtgggaagtcttcgaacgttggtgctacgccatgctggcagagcagtttcagcgcttctatccagagctcaaatggcggcgccatgatcgttcgacgcgagacgattgcattctgtggtcggggcgcagcgatgcccttgagatcgatatctggttgcaagtcagttgccctgcggttgaccagccgccctactgcggattctcaagcatttcccggcagcgatatccggacattgccctcaccgtgcgaagagatggtcgtgagcacttcatcgttatagacgccaagtaccgtagcagccgcagtgcggtgctggaggccatggcttccgcccacctgtaccgcgatagcctgcgctggcgaggacgccgtccggagtgcgccttgctgctgattccgcgcggtggtgcggtgccagccctggaatgttcgcagtacagacaggacaatgccgtcggtgttgtgtctgtcagtgaccccaatgacgcagctgaactggtgcgggtactcgctgagtactggtcggatacacctgtcagccctcagggcacgtag

SEQ ID NO: 330444 - DNA, 180 bp, Pseudomonas aeruginosa
atgaagctactgcgcatcttaggtgcggctttcattctcgtcggcatcctcgcgggttgcctggcggcgctgctgctggtgatcctgatggtgcgttttccaccgctactgattgccgtgctcctggcctgctggatcttcagccgactacagcagactgcagacgaatcaccacactga

SEQ ID NO: 330445 - DNA, 171 bp, Pseudomonas aeruginosa
atggtactggtacacaaccacccttccggtgatccagaacccagccaggcggaccgtaacctgacccacaaactgcaggaggccctgagcctggtcggagtgcgaacgctagaccacatcatcgtgggtcgcgaaggctgcgtatcgctggctgagttgggctacctgtga

SEQ ID NO: 330446 - DNA, 294 bp, Pseudomonas aeruginosa
atgaccgagagccagcgctacagcctggagagcgtggagatcgccaaccgtgccggcgaacgcctgagcagcgtcaccggacggatcgccgagatcgacagcatgaaccagtcggtggccactgccaccgaggaacagaccgcggtggtcgactcgctgaacatggacatcaccgagatcaacaccctcaaccaggaaggcgtggagaacctccaggccaccctgcgcgcctgtggcgagctggaaacccaggccgggcgcctgcggcacctggtggacagcttcaagatctga

SEQ ID NO: 330447 - DNA, 1890 bp, Pseudomonas aeruginosa
atgatcaaaagtctgaagttcagccacaagatcctcctcgcggcctccctcgtggtgttcgccgctttcgcactgttcaccctctacaacgattacctgcagcgcaacgcgatccgcgaggacctcgaaagctacctgcgggaaatgggtgacgtgacttccagcaacattcagaactggctcggcggccgtctgctgctggtcgagcagaccgcccagaccctggcccgcgaccacagcccggaaaccgtcagcgccctgctcgaacagccggccctgacctcgaccttcagcttcacctacctcggccagcaggacggcgtcttcaccatgcgtccggacagcccgatgccggccggctacgatccgcgcagccggccctggtacaaggacgccgtggcggccggcggcctgaccctgaccgaaccctacgtcgacgccgccacccaggaattgatcatcaccgcggcgacaccggtgaaggccgctggcaacaccctcggcgtggtaggcggcgacctcagcctgaagaccctggtgcagatcatcaattcgctggacttcagcggcatgggctacgccttcctggtcagcggcgacggcaagatcctggtgcacccggacaaagagcaggtgatgaagaccctgagcgaggtctacccgcagaacacgccgaagatcgccaccggtttcagcgaggccgaattgcacgggcatacccgcatcctcgcctttacccctatcaagggcctgccttcggtgacctggtacctggcgctgtccatcgacaaggacaaggcctacgccatgctcagcaagttccgcgtctcggccatcgccgccgcgctgatctccatcgtcgccatcctggttctgctcggcctgctgatccgcctgctgatgcagccgctgcacctgatgggccgtgccatgcaggacatcgcccagggcgagggcgacctgaccaagcgcctcgccgtgaccagccgcgatgaattcggagtgctcggcgatgccttcaaccagttcgtcgagcgtattcatcgctcgatccgggaagtcgccgggaccgcgcacaaactgcacgacgtctcgcaactggtggtgaacgcctcgaactcttcgatggccaactccgacgagcagtccaaccgcaccaacagcgtcgccgcggcgatcaacgaactcggcgccgccgcccaggaaatcgcccgcaacgccgccgatgcctcgcaccacgcctccgacgccaaccaccaggccgaagacggcaagcaggtggtcgagcagaccatccgcgcgatgaacgagctttccgagaagatcagcgcctcctgtgccaacatcgaggccctcaacagccgcacggtgaacatcggccagatcctcgaagtgatcaagggcatctccgagcagaccaacctgctcgccctcaacgcagccatcgaagccgcgcgcgccggcgaggccggacgcggcttcgcagtggtcgccgacgaggtgcgcaacctggcccatcgcgcccaggagtcggcccagcagatccagaagatgatcgaagagctgcaagtcggcgcccgcgaggcggtggccaccatgaccgagagccagcgctacagcctggagagcgtggagatcgccaaccgtgccggcgaaagcctgagcagcgtgacccggcggatcggcgagatcgacgggatgaaccagtcggtggccaccgccaccgaggagcagaccgcggtggtcgactcgctgaacatggacatcaccgagatcaacaccctcaaccaggaaggcgtggagaacctccaggccaccctgcgcgcctgcggcgagctggaaacccaggccgggcgcctgcgccaactggtggacagcttcaagatctga

SEQ ID NO: 330448 - DNA, 945 bp, Pseudomonas aeruginosa
gtgcggctcgcttggcgccaccggcaagggccacggcagcgacaaggcggtactgctcggcctggagggcgagcagccggacaaggtggataccgccgcgattcccgctcggctcgatgccatccgttccagcggcgagctgcgcctgctcggcgagcggccgatccgcttcgtcgagaaggaacaccttgcgctgatccgcaagccgctggcctaccatcccaatggcatgatcttccgtgccttcgacgccgccggcctgcaggtccgcagccgcgagtactactcggtgggcggcggtttcgtggtcgacgacgaggccgccggcctcgaccgcatcgtcgaggaccgcacgccgctggcgttccccttcaagaccgcgcggcaactgctcgaccattgcgcccgcgaaggcctgtcgatcagccagttgatggccgagaacgagaaggcctggcgccccgccgaggaaacccgcaccggcctgctgcgtatctggcaggtgatgcaggactgcgtcgaggccggctgccgcaacgagggcatcatgcccggcgggctgaaggtcaggcgccgtgcggcggcgctccaccgccagttgtgccagcggccggaggccggcctgcgcgatgccctcagcgtgctcgactgggtcaacctctacgccctggcggtgaacgaggagaacgccagcggcggccgcgtggtgaccgcgccgaccaacggcgcggcggggatcattccggcggtgctgcattactacgcgcgcttcatccccggggccgacgacgacggcgtggtgcgcttcctgctcaccgcggcggcgatcggcatcctctacaaggaaaacgcctcgatctccggcgccgaggtcggttgccagggcgaggtcggcgtggcctgctcgatggctgccggggcgctctgcgaagtgctcggcggtag

SEQ ID NO: 330449 - DNA, 462 bp, Pseudomonas aeruginosa
atgcacgtgatcgcggccaaggcggtgtgcttcaaggaagcgctggagccgggcttcaaggactaccaggcgcaggtgatccgcaacgccaaggcgatggccgaggtgttcatcgggcgcggctacgacgtggtttccggtggcaccgacaaccacctgatgctgatcagcctggtgaagcaggggctgaccggcaaggccgccgacgcggcgctcggagcggcgcacatcacggtgaacaagaacgccgtgccgaacgatccgcagagcccgttcgtcacctccggcatccgcatcggcaccccagcggtgaccactcgcggtttccgcgagggcgagtgccgagaactggctggctggatctgcgacatcctcgacgatatcgacaatcccgaggtcggcgaacgggtcaggggccaggtcggcgaattctgccggcacttcccggtctacgctgattga

SEQ ID NO: 330450 - DNA, 606 bp, Pseudomonas aeruginosa
atgactcagtggcaactgttagctgatgatttgtggggtggtgaaaaaaatatatgcttttttgttcattcgggtgcgtgcttctgggttgtggatgataaattcaacttcagcttggatgcggagaaggattatcgtgcataccttgataagggtcatataactcaggagcaatatgcgtcggcatgcatgacgtttagaggtggggttcttaaacttactgctgagaattttttgaaatatttgagggcggaggagcggtgggtgttatcgcggcaagacctaaaagatatgtttgtgtgcgggcttgatttgagcgagtctttgcatggaagaattgaagattactatctttctggtgttgagttgagtgcaagctactttcatgatgctaatactgttgcctctaggcttccaatgttctatgtgaatttcgatcgcaaaatttacatgcatatggactgtaatcgggcgcatgaagaattggcttactcagactggcttgctaagtgttcggatttttgccatttagtgcccgatagggagaggtattgggttttagagggtatggattattggaagtatagatttttgcaatcggcataa

SEQ ID NO: 330451 - DNA, 645 bp, Pseudomonas aeruginosa
atgggcgtcaacgcgaacatttccgagtccctcaccgggaccatcgaagcccctttcccggagttcgaggcgccgccggcgaaccccatggaggtgctgcgcaactggctggaacgcgcccgccgctatggcgtgcgcgagccgcgggcactggccctggccacggtcgacgggcagggccggccgtcgacgcggatcgtggtgatcgccgagttgggcgagcgcggggtggtgttcgccacccacgccgatagccagaagggccgcgagctggcgcagaacccctgggcctcgggggtgctgtactggcgcgagagcagccagcagatcatcctcaacggccgcgccgaacgcctgcacgacgagcgcgccgacgcccagtggctgagccgcccgtaccagacccacccgatgtcgatcgcctcgcggcagagcgaaaccctcgccgacatccacgccctgcgcgccgaagcccggcgcctggcggaaaccgacggcccgctgccgcgcccgccgggctactgcctgttcgaactgtgcctggagtcggtggagttctggggcaacggcaccgagcggctgcacgagcgcctgcgctacgaccgcgacgaaggaggctggaagcaccgctacctgcaaccgtga

SEQ ID NO: 330452 - DNA, 276 bp, Pseudomonas aeruginosa
gtgtggtcgctgaaatgcttcccggattgggagtggtacaacatcaaggtcttcgagaccgacgatcccaaccacttctgggtcgagtgcgacggccacggcaagatcctcttccccggctatcccgagggctactacgagaaccacttcctgcattccttcgagctggacgacggcaagatcaagcgcaaccgcgaattcatgaacgtcttccagcaattgcgcgccctgagcattccggtcccgcagatcaaacgcgaaggcattcccacctga

SEQ ID NO: 330453 - DNA, 1542 bp, Pseudomonas aeruginosa
gtgccgcgcctcgccacatcccggcggcaagccgcgggatgcgcgccactgccgtccgcccacaccggttcgcggtacgcgcgccacgcgcccgagcgcacgctgctgtacgcgctagtgcaggcgcactacccggacttcatcgcgcgtcttgaggccgaagaccgcccgctccccgagtatgtgcgcgaggagttcgagacctacctgcgctgcggcgtgctcgagcacggcttcctgcgggtggtgtgcgagcactgccgtgcagagaggctggtggccttctcctgcaagaagcgcgggttctgcccgagttgcggcgcgcgacgcatggccgagagtgcgcggcacctggtcgaggaggtgttcggcccgcggccggtgcggcaatgggtgctgagtttcccgtacccgttgcgcttcctgttcgccagcaagcctgaggcgatcggcccggtgctgggcatcgtgcatcgtgtgatcgccggttggcttgccgatcaggccggcgtgccgcgggatacggcgcaatgcggtgcggtgaccctgatccagcgcttcggcagcgcgctgaatctcaacatccacttccacatgctgtggctcgacggcgtgtacgaggacaccaccgagcgtccgcagcgcaagccgcgcctgcaccgcacccgtgcgcccacatcggcgcaactgacggaactggccaacaccatcgcgcatcgcgtgtgccggcacctgtcgcgccgcggctggctcgaaggcgaagacgaatccgtgttcctgtccgacagcgcgggtagcgacgacggcatggatgggctgcggatgagttcgatgacctaccgcatcgccaccggtcgcgacgctggccgcaaggccgtcacgctgcaaacattgcccggtgacgcaggctcgctggagggcgatgccggcaaggtcggcggcttctcgctgcatgccggcgtggccgcggaagcacacgaaagccacaagctcgaaaagctgtgccgctacatcacgcgcccggcgatcagcgagcagcggctgtcgatctcaccgcagggtagggtgcggtatcagctcaagacgccgtggcgcaatgggaccacgcatgtcgaatgggatgcggtggacttcatcgccaagctggcggcactggtcccgccacctcgcgcgcatttgacccgcttccacggcgtattcgccccgaacgcgaatctgcgcgcgcagctgacgccctcggggcgcggcaagcggcctgcgagcgatgcagtgccggtggacgtcagcgcccacgacgagccgcgcagccccgagcagaagcgccgtgcgatgagctgggcgcaacggctcaagcgggtcttttccatcgacgtcaccacctgcgcccactgcggcggcgcggtacggatcgtcgccagcatcgaggaacccaccgccatccgcgccatcctcgccatcctcgcccacttcgagaagcacggcgcgctggagcaagcgcactaccggcccgcagcgcgcgcgccgccagtgcaagccgcgtga

SEQ ID NO: 330454 - DNA, 636 bp, Pseudomonas aeruginosa
gtgggcgcccccgccagcgcgcgcgacgacggcaccccgccggtgacgtcactggacgaactaccccgcggccaggacgtctccgacacggtgatcgaactggccggctgggtcgtcgcctccggcgacagtcagggctatcccttcgcgatcatggacaaggccgccgcccagatcctcgtgttcggcggcgatggccgcctgcgcggcgccgcgcccggcctgttcggctccgccgtgggcgaccacaccgcccccggcatcgcgggcctcgccctgcgcgagatccccggccgcgaccgcaccaccccggccggccgcttcgtcggcggctacggtccgtccatcgatgccggccgcgtgctgtgggtcgactacgactccgcggtctcgatccacccgaccgcgaccggcgtgccggaggaaaagcgccccgagcgtctggcctcgccaacgccggatgacaaccgggtcacccacggctgcatcaacgtgtctccggcgttctacgagcaggtcgtcaggcccaccttcgcgcgcggcggcgtgttctacgtgctgccggacgaaggctcgctggaggaggcgtttccggagttcgcgggcgccggcacccggaagaccgccggcgactga

SEQ ID NO: 330455 - DNA, 816 bp, Pseudomonas aeruginosa
gtggtgcccgcggggttcgaacgcgggatcctgcgcggcgggcaggggcaactggcgctgtacggcagtggtgcgttcctcggtcgcggcggcgtggtgctggagggcctgggcgaggccgccgccgcgttcgcgcgcgaggccgccgtggtgcaggcaggtttcgcaggtgcgcccggcgcagcgccgctgcaggtggtggcgcggccgctgttcaacacccgcgagggttacggcagcgccgtggtgccgggcgtggcacagctgatcgtgcagcagacactgctgatcggcatgctggtcatggccggcacgcgtcgcgaacgcctgggtcggctggcgttctcgcgccgcggcctgctcggcatcgccgccgcgttcgcgctgatcggcgtgtgcagcatgctgtactacaacggtctggtgatgtggctccaggactatccgcgtggcggcaatccgcccggtacgctggtgggcggagcgctgtacgtggccgcggtggtggcgttcgggctgttcgcgggcagtttcttccgcacccgcgaacggcccttccagctgatgctcgtcaccgcgctgccactcttcttcctgtccgggctctcatggccggccgtggcgatgccacagcccctggcgtggctggcgaagctggttccctccacgcccggcatcaacctgatggtgaagttcaaccagatgggcgcaagcttcgccgaggcgcttcccgagttgtgcaacctcgcttttttgacactgctgtatggcgcgctggcggtatggcgctacgccccggcgcgggacggcgcctga

SEQ ID NO: 330456 - DNA, 1695 bp, Pseudomonas aeruginosa
atgagcaaacaaaaactcgaactcacctggatcggcaaggagaagcggcccaagctggagccgcgtatcctgctggaagatccggaaaagtcgtatcacgccaagcatcgcgtgacggacaacgacatcttcgacaaccggctgatcttcggtgacaacctgctggcgctgaaggccttggaacaggaattctccggcaaggtgaagtgtgtatttattgatccgccgtacaacactggcagtgcattcactcattacgacgacgggctggagcactccatctggctggggctgatgcgggatcggctggagatcattcggcggctactgtctgaggacggatcgttgtggatcaccatcgatgacaacgagtgccattacctcaaggtgttgtgtgatgaggtttttggacgtgcgaactacgtaggaagcgcggtgtggcaaaaaaaatatggcgcaaagagcgactcgaaatatctttcagaatctcatgactatgttctagcgtatgcaaagagcaaggagcggatgacggtacatcgtcttgcgcgaactgccgagcaggactcgcgctacaaaaatccagataatgatcccagagggccctggacgtcaggcgatctgctgcgcaacgaagctcgggattacgccatttacgaaattgtggggccatcaggccgtaagcactggccgcccgagggtacgagctggcgttttacaaaggaaaagtttgccgagttggtggcggacaatcgaatatggtttggaactaagggagataacgttccgcgcttgaagcgatttctggatgaggtggcagacagtgtgccggcgacgacttggtgggagcacaaggacgttggccataacgacgaagcgaaaaaagaaatcaggtcgctattcgaaagcaatctttttgacacgccaaagcccgaacgactcttgaagcgcatcatcgagctttcttctctgccgggtgacattgtgctcgactccttcgccggttccggcacgaccggcgcggttgcccacaaaatgggccgccgctggatcatggtcgagttgggcgagcactgccatacgcacatcatcccgcgcctgaagaaggtcatcgacggcgaggacccgggcggcatcactcaagccgtgggctggcagggcggtggcggtttccgctattaccgcctcgcccccagcctgatcgtcaacgaccgctggggcaacccggtcatcaaccccgaatacaacgcggcgatgctggccgaagcgctggccaagctggaaggcttcacctatgcgccttcggaggtgctgtggtggcagcacggccattccagtgagcgggacttcatttacgtcaccacgcagaacctctccgcagaacagttgcaggctctggccgatgaagtcggtccggagcgcagcctgctggtgtgctgcgcggctttccatggcgttaccgcgaccaaggcggcggagcgctggccgaacctgacgctgaagaagattccgaagatggtgctggcccgttgcgaatgggggcgtgacgactacagcctgaacgtggcgaacctgccgatggccaagcctgatcccgttgagccttcggctcaggctgaaacgagcagaaaaaaaagtagaaaagcgtcggctgaggatgcgagccaaggcgcgttgtttggggaggatgaatga

SEQ ID NO: 330457 - DNA, 1734 bp, Pseudomonas aeruginosa
atggcacgaatcagaaagatcgagatcgccaacttccgcggcatccagttgctggcctggtgcccgacgcctggcatcaactgcctgatcggcccgggcgacagcggcaagtccacggtactggacgcgattgatctatgcctgggggccaggcgcaatgtcccgttctcggatgcggacttcttcggcctggacatcacgaccccaatcagcatcacgctgacgctcggcgacctcgatgacagcatgaggacgctggagagcttcggtgcgttcctgcgcggataccacgccaacactggcgtcgtcgaagacgaaccctctgccggcgcggaggttgtgctctgcctgaacctgacggtcgccagtgacctggagccctcgtggacccttgtctccgaccgcgccgcacagcaaggcatcgtcaagacgctcgcatggaaggatcgcgtcgccctggcgcccactcgtatcggtgccctggcggacttcaacctgggatggcagcgcggctccgtactgaaccgcatctcggaggagcgagccgacgcttcggccgccctcgtcaaggccgccagagatgcgcggagtgccttcggagaccaggccgaacaacagttgggagaagcgctggggatcgtcaccaccactgctcaggagctgggcgtcaacatcggcgccaaggccaaggcgctgctggattcgcattcggtgtcgttcggtggcggcaccatctccctgcacaacgaaagcggcatcccgcttcgcagcctgggcgtcgggtccacgcgtctgcttgtcgctggcctgcagcgcaaggcggccggtcaggcgtcgatcgtgctctcggatgaactggagtacgggctggagccgcaccgcatcgcgcggttcctgggctccctcggtgccaaggaggccgctgctccgctgcaggtgtttctcaccacccactcacccgtggcactgagagaactgtcgggcggccagctcttcgtgttgcgccgtggccctcagggccacgaggctcgcctggtcggcgccgacaatgacatccagagcacgatccgcctctatcccgaggccttcctggctggctccgtggtcgtgtgcgagggagccagcgagataggcctgctgcgcgggctggacttatacaggcttgaccaggggaatgcgtcactggctgcattgggcgtggcgctcgtcgactgcggtggcggggagccggatcgaccgtatgcgcgcgcctccgcgttccagtctctgggctaccgggtgatggtgctgcgcgacgacgacaagaagcccacacctgcggtcgagcaggcttttgtcgagaacggtggcaccgtcgtcgcctaccgcgcgggccgggcgctggaggacgagctgttcggaagtctcacgccggctgcctgccagaggctgatcggctatgccaacgaattgcatggcgacctgatcgtcgaacacctgcgcactgtctcgaacaacacgctcaccttccagcagatctgggacgagatccagaacaccggtctcctgtcggccgaacgcagggccattcttggtcaggcggcgcgcatccgaaaagctggctggttcaagcaaatctcgtggatggaggacgtggcgaggaccatcgttgcaccggacctgcatctttgcgatcagggcttccgcgctctgatggaccaggtattcgggtgggccactgatggaccacgttga

SEQ ID NO: 330458 - DNA, 1419 bp, Pseudomonas aeruginosa
atggaccacgttgaaatcgaccttcgtgcaatccaacgcggaaccgtcaccgcaccggccggctgcggcaagacacagctgattgcccacgcgcttgccggtcatcggggcaacaagcccatcctcgtgctgacacacacgaacgccggggttgcggccctgcgtggccggctggaccgcgccggtgtgccagccagcgcttatcgattgagcacgatcgatggctgggccatccggctcatctcgacctttcccggccgcagcgcccacgatccggagattctgcggctggctgcacctgcgcgggactacccggcaatccgcgacgccgcctggaagctgctgcaagccgggcacgtcagtgaggtgctgaaagcctcatatgcgcatctgatcgtggatgagtaccaggattgttcggtgcctcagcactacatcgtctatttcctctcgttgatcttgccgacctgcgtgctgggcgaccccatgcaggcgatcttcgggttccggggcaatgcgctggccgactggaaccagcacgtgtgcgcgcattttcctgtcatcggggaactggcaacgccctggcgatggcgcaacgccggcgcggaagcgctgggacaatggttgctggaggcccgccggttgttggcggcggggcagtcggtggatctgcgtagtgggccaccggagcatgtgacctggatgcaggccgtaccacccaacgaccatgcccagcgcctagccgctgcgaggacggcatcgccaaccgctgacgggcgcgtgctcatcatcgccgatagccgcaaccgagcagctcagcagaactttgcgagccagacgccgggcgcttcgacggtcgaggccgtcgatctgcaagacctcatcgccttcgccagcagctttgaagtgggggcaccgaatgccctcgcgcagttgctggcgctggcacagagcgtcatgaccaatgtgggcgtggcggagttgacgcggcgcctggagtcgttggcaaagggaactgcaaggaatcctccgaacgaggcagaaagccgcgcactggcgttcgggcgcgcgccctctctcgctgcagccgccgcgctgttgtcggaattgcgggcactgccgaacgtgcgtgtgcatcggccggccatcctctacggggtgctcaaggcgctccgagaagcctcgtcgggggccgtccctctggcagaggcggcccggcgcgtgcgggaagagaaccggctgttggggcgcccgctaccaaaacgagccgtcggcagcacgctgttgctcaaggggctggaagcggaagttgcggtgctgctaaatatcgagggtatgagcgcacagaacctttacgtcgccatgacccgtgggtcgatgaagctcgtagtgtgtagcgccagtccagtgatcggttag

SEQ ID NO: 330459 - DNA, 237 bp, Pseudomonas aeruginosa
atggccagcgcacatgacctggcccgcggccacaagcggctgcgagggctgatcgagttcgccctgggagaaggttggaaggtggtgcgcacccgcggcgggcacctgctgttcacgaagcaaggctgcgcgccgatctacaccagctcgacggcgagcgaccaccgcgccgagcgcaacgcccgtgcgcagcttcgccgcgccgaccgacaggcgcaggagaatggccgtggctga

SEQ ID NO: 330460 - DNA, 441 bp, Pseudomonas aeruginosa
atgagtgacagcattcatatcgtctgcccacactgccaatccatcaatcgcgtgccagccaacaagttggcagagaagcccaattgcgggcggtgccagcacccgctgttcaccggagagcccattgatctgaccacagcgaccttcgcccgtcatctggagcgcagtgacctgccgctgctggttgacttttgggcgccgtggtgcggaccgtgcaagatgatggcgccgcagttcgagcaggcagcctccctgcttgaacccaaggtgaggttggccaaggtaaataccgaggccgagcctcacctggccgcccagttcggtattcgcagcattccaaccctgattttgttccgagggggacatgaggttgcacgtcaggcgggcgccatgggcgcgcaggacattatgcgctgggtggcttcgcaattgccccggtga

SEQ ID NO: 330461 - DNA, 471 bp, Pseudomonas aeruginosa
atgaataaagaatctggccacacggcccttgacgagatacgctcccagtggcggttgatgacggtttacgagcgcttcgagcagttcgttgccatcacgctttcgggcgtcatcgcgttggtaattgtgatttcgctgattcagttgattcggctggtgttcacactgctcgtcatggatgcgctgaatccactggatcataaggttttccagctggtgttcggtgccaccatgacgctgctgatcgccatggaattcaagcattcgatcgtcaaagtggctctgcgcaaggaaagcatcatccaggtcaagaccgtcattctgatcgcgatcctggcactggcccgcaagttcatcatcctagaacccgacgttgatcctgccaaagtggccgcgctggcggggacggtactggccttgggtctgacctattggctcatgcgtgaacgcgatgaccgcaagagcgagtaa

SEQ ID NO: 330462 - DNA, 966 bp, Pseudomonas aeruginosa
atgaccccctatggtctagtcggccgacacgatgccaggtcgaggcaccgctggctcaatcgctttcaaaccgcgctgctggttttgaccctggtggggatcgcagctgccgctggcagtctgctgttcggcgagattggcctttggctggcactggcaacatgcgcattgaccctgctgatcgaacctgtcgccgcctccgcgatgaccttgcgtctgtatggcgcccgtcccttgcgccctgatgaagcccccgcaatctggtcgttgctgcgagcgctcgcagctcgcgcaggattgccgaacacgccggttccgtactatgtgcccagcgacatcgtcaatgcctttgccaccggctccaggcgccttgcctccattgccctcaccgatggcctgctccgcagcctgagtatgcgcgaactgcaagccgtgctggcgcatgaagtcgcgcacatcgctcaagaagatcttcgtgtcatgggcttggccgattcgatcagccggctcacgaacctgctggcgttgttgggtcaggtcgcgctcctgatcagcatgccagccttgctggtcggtgcagcagaaattaactggattggcttactgttgttggccgcttcgccgcaacttgcactgctcgcacagttgggtctgtcacgtgtgcgagagttcgatgccgaccggatggcagtagagctgacgggagatccgcacgggctcgcctcggcgctggcgaagatcgagcgggtgagccgctcgtggcgagcctggttgttgcccggctgggggaatcccgaaccgtcctggttgcgcacgcatccggcgacagaggatcgtatcgcgcgcctgatggcgttggcgcctcagccatcgcaggccctgccgttccaaacggaatatctcgcgccaaggtcgttcgccccgatgcgcccgccacgccggggcctgagcggcctttggcgctaa

SEQ ID NO: 330463 - DNA, 369 bp, Pseudomonas aeruginosa
atgaccgaagagaacgcttggaccggcgaatgctggtccgccaacgacgaagacttcaactgcgtgagcctggccgacctgctcaacgagaacgaagacctcaagccaggagacaccgtataccgagcccaagcgatcaagcccgacccgactggctatgtgcatgcaagggatgtgatcgagttgctcggagagcgcgcatgggatgacggtggagagcatgcagagggctggccagatatcggcaaggaagaagaggaggagctcaaccagttgctggagagctggattcgcaaacactgccctacaacgacctggtggcgggtgaaggattcaaccccgtacgtcctcaccgaatccgacttctga

SEQ ID NO: 330464 - DNA, 207 bp, Pseudomonas aeruginosa
atgccattcgacgaaagccccgcagtccgccgcataaacgccctctgctcccccgcgccagcacgctacctgcacattcccaccggcattcactgggtcgtcatcgacagcctgggcaatgtcctgcaactcgaaaacatcgagcgccggcgccgactgataaccgtttctgacctcgatagcgagacctggagaaagctcccatga

SEQ ID NO: 330465 - DNA, 213 bp, Pseudomonas aeruginosa
atgcaccagctaacagcgaatcaccgcccttgcggtgtgacggtcaccggctggcctgaagaaagccagcttatgacatcggacgacattctgcgcatcgcgagagcggttaagcagatggcgatcaaccagtcccagggcgccgatggcgttcgggtctacccggaggatgagccatgccattcgacgaaagccccgcagtccgccgcataa

SEQ ID NO: 330466 - DNA, 159 bp, Pseudomonas aeruginosa
atgtacatcaaaaaagatgtcatcgaggtcatcaagtacgcggcgatgatggcggcctgctctcgccagtcctggggaatctaccccatgaaccagggttacaaggcaatgcccttccgtggcgactatcaccgcgtcgtcgaagtctgccacccctga

SEQ ID NO: 330467 - DNA, 336 bp, Pseudomonas aeruginosa
atgagaaccgtgctcaaagccacctgcggcaagcactccaaggaaatatccgtctcgcagatcacccacttcgtcgccgaagacaagtacgtcatcgcgtactacccggatggcgtacttgtcttgaacgaaacgcttaaggccctggaggctgagttcgccgacgagttcatccgcgcccaccggaaggccttggtccgacgctcgctgatcagcatgttcaaaacccgacctgatgacagccaagccggcgaggtactactgctcggaaccgagaactggatacctgtcagccgcagccactcagcgcagatcaaatcggcgatgggtgcgtga

SEQ ID NO: 330468 - DNA, 519 bp, Pseudomonas aeruginosa; identical to SEQ ID NO: 330230

SEQ ID NO: 330469 - DNA, 366 bp, Pseudomonas aeruginosa; identical to SEQ ID NO: 330231

SEQ ID NO: 330470 - DNA, 279 bp, Pseudomonas aeruginosa
atgagcaagaaatcgcatacgccggggccttgggtgtctcgaaataacatggtcttcggtgggaaaaagtgtatctgttcaaacgtcaattccgcctcgcagaccccgcaaaacatagcggaagacgttgctatgtcgattgcaaacgcccgcctgattgctgcggcgcctgagcttctggatgccctggtaaatcttctgccgctgattagtccgctgaaagcggaaagccagcaggttgcggatgcatccgccgcaatcgccaaggcaaccgcctaa

SEQ ID NO: 330471 - DNA, 213 bp, Pseudomonas aeruginosa
atgagtgagtggatcaagtgtagtgatcatctaccgaacgttggcgacaaatgcctgatcatgatcccggtatgtgggcgatatgaaattgaaggagccacttacgagggagaaggcgaatggttaggcgcatggtgccaacgtaaaggcgaaagtcaatgttacaaggtcaaatactggatgcagagtccagagcttccgcaagacgcctga

SEQ ID NO: 330472 - DNA, 207 bp, Pseudomonas aeruginosa; identical to SEQ ID NO: 328530

SEQ ID NO: 330473 - DNA, 207 bp, Pseudomonas aeruginosa
atgaatgaaaaggccttactggctttacgtcagtctcttcgaatcatccgcagggagaacgacgtacaccgagcgcgcatcgagtactacgaaacggtcgggatgttgcgcggattgcactacggcggagcgatcgactcctggcagctattagctctaaccgatctagcaggaagcgcatacatcaacgctgggaaaccctggtaa

SEQ ID NO: 330474 - DNA, 327 bp, Pseudomonas aeruginosa
atggccaagcagaagaaagcgcagcaactccagcaggaactcacggctgcggatcgcctaggactgagggtatcggcaatgatcaatgcgccgaaggcgcagctagaacgcgcggtgactgttcaccggctagatactgatacggacgaggcgtgggaggccgtgatggagctgattgcggaggaggatggagttgagctgattttcaacgatgatggctcagtgaccttgcggtgggcgcttaggaacgagggtgagcatcaagctatctgtcccgaggttgaacctgtggaagagggcgcggaagaggatgagaccccattctga

SEQ ID NO: 330475 - DNA, 510 bp, Pseudomonas aeruginosa
gtgctagacactctggatgatcagcccgtggtggaggccgcagacaatgtgatcatcgccgacttctcccgcaagccactggtgggcgatgagattcgcatcgctcattacgatgttcagggggcgatgggcaatggaaaggttgttcaagatttcccagagatgttccgcgatgtcacggtcagccagcagcatctgcgcgaacttggcgttaagtacaaggatccatcacatctgaagataatcactggcgacggacagtcgatggccccgaccatccagaacctagatccgctaatcgtcgatgccagcattcgcgagttcaccggcgacggtatctacgcgttcacctggcagggactcttctatatcaagcgcctacagttgaaagggtcagaccacttcaagatgatctcggacaatacaagccactctccagaggatattcgagtggatgaaacctacatccaggccagagtgttgctggtctggaacgcgaaaaggctgtga

SEQ ID NO: 330476 - DNA, 573 bp, Pseudomonas aeruginosa
atgcgaaccgaatcgcacaccctgatttccacgctgctcggcgtggtgaaccaatggcgccgccgcgaaggctggagccgcgagaccgtgatccagcacatcgtggaggctcacgaacgcatcaacgctcacgtcgccaccggaatcgtattcgaccctccttcgcgcgatgcgatggatcgaatgaaagcgaatgctgaccgagtgttccgttggctggacgactccaccaaggacaacaacctgctgccggccaacttcctgccgtcgatcctggctgcgttgccgagcgatctcaaaatccaggctttgggcgatttgctgaccccggtcggggtatcggtccgcctgatcgatggggagggtggcgagcgggaagtgctttgcatgctgcgctctctgatcaaggagaacggcgaagcacagcaggcaatcgcaagcctggttgatggcgctgacgaaggtgagttgcaagaggctcaccgtgaactctctgagtctcgcgccgcgacagaagaggctctgcggatgattgaccagatgcggcgcaagcctcgcttggtgagcgcttaa

SEQ ID NO: 330477 - DNA, 630 bp, Pseudomonas aeruginosa
atgcctatcactgagcagcagttgctgcatgtcctcccgaacgccggccctcgagccggcgtttttgttggtgcgctgaaccgcgggatgacgcgcttcggtatcacttcgccggtgcgcgcggcggcgttcctggcgcagatcgggcacgagagcgcccagttgacccggctggtggagaacctcaactacagcgcccgcggcctggctgcgacctggccgagccggtacctcggcgccgacggccagcccaacgccctggcgcagcgcctggcgcgcaacccccgagccatcgccaacaacgcctacgcctcgcgcaacggcaatggcgacgaggcgtccggcgatggctggtgctaccgcgggcgcgggctgctgcagatcaccggccgggcgaactaccgcgccgccggcgccgggctgggccagccgctggagcaggaacccgagcttctcgagcaaccggagtgggcggcgatctcggcggcctggtggtgggccagtcacgacctcaacgagttggccgaccggggcgagttcgccgccatcacccgccggatcaacggtgggctcaacggccaggcggagcgcctggcgctgtgggagcgggcgaagagggtgctgtcgtga

SEQ ID NO: 330478 - DNA, 1428 bp, Pseudomonas aeruginosa
atgagcaccactaacccagagtccgcctataactacaaggtggtccgccaattcgccatcatgaccgtggtctggggcatcgtcggcatgaccgtcggtgtcctgatcgccgcccagctggtatggcccgacctgaacttcggcttgccgtggacgagcttcggccgcctgcgcccgctgcacaccaacgcggtgatcttcgccttcggcggttgcgcactgttcgccaccagctactacgcggtgcagcgcacctgccaggtgcgactgttctccgacaccctcgcctccttcaccttctggggctggcaactggtgatcctgctggccgccatcagcctgccgctgggctacacctcgtccaaggagtacgccgagctggaatggccgatcgacatcctgatcacggtggtctgggtcgcctacgcggtggtgttcttcggcaccctggtcaagcgcaaggtcaagcacatctatgtgggcaactggttcttcggcgggttcatcctcaccgtcgccatgctccacgtggtgaacaacctcgagctgccggtgaccttcaccaagtcctactcgctgtacgccggcgccaccgacgccatggtccagtggtggtacgggcataacgccgtgggcttcttcctcaccgccggcttcctcggcatgatgtactacttcgtgcccaagcaggcggagcgtccggtctactcctaccgcctgtccatcgtccacttctgggcgctgatcgcggtgtacatctgggccggcccgcaccacctgcactacaccgcgctgccggactgggcgcagtcgctgggcatggtgatgtcgctgatcctcctggcgccgagctggggcggcatgatcaacggcatgatgaccctctcgggcgcctggcataagctgcgcagcgacccgatcctgcgcttcctggtggtgtccctggcgttctacggcatgtccaccttcgaaggcccgatgatggcgatcaagaccgtcaacgccctctcccactacaccgactggaccatcggccacgtccacgccggcgccctcggctgggtcgcgatggtttccatcggctcgctctaccacctgatcccgaaggtcttcggccgcgagaagatgtacagcctgggcctgatcaacgcgcacttctggctggccaccatcggtaccgtgctttacatcgcctcgatgtgggtcaacggcatcacccagggcctgatgtggcgcgcggtcaacgaggacggcaccctgacctactccttcgtcgaagcgctggccgccggccaccccggcttcatcgtgcgcatgctcggcggtttcatcttcctgctcggcatgttcctgatggcctacaacacctggcgcaccgtcagtgccgccaagccggccgaatacgaagccgccgcacagatcgcctga

SEQ ID NO: 330479 - DNA, 288 bp, Pseudomonas aeruginosa
atgatgaagcgggttctctacaaaggggcgttcttcactgagtgggacggcccgctggcggccatcgctgaaactgccggggtgagcatggacgatctcgcgttccacccggatgacgcgctggcggaggtccaggaactgcgccgacaggcataccgggacgaggcagacccgctgcgcctggaggccgagtatgacgccatcgctaccggcacagcgccggacctgtcggcctgggtcgaagctgtcaaggcgatcaaagaacgctatccgctcccccagtcctaa

SEQ ID NO: 330480 - DNA, 1206 bp, Pseudomonas aeruginosa
gtgttcgaccgccgcgcccgtagcctgaacccaggccagccgttccgtattcgctcgacccggcgcggcatccccgaaaccgtcgtcagggtcggcaggatcgaggacaacttcctcggcgacggcaagatcaccctgacggtcgtccaagaccagttcaatctgccggcgactaccggcgtggcaccaccgccaccgggctgggttccgcccgaccggacgcctcgggcggtcactgtgcggcgtttgatcgaggcgccatatcgcgagctggccggggtgatcgatccggccaacttgcagctcctggacgtgtccgcgtcgtaccttgccgccttggccgaggcgccgaccagcctgtcgcagagctacaccttgaccgaccgcgtcggcagctctggcgcgttcgttgatcgcggaaccggggactggtgcccgaccggactactcgccgccgagctgccgctggcggccggcccgagcgtggtcacgctgaccaacgccagccggctggaggacgtcactgtcggccaggccgctgtggtggacgacgagatagtccgggtcgatgcggtcaactatgccagtggcacagtcaccctggcgcgcggctgtgccgataccgtaccggccaaacacctggccggggctcgggtctggttctacgacacgttcgaagcggtggacgagacggtctacagccagggcgtgaccctacaggccaggctgctgacgaacaccagcgagggccaactggccccggcgctggccgccactgacagcctcacgctgaccgggcgccagggtaagccgtatccgcccggccagttccgcatcaacggcagcgcgtacccaacgaaagtctacggggcgctgtcggtgagctgggcgaagcgcgaccggatcggccaggccgaccagttgatcgataccacggtcggcaacatcggacccgaagacggggcgacggttacgctcctggtctacagcggcacgacgctgaagcgcacctacgccggcctcacatccagtagctggtcctatccgttggccgaggacatggcggatggtccgctccaggacgtgcgcctggttctgcgcagtgtccgcgacggcatcaattcttggcagcagcacgacatcacgattgaacgccacggcctcggtttccggctgggcgaagaactaggaggcgtttccgcatga

SEQ ID NO: 330481 - DNA, 714 bp, Pseudomonas aeruginosa
atgggttacgaacaaacggatggcgcaccgactgaattgtctgggcatccgattccccaggatggaatcggatacttcaaaatccgtctgaagcaggcgatttcctcgcatagcttgcgaggattttctaaggagtgcggcttgtccgaggcgaccctgcgcagttatctgtcgggggagactttcccaaccttggatcgacttgagcagatcgcccaggccgcagggacttccgctatgtggctggctttcggcacccctatacctgcggaagatagtcgcgagaagggagacgacaattacgcctatatccctctgtatgacgctcgggtgagcgctggtcacggctcctggacagagggggcgcggatactcgctcagttggcattcactcgctacagcttgcggaagcaaggcctggagatcgcgaatatgtcggccgtccgcatcggcggtgactccatggagccactgttgagcgatggcgatacggtgatgattgaccacagttgcaatgaggttcgtgacgaagctgtctacgtcatccgcctggatgaccacttgtacgccaagcgcgtccagcggcagatcaatggcggcctggcgatcatcagtgctaatccggcctatcagacaatgttcgtgtctaagcaagacttggaagcaatcgacattatcgggcgcgtcgtatggtcaggccgctggatggcttag

SEQ ID NO: 330482 - DNA, 840 bp, Pseudomonas aeruginosa
atgcaggcgcgaaccggcatttccgaacgtcgtgcctgtcagttgatcgggctgtcccgctcggtgttgcgctaccagccgcgagccagtatgcaaaacaccgagctgcaagcccaactggtggaactggcccaagagcgccggcgctttggctatcgccgcctgcacatcctgctgcggcgtgctggcgtgcaggtcaaccacaagcggatctatcgcctgtaccgcgctgccggcttgatggtgaaacggcggcgccgccatggcatcgcggtggagcgcgaacgtctgagtttgccgagcgcaccaaaccaggtctggtcgatggacttcgtcttcgatgcactgagcaccgggcggtggatcaaatgcctgacggtggtcgatgacttcaccaaggagtcggtcggcatcctggtggagcacggtatcagcggctttcgcgtcacacgggcgctggacgagatggcgcggtttcgcggctacccgaaagcgatccgcaccgaccaggggcccgagttcaccggcaaggcactcgatcaatgggcctatcagcgcgacatcaagctgaagctgattcagcctggtaagcccacgcagaatgccttcatcgagtcgttcaacggtaagttccgggacgaatgcctcaatgagcactggttctgttcgctggccgaagcgagaatccgcatcgcggcctggcggcgggattacaacgaacaccgaccgcacagcgcgattggcaatctcaccccggcagaatttgctgcaagttggcgaactcgccagcagcaactgaagcaggaaaaattaatatcaaccccagggcctactaactag

SEQ ID NO: 330483 - DNA, 264 bp, Pseudomonas aeruginosa
gtgaaaaagcgttttaccgaagagcagattctcgacttcctcaagcaggcggaggccggtgtgccggtgaaggaactgtgtcgccgacacggcttcagtgatgcctcgttctacacctggcgggccaagtttggcggtatgaccgtggcggacgccaaacggttgaaggatcttgaactggaaaatagccgattgaagaagttgctcgccgaggcccacctcgacatcgagtcgctgaaagtggtcgctcggggaaaagggtaa

SEQ ID NO: 330484 - DNA, 1014 bp, Pseudomonas aeruginosa
atgctcgggatcaagctcgactccagccccgcggacagcaacagcggcctgctgccttccagcggccacgatccgcgtcgctcggtcgaccagtacgccaaggccggcgttgccggcaagatgcgcttctcgcagacacagttcaggtacggggcgatgctgccggacatgccgttgctgaaatacaacgacggacgcctgctgccgaccctgttccacggcgcccagctgaccagcgaggagatcgccgggctcaggttctccgccacccgcctggagcgctacaccgcgcgggactccagcgacgcccaggacatccgcctgcactgcaagaacaaacgctacgcctgcgacaccaccggcaaccgcttcgacgcctaccaactcgactaccaggtcaacgacggcctgctgctgcaatacgcccagggcggcctgcgcaacgtctatcgccagcgctacctcggtgccgtgggcaagcggcaggtcggcgccggcaagctgagcgccgacctgcgctggttcgacagcgaggacgccggcgcggcccgcgccggcaagatcgacaaccgcgccctcagcctgctgctcgcctacgcccagggcggccacacgctcagcgccggctggcagcggatgaacggcgccagctcgatgccctacctcgacggcagcaatccgtacctggccaactacctgcaggtgaacgacttcgccaaccccgaggaacgctcctggcaactgcgctacgacttcgacctgcgcagcgtcggcgtgcccggcctgagcttcatgacccgctacgtcaacggcgaccatatccgcctggccaacggcgacgagggcaaggaatgggagcgcgacatcgagctgaagtacatcgtgcagagcggccgcttcaaggacctcagcctgcgcctgcgcaacgccacctaccgcaccgacttcgagcgctcggcgcgcgacgtggacgaggtgcgcctgatcgccagctacaacctgtcgctgttctga

SEQ ID NO: 330485 - DNA, 405 bp, Pseudomonas aeruginosa; identical to SEQ ID NO: 329216

SEQ ID NO: 330486 - DNA, 519 bp, Pseudomonas aeruginosa
atggccgggaagaagcctgttaaccctcgcggccagccgaccgactcggcgcccgacgacagcctgagcgtgctgttccctgaccgtcaactgacggtcgggggcgtcgaggtgaccgtacgcgagctgagtttcagcgagcaactgcgccacaaccatctactcgcgccgcttggcgacagcctggccgctatccccccgcagaagatggacagcccggagtcgatcaacgtcatcttcgacgccctggccttgcacgctgacgcgctgcgcgagctgatcgccatcagctgcggccagtcgatggactgggtggacgctctgccaccagatgaaggtgaagctctggtgctgacctggtgggaggtgaacaacggttttttcgttcgacggctctggcgtccgcgcctcctggaaatggcactagccgcgcagcgctctggagccgagtcttcgccgacctcattcgcgccggccaccaccgcgacgccctcaacaactacacccggcgacagctga

SEQ ID NO: 330487 - DNA, 639 bp, Pseudomonas aeruginosa
atgaccgatgacgggcagcgccatcccggcgacgtcggtcacgcggggaatcgcgctgccgttgtccagggtggacagcaggcgctgatagctggaggtgaggtcttcgctttcgtccgggcgctgctccagcactggccgccccctgtaggtcgtcgccggcattacctcgggccaggcgctgggctccattatcaggaacgacacccgcgcagactgcgcggtatcggtcagccgggtcagcgtgggctgttcggtcagctgcgcggtgcgcaccgggtacagtcgcgagccagttacccaggtggcctggacggggcggaccaggtccaggccggcggcggtcactgccttgacctcgacgacttcataggtgaaggcgtcctcgccgcgcagcatcgccagaccgccgtcgcggaagtcgaggccgaccgtgtcgcacggaatgttcagcgagccggccgccagcggttcttggagcagttggatatcaggccaaatcggcagcgcccaaattcgcgcgccccagccaaacagcgtcatgtccaggagctgccgctcgcggtctaccgcgtacatgttcgcttcgaactcccggcgcggcgccaggcgcatagcccggcgctgggtcacggctga

SEQ ID NO: 330488 - DNA, 924 bp, Pseudomonas aeruginosa
atggcttacttcacaggaacagcgaacaacccggccgacttgctcgccaagctgcgcgtccacgccgagtcgctcggctgggtcaccgaccgcgcctcggcatcggaatggctttgtcacaacgccgacggctactggtcgttcaacgccggttccaatcaatggcagctcgcgggcaatacggggttcgacgacgggcttgcgtggaatgcgcagcccggcaactcggtgcagaacaacccgtattcgtcgaaagaagcaaccatagcgcagctcagcgccgggccattcacgcgctatcacctgttcgccaccgctgcctatctgcacctgcacgtcgaaatcgctgccggtcagtttcgtccagtgatgatcggctccctcaacaagcgtggcgtcggctatacgggcggccagtatgtttgcggctcgttcctctacagctctggccaggcgctcacaaacaactggtcatcgcatccattcgatggttaccacattcgatacagcggcggcggcagcatgctgcggctagacagcctcgacggtggcccatcgccggagtggttgccgttcgactacacaacgaacgtctcccggcgcgtcgtcggccccggtcgcggaaactacagcagtcagtaccatcccgacgtggggctgatcgacgcgagcgcaaacgagctgaacagctcgaccacccctgtgccctgcgccatctatgcgttcggcgctcagcagcgctcgcggtacgtgggcgaggtgccggactttggcatatgcaacatggcgttcctcgcgcctggcgatccgctggtgatcggcagcgacacttggcgcgtctatccgttgctccaacgcggaagcgctaccgatttcggcaacaccagcgcctgggtcggctactgcttccgggtgcttgagtaa

SEQ ID NO: 330489 - DNA, 234 bp, Pseudomonas aeruginosa; identical to SEQ ID NO: 329016

SEQ ID NO: 330490 - DNA, 774 bp, Pseudomonas aeruginosa
gtgcgcgtactccggctcgatgtgcacacccaccaccactcgctggcggtcgcgcgacagctggtagctctgcacgctgccgacgcggacctggcggtagaggatcggcgcgccgatatcgatcgagccgagcttgtcgctggtcagcaccaggtgcaggccgggcgcgtcggtgttcagcggcggcgctttcgggcggatggtgaactcgcgactcggcgcgccgctcttggcgaagcgcacgtcgatatagttacctttcaccagggcctcaaggccggtgatgccggccagggagatgcttggcttgacggtccagaattcggtgccttccagcagcatgtcctcgacccgcggatccatcgccaggtcggcagtggcgctgctgtagtccttgcccatgtcgatcgacttgaccaggccgacctgcacgccgttgaacatcaccggggtgcggcccggatcgataccactgacgtcgttcatcttcagcttcacgcgcagaccggcctgggccgcgtcgtagtcgtcgtacaggcggaacggcttgctcggatcggtcggcgggctgtcggtgcggttctccggggtggagaaggcgataccgccggcgaccagggtcagcagcgactcgctacgcaccttgaagccggacaggccgccggaaatggagatgccgctggcgttccagaatcgcgtgtgcttgcgtaccaggtcggcgtaggccggctcgatgtgcaccttgatctcgatggtcctctggtcatcgcctaa

SEQ ID NO: 330491 - DNA, 666 bp, Pseudomonas aeruginosa
atgagcctcggcaagaacccggctcacctctgcatggtcgggggcaagagcccccgccagcagatgtgggaagtcatccgggccaaccgcgaagagttcaccgtctaccgcgtggcgcgccgctccaaccagcacgacaagaccgtcgagaagtatgtcgcctgcctgcgcctgggcggctacgtcgaggcgatccgtggattcaagcgcggcgaagaggtcgttttccagctggtccgcgacaacggcgtcgaggcaccgaacctgaacgccgatggcaagccatcccagcagggctacaccaccgaggcggtctggcggacgttgcgcatcctcggtccagcgaccccggagcagatcgccgcatcggtggcggcctctggcgcgactgtgtcgcccagcaccgttcagcgctacttcatcgatctgcagaacgccggatacctgacccgcaacggccgccactacgccctcaagccgggccgctacaccggtccacggccgcccatcgtccagcgcgagacgcgccgccaggtctacgacccgaaccttgaccaggtcatgtggagttcgcacggcgagtaccagcacaaccggagtcgttcgcggggcgcttcccaggctggcgtggcggataccgaagagaacaacgaatcaggcggctga

SEQ ID NO: 330492 - DNA, 318 bp, Pseudomonas aeruginosa
atgctgccgaccaagctgaagaagttcgaacgcttccatggccgcgtgctgagctgggttccggcccagccagtctccctggaggacgcccgcaacctggcgccggtctacagccccggagtggctatcgctgacgacctgctcgcgcacttggtgaagaagtccctgggctctgtccgtcgcgtcgcggtgaacctggagcagttggccgaggccgccaccgttcagggccggcgcgagctggaactggccgacctccagcgcctgaacctggagctgtataccggcgcggccccgaacccgaggacttcgaaatga

SEQ ID NO: 330493 - DNA, 1248 bp, Pseudomonas aeruginosa
atgcacggccggcccttccggccggaaatcaccaccatcatcgacatccgtacccgtcgaattccgggatggtccaccggcctggccgagtcggccctggtggtggtcgatgccctgcgcgacgcctgcaccaagggcggcatcccggccatcttctacgtggacaacggctcgggctacgtcaaccacatgatgcgcgacgaggcggtcggccttatgggccgcctgggcatcgatatgaagaacagcctgccctacaacagccaggcgcggggcgtgatcgagcgcgttcaccagagcctctggattcgcgccgccaaggaattgccgggctacatcggcgccgacatggaccgccaggccaagctggccaccttcaagctcagccgcaaggccatcgccaagggcggcaccatgccgctgatgtcctgggaatcttttgtcgcattctgcgaacagcagattgccgagtacaacgaccggccgcacagcagcttgccgcgcatcgttgacccgaacaccggccgtcgccggcacatgacccccaacgaagcctgggcgctgcacgaagcggacggtttcagcccgatgcgcgtcaccgacgacgaggcccggccgctgttccggccccaggtgctgcgcaccgtccgccgctgcgaactggagttcatcggtaaccgctacttcgcccgcgagctggaggaattccacggcgaccaggtggccgtgggctacgacatccacgacgccagcacggtgtgggtctacgacggcgagggccgcttcctttgcaccgcagagctgaacggcaacagccgcgactacatgccggcttcgtatgtcgagcgcgcccgcgagaaacgctcagaggcccgcgagaagcgcgccctggctcacctcgacgagattcgcgccgagcgtgacggcgggtatgccctggaaatggatgcgccgctgtccatccccggcctcggcacgatcacccctgagcaactccggtcgcgcagcgccgcgaccctcgaaatgcaggccgagcggatcgacgaaccgcgcccggccgcagccaccgcccaagccaccaccgcccaggtcttcaccctgccgaccgctcccgcccagcgctaccggcagtggtgcgagctggccgagcggcagcgctccggccaacccatcgagccggacgccgcccagtggttcgaggtttaccccaaatccaaagaattcgccgcccagcagcggcaagcatga

SEQ ID NO: 330494 - DNA, 351 bp, Pseudomonas aeruginosa
atggacgatgacacctatcgcgcattgctcgctcgcgtcgcgggcgtgcgctcggccaaggacttagggccgcgccagattgaccaggtactggtcgaactccagcgtctgggctggaaaccgaagagcaaccggcaaggccgggcgacgccaaaagtgccgcaaaaccggcaaaccgtgctgcgcaaaatcaccgcgctcctggccagcgcccatcgcccctggagctacgccgaccatatggcccggcgcatgttccaggtcgagcgggtcgagtggctggacgacagccagctctaccggctgatgcaggcgcttatcatcgacaggagccgccatggccaggtctga

SEQ ID NO: 330495 - DNA, 888 bp, Pseudomonas aeruginosa
gtgcggccattcgatgatcgccttgaacttgcgccgcttccacagcgggtttttcagcaggcgcgacaggaccgagtcgtagtgaaggatggtgccgatgatgatcacgtccatggtgtcgtcggccgagccgagggacagaacggttttcttcagccagttttccagcttgtcgcgctgctccgggctgcggacgttctcgtcgttctccaggtcgtcgccgatcaccaggtcaggacggtgcgggccgtgtcgaaggccgcgcatccgcttgccggagccgaagacctggaccttggcatcgttcgccgtaacgatggtgccgacctgccaaacgcggcccttgccggcgccctgggggaagtccatggccaggcgcgggttgaactccagctccgccttgatcgcctccagcatcgtggcggcctgttcgaaggcatccatgatgatcagggggtaatgcttgcggccggtgagtacgcaccagatcacgaatatctggctcaccagggtggacttggcattaccacgcggcgccgcaatggcttcgtgctggccgtccgggtggtccaccagctcgggcaaccgcttgtagaggtagtcgtggagcagcgcgttaccgcgcttcacgtagtgcgggaagtaggtccgggcgaaatactcatagtccgcgctggcccgttcacgccggacggcgctggccttcgggtcggggtcgaaacctgcgacctcggcctcgatctggcggcggaactcccccgcgagctgggcaatatccgccaggaagtctctggtgctacccttcatgggtcgatttctccccagaaggaacctggtcatgatggactggattgctggtgcctacggcggcatcaaggcggccactga

SEQ ID NO: 330496 - DNA, 222 bp, Pseudomonas aeruginosa
atggacattcaacctgcgtttcagcccttaccaaagggctatcaggtcgcctggtacggtatggaaaagctctgcaccaaatgtcgggaatactggccagcggatgccgagttcttcttcaccaacccggacggaacactcaaaaattcctgtaaagcctgctggtacgaaatgccttccgtacagcggcgcctacagggtaaggcgcggaggctgcaatga

SEQ ID NO: 330497 - DNA, 270 bp, Pseudomonas aeruginosa; identical to SEQ ID NO: 330342

SEQ ID NO: 330498 - DNA, 414 bp, Pseudomonas aeruginosa
atggaacgcgcaatcgatctgtcggcctggggcgagcgtccgcctgtcttcgtccagctgctggccgccgaggtggcccgcagcagccagacgaaagccggcgaggcaatcggcatgagccgttcgaccgtcagcaccatcctcgccaaccgctacccgtcgccctcgacgatccgcgtcgagcgccgcgtcctggccgcgctgagccgtattgagtgcccggccttgggcgaggcggtgacctcggtcgagtgcagcgagtacctccagcggccggcgccgctgaacaaccccgtcgcgatgcgctgctggaaagcgtgccgcgcctgtccacgcaacccgcataccgcccccatgaaacgagaggaacaaggccatgagaaccgcattgcccttgaaagtcttgacgcctga

SEQ ID NO: 330499 - DNA, 312 bp, Pseudomonas aeruginosa
atgagaaccgcattgcccttgaaagtcttgacgcctgacttggcccagagcctgcgcaccttcaacgacgccgcccggctgctccagcgcatgggggtccgccttcatcgcctggagccgacagaggggcgcgtgaccatcgccgcagatgacgcccgccagctcctggagaaaggctacctgatgggcttccagcgcgacgcctcggccggcagcacccgttacatcacccgcttccagggcatcaccctggcctggagcgaaccgatcagctaccgcgacttcgccggcagcaaatccgtaattcactga

SEQ ID NO: 330500 - DNA, 189 bp, Pseudomonas aeruginosa; identical to SEQ ID NO: 328998

SEQ ID NO: 330501 - DNA, 771 bp, Pseudomonas aeruginosa
atggcacaggaaacgtatttctacgggcaaggtgagattgacgccgcgcctatcgtcaacggcgtcctcggcaaatggcgctggattcaggatgtctcggccatgagcatccagctcgcagtcgagaaggtcgagcacaaggaaagctacagcggccagaaagccctggtccgaagcttccccatcggcaagaccgccaccgtcagcatgaccttgcacagcatcgacccggataacctggcgctcaccctctatggcaaggtcgtgactaaggcggccggctctgtgacgggtgaggcgctccccgccgacctggtggctggtgatgtaatccgcctggccaatccgggcgtcagcgagctggtcatcaccgacagcgcgagcacgccggcgcccctcgatccgcagtattacgccctgcgagccgatggcgcctacggcgaggtccaactgctgggtctgccgacgccggccccgacccagccgttcaaggcggcctatgagtacgcggcgactcgccaggtgggcatgttcaccgcgccgcagccgaccatcgccctgcgctacaagggcatcaacctggccgaaggcggcgcgccggtcatcgtcgagctgttcaaggtcgcgaccgacccgctccaggaactggcattgatcagcgacggcaacaccgttgccgggatgcagatcagcggcggtatcctgctggacaccagcaagccggataccggcgacctgggccgcttcggtcgcattatccagctggggtaa

SEQ ID NO: 330502 - DNA, 297 bp, Pseudomonas aeruginosa
atgacgaacgaaaccaagacagaccgccagcgccgcctggcgcgggaacgccaacgagcgaagcgcgagcgcgatgccctgcgccgcgctgcgctgggcggtcgccgcttcaacatggacatgtaccagggaacggctgatgcactcgatctgatctgcgcggccggtggcttcgccgagccggccgaggcggtcaccttgctcctacacaacgttgccgaaattgcagaacgtgacgcgtcacgctttgccgaattgatccaaaagagaagccatccagggaggaccaagcgatga

SEQ ID NO: 330503 - DNA, 507 bp, Pseudomonas aeruginosa
gtggacggggtgaagctccagttgccgctgccgtcggcagtgacctgcccgatcggattgccgctgccatcggtcagggtcaccgtggcgcccggttcggcggtgccgctgatctccgcgccgttgctcggattgaccaccggcgcggccggcgccaccgagtccacggtggtgctggccggagcgctggtattgccggtcgggtcgctggccgtggcgttgaccacggtgccgttgggcaacggcgtgcccggtgtgaagctccagttgccgctgccgtcggcggtgacctggccaatcgggttgccgttgccgtcggtcagggtcacggtggcgcccggctcggcggtaccgctgagcgtggtgccgttgctcgggttgagcaccggagccgccggggcctgcgagtccacggtgacgctggcgcccgggctgctattgccggcggcgtcctgggccaccacgttgaccacggtgccgttggcgatcggcgtggacggggtgtag

SEQ ID NO: 330504 - DNA, 348 bp, Pseudomonas aeruginosa
atgacccgcgccgcagttgtacgacagcctggcgccctggcatttctcgaacagttcaaccgctacggcatggccgcgctggccggctgggcgaaccctgtccgtcacgcaaccggcggacagatcggcattcccgctcccaatctgccggctcccgtccgtggcggcgcgaacctgcccgagccctccaaaaacttcagtacctcggtcgctaactcgatctacctgcacgccgttcaggaccccgaccagatggcggccgaaatgtgggccggcaagggcggcgaccattacatcgtctggctgaacaagaaccgccaggccgtcaagcaaatactcggaaactag

SEQ ID NO: 330505 - DNA, 432 bp, Pseudomonas aeruginosa
atgtttggtttcgcctccggtgggcacatcaaggggccaggaacaggcaccagcgacagtatcccgattctggcatccaacgacgagttcatgacccgtgccgccgttgtacgacagcccggcgccctggcatttctcgaacagttcaaccgctacggcatggccgcgctggccggctgggcaaaccctgtccgtcacgcaaccggcgggcagatcggcattcccgcccccagcctgccggcccccgtccgtgccggcgcgaacctgcccgagccgtccaagaacttcagtacctcggtcgccaactcgatctacctgcacgccgttcaggacacggatcagatggcggccgacatgtgggccggcaaaggcggcgaacacttcctggtctggctgaacaagaaccgccaggccgtcaagcagattatctag

SEQ ID NO: 330506 - DNA, 309 bp, Pseudomonas aeruginosa
atggcccgcaaccgcgcgcaacagctgtgcatcgtcaccctggactatcagcgtttcctgttaccccaggccgatgcactcaagctgatagacatcatgagtcgagccgcagaggttcaggccgactacgcctctggagctgggttcaagtacaccgtcggcgaagcgccggaagtcgagttgacggtagtgcgccccagtcaattggtcatgccgcaggctgagccggccccagctacaccacgcactcgccggaagtctccggcccagctcacgcacgattccactcggctgctggaggggctctga

SEQ ID NO: 330507 - DNA, 243 bp, Pseudomonas aeruginosa
atgcaacgccccagcggaatcagcctcagcgatctgttcgcgatctgccgtgaagacccggccaaccgatggctctggatacgcctctatctccgcgacctgctggcccgcgtcgtgattctggccttcatggcaattggtgccgcaggcctcgcctatggcctgggcggggcgttcgcctacggcttcatgcagaccgttgcgtcctaccaggtccagctcagcgtcgagaaatcgccatga

SEQ ID NO: 330508 - DNA, 282 bp, Pseudomonas aeruginosa
atgaccaagacgttcgccatgtgccgcatcgacggcctgatcgagctgcgggaagagcacccaggcgagggctatttcgcccttgccgtgggcgagctggccagcgtgcgggcggcggtctttgcaaccgctgagccgcaccaggtgggccagaaagtcgcccggcgcgtgccgggtgtgagccccgaggccaccgaccgcgagaacctgggttccatcgcccgctacatccagaccctgggccagcaggatcggcccggcttccgtgcgctgggggtgtga

SEQ ID NO: 330509 - DNA, 240 bp, Pseudomonas aeruginosa
atgggcctgaacctgctgcgcgagcgctaccgggtcgacctggccagcctgcaggcgacctgcgaagcgaactacgcgcggctcatgcgcctgctcccggacatgcgcgaggcgcaggcctcgcgccgggtcgcgctgagcgaaggggagcggctgctcggcgtacttgcgctggaagtgaccgaggcctgcccctacaccaccacccttcaggtgcgccaggaactgggcctgccctag

SEQ ID NO: 330510 - DNA, 888 bp, Pseudomonas aeruginosa
atgggagagccctacttcaagatacggaacaagcttcagcgcctgggtattcgcgcgttctccagcaactacgcgctgtacggcgacatgagccagcgggtaatgactctccttgaggagatggcgcccgccgtcgaggtgtacagcatcgacgaatgtttcgctgacctgaccggggtccctggtgacctgatgcgcgttgggcgcgagatgcgcgctcgggtactgcgctgcactggcatccccgtaggcgtgggtatcggcacttcgaagacgcttgcgaagctggccaaccacggcgcgaagaaatggcaagctcagactgggggcgtgttggatattcgagatccggcgcgccgtgatcgattgctgcaggcctgcgaggttggcgatgtatggggcatcggccgacggatgaccgagcacctaagcacgatgggcatccgcacggcctgggatcttgcacaggccgacgcctggaccttgagaacgaaattcaacgtcgtcatcgagaagacggcgcgagagctgcgcggcactccctgcctggagctcgaggacgctgctccgcctaaacaggagatctgctgcagccggatgttcggcaagcggctgcatgacctcccgccgatccgcaaggacatagcggcggaaaccggcatggagcatcgtccggtagccgacgggcagcgcgtctccggcatctaccggcgctcggtcatgctcgccagcgggcgttatgcgatgcttgatgacggtatggggttcagcctggtgccgtggcggccggtgatcgaacagcggctggggcagcagcttgccgcgacggtgcgcggcagtggcgtgtcgtgggagataggacggcagcgtggacctgcaattgggtga

SEQ ID NO: 330511 - DNA, 807 bp, Pseudomonas aeruginosa
atggacttttcctctgccgaaaatgatggccatgcgcttgacctgagtgcaggagaagttcgcggtttgccggtgttcggcgtagccgcgcgctaccctgccggccacgtcgtgccccggcacacgcatccgtatggtcatctgatccatgcagatcgtggcttgttgcgtgtggaagccgaaagcggccagtggctagtgccgcccacggcagctgtctggcttcgaccaggcgtatcgcaccagttggtggttcctgtggcgctgcaagcgcacggcctgtacgtgcgcgaggacgtgtgcgcccgactgccagcaactgattgcgtcgtgcatgtctccggtctgctgcgcgaagtgatcatggcgctggcccaaaccggcgataaggccaaaccatccaagcgcatgcgtttgctcggtgcgctcttggtcgaagaactgcactcccagccggttcttccgcttcatctgccatggccgacgggtggtgctgacagcctgatgcggcatgtatgccaggcactactggacaatcccagcgatgatgccaccgccgccgagtgggccgacaggctggcaatgggcggcaagactttccaccggcactttctccaatcgaccggcatgaccttcggtaaatggcgtcagcaacttcggctcatgtcgtcgatgacgctattgatgcagggagtacctatcacacaggtggcgctggcgagcggctacgatagtcatagcgcctacaccacggcgttcagcaagcagtttggacagccgccctccgcatttgcagcgaatacataa

SEQ ID NO: 330512 - DNA, 1677 bp, Pseudomonas aeruginosa
atgctgactgatccttcccataaataccgtcccattgcctcggtcgatcttgccgaccgtcaatggccgtcacgcactctgacgcaagccccgatctggctgtccaccgacttgcgcgacggcaatcaggcattgttcgagccgatgaaccgcgagcgcaagctgcgcctgttccatgagctggtgcgcatcggtttcaaggaaattgaagtcggttttcccgcagcgtcgcgtactgatttcgagatcgtgcgccacctcatcgaagcgggacagattcctgcagacgtcaccccgatggttatgacgcaattgcgcgatgacctgatcaccgaaacggtacgcgcggtggcgggcgcacagcgtgtgatcgtgcatttctacaacgccgtcgcgcctgtctggcgcgaaatcgtgttccgcatgagcgtgccgcagatcgtcgacatggtggagcgtcacattgcgctgttcaagcgactgacggccaaccacccggaaaccgaatgggtgctgcaatactcgcccgagacgttctgcatggccgagctggatgtttctctgaccgtgtgcaacgctgccattcgagcctgggatgccgggccgcagcggccgatgatcatcaacctgccgaccacggtagaagtctccacgcccaacatcttcgctgaccagatcgagtggatggatcggcggctagagcggcgcgagcacatcgtactgtccgtgcatccacacaatgaccgaggcacaggcgtggcctgcgccgaacaggccatgctggccggtgcgcaacgtgtcgaaggctgcctgttcggcaatggcgagcgcagcggcaacgtggatgtcgtgacgctggcgttgaatctgtatacgcagggcattgcgccggggctggatttttccgacatagcagcggttgcccgtgtagccgaggaatgcaccgcgctgcccatccacccacgtcacccatatgtgggagatctggtcttcacggctttctccggctcgcaccaagatgccatcgccaagggctttgccgcgcaaaagtccgatgcgccctggcgtgtgccttacctgcccatcgacccgaaagatttgggccgcacctacgacagtatcgtgcgcgtcaatagtcagtccggcaagggaggcattgccttcttgctcaaccgcgaccacggcatcgtcatgccgcgccgtatgcagatagagttcagtgccatcgtccaggcgctggccgactccagcgaaacggaactggccagcgaagaagtttgggccgtgttcgagcgcacctaccttgccccggtacgggaacagtcaggctttatttatcgcaaccaccgcctgttcgagcacgcggatggacaaggcataacactggagctggcggatgcggacggcaacgtcaagaccttagaggggacaggcaacggcccgatttccgcgaccgttgcggcgctgggcctgccgctgcgtattgacagctatgaggagcgcaacctgggtactggctccgacgcggcggcgctggccatcgtggagagcgccatacccggcgtgctcggctcgcgctttggggtaggccggcatgcaaacatcgctaccgcgtcggttctggcggtgctgagtgcggcggcacgattctctatggagatggcagcagtcggctga

SEQ ID NO: 330513 - DNA, 468 bp, Pseudomonas aeruginosa
atgagtttgcaatcggtccgcgctttcttgtcagaacatgcgcccgaccttgaaattctagagaaggatacgagcaccgcaaccgtcgccgaagctgcggttgcgcatggcgtagcgccgggacaaattgcaaaaacgctctcgctatggctgaaagatgaagttgccatcgtcgtaatgggcggcgatgcaaaaatcgacaaccagaaattcaaggcccaattcaagaccaaggccaagatgctgaatgctgatgaggttgttgagtggacgagccatcctgttggcggcgtgtgtccgtttggcttgccgcatcctctgcctgtctttgtagacgtgacattgaagaaatttgacgttgtcttgcctgcggcaggcgcaaccaatgccgcgctgcgcattgctcctgagcggctggcccagctagttcaggcgacttgggtggacatcgcgcaagatcgttcttag

SEQ ID NO: 330514 - DNA, 945 bp, Pseudomonas aeruginosa
atggaactgcgacacttgcgttgtttcctggctgttgccgaagagcttcacttcgcgcgtgcagccgaacgattgcatatcgaacagtcgccgctgtcgcgcaccatcaaggagctggaagaagacttgggcgaacagttgttcatccgcaccagccgcagcacacggctgacacgggcaggaaagctgtttctggagcatgtgccgcgcatcttcacggccttgcagcaagcccgtgacagcgtgcaggcagcggccaacggctttcatgggcaattgcgcattgcgctgtccgatggcatcacgccgtcgcgcctgccgggcttactcgcgatgtgccggcaggaggaacccgaggtcgatattcggttgttccaggtgccgctggcacagcagatcaaagggctgcaagacgacctgtacgacgtgggctttgcgcagtcggacgaagtgggcgaagggatcactgccggagcggtgtggaatgacccgctgatggtggcggtgccggcacggcatcacctgctcaagcacaagcgaatccctttggatgaagtgctgcaatttccgctggtgctatgcgatccgctggcgtgcgagggccatgcgcgccaggttgatcgcctgctgcgccgttccgagcgcgaacccctgatcgccgagcgcgtggcttcgtttgagttgatgatggtggtggtgtcggcaggcttcgccctgggcctggccggtgcgccacacatcgcggcaagccaggaatctggtgtggtggcccggcccctggctggacgctcgcccatgctgacgacctacctgctgcgcccggaaggcgagccttcggagacgcttgcccgcttcatagaacgggtgcaggccatcgacctgcccgaaggcgcaaggcctgcgccggcacctgaacctgatccgcaggaggccaccccgccatga

SEQ ID NO: 330515 - DNA, 264 bp, Pseudomonas aeruginosa
atgaaacgcattgccccattgctattgatcgccgcgctcaccgcctgcggccaatcggaagcgcccaagccggccaatgtgccgaccgtggacgaactggccgcggatccggcgcgcttgaaggaactgcgccagcaatgcaagaccgaccgcgcgacgctgggtgacgtgttgtgcaaccgggtggccgaagctacgcgcaagcggttttatggcgacggcaaaacgccctacacgccatcggagacgccgccgaagttttga

SEQ ID NO: 330516 - DNA, 489 bp, Pseudomonas aeruginosa
atgagccctcatcgtgcgaactatcgcctcaatctgttcattcagcccgaacatgcccgccgcttggacgaactggccgccaagaaaggcgtctcgaagtccagcatcgtggctgccgctctggcgtcctggctgtcgcccgatgctggcgaccagcgcgaggcggccatcgccaagcggctcgatcgcctgtcgcggcaggccgagcgcctggagcgcgaccagaacatccagatcgaaacgctggcgctgttcatccgctacttcctgaccgtcagcacgccggttcccgaagcccatcaggacgcagcccgtgcgcagggcaaagcgcgtttcgagcaattcgtggaacagcttggccgccacctgctgcgcggccgcagcctggtgcgcgatgtggtggaggaactgcatcctgacccggtgcggatggatgacgcggcggcgctggccgaagcccacgaacgaactgcggagcgtgccttatga

SEQ ID NO: 330517 - DNA, 1080 bp, Pseudomonas aeruginosa
atgagcgccggtccgcagaccccgcccgaaccgcgttcatccgctgcggcctcgctggatcgccgcatccagatgctgcgcacagcaatggggccagtcatcgccgccgcgctggccgacccgaacgtggtggaaatcatgctcaatcccgaccgcaccctatgggtggatcggctgtcgtcgggccgcacgccgctgggcgtggaactgtccgaagacgatggcgaacgcatcattcgcctggtggccgcacacgtcggcgcggaagtgcatcgcgggcggcccttgctgaccgccgagctgcccgaaaccggcgaacgcttcgagggcattctgccgccggccgcgccggggccggccttcgcgctgcgcaagcgcgccgtgagcatcatcggcctggatcgctatgtggccgacggcatcctgaccaccgtgcaggccgagttcctgcgccgcgccgtgcgcgagcgccagaacatcctgatcgccggggcgacgagcagcggcaagaccacgctcgccaatgccttgcttgcggaaattgccgccaccggcgatcgcgtgctggtgctcgaagacaccatcgaactgcaatgcgcagcccgcgaccatgtgccactgcgcacgcgcgctggcgtcatgtccatgaccgaactggtgcgcgccacgatgcgcctacgccccgaccgcgtgatcgtcggcgaggtacgcggcggcgaagccctggacttggtgaaggtctggggcaccggccatccgggcggcatcgccacgatccacgccggttctgcgctgggcgcgctgctgcgcctcgaacagttgattctcgaagtcgcggtgaatccgccgcgtgccctgatcgccgaggcggtcaacgtcgtcatccacatcgacgggcgtggccgcaagcgccgcgtcaaaagtatcgcccgtgtcgtcggtttcgacggtgggggctatctcctggcgaatgcactggaggcgctggaaacaccgtttcccgagctgacgccggttcctctcgcagccgataccgctgcgcctttcccgtcccttgaccaacctggagaactgccatga

SEQ ID NO: 330518 - DNA, 384 bp, Pseudomonas aeruginosa
atgacgcagatgcacgctcatgctttccgtaattccgtaaatccggtttcgaccatcgcacgcctgcggcggctggtcggccctgcgcaccacggcctgctgctggctgccgtcatgttgatgacggcaggcacggcaaaggcgtccggttcctcgatgccgtgggaaggcccgctgcaatccattctggagtcgattcaggggccggtggcgcgcatcgtcgcggtcatcatcatcatcgctacaggcctcgcgctggcctttggcgacacgtcgggcggctttcgcaagctgatccagatcgtcttcggtttgagcatcgccttcgccgcgtcctcgttcttcctgtcgttcttcagtttctccggcggggccgtcgtatga

SEQ ID NO: 330519 - DNA, 273 bp, Pseudomonas aeruginosa
atgagtggcgcggatagcttcgcggcaggcttcgaggtgccgctgcatcgctcactgaccgaaccgctcctgatgggcggcgcaccgcgcaccgtggcgattgccaacagcacgctggccgccgccgtcgggctgggcctgcaactctggattcccggtgtcgtgctctggatcgtcggccactcgctggccgtgtggggcgcgcgtgtcgatccgcagttcatgcaggtcttcgcccggcacatcaagcacaagccgctgctggacgtgtag

SEQ ID NO: 330520 - DNA, 1392 bp, Pseudomonas aeruginosa
atgaacgacgtgaccatcatcgaccgcttcctcgatacgttctcgcgttacatcgactcggggttcggcctgctgcaaggcgaagtggcgtttctcaccgccacgctgatcgttatcgacatgacgatcgcgggcctgtattgggccatgagccacgccaccggccagggcgaggacgtgatcgccaagctgctgcgcaaggtgctctacgtcggtgccttcgcctacatcatcggcaacttcaactggctggccggcatcgtcttccgctcgttcgccgggctgggcctgacggccaccggctcgaccatgacgatggagaacttcctgcaaccgggtcggctggccaagaccggcatcgacgcgggtgcgccgattctggagcagatcggcgacatggcgggcttccccgaagtcttcgtgaacatcgaccccatcgtggtgatgttcctcgcctggctcaccgtcatcctgtgtttcttcgtgctggcgatccagcttttcatcacgctgatcgagttcaagttgaccacgctcgccggcttcgtgctggtgccgttcgcgctctggaacaagacctcgtttctcgccgaaaaggtgctcggcaacgtggtgtcatcgggcatcaaggtcttggtgctggccgtcatcgtcggcattggctcgggcctgttcgcagagttccgggttcaccccgacgaaccctccatcgatcacgcccttgtcgtgatgctggcctcgcttgcgctgctggcgctgggcatctatgggccgggcattgcaaccggcctggtgtccggtgcgccgcagcttggcgcaggcgcgatggccggtgctgccattggcgccaccggcacggccgttgccattggtgctgccgcgacgggcgtgggcggtgcggtcgtggccggggcacgcatggcgccggcagccgcgaagctggccggcgccggtgcgcgtgccgccacctcggcggccggtagcgcacgctcggcgttccaagccggttccgccgctgcgggcggaggggccaagggcgcgatggccggcttgggcaatgtcgccaagaccggcgcgcagtctgtcgggcgcagcgccgcatctggcgcgtccggcgctgctcagaagatgaccaactctttccgtgctggatggaacggcacagaggcaggtggcggcgctgcgcccggtgcggctggctccggccaagcggccgcaggcgaagccgcagacggcgccgcctcgcagaagcaagagcagcccgcatgggccaagcggatgcaccgccgccagcggatcacccatgccgcgaccactgccgcacacacgttgcgcggtggcgatggcggcggctccgggcaaggcccgagcctgcgcggctccgacgactaa

SEQ ID NO: 330521 - DNA, 705 bp, Pseudomonas aeruginosa
atgcgattcaaacgaccgcaggtgcgctatgccgatacgccgcagcctgccactccgtatcaagccgccgcccaggtgtgggacgagcgtatcggctcggcccgcgtgcaggcgaagaattggcggctgatggccttcggctgcctagtgctggccttgctgatggccggtggcctggtctggcgctcggcgcagtccatcgtgacgccctacgtcatcgaagtcgatcaatccggccaggtgcgcactgtaggcgaggccgccacgccgtaccggcccgccgatgcgcagattgcgcatcacctggcgcgcttcgtgacgctggtgcgctcgctgtccatcgatcccatcgtggtgcggcagaactggctcgatgcctacgactacaccacggacaagggtgcggccgtgctcaattactacgcgagcaagaccgatccgttcgcccgcgtcggccgcgagtcggtgacggtgcagatcaccagcgtcacgcgcgcgagcgatgcctcgttcaacgtccgctggacggagcagcggttcgtcaatggcgcacccgctggcaccgaacgctggaacgcggtgctttccaccgtcctgcaaaccccgagtaccgaacagcgcctgcgcaagaacccgctggggatctacgtcaacggcctggcgtggagccgagaactggattcttccgaaggagccaagccatga

SEQ ID NO: 330522 - DNA, 1161 bp, Pseudomonas aeruginosa
atgaaagcactacacaccattccggccgcgcgccgtcagccccgtaccggcatgaagccagttaccgctacgcattcgcgacggcaggcgatggaagccgaatatcggcaacgcgccaccgaagcgctccaactcgtctttccgctgttctcgccgcgtttcgggatggattcgcgcacgctctacatggtgactctgctgtcgctggtcgccgcgctgtcgggctgcgcttcgcacggcaagcctccgccgacgatctcgctcgatgagccggtgcaggcgcagccgctgcccgacccacccaagcccatcgaagtggtggcggtgcccgagccgttggcgctgccggcgcagttgaagccactgccgggcgtcgatgcggccccggctgcgccggagccagaggacgagaaggtgcgcgtctcgcgcgccaatgccgaggcgcgcatcgcgcccacgcgcgagggctacgtcaatgcgattcaggtgtggcccttcaccgatggcgcgctctatcaggtctatgccgcgccggggcgcgtgaccgtggtttcgctccagccgggcgaggaactggtgacggtggctgctggcgataccgtgcgctggatcgtcggcgacacgtccagcggcagcggcgatgcgctgcgcgtcaatgtgctggtcaaacccatccgctcgggcctgaaaaccaatctggtcatcaccaccagccgccgcacctacctgctggaactgacctcgacggaaaaggcttggatggcctcggtgtcctgggactacccgaaagaccggatgctggccttgcagcgccaggcacaggcggccagtgcggccgcgccggtagataccggcctgtcgctggagaacatccgtttccgctacgcggtgtcgggcagcaatccgccgtggaagccactgcgtgccttcgacgatggtgaaaaggtctatatccagttccctgcgggcatcgcccaaggcgaactgccgccgctgttcgtcatcggtgcgcagggtgacgggcaactggtcaattaccgtttccgctcgccgtactacatcgtcgatcgcctgttcggcgcggccgaactgcgcctgggcgccgaccagggcgacgtggtgcgcatcgagcgcacggatggcatcgtcgggaggaactga

SEQ ID NO: 330523 - DNA, 1281 bp, Pseudomonas aeruginosa
atgagccaggacgatactcccgaccttgccacgacgcaggcgggcaaggttgcgcccgaagccgtggcgctgcgcgcccagccgcgcccggtcacgcgcctgaaccggcgcacgctggtcatcctcgccggcggcctgtcggtcgccgtgctcggcgcgctgatgtggtcgctgcaaccgcaacggcgcggggccaatgaacagaccgagctttacaacgtcgatcgcgtctccaggtccgaagggctggatgcgctgccggcggactactccaagctgccgccggcattgccgcccgccgtgcctgagctggggccaccgctgccgggcgatctggggccagccatggtgaattcacagcagccggtggctgccgcctacgccgctcccggctacgaccccaatgacgcgctgcgcaaggaaaccgaagcagccgcagcttcatcggtattcttccgcaccggctccccgcaggcagcgcccgtggcgcagtcgcaggtcgccgccgcgccgggcttcgccgccaatgcggcgttcgacccactggcggctgggcctgcctcaacggcggcccagcctgccgacccgaccgccgtgcagaaccgtcaagaccagaaagaggcgttcctggcaggcggtgctacagaaacccgcaattccggcaacctgaaaatgcccgcttcgccgtatcaggtaatggctgggacggtgatcgcaggcgccttggtcacgggcatcaagtcggacctgccgggcgatgtgatcgccacggtgacggagccggtctatgacactgctacgggcaagttcctgctgatcccgcagggttcgcgcattttgggccgctacaacagtcaggtcagctacgggcagagccgggtgcaggtggtgtggaaccggatcatcctgccggacacgtcatcgctcacgctcgacaacttggccggcaccgatccggccggctatgccggtctggaagacgatgtggactggcattgggatcgtgtctttgccggtgcggcgctgactacgctgctgggcatcggagccgagctggccgcgccggagaaccggcaggacggcgatcgcgtcatcatcgccgggcgcgacagcgcgcaagacagcatcaatcaggtcggccaggagatgacccgccgaaacctcaacatccagcctacgctgaccagccggcccggcttgccggtgcggatcatcgtcaatcgtgatctggtgctgcggccgtaccagccgctattcttcaacagggggacttcacgatga

SEQ ID NO: 330524 - DNA, 246 bp, Pseudomonas aeruginosa
atgagcgcgacgcgcaagctgcggctcgggccgctgccaaaaaccgaatccatgaaactgacctttgcctgcccggccagcttgaaggctgacctcgaccgctacgccgcgttgcacgcgcagacctacggggaagctgtcgatgcggtgatcctgatcccgcacatgctggaagcgttcatggcgggagatcgtggattcaagaagggctacgcgagcaagaccacgccgcccaagccaatatga

SEQ ID NO: 330525 - DNA, 906 bp, Pseudomonas aeruginosa
atgcaaaacatgcagcccatcccttatgccgaacacctgccggtctttgtcgcggtggcccgggccggcagtttttccgccgtggccgcccggcagggcgtggcaccgtcttccgtggtgcgccagatcgacgctttggaggtggcgctggacgtgcggttgttcgtgcgttccacccgcggcctggcgctgaccgatgcaggcgaactgctgctggcccgagcccccatcctgctcgacgagctggtggatctgcgcgcggaagtcgccgcgctgggcgatgagccgcgcggcgtgttgcgcgtggcgtgcctgccgaccttcggccgccaccacgtgctgccactgttgcccggtctgttgacgcgataccccgcactacgcatcgaactggagttcacggaacggctggccgacccggtgcgcgaacggctagacgccgtgatccgcgtcggcccgctcaaggacagccggctctacgcgcagcgcctcgggacgcagcgctggtccatctgcgccagccgcggctatctgaagcagcatgggcatcccgccaccttggacgatctggccggccaccgcctgctggacaagcgccacgaccccgaaggattgggctggcgtggcttgcgcgccggcaccctgatccccgacgccgctgccgacagcgctgtggcctgcgacgacttcgaggcgctgcttttggccgccatggccggactggggctggcctatctgcccacctgggtgacggctgaagccacttccagcggagaactggtcacgctattcggcgatcccgcccagcgcgaagacgacatccacctgttgcgggcgctgccgcgaccgccggccaaactggcggtgttctcgcaggcgctgcagtatgcgttcaagacgggctga

SEQ ID NO: 330526 - DNA, 1209 bp, Pseudomonas aeruginosa
atgtctgattcttcccgcgccgccgcgtccctgtccggacgcggcgtggtggcgctgtcggcggcctgcggttttgccgtcgccaacctctattacagccagccgctgctgccgcagatggcggcgacgttcggcgcggatgcgtcggcccaaggggctatcgccatgctgacccagacgggatacgcggcggggctgctgctgttcggcccactgggagaccgccttgaccggcgttggctgatcaccgcgctgctgctcgtgaacatggtcggcttggcactttgcgcaatggcgaccagcctgagcggcttgttggctgcatgcgtgctggtcggcctgacggcggtcagcgcgcagatcatcatcccggccgtgtcgggcctggtcgatccggcccgccgcgggcaaaccgtgggcaggctgatgagcgggctgttcgccggcacgctgctagcgcgcacgatcagcggctatgtcggcgcacacacgagctggcgggtggtgttcgaactggctgccgcgatcgacgtggcgctgatcgcgctggtctggcgctacttgccgcagaccgagccgggcagcgacctgtcgtatccgaagctgctggcttcgctggggcagttgctggcgaggcagccgctgctgcgggaagcctgcctggccgggttcctgctgttcgcggcgttcaacgtgttgtggggaacgctcgcgttgatgctggcgcggccgccctatggctatggcagcgaagtggccgggctgttcgggctggtgggcgtcgtgggcatgctggcgtctcccgctattggccgcttggccgatcgctggggcgggcgccgggtggtggcgctggcggccgggctggtcatgctggccttcgtcctggtcgccggttctgccgtgaacattggcttcctgatcgttggcgtggtgattctcgacctgggcagccgcgccaatctggtggccaaccagacccggctgtatgcgctgcttccgcaggcgcgtggccggctcaatacggtgttcatgacctgctatttcctcgggggtgccgcaggctcggcgctgggggcagcggtggccggacgcttcgggtggcgcggtgtagcgacggctggcgtgctctgcgcactcctggcgctgggcgtgggtgcgatccatcgcaagacagcgccgacgacagttcaactgcctaggacataa

SEQ ID NO: 330527 - DNA, 1125 bp, Pseudomonas aeruginosa
atgaccaggcagttgaccactctcacgctgtgcctgctgctcgccagctgcacgacccacaaggctgagccggccaggcccgccttcgacagcagccgcaatccagacctgctctcaccggacctgtacccgaatggcgtacaaccggagaaggagcccgtcgtgcgctacgggcgctacaccctggtcagcacccagccggacgctggccagcgcgacctgatggcacagatcatcgacgtgaccatcccgtcgagcatgaacccgagtgtcaaggacgccatgcagtacgtgatgagccgctcgggttactcgctgtgcccggcagaggccggtcatgtgaacatcctctacacccggccgctgccggcagctcagtacaagctcggccccatgaccctgcgcaacaccctccaagtcctctccggccctgcctggcaggtgaaggtcgacgaagtggcgcggcaggtctgcttcgtactgcgcccgggctatcaacttcccccggcgccgaggccgaaaccggtccagcaactgtatgcgaagcccgctgccccaactccagcggcggtagcgcaaccctcctccacggaaaaagtcagcacgcttgagtcgcccgtcgtggtcgcctcggtgccaacgccgacgccaatcacaaccagccccgctccgactaagaagcctgaatccaccactgtgttccccccagccgcaccggccaaggatggtcacccctcttctcctcccggggcttcgccaccgatcaagcccctggcttccaccgtgaagcccacgccgcccactccggccagcgtggcttccgcccctccggtcaacgtgctcaggccaacggagccgagccggcagttggcacagtcctggtcagccgaaacgggatcaaccctgcgcgacaccttggaagcctgggcaaagcgcgcacgctggaccgtccgctgggagccgctggatctcaactatccgatcgaagctcctctgaccttccacggctccttcgaggacgcggtatccgagctgttcccgctgtatgacgctgccgaacggcccttcctggtgaacgccagccgcccgcagtccctgatcatcatcaaggagcgcaagaactga

SEQ ID NO: 330528 - DNA, 288 bp, Pseudomonas aeruginosa
atgagaaagtattatgtggtcgctttctttataagtgggatgctttcattgtatgtgcaggcagatgacgggtttgaaagtcataaagaagttagaaagagctacctagagtgccagagagaacgaagtaaggataacgctgaagctcgtagggaaagccgtaagtttcgtgaggaacagaggtgcgagagtcaaaagcattacgaggagatggcgcgtgagaatgctaagcacagggcggaatactttcgcgagatggataaggcataccaagaattgtccagataa

SEQ ID NO: 330529 - DNA, 1920 bp, Pseudomonas aeruginosa
atgcaccttgtaatcattgaagccccgggcaagctgaaaaagctgcggtcccttctcccctccattcgtcccgacgtgacctggcaggtcgaggcgacagccggccacatcagagacctccccgttcacggccaggatccgcagatgctcaccgtcggcgtgggccaggatttcaaaccgcactaccagatcctctcgggcaaggaaaaaaccgtcgcacggctgaaggatctgcagcagaaagctctggagatctacgtcgcatccgacccggatcgcgaaggcgaaagcattggctggcacatcctccaggctgccgggatcaaaaactacaagcgcgttgccttcaaagagatcaccaagtcatgcatcagcgccgaactcagctcgccgcgtcgcctggacctcccgaaggtcgcctcgcaggaatgccgtcgcgtcatcgatcgcctggtggggtatctggtcacgccagagttgcggcgcgtgatgggcaggccaaccaccgccgggcgcgtgcagtccgtcgctgtgtacctggtggtcctgcgagagcgggagattcgcgccttcacaccaatcaagcatttcggggtggaactggccttcgtttcgcccagcgacggccgcacctggaaggcggagtgggatccagtgcccacgtttgccagcaaggaatttccgtatatccaggatcgtcaactcgcagaactggtgggggctatacgcaatgtgatcgtcgagacctgcattgatggcgaagaaaccgatatgcctccggcgccgttcatctcctcttcgctccagatggcagccggaaatgcactgaagtggtcacccgacaagacgatgaaagtcgcccagcggctgtatgaacaggggctcatcacttaccaccgaacggacaaccccaatatttcgaaggactcgatgccggatatccgtgctgtcgccaaagccttggggctgaagtgtgtagagcaacagcgaatgttcaaagcggaccaagacgcccaggaaggccaccccgccatcacccctaccgactggatggccgcttccgccggtgagactgctgatgagcaggcgctgtaccagctcattcgagtccgcgcgcttgccagccagatcgaagctgccgtgtacgccgtaagaaccatcaccctccttggcgtcggccccgacaaaaagccgctgcgcttcggcgccaaagggaagctgctgaacgtgcctggctggagaaaactgctgcagggcgatgatgccgaggagcaaaagaacgaaacgccttcaagccccatcccggcgctggagccaggccagatactcaaggtctacagcggcgaggtcctggagaagaaaaccacccctcccaaacgcttcaccgatgccagcctggtgggcgagatgaagcgccgcgggattggccggccatcctcctacgcctcgatcgtgaagaacatcatcgacaagggccaggtgcagatgaagggacgaagcctgatccccggcgagctgggagaggccaccatcgcgctcctggagcacaacttcagcttcctcagcctcgacttcacccgcaacctcgaggtcgccctggaccggatcgccaacagcgaggacacctacatgaacgtggtccagcagttctaccagctcctgcagtcagagctgcagacactccgcgcgctccccagcgcacaggacgaaccacgcgcaagctccaccgccaatgtctcctcggcgccgaccagcgacttcctctgcggcaagtgcggtctgcccctggtccgccgcaagaaagccggcaagggcggcttcgacttctggggctgcagcggctaccgcagcaccggctgcaaggtcagctatcccaccaagaacggccaacctgacttcgacaacccgcgcggacaatag

SEQ ID NO: 330530 - DNA, 852 bp, Pseudomonas aeruginosa
atgagcaacatcagcaacatcagcaacaaggccgtttccaacaccaatacccagccctccaccgaggtcagcgtcgagatcaccggcggcaagcccaccactaccagcctcgacgtcgccaaacacttcggcaagcagcacaaggatgttctgcgcgcgatccgcaatttggattgctcgacggagtttcatgagcgcaattttgcgcccacgatccagaccgtgctggggcccaaaggggccaagcgggaggaacccgcattccgcatgacccgcgacggcttcaccttcctctgcatgggattcaccggcaaggaggccgcccggtggaaggaggcctacatcaacgccttcaacaagatggaacaggcgctcatcgagcaacccgagatcctcagtcacaaccacctgctccagttcgccatcaagaccctcgacttgatgcgcgaccacaccctcggcgagccggcccgccccaggacagaacaggtcgtatgcaactacctggccgtcgagtccttggacgcggcgaatcccgagcagatcaagcaggccctgaacttcctccagggtcagatcatcggtgaaggtgtggccgccaagtccttgcccagcgtggccggctcttccatcgccaaggatctgctctacggcttgctgcgctccgctcatgacgcggagctactgttcaactccctctacgacagtggcgtcgaaaagctggccagcgaagtgttcaaggagcacatggccaacaccttggctgcaacgtctcggcaaacccgtgaactgctcgggtacgtggccagccgcgccactcgctcccccttcaaaacacgctccacccactaa

SEQ ID NO: 330531 - DNA, 549 bp, Pseudomonas aeruginosa
atgcggcagctcgataaagatcagcaaggcgctctgcaacaaagtgccttccggccactgcaacaaagtgccttccgctcactgcaacaaagtgcctcactaaaaggccttttaaagccttttaaaggtaatagggagctggcccagttggcggaacagtgcgaagccctggagcagggactactggaacttgcccagggactgctggcccaggttcgtcgcacgcccttcactcttctgcccgcccgactcatcgagcagcgcacatccgcccgcaccacctttcttcgctggcagcacattgcaacccggcggatgggcgtcggggtgtggtcggaaatgctgcgccaggacaagaccccggaatacctgctgcaagacctctacgagatggagctgcagcgcatcaccctcaacatgcaaatcagcctgatccactccatcggcaagcaggccgccgagtgtgcggaaaagatgggccaggccgaggccgagttcatgggccgactgcagcagagtcagacccgccctggttccgtgggcatgtag

SEQ ID NO: 330532 - DNA, 198 bp, Pseudomonas aeruginosa
atgtgtgactcgatcttgtatgcccccatggacgagctcgaattcgagcggctgctagggctggcaaccctattcaacgacaacgatgaatggcctatcgactttacggagctgcaggaactgagcgagctgctcggcaaactcaaaagttgcgtcgacgtagcgatagacaacgcccctgagggggccaagagctga

SEQ ID NO: 330533 - DNA, 1326 bp, Pseudomonas aeruginosa
atgaggctgtcgcgctttcccatctcgacactgctggactcggcctcgggacatctcgaggcccatttgtataagaagcggcttgctgccgaaagcggcgaaccgctggctcaacaatattccggcatcattttcagcggcaacccgcatgaaaccgttcctcggcgcctgctgctggataaacgcctcaccccgctggagcggaactgctggcaagtgttccgcttgctcattaacgacgacgggctgaccgcgttccctacatacgagcaactacgcccttatctcggcatgcagccgggtaagatcgcctcgcgcgaaaccatcgccaaggcactcaaggtccttcggttgacacgctggctcagtctcggccgccgcctgcgcaacgacctcaacgggcaagtacaaggcaacgtctacatcctccacgacgaaccggtatccccggcagaagccctggagctggaccccgactacatgcagttgctgagccagtccaccggcgacagcaaccgagccatacgcgaaatcggccagatcacatggcgggagttcagggatgacccggacgttggtcgccggctcccaacccatctggagaagctcgagggacgcttgaaccaccagcaatgggctattgatagtcagctcgaagcggatccagcggcagagttcggcatccgaactctgcccgatctacctcattcaaccccgagttcggatgccgaactcagtgaaatcagcggcaagcaatgcgctttaccgctgagttcggatgccgaacccagacagaatccgccgagtacgcccttggttcggatgccgaactcatatagtacgtatacatacaaacaagattctgtatgtaaaaagccagtacaaccgcaaacacgcgaggaagcacatccgaactggcagggcctcttgcacacactggaggccgagcaacggatccaagccgtaagcgcgctccgacgggtgtccgaggatcttcggctacccatcatcgagcaatggcagcaccgatgtgccggcggaaccgtcggtaatccgttcggctacctcatgacgctcatccagcgtgcagtccagggaaagttcaacgcttcttgggctccggaagaaccggctgaacgaaccatcccagcagcggaacgccccagtcgtgctccggcaccatcaagccccatagcgcctacacagcctcaggtccagcccaggggggatacccggacagggagcgaggtcctcagccggctcaaggacctcattcgtcccaggcacggatcgagcgtgccatccgagcggggtgatgagccatga

SEQ ID NO: 330534 - DNA, 1728 bp, Pseudomonas aeruginosa
atggccaagatcaacccgcaagatctgaaagaccggctacttgcccctggtttcaccgcgccgcccgttcttgaacagttgtcggacccgatcagcgacacgcccatggtgctgacactcgaccaggtcctcccctggcacgataacccccggaccactcgaaacccgaaatacgatgagttgaaagaatcgatccggcatcgaggcctcgatacaccgccaccagtgactcgacgccctggggaagacaaataccgcattcgcaacggtggaaacactcgcctggaaattctcaacgagctctacaaagagaccggcgacgagcgttacttccgcttcaactgcctgttcaggccctgggacaagcagcgcggcgaaatcatcgcgctgactggtcacctagctgagaacgatctgaagggtgacctcaagttcatcgagcgagccgtgggcattcagaaagcgaaagcctggtatgaggaggagaaaggcgaaccggtcggcatccgcgagctgtcacggaagctcaccgatgacggctatcctgtttcaccctcacacatcagcaggatgctggatgccgttgagatactgcttccagccatccctgtgatgctgtattcagggctcggtaaaccgcaaatcgaaaaactcctgtcactcagaaagtcggcatcctcctgctggacacgtctatacgccggtgaagggatcgacttcgaaatgatgttccaggacactctggcgatcttcgacagtagccctgacgaattcattttcgagcgtttccaggacgaactcatcgaccagatgaagcggcccctgggcctgcgttatgaccagattctgctcgagatcaccaacggccagcaggaacagcgccggggcactctgatcgacctgcccgcacctaccgcaccacctgaaattccaccagtagggcaggaaagtcctgctgcgtcgactactggacaagcacaatcacagagccccgctgccggcctccaaacgtccaagatcaatagcctcccgggtaatccctctaccccgccaactccgccgctacctgtacaacagcagcaactgaccgacgaggagcgtgctgagctcttggcaggtcatatcgtgagcccggtatccacaaagatccagcagactcgccaacggctggccgctctcgagggtgaacatctacctgtcttcgaggaaacagctctgcaggcaatcccagtgcaagtcggcggcctgcacccgatcaccgatctctggtacatcgagcggtcgatcgatacccccgagatcctgcgacagcacatcgctgatctggctgaagagatcgctctgcatgtcggcgccccaggagagatcgtcaggattcagggcggtgtgggttacacgtatcgcgagcccaatgaagaccctgagattactgattcagcgctgcacctcatgacgctgcttcaagcgctcagcggccaggtccaagtcgtcctgaactcacacgaccagcagacctgccgcgacgccctgggcgagtttcaattctcagctggcctcgctcagttgctgctgggccaacccaccacaggcgatcagccatccagccaggcaggccgtctcaatgacgaagccctggtgaaactgttccggatcattcgtcttgcccgacgcctggttgaccttgagctgccgccggccgcctccgagcaagcagctaccgaccagtga

SEQ ID NO: 330535 - DNA, 249 bp, Pseudomonas aeruginosa
atggcccgagaaaccgaagataagttcgttgtccgtatgcccttgggcttgcgcgatcagctaaagcaaaaagccgcgcataaccaccgctcggccaacagcgagatcgtctaccggctggagcgcagcaacgagctcgaagaagaactcgctcgagcgaaccgaatggtcgacgagctcttcgccaagaaccagcgtctgcaggcagagctggctgcggcgaacacgcctcaggtggcggaggcatga

SEQ ID NO: 330536 - DNA, 1017 bp, Pseudomonas aeruginosa
atgcctatcaaacacgccatcgtccatctgatcgagaagaagcccgacggcaccccggccgtgctccacgcgcgcgacgccgaactgggcgactcccaggccaccgagaacctgctggccgacctcaacgaaagctacaacgccaagaacaaggcctggggcttcttccagggcgagtccggggcctacccgttcagcggctggctcggtgaatacctggagggcgaccgcgacttcgtcggcttcagccgcgaagcggtcgagcacctgcagaagctgatggaggagtccaatctctccaccggcggccacgtcctgttcgcccactaccagcaaggcatgaccgactacctggcgatcgccctgctgcaccacagcgaaggcgtggcggtgaacgagtcgctggaggtctccccgtcgcggcacctcgacttcggccagctgtacctggccgcgcggatcaacatctccgagtggcgtaacaacaagcagtcgatgcagtacatctcgttcatcaagggcaagggcgggaagaaggtcaccgactacttccgcgatttcatcggctgccaggagggcatcgactcaccgggcgaaacccgcgccctgctcaaggccttcagcgagttcgtggagagcgagggcatggccgagcagcaggcccgcgagaaaaccgagacgctggtcgactacgccacctcgcaggcgcgcatcggcgagccgatgaccctcgacgcgctctcggaactgatggacgagcagcaaccgcgggcgttctacgactacatccgtaacaaggactacggcctgtcgccggaaatcccggcggacaagcgcaccctcaaccagttccgccgcttcaccggccgcgccgaaggcctgtcgatcagcttcgagtcgcacctgctgggctccaggatcgagtacgacgaggagcgcgacacgctgcagatcagcagccttcccactcaactccgcgaccagctcaagcggcgcaaggcccaaattggagaatga

SEQ ID NO: 330537 - DNA, 234 bp, Pseudomonas aeruginosa
atgcgtagtttccttcgcggcgcccgggaaagcgttcgccggctggtggccttcgctcaagccgaaggctggagcgtcgaccgctccgccggcggccacttgaagctcagcaagatcggctgcgcctcgatcttcatctcttccacgccaagcgacgcacgcggcgaactcaatgcccgcgccctgctccgtcgagccgacaggcagagttccctgaaccaggagtctttctga

SEQ ID NO: 330538 - DNA, 258 bp, Pseudomonas aeruginosa
atgaaggcgtcccagacctatcagtgcatcgtcaagttcgatggtgccggcttctggaccaataccattaagaagcagcgtgcgacctgcacctggagcgacaaggtggcagcctcccgccttgccgaacggctgtttggcgaggacaacgcctacatcacccgtatgccggcacaggcaggcgaccacgaaaagcgcatcgagagccgctgggagctgtcctgtagcaatcccaaggaggtagcgtgcgatggctga

SEQ ID NO: 330539 - DNA, 528 bp, Pseudomonas aeruginosa
atgaacactgaagcccgtttcccgagcatccacgcctcggccgcgttcaccgactcggcggtggttcatgccaatcacgttggggtcaacccgatcgagctggacgccctcagccaagtgatctcgcgcctttcgcgggacgagagcacggtcgcgcccagttcgatggagcgagagcttcgtgaactggaagaactggggtacatcgagatctcaaccacccaggccgggaccctggtggtcactacgcgcgctccggggcaactgctttcggcctacttctggtcggtatggatccctcgccacctgttcagctgctcgctgaaagtgagcctggtgccgcacctctgctgcggcactcaggactcacagcacctcaccgccgtgttccgcattgcaggcagcaaggacgccgcgcgtgagttcctgcatcagttggccaacaactatcccgggcatgagccggagttgcccgaactggtggccgttcaggtcggtgatgcactcagcaaggaggtcgaatcatga

SEQ ID NO: 330540 - DNA, 897 bp, Pseudomonas aeruginosa
atgaattcggtgttggccaatgccttcaaccgcttcgtcgagcgtatccacgaatcgatccgcgaggtcgccggcaccgctcgccaactgcacgatgtggcgcaactggtggtgaacgcctcgaactcctcgatggccaactccgacgagcagtccaaccgcaccaacagcgtcgcagcagcgatcaacgaactcggcgccgccgcccaggaaatcgcccgcaacgccgccgatgcctcgcaccacgcctccgacgccaaccaccaggccgaggacggcaagcaggtggtcgagcagaccatccgcgcgatgaacgagctttccgagaagatcagcgcctcctgtgccaacatcgaggccctcaacagccgcacggtgaacatcggccagatcctcgaagtgatcaagggcatctccgagcagaccaacctgctcgccctcaacgccgccatcgaagccgcccgcgccggcgaggccggacgcggcttcgcggtggtcgccgacgaggtgcgcaacctggcccaccgtgcccaggagtcggcccagcagatccagaagatgatcgaggaactgcagatcggcgcccaggaagcggtcagcaccatgaccgaaagtcagcgttacagcctggagagcgtggagatcgccaaccgtgccggcgaaagcctgagcagcgtgacccggcggatcggcgagatcgacgggatgaaccagtcggtggccaccgccaccgaggagcagaccgcggtggtcgattcgctgaacatggacatcaccgagatcaacaccctcaaccaggaaggcgtggagaacctccaggccaccctgcgcgcctgcggcgagctggaaacccaggccgggcgcctgcgccagctggtggacagcttcaagatctaa

SEQ ID NO: 330541 - DNA, 912 bp, Pseudomonas aeruginosa
atgaatagcaaggtgctgatggccctggccggcctgctgctgctcggtgcggtgttgctcggatacctcggcgtatccatcggccgcacgccatcgaacgcgcacgctccatccgtggcgccggcttcggcgacggtggacgcttcgctggaaaagctcgaacgcaagccggtgctggtggccagtcgcgatctcccggcgctggcggtgatcggcaaggacgacctgagcgtcgagctgttgcggaccgcaccggtcggtagctacgacaggcccgaggcgttgctcggcaagcgggtctgggtcgcggtgccggccggcagcattctttccgccgcgactctcgaacccggcggtccgctggcccggaccatccgtccggacgagcgggcgatggcgatcgctgtggacgaagtggtcggcggcggcggcttcgtcctgcccggcgactatgtcgacgtgatgctcttcgtgcgtgacgagcgggacggcgaatcgaccccgctggcgcaactggtgttgcccggcgtccgggtactgacctacggcgagcggatcgccgtgggcagcgatggacaggaccgctcgaaccaggaaaaggacccgcgtccgccgcgtaccgcggtgctggcggtaccggaggacggcgtggcgcggctgatgctggcgagccaggccggttcgctgcgcctggccatccgcagcaaggacgaagaactctaccgcagggagcaggaaggcgcgctgctgcaagcgtcgctgggcgcgccgagcgcggcgctgagtctcgaccaactgctggagcgccgcaaaccgacggcgccgagcgtgcgcagcgcggctccgcgcgtgccggtggccaacggggtcacggtctaccgtggcagcgccatgacccatgaagtgccttga

SEQ ID NO: 330542 - DNA, 240 bp, Pseudomonas aeruginosa
atgatcgactggagccaggtaaagaccgctgaacagcaggcgcaagaacgctggcaggctgagtacgatgccgcagccgcggcgcgggcgaatgcctaccggctggagagtgacccgctcaagaccgaggccgagttcgacgctatcaaggccggcgtggaaccggactactctgcctgggtcgccaaggtcgaggagatcaaggcccgcttcccgttgcctggtccactacccgaatag

SEQ ID NO: 330543 - DNA, 1149 bp, Pseudomonas aeruginosa
atggatgatattggctgtaagcttccagataaaaatggccccgacaagggggctccgccaccggaggggtgcgcaggaaacccggtcaacatcaccaatggcaacaaataccaagttgaaagcgacttaagtattccgatcccgttgaaccggtactacaacggcctggacggcttgtggcgacattcgtattctgcgcgtataacacgcaaggatgatggcttcctactctaccgcgaaaacggaaaagcctcggagttcacggggtcgggaaaagatctaacctccatcgcagacgtaggtaggctcagccggttaccagggagatttatatatacctccgaactcaacgaggtgatggagttcgaccagagtggaaaactcactaaactcaccaccaaggaaggtcgcaagtatcgtgtagagcgaggcgctagtcttacgattagcgacgagcatggcaacaagctcgttctctcggagggaaccaaccatcaactccttcgcgctcagacagggggtatatccattgagtacacatacgacaaggaacagcgactcacttcggtaacacgaacagatgggcaatacagcacgaaaacacagtacctctatgacgacccgaggaacataaaactacttacaggcatccaggataacaataatcgccgcttcgccacctgggcctacgacaaccaaggccgcgccatctccagcgaacacgccaacggcgccgaaaaggtcaccctcgcctacaacgatgacggctccaccaccgtcaccaacgaatacggcaagcaggccacctaccgcttccaggtgatccagggcatcaagcgcatcgtcgccatcgaaggcgaaccctctcccaactgccccagcagcaattccaccttcacctatgacgaacgcggcctgctcagcagcaaacgcgacaacaacggcaacctgaccacctaccagtacaacgctcgtggcctggagacctcgcgcaccgaggccgccggcaccccgcaggcgcgcaccatcacaaccgactggcacccgaccctgttcctcccggtgcaggtcagcgagcccggccggatcacccgctaccagtacgacgccgagggacgcaagaccggcgagaccgtcaccacccgctga

SEQ ID NO: 330544 - DNA, 2763 bp, Pseudomonas aeruginosa
atgcgcatccccccatacttcccccgcctcggcgccctcgccctggcctgcgccctcgccctgcccgcgcaggcggccgagcgcgcctggagctacagctacaacgcccttggtctgatcgagcgcgccgacggtccgcgcaccgatgtgcaggacgtcaccctctatgcctacgacagtcgcggcaacctgacccaggtgaccaacgccctcggccaggtcacccgcctcggcgactatgacgagcgcggcaagcccggcagcatcaccgatgccaacggcgtcaccagcagcctcgcctacaccggcgtcgacggctggctggcctccgtcagcaccgccggcagcaccacccgcttcgactatgacgcggtcggccagatcacccgcgtcacccgtggcgacggcagttggctgagctacgaatacgacgacgcacggcggctggtggcgatcggcaacaacctcggcgaacgcctcgaatacgacgtcgacaccaagggcaatcgcaccgcccagcgcatcaaggacgccagcggcagcctggtgcgccagcagcaatgggcctacgacgagcttggccggctgctccgtgcggtcggcgccggcggccagacacgcagcttcgcctacgacctcaacgacaatccggtcggcgaaaccaacccgcgccagttcgcccacagccaggccttcgacgccctcgaccggctggtcggccagagcgatcccctcggcggcaagacccaactcgcctacgacgcccaggacaacctcaccgaggtcaaggacccgcgcggcgtcaccacccgctacgaatacgacggcctcggcaacctgacccgactggtcagcccggacagcggcaccaccaccttcgagcacgacgccgccggcaacgtcatccgccgcaccgacgctcgcggtacggtcaccgagtatcgctacgacgccctcaatcgcctgatcgagcgccactcgccgagcgacccgagcctcgacgtacagtaccgctacgacctcaccgccgatggcaacaagggcatcggccgcctgggcgccatcgaaggtgcccgcgacagcctggtgtaccgctacgacgagcgcggcaacctggtcgagcaggtacgcagcatccgcctcgaccagcagaccctgctcgaccgcgtgacctaccgctacgacgcggccaaccaactgctggagatcggctacccctccggcctcgccatcggctacccgcgcaatgccggcggccaggtcgccagcgtgaccctggcagtgggcgacaaggcaccgagcaccctggtcgggcagatcgcctacctgcccttcggcccgctgcagcgcctgacctggggcaacggcatcgccctcagccgcgagtacgaccaggactaccaactgctgcggcagaaggtcggcccctggcagagcgactaccagcacgatgccaatggcaatatccagcagcaccgccacagcctctggggcaccctggactaccagtacgacccgctggaccgcctgaccgaggaacgcggcgtccagggcgggcgcagctacgcctacgacgcggtcggcaaccgcacccaacgcagcgacaaccccgcctcaggcggcaccgccagcagccaggactaccagtacgcgcccgacagcaaccgattgaccgccatcggcgcgcaagcggtgaccagcgacgccgccggcaacctcacccaggaccgcgccgcacgcaaactggcctacgacacccagggccgcctgcaaagcgtcagcctcgacggccagcaggtcgccgaataccgctacaacgccctcggccagcgcatcgtcaagctcacccccgagagcgtcaccacctacctctacggtcccgacggccagttgctcggcgaagccgaacacgacggcagcggccggaaactgcgagcccagtactacctgtggctggacagcctgccgctggccaccatcgacgccgactacgacgcccagggcaaggtcggcaacccgaccctgctctacctccatggcgaccacctcgacaccccgcgcctggccaccgacgccagcggccagatcgcctggcagtggcagtccgacgccttcggccgcggcgaagcgctgagccagggcagcacccaggtcaacctgcgcttccccgggcagtactacgatgcggagagcgggctgcactacaactacttccgcgactatgatccggagactgggcggtatgtggagagtgatccgattgggttggtaggagggttaaatacatatggatatgtagagggaaatccactcggactttcagatccactaggactggctccaggggatatgtttgcaacagaggctgcggcacgagcagatgctcttgcttatcaggagtctgtgaacagtagcattgatagatggctatgggggaatatggtctatggctttcgtgtgtttaaagcctccgactgcctttggacctacgaagtacagaccccagtcttgggaattgcgcctccacttggccccaaaggtccttggaaagtcaacaagccaggagtttcaggaaaggcaggagctaaagacgttccaagctgggcaaaaggggataggccatatcaaggcgaatcagggaaagactttgccaaacgcatcatggatcaaaaatatggaaaaggtaactggaaagacggaccaggatctgaatacaaccagatcaaaaagtggggtgacagatcgttcatagaccccaagtaa

SEQ ID NO: 330545 - DNA, 1107 bp, Pseudomonas aeruginosa
atgctctactctacagagagtagtggtgcggaattgcaagttaaagattcggataggcatatactggttggtattttttcaaagagaaagcttctggcctattccgactcgataggtgaggaaatgaggtcaggtgtggcggctatttattataagagacgtgttctatttgacactaatctcttgacggatcttcctcgatattttcttgaggagaacttgcctacaagaaataaagttgcagagatattggctatagttgaggctgagtatggcggggggttcgattatgtttttcctgttttggagaatttaagggaatccgttaaggagaataacccgtatccggtcagaaaggttgcagctgcaatttattttgatcacctccttaggggagaggctaggcttgaagtagataaatctagaatattagatccttacttcttgaaggcagagtctctttgggcgagctttcgatccaatcaagatgcttggaatatgttggatcgccgggactcaatttactttgtgatgctggaaacatttcatgtgctttggtcgagaggcagtttgactatagagagtgccttgaattacctagttgatcgttgccttgatgtgcttggcgttcttccgttgaaagagctctattttgcttggaaagctattatcgggatcggtactgggcattatacacctgtatttgacgagccagatctgaagcgtccaacgaaagaatcggttcgtcgtataggtgctctttcatgggatttatatgtgtttagatttgttgagatgcttttgactgaggagaagggaaataatttctatatcccaacttttactactctggataaagggttgttagctaccatttcttcttgtccggtaaaggccatgatttcattcggcgatatgaggtttgttgagacgatttttgaagacgaattgcttttccagcaatgcctcgatgcatcgctttccatgaggcagaagcaagtattaatggaggccggcaggagtgtgaaggggaataaaaaactgaggtattatacgtcgttatccatagcggatgcggagaaaaaaatatttaggcttgcatcgtaa

SEQ ID NO: 330546 - DNA, 6336 bp, Pseudomonas aeruginosa
atggataagtatttctctggactagttgaacaggcgctttcccgcaccactgagtccaccttgagcatcttgagcatcaccgatccgggcttgcgtgagcatctcggtagtctgatgcgagcggagtgtggcaaagaaggagcattcctggcgccccctctgttcgaacagaccttcggttgggaagagtcttcactcacgatggagcagctggcgagtgatgagcgcttgcttagcaaggagatcattgcttcgctcgacggcaaggcgaatgggcgttatcgctttggggcaagctggaagcctttcacccaccagttggccagctggcgctccttgcttgagaagaagcattcggtagtggtcaccagtggtaccggctcgggcaagaccgaatgctttatggtgccggtgttggaggatctgtatcgcgagtaccatgatgctggccgtaagccgctggtcggtgtccgggcactgttcttgtatccactgaacgctctgatcaactcgcaacgcgagcgtttgaatgcctggacgcagagctttggaagtggcatccgctattgcctttacaatggtaatacaccggagctgcaggccaaggtgcgcagcgagcagagccaaaagcctaacgaaattctgtcgcgcgagctgatgcgctcgcaaccggcgcccattctggtcaccaacggcaccatgctcgaatacatgatggtgcgccaggttgatgcgcccattgtaagaatttccagagagcagaagtcgctgcgctggatcgttctggacgaggcccacacctatgtgggatcgcaggcggctgagttggcattgcagctgcgtagggtgatgacagccttcggcgttacgcccaaggatgtccgcttcgtggcgacttcggcgacgattgccggtgaggatgctgcaggacagctgaagcagtttctctcggatctgtctggggtgccggtcgcgcagattgatgtttggggcgggaaccgggtcatcccttctcttgcaccatgtcaacaaacaccggttgctctggatgcgctcgaatcgatgccggcggtcaacgcgaacgatccagaggttcatcccgaccgatacgatgccctggtgcactctccacaagcccgcgcactgagaaacctgctggtcaccagtcctaaaccattgaagctgaccgagatggttagccatatgcgtcaggagggggaatggtcgctatcgcaaggagaaatactgcgctggttggatgtgtgttcgggcactcgtccttcggctagcgagccggcgtttctgaagttgcgagcgcacttcttccagcgtactactcacgggctgtgggcctgttttgacaaaaactgctcggcaaagtcaggcacggctctgcagcaaagctggccctttggctatgtctacgccaatcaaaggcaaacctgtagctgtggcagcccggtattcgagctggcgttctgcaatgattgcaatgagccgcatctgctcgcacgggataagaacggaaagctaatccagtgggaaagctccgggggggatgagttttccctgcaggctgaaacacccgttgaggaggacgcggcggatgcttctgccgggcagctgtcggccaagacgccgttggtgctgtgttccttcgagaatactggtagcgcctatatccccgttgagatcgataagttcgctggttcattcgcagcagtttctggtgagcgggtacggcttggggtgagggatcttgatgctgtgtgcagccgcaccagttgtggcttgagcgggctgcacggggcgtctccattccgccgcgccatgcttggcggacccttctatgtggccaatgccgtgccgacagttcttgagtactgtcaggactatcaagaagaagatcagaagccggattatgggccccagtctctgccgggtagaggccgtcggctgattacctttacggacagcaggcagggcacggcgcgtatggctgttcgtatgcagcaggaggccgagcgcagcaggttgcgcggacttgtcttggaaattctaagctggcaccagcggagccagaccacctcgtcggcggatgccagcagcctcgacccgtcggtgttacatcaacttattgccaaggcgaaagctgacgtggagttgtaccgcagcattggcatcaaggaggaagccagagccgcagaggaaaaagtcgcacgactctcggccatgctagctgcaactactggatcgaaaattaggccaaagctggtttctctagcctggccggagctcgccaatgagctcaagcagaaggcggacttgaaaggctcgatgctgctttacaacaagtatcagaagcctgagatattcagagacaatgatggcccctacaagctggcggagatgctgctgttccgcgagttcatgcgccgtccgagacggcagaacagtctggaaacccagggactggtgaaggtcgaatacgctggcttggctaaggtccaggaagtgccggcgtgctgggaacagaaaggcctgacgctcgatgattggcgtgacttcctgaaggtggcgctggactttcatgttcgggataacagctatatccaggtcgatgagggctggttgagttggatcggcagccgcttttctgccaagagtctgcgtaatcccgagtcgcaagaatctgatgagatccgggtcaagcgctggcctcagatccgcaacggcaaccattcccagcgactaatcaaactgttgttgcttggtgctggcctgaatccggccagcacggccgacgttgatctggtcaatgcttggctgcgggctgcctggctgcagttgaccagaccgggctcgacgcttaaggctgacgaaaaccgatatttcctgcccagagagcacatgcagttctcgttggttgatcgggcttatgtctgtccggtgaccaacaaactgttggataccaccttcaaaggtcttaccccttacctgcctactcatctggatttctctcggctgactgaagagcagtgtaagcgctatcaggcggagctggttgagctaccaggcctgtgggagtttgaccgttcgcaggacgactatgcgcctggacttgtgcgagttagaaacctggtggcgaacgatcctcttgtcagcgatctgcgagcacgaaacctgtggacagatatcaatgatcgggcagtggagggtggatactactaccgcacagcagagcactctgcccagcagtcttccgagcgcctcggctcctatgaagagatgttcaaaaaggggcagctcaacgtcctgaactgctccactaccatggagatgggcgtggatattggcggtatttctgctgtggtcatgaacaatgtaccgccgcacccggccaactatctgcagcgtgccggtcgtgctgggcgaagtaaggagtccagggcgcttgcctacaccctttgtaaaaacaacccgcatgatcaacaggttttcgccaatccgggttggccgtttgagactaagatccctgcgccagtagtggcgttgaattccgagcgactcgtgcaacggcacgttaactcactactgttggcggactttctctgcaatgtggttggtcctactcagacagagaaaaccagtttgaatacccagtggttctacgacgatgagcacggtgtttctcagtgcgaccggtttattgagcgactgggtcaggttgtctctgatctggatgatgcactgaaggacttggtaaggggcacggctctggccggtgtggacgcggctcagctgcgccgtcgtgcagttgatgcaatcaagccattgcagagtcgctggttgaagaactatcgcttcctgctttctgaggagaagcaggcgaaagccagcagcccttatctgaagcgccttcaaatagaaaagacccgccattgcaatgagtacctgttgcgggactttgcggcgcgtaccttcctgcccggctacggcttccccaccgatgtggttaacttcgataacttcacgatagaggattacgttcgcgagcgagatgcggggagcgctctgaagcaggaccgtgaggacaatgtatcccgatacaagggactgccttcacgcaacctgtcgatagccattcgtgagtacgctcctggcgcagaaattgttctagatggtcgggtgttcagatctgccggtgtttcccttcactggcataacctcaatgcagacagcaaagaggcgcagaaattggacatcgcgtggcgttgtgatgtctgcggcacggtggattatgaggaggcgctggtgaaggccgatgagctgacttgcagcaatgtcgactgtcaggcgctgattaagccccagaacattcgtaaggtcctgcggcccaccggctttgtcactgatgcctatgtgtcggtatccaatgacatccagcatcagaaattcatcccagttgaggctgcctgggttttcgtaaatgccagcaaaaccccgctgccaaacccggcagtcgggtcgatgacttacggtgccgatgggaaggtcttccatcacagctcaggtgagcacggagcaggttttgcgttgtgtatgagttgtggccgagcggagtccatgcagccagatgggacgtttccgcgagacctatcaccgtccggtgaccactatccgccgcgcccgaccaaagaagatagggaccagaacaacaagcgcctcccttgtcagggaagcgggagcattcttcctagcgtgagccttggtgcggtggctactactgatgtatttgagctcaccttgcatcatccagtacgcggtgagtttatttctgactcggcgcagggcagtgtaattgccatgacactcgctgtagctctgcgtgccgccctggctgagatattgggggtatctgcttccgaactgggctatgcaacccgtccaagcaagctgcccagcgggcagtccattcgcgtccttcagcttttcgacgtcatcagcggtggtgcgggctttgctactagcgcgccgttgtatgtcgaacgactgctccgcgagatggtggaaaggctccactgcaagcattgtgaaacaggttgtagcgagtgcgtgctggactctcaaacgcggcatgaccacgacaaactggatcgccaggcagcgctcgactggctaggctcggacttcattcatcacgtggggttgaccgccgaaaacaaactctcctttgctgatggccaatatgcgcctggcagcatcgagagcgttctgcgccggctcatcaatgagggggctgagagggtcactctactgacctctggtgatacggcggagtgggatcttcttgcaccacaattccgtaaggcgattcagacctatgttctggctgatgagctaactgttgatctgctagtgccagcggatatcaacgatggggagctcatgcaggatctccagcgtctgtcgagccttggggttaatgttgggaatgttattactaagccaggtgagcatgtcgttgcccaagcatttatagggggcgaggttattacgctggcctcgcgcagccttttggcaaccgtcccaggctgcagttggcatcaaagcgatgagctagtcgttctctcaagaagtcagccggggctctactggaaagcgatggacctttcccaggcctcgagtggctcctccggtaaggtagggatcgtcgatatatcaattcacgaagagctcaatggggcgttactgcagttcggtgagcgtttctgggagttgcttggcgccagagatcagcaagttgctgaagtgattgcgactgcgaagatcaaccggctgacctactcagatcgttacattcagaaccccgctgtcgtgacgatcctgggggctgttctgaagaatctgaagagtcgcatttctgccgacgcggttgtgcaggtgaagaccctattcaaatcaggtcggatgcaagggcgtaaggcatttgatgactgggcctgccaagatgatttcgagttcttttcacgcaaatggctgtcggccatggttgggtgtcaagttgaactgattgtggagtcgtcgaatcgtgatatccctcatcaccgtaggttggagattgagtttgaagacggcaggacgctgaaggtccggttcgaccaaggtgtcgcttattggcaagttcgcttcagctcgcacagcgacatgtggtttgactttgatctggctgcgcaagatcagctaatgcacatggccagggtggttgagagcgctcggatacagaactctgagcagaagtgggcgacggacgtgttggtcgagctaaaggtctaa

SEQ ID NO: 330547 - DNA, 969 bp, Pseudomonas aeruginosa
atggcattggatttcagcaaaaccttggtggtaggtatttccgcgacggctctgttcgatatgagcgactcggatcagatgttcaaggccgcattagaggccgaccccgaaagcgtgatcgataactaccgccgttacatgcaggcgcgtgaggacgagccgctggccccgggcactggttatcacctagtcaaggcgctgctagatcttaactggcatatgaaaggtggcgagacctctccgttggtcgaggtggtggtgatgtcccgcaacagtccagacaccggtattcgcgtcctaaagaccattcgccgcgaccagttggcgatcactcgctcggcctttaccggcggcgagtcggtggccgactacatggacgccttcgatgtggacctgttcctgaccaccaatgtggaggacgcgcaaaaggtcatcgattccaggcgctgtgctgcggccatcctcaagccgcctcccgccaacgccccgcaaatacccgagggccaggtgcgaattgccttcgacggtgacgcggtgctgttctccgatgccagtgagctggtctacaaaacccagggactagatgcgttcaaggcccaggaagatgcgctgcagcacacaccgatggaagagggcccttatgccagcctgctgataaaactggcccgtctgcaggagcgcctacccactggcggcaaggactctccgatcaggattgccatcgtcaccgcgcgaaattcgccctcggaaatgcgtgtcatcaatacccttcgcgcttggggcgtgtacgttgatgaggcgttcttcttgggcggagtcggtaagcccaaagtcctcagagccttcaacccgcacatcttcttcgacgatcaggatgtgcacttggaagccgctgccaatctggtaccctctggcaaagtgccatatataaccagacctagcttagctattggcagtgcggtggattga

SEQ ID NO: 330548 - DNA, 939 bp, Pseudomonas aeruginosa
atgagcgtggaaacggttgccagaacgatcagctctgtcccggatatcattgccggtattaagtctgggctctatacggtgtggggtggcgtcgtcagatattccgccgggcagtccaagggcgggcagattgtcggacatctgcagttcccgggtgatgccgttcaggccgctgagcagcttgccaagctgcaggaggcgctgggcggcgtagagggagccttgggtgttctgcaaaatctgcagtacgcaaacctggcactttctgggctcaaccttgcggtttcggtcgcaggcttcgccatcgtgtgcaagaagctcaatggcatctctgagcagttgcagcagcagtccgaaaagctcgatgtgttgatcgaaatggccagcgctagcaaagcccgcgaagagctgcgcgacacggctcgcttcagtgcggtgctgtggacggttcgccagtcagccgagcagggtgatctgctggggctcaagagccaggtaaataatctgcgtgagcaatatgagatcaccaagctgaccttgaaccaggccgcagccaatgccactggtaaggacttcatcacgtcccttgacgtgctgcaaaacctgcagcaacgcatgatgtatctcggtttcatgcaggcctatgtgcagcagcatacggcgggtgaaaagtacgccgttgaggtcctgcaagagctgcaggccgactggctgaagatcactacgctggcggtcgaggcgattgccgccaatcaggagtgggtcgagcaattgactcaggaggaaggcaataacgtcgtctccttcctggagttccgcaagcaagcggtacctgccatcgattatcagctcggcttattggagtactccgcaagccaccccgaagcggcaggtctgctcaacgaagaggttacggaaattcgttttctggctgcgtga

SEQ ID NO: 330549 - DNA, 768 bp, Pseudomonas aeruginosa
atgagcaatagcaaaaaacggccactgatcagaaggcatatcggcctggaggaagtactgcaattggcgacgccggatgagttggtcgccatcagtgaaatcctgctggataaggcccatgaccgtctgttgggcgatgattcgacgcggcagcgtcttgcccaatgctttgcggctggcgagctgtacaaggcggttgccgacattgcgtatgagatccgtgcgctgggcagtgtcagcctggccagcctgttacgtcggggtgaaccggttagctacgacgaggtggtacgcgatgtggcgggcgagctgaaggtggcattcagcaaggctgacagcacggccgttattgaagaacaggtactggccaagctgattgaaaagctggccgaacaggctgagtccgccgaggcggacagccagaccgaaaaaggttcgtggcttggccgggcacgccttaataaacccttttctgctgtgctggggtcattgggcaagctgggtatgggagctgctggtggcggcctgctgagcggtgcattgggttcggtggcggcagtgggttcagtggccgcggccggcgtggtggcggcactgccgctgacggcgattggtgctgtcagcgcgggtgtgtgggcgttcaacaacaagaaacgcccagagctgcaggggttggcagccatcgttatgcatatcgcgcggatccgtgcgggggctgtcgctgaagatcacaaggcatttgctaagcgtttgagggcgtgtttatga

SEQ ID NO: 330550 - DNA, 1206 bp, Pseudomonas aeruginosa
gtgagttggcctatatctagattgggcgaagttatttcctttattcgaggcgtcacctttacgcccgaggatcaagtagagccattctcggagggctctacagttgttatgcgtacaaaaaatgttcaggtggcggggctggatcagagtgatctaattgctgtgccttctggatttgtaagaaggaaagagcaggagcttcgggaaggggatattttagtttcttcagcaaatagctgggagcttgtcgggaaagctagctatgtgccaaagctaacctatgaggcgactgctggtggcttcatttcaatcgtaagagcgaaagaatcacgcattgactctagatacttgtattactgggtgacttgtccatccactcagcataagatcaggcactgtggccgccaaacgacaaatatttcaaacttggatgttggtaggtttcaggatttggaaatcccccttccacccctacccgaacaaaagcgcatcgccgccatcctcgacaaggccgacgccatccgccgcaaacgccagcaagccatccagttcgccgacgacttccttcgcgcagtgtttctggacattttcggcgacccggtgaccaatccgaagggttgggatgaatatgtgctgaaggaaattgctgatatccgctctggtgtaactaaaggaaaggcagttaaaccagaggatagcgtgacgcgcccttatatgcgagttgctaatgttcaagatggttatcttgacatggctgatgtgcagcatattaccgtttccaagagggatgctgagaaatgcttgcttctggatggtgacattcttctgacggaaggcggtgacccagataagttagggcgtggtcatgtgtggcgtgatgaggttgaaggatgcttacaccaaaatcacattttctcggttaggatcaacgataaagagcgtgtgcgccccgattttcttagtgtaattatttcgtctgcgagggggaaaaggtatttcttgaaggttggcaagcaaactacggggatagccacaattaataaaacggcgctatctgagtttgtgccatttgttccgccgatcgcacttcaagataagtatctggatttttccaaacgaatttatgctgtcaagcaatcgctagctgaaggggatgttgaattattcaattcactttctcaaaaggcattttctggtcggctgtaa

SEQ ID NO: 330551 - DNA, 1584 bp, Pseudomonas aeruginosa
atgctcaccggcaaaatccgcaacgatatcgacaagctctgggaaaaattctggaccggcggcatcaccaacccgctgaccgtgatcgagcagatcagctacctgatgttcgcccgcatgctcgacatgcaggaagacgtggccgagcgcaaagccaaccgcaccggcaagccctttgcccgcctgtttcccaacactccggaagggcagctgctgcgctggaaaaacttccgcaacatgagcggcaaggagctgcacagccacctcaagcagaaggtctaccccttcttcgcccaactcggcagcgccgaaggcgagggcggtgagcgtgaaggcctcggccatatcagcgaatacatgcaggacgccgatctggagatcaagaacgagtccgtgctcacctccgccgtggagatggtcaacgaactgccgctgacccagagcgacgtgaagggcgatatctacgaatacctgctgagcaagctcaccaccgccggcatcaacggccagttccgcacgccgcgccatatcatcgatgcgatgatcgaactgatcgccccgcagcccaccgaggtgatctgcgacccgtcctgcggcacagcgggatttctggcccgcaccatggaatacctcaaccgcgtgcactccagccctgaaggcaccttcaccgacgaagacggcaacctgcattactccggcgacctgctggaaccctatcgccagcacatcaacagcaagatgttctggggcttcgacttcgacaccaccatgctgcgcgtctccagcatgaacatgatgctgcacggcgtgaacggcgcgaacatccgctaccaggattccctgagcaaatccatcaaggagcagtacccgcgtcaggagcaggacttcttcgacgtggtgctggccaacccaccgttcaaaggcagcctggacgaaagcaataccaaccccgatgtactcggcctggtaaaaactaaaaagaccgagctgttgttcgtcgcccatatcctccgttcgctcaaactcggcggtcgcgctgcggtagtcgtgccggacggtgtactgttcagctccagcaaggctcaccaacaactgcgcgccgaattgctcgacaacaaccagttagaaggtatcgtcagcctgcccagtggcgtgttcaaaccctacgccggcgtcagcactgccatcctcattttcaccaagggcggcagcaccgaacgcgtgtggttctatgacctgcaagccgatggctactcgctggacgataagcgcaccgtgctgaaaggcgagggcagcaatgacctgcccgatgccatcgcccagtggcacaaataccggcagatggtcgtgagcaatctcagcgacagcaccatcaaggccgtgtttgccgaccggcgcaaaaaggcctttgtcgttccggccgaggatatcgccgccaacaagtacgacctctccatcaaccgctacaaggaagtggagtatcagcaggaagagtacgaagacccgaaggtgattctgcagcggctcaaagggctggagcaggagattctgacggatctggatgagctggaggcaatgctgtga

SEQ ID NO: 330552 - DNA, 2124 bp, Pseudomonas aeruginosa
atgcaagccagtcaatggacaaccgagatcattgtcatcacagccgtactcgcactgaccggtgtgctgttggggtacttcgcggcagcgctacgccaagggcggcaactcagtctgctggcggcccagcttgagcaggcccagcaggctcaaacaactgcactggcaggcagcacagcactgagtgatcagctcaaggccgcagaggcgcgcggccatgaactgcaggtcgcagagtccaaactgaaggcgcagctgcaggccgccttcgacaatgtgactcggctgaatcaggagcagcaggcagacaaagacgcacaggctgcgttgcaactgaagctggacgatgccagccggcagcatcacgaagccgccaaacgcctggaaaccgctcaagccgaagggcgagcgctgcaggagcaagtctctgaactgcgtgatcgtctgacggcagcgcaaactgcaatcacctcattgcaaggtgagcgcgacactctcaaggacgaactggcaaatctggatgccagtgccaaggtagcggcaacgggcgagcgagaggcgcgtgagcaacttgctgagattcgccagaagatggccgctcaggctcaggattacaacgagctgctggggcgttatcagccgctcagcaatcagcatgcggagctcaagacctccttgcacaagcgtgaggagctcgtggctgaactgcgtgatcgactgcaagcagcggaggccgtcagcgcacaactgcaaaccgaccgggatcagctgaaggacgcattggccagcgaaggtcagcgcagcaaagccctggaaacctccgagcgcgaagtgcgtgagcaactgcaggacatcaaggcccaacaagtggccgccgcagagcgttacgacgcgcttcaggcccgctttgccgcacaaagcagcgagtacaccaagctcaagaccgagctggatgagcgcgaggccagccatgcccgtgagctggccaacttcgaacagcagaaagccagcctgagcgagcagttcaaactgctctccaacgagattctcgaagcgaagactcaggccctgcaggaaagcagcaagctcagcctgagcgccgtgatgacgcctttccagcagtccatcgacaccttcaagcgtgaagtgcaggagatccatcaccgcgagaccacccagcagggtgagctgcgcaaagaactggagcagcttaaaacgctgaaccagcagatcaccaccgaggcccacgaactgtccaccgcgctgcgtggccagaagaagctgcaaggtaactggggcgagctggtgctggaaaacgtactcgaccgctcaggcctgcaactgggcaaggactacctgcgcgaagtcagcatcaccactgaggagggccgccagcgcccagacgccgtggtgtacctgccccagggcaagcacctgatcatcgacgccaaggtctcgctcaatgcctatacccgctacgtcaacgcagaagatgagttggagcgtaagcaggcactcaaagagcatgtgcaggccgtcgccagtcgcatcagggagctggccgaccgcgactactacaagctgccggggctgaactcgccggacatggtgttcatgttcatccccatcgagtcggccttcgtcgaggcgctcaaggcggacgaaaccctgttccagcaggccatcgagaacaacgtgctggtggccacgccaactacgttgctcaccagccttaacatcgtccgccagctctggcgctatgaggatcagaacaagcacaccgccgcgctggccagccgtgcagagggcgtgttcaaaaagctcaataccttcttggccagcttcgagaaaatcaaaaagggcctggaaacggccaccgaagcctacgtcaaggctgaaggccaactggtcagcggcaagggcaacctggtcaagcaggtgggcgagttcaagaacctggcccccgccatcaaggcacaattgccggcctatttcgtcgacaaggccgcgctggaaatcgactttatccctgccgagcagcacatcgaggtgctgaccgacagcgccgtcgatgaagacctgctcgacgaaaccgacactgaaaccgactacgagaccgcctga

SEQ ID NO: 330553 - DNA, 582 bp, Pseudomonas aeruginosa
atgcttgaacattcgcacgcccctcatcagtcgaagatactcaaccgaaaactctcgacggagatttatgcccaactgatgttcgggaagatgattaaccgaacacagtgccttgagggcaagctagtttccaacccgtacttcgaggagctggtgaacaatttcgaccagtaccgcgtgctctacgagctcatcggctacgagctggtaatgcgaaatggctttgccttcatccgcaccgctgaagtgtcggagacagagaaggacgacattgctcgcagcttccagggccttttattggtgctgttccgtggagtcatggagctcggctacaccatggaaattctgctcaaggacgaggctggcctttctgatctgcgcatcgaagaaattggtaaagggcaagacaaggtggaggttttgatcgcgtgcggcatgaagtccgggagcctagtcgagcatgtcaagaagcttgaagccaggaacgtcgcataccgaaatgcaaagggtaatctagttctggccgaagccggggcagggttcttccaggacctgcttggagcgggggacttggtggtttga

SEQ ID NO: 330554 - DNA, 1422 bp, Pseudomonas aeruginosa
atgatcgtaaatgcggagttcgccactatcagcatgatcgagaacaaaaaactgtttctcgacctgatcgataacatggacaaggttggcgagggtgaagaggtccgcatcgccatgtatcagcgcaagctgactgagctgctggaccgggtggggccgctcaacaaagaccggcccgcgaaggatgttccgcctgcgcggcgcaagctggaggctgccctatcgatcgataacctggagcgcgtgggtctggtcatccacgttgatcatgtacgcggggtgatggtctttgcgcctttcattatcgatatgttccgtcactttgacggtgcccgcctgaggaagctgagcagcgccgactacgagctgatccgggcgtccttcaaccggctttatggcatttgcgcgggtatgcaatcgctcagcgaagatgatctggacttcaaggagcaggtagatgcgctgcgtaaggagatccgcagtgcgctgtccaagatgaaggagtgcgtgtcggctctccaatcgcgcctcacacgcctgggcgagattgtcgatcagatgcgctatgacgatattgacgaggtgtcggcggccaaggaagcacttggcgagatcaacagtacctacctgcgaaacatcctccctgcccttgagttcctggccgagaacacggacttgaaggagggcaaaccggctcttcaggcactgactttgattggtgatcacctgatgcgctatggacataaaaggctggccacctcgatctattacaacgtcgaggccattcgctcctatcgctacgacattgatgtgatccgagggtcactgatgcggtatgtgcagcagaatgctgcacagcgtcaggcttacgacaagatcgagcaagcctggaacatcctacatggggccgtccagcatctgcacgacggggcgctcaagggcaatcagcttccaagtaacgatgctgttttcgataactggtccaccttcaatggcgtgaagtttaggcgctttgatccaaaggtcgaatggcccgaacggaatcaccgcctgttgctgactgaacacctgcgaaccgagctgcccaatgtgaaggctttagtggctttgccccaggcggtcaaaccacaccggtcacctacgcaagggcgcaagcgtgaggaggacgagcgcctgttttcgatcagtcgccttgtggccgactgggaactttacccctgcgaagacctacatgaagaattgaaccgctacctgagcagccacctagtgccctacggcctgaatgacttgcttgtgggactgagctgtctcacaggcaccgatggcgctgcgttagtcccacggtttgaggttggtacgctcgccactgaaaccgaacgcctgcgctactacaaggtgcgcttggagattgcacatgcttga

SEQ ID NO: 330555 - DNA, 2976 bp, Pseudomonas aeruginosa
atgagcatcgaggatttctactggtcgttcacttttaagcaaatcgtcctcgtgaacagcgggaagtattgctacgtaaaggtgcctctgaatgagcacatctgcctgcttggagccaacaatggaggtaagacatcgatcctgaattcgatgaaatttttcctgttgcccgaagagaatctgcacgattgcgaacggaagtttggtctgaaaaacccgaacggtttctatggccgcgactccacctaccagttctatttccccgagcgcagctctttcgtgattctggaggcggaaaacccgcatgggccgttctgcatcgtcttgaaccagggcggcaagcccttcagttatgagcgcactggtgtgccgtgcgcatacagtgatatcgagcaccttttctggaatgtttactcaccaataaacggcggccagggcgcacccgttcccgggctgagcatcaagtcggtcgcagccgacctgaagaaaatgaacggtgtgctgatccgtgacaccgccaccattaaggagcgtatgtacaagcatcagcctacccgcgcggatgctgggcgcttttgtctgctccctctgaagagtggtggtgccaagcagcgcgagattgatgcttggaagcgtttgatccacctgtcattcgacatcggggccaaagataggcgcactatgccggacaccattgcgaccatcatcgaaggtcgcaaagcccgggctgaggctgaggtcaacgtcaatttcggcgacatcatggcccgctatcaacgactgcgtgccactcaagatcgtctccagacgatccgcaacggagagcgctattggaatgcattcgaccagagtttcattgagcttgcgttgcggtcgagcgagctgctgaatctcctccacgacactgaaaacagtattgaacacgttacggcgcgactgctgaaagttcgccaggagagagcggcggagtactccgaacgcaacgatcgcagtcgggaggcagggcaggaagctacccgcctattggctgagtacaaccagtgtcgaggtatagcaactaacgctaagaaggctttcgatctgatccggaaggatgtgattgagctcggtacggcccgaactggctacaccggcaagtcgctcgacgaaatcctgcaaattcgtctcgacgtccttgaagaagctaagcacgacctcgagatctgtaacgataaggtgaaattgcggaatgagtttgaggaaaaaaaccgtgatatcaagcggcttaagcccttgattgaaggcgctgagcagtggattaagaatcagaccagtagcgtcctggatcttttgagcgaacagaccgctgacctgctgtactccctcaacgagaaagcattcagtgttgagtgtgaggctttggaggcgactacgcaggacgtgattgagcgctttgccggcctttttaacgttgagagcgaccaactccgtttcctcggtaaactgaccggcataccgctgcagcactacagcgctgccgagttgcttgaccgcaaactggctgagttggacaagatgaaggggcagttgcacaaagcccgttcgcgctacagcgaacttgccacgcttgtcacggagtcagaagaaaagctggccgtccgcagcaaggaactgcgggaagtgattgccaaggatcagcgcgagatcggcctgctcaggagcgctgaacgtattgaagcggatctccagcgcctcgaaggtgaatacaagaatgctaaagagcagctatctctattagaggggcaggctgcggaggcgaacacgaggcacgacgaagccaaggcgcagagggatgtagcctggaatgcgttggagcgtgccaaggacgaagccgacaatgttacgagctgggcaagtcgcattacagaaatgctgcatgtacgcctgggcttgttcaaatccgggttccaacggagcgagcctcgtaacgttgtggtcaataaggccctgatcgacgatatggagcatcgatcacagagtttattgactctgcttcaagcttccagcaagcaggtctccgatctgttggatgctgttccgctcgacgacagcagttccgagcaagcgcatcgtgccgcttatgaactcaatgatctgcgccagctccacgatcgctatgctttgctgtatgcgaggcttacagctgaagaagacaacctcttccaccaggtggctgcgcacaatgccgacactgatattcagatgcggcagatccgtgcaacgagaacgctcatcaccagcttcatcggcgagatcgaagaccatttgaaatccatcaagatttcgaatatcgcggagattcgcatcgactgcacgctgcacccccagttcgatgagttattggcagtgcttgaggccgtgaacatgagtggcggtgagctcccgccacaggtgttgtatgaccgcctgggcagcttctttacccagttctttgagtccgaccagcgccgcgattccacactgaacttggcgaagttgatcaacagcgtcgactaccatgttcgcttgctgggccgtgaagagttcaaggtggaggcgcagtccactggcacgtcggtgatgatcaacattcgtgtgctggctttcttgctcaaagagctgctgcaaagcgacagcaaggtatcgatgcctctgctgatcgatgaggtctctcagttggatgtggccaacctgaaatctgctcgagacatcgcggaggctgatgggttctgcatttttggcgcaacgccggagtggacgcctgcgatcggcaaggtgcttgggaagttcatgaacctcagctatttcgaggccgtagatgagtcgtacagcgacgagcgaactatcgtcttcaccggcgaatgtgagtcgttgacctcgattgcgactggtggtgatcaggcaagggctaacctggaggcgccagctgatcgcgaagaagaggccccggtcgaatga

SEQ ID NO: 330556 - DNA, 822 bp, Pseudomonas aeruginosa
atgtctgcagtcattcatggctacctagccaaaatcgaggcgggcgatacgctcaatttcgaggccttgcttaatcgacttgttgagatgggataccaacgtcccgagctcgcgcgcattttcaattcaataaaattgggcaagtcccggtaccaggtcagcattactgatccggcggcattttccgtcctaatcgagcgcttcagaccgtcaggccatcctggtcgggttggcgctgcccttgatggtgacagccaccgagccagcgtctccggtgcctacctcctgatgcgatccttgatgcatccacacccagttgtagccctctatgagggggatcattggcatgtacccagagtggtggccccagtcggggtgattgtggaaaacctggagaattttcttgagctggagcgaacgcttacccttgtttccggcctgctgcatcaagaactgggggttattgagctgatctatggtgcgggtaaccaggtcaccaactgtttaaacacggtattcctaagcacgttcaccgaattgcactgcctgttcgatgtcgatccgggtgggctgcgcatgtacgccacgctgcgcaggcaattgcccaatgcctacctccggtttttggttccggccgatattgaaaagcgccttgaacgctcgcgctatagcctttcagagcagggtggtcaggacgttcttcaatatgtgggcgtctcgcctgagaccgaccagcttatccgatacatgcgccagaagaacactgttctggagcaggaaacctatctactcaaagtgcctagcgatggagtgcaagcatga

SEQ ID NO: 330557 - DNA, 372 bp, Pseudomonas aeruginosa
atgggggtgaatgaaggcgcctggcgtgccttgaaggcaggattagtggtcgctgagggaaaagacgtggccgcaggcatggcactcgaagttatcgagcacgcgggcatcgatttcttcacccatgcgtgcaccggcgaggctgccaactgcgccgccagccaagccacccaggatggcaccagccagaccgcccaaggccactccgatggggccagcgaccgcgcccagggcggcaccactctgcgctccggctgcagcgctcgccgcgccggtcgctgctccgcctacagcaccggctgcgccaccgattttgcgggcatggttgcgcgctgtgacgcgcgcagagttacaggaagggcagttaattga

SEQ ID NO: 330558 - DNA, 969 bp, Pseudomonas aeruginosa
atggctcacctcatcgagcaaatggcctacgtcggagccaccccttggcacggcctgggtaatcaacttacgcaaaagcagccccttgaagtctggcagcgcgaagccggtatggactggcagatcttggaaagccccgtgcatttcaagtcagacgcgattggccatctcggtacgatccactcgttccccgagcaaaaggtattgttccgttcggacaccaaggtgccgctgtcggtggtctcccagcgctaccacaccgtgcaaccgcgcgaagtgctagagttctacagggatctgaccgaggtctccggctatgagctggaaaccgctggcgtactcaaaggcggccgcaagttctgggcgctggcgcgtaccgggcaaggcgctgcactcaagggtaacgaccaggtcaacggctacctgctgctggccacctcctgcgatggcaccctggctaccaccgccacgccaactaccgtgcgggtggtatgcaacaacacgctgaccatcgccctggacggcaccagtcgcgcgatcaaggtgccgcacaacacccgcttcgatccccaagcggtgaagaagcaactcggtatcgccgtctcgcaatgggacgacttcatgtaccgcatgcgtgcgctggccgagcgtaaggtgcaatggcacgaggcgctgggcttcttcatgaacgtcatgtgcgagaccagccccaccggtgcgctgccagaacatctgcccaacgagcgcgccctgcgcaaggtacaggagctgtatgaaggtcgtggtcgcggcagccagctggactcggcacgcggcaccgcctggggcctgctcaatgccgtgaccgagtacgtcgaccacgagcgccgtgcacgcagcaacgagtaccgcatggactcggcctggttcggccagggcgcgcagctcaagcagcgcgccttgaacgccgcgctgctgctcgccgcctaa

SEQ ID NO: 330559 - DNA, 1005 bp, Pseudomonas aeruginosa
atgaaagcaacgtcactgaacagcagcacccgcaagaaacgccctgccctgcgcctggtcagcaccaaggagctgccgcgcgaggactggctgcaaatccgtaagcaaggtatcggcagttcggatgcagcggctgcggtcggcctcaatccctacaaatcgcagctggaactgtggctggagaaaaccggccgcgacaccaaactgccgaaaaccgatccgcatgacgaggaaagcccagcctactggggcaacgtactcgagcctatcgtggcctggcactacagcaagcgtacaaagaaccgcgtgcggcgcatcaacgccgtgctccagcatccggatcgggaaatgtcctggatgttggccaacatcgaccgtgaagtgatcggcgctgacgatgtgcagatcctcgaatgcaagaccgccagcataaacggagcacgcctttggaaagagggcgtgcccgagtatgtccaactgcaggtcatgcacctgctcgccgtaaccggcaagcaggcggctgatgtggctgtactgctcggcggtcagacactggagattcaccgaatcgagcgggatgagcagatgatcgcgcggctcatcgagctggagcgcaggttctggcagtacgtggaaacggacacaccgccaccggccgatggctcggcatccgctgaaatggccctgcgctgcctctatccggaagacaacggccaggtcatcgacttcagcagccatgccggactgaccgcagccttcatcgagctgaaagccgttcgccagtcgattgccgacaaggaaaagcgagaagccgagctcaagcagatgttgcagcaagccatgggtgacgccagccgagctgagttcgccagcgggtacgtcagttggcgcaaggccaaagacagcattggcttggacctcactcagctactcaaggacaaaccttacttgcaggccaagtacccgctactgaagcccggcgcgcggcgcttcttggtcggctga

SEQ ID NO: 330560 - DNA, 894 bp, Pseudomonas aeruginosa
atgttgaaaggtctggctctaacgcccccagtgattgggcgcatctcgatcggcaaagtcgtcgagagaaacggcaaacgtctgccggagaaagacgatcaattcaccatcacctcccaggtgcaaggcaaggatggttggttactgcatccacttaacgaccagctgcgccaaggcaaagaggacaaactgcgcagcatcccgatccgtctgatgttcaacgaacccgagctcaatttccgcgccgactacaccctgttcgatcggcaaaccgggcgcccggtttgtgtgggcaatggggaaacctgcaagcgcattgatcaggacggaatccagacactgccgtgtccctcgcccgatgcctgcccactggccaaagggggcgcctgcaagccgtacggccgactcaatgtcgttattggcgacgatgatccgctaggcagctttgtgttccgcaccactggtttcaacagcatccgcaccctcgcagcacgcctgaaatacttccaggcgatctcaggcaatcgcctggcctgcttggcattggagctgcgcctacgcggcaaatccacccggcaaagccatggaacgcccattttctacgtggacatcacgctgcgtagcggcatgagcgtggaggagaacctgctggccgccaagcaattggatgaggctcgccaagcagccggcttcgaccagcgcgcgctcgatagcgccgcgcagcaagggctgggcaatggcgccttcgaagataacgaggaagacagcggcgcgattgtagatgagttcttcccgctcaccgagccagcgcccaccgccagcgagccttcccccccacaacgcacagccctggccgccaagctggaatcgctcagcagcgaagcgaggccctaa

SEQ ID NO: 330561 - DNA, 348 bp, Pseudomonas aeruginosa
atgtccgagattgatcagaagcacttggccgaagctgtaggtcgagcgattgccaagcagcgcgtccgtgccggtatgacgcaagagcatgtggccgagcggcttggcattggcagcgaggcgatttcccgcatcgagcggggtatcgtcatccccaacatttctcggttgctggagttcgccgccattttcgagtgcgaggccgcggatctgctgacagaagcaagcccgcgaaccgacgatcaggcgcaacggatcagtcgtatgctggctacggtctcaccggaggatcgccagttgatcctggggctggtcgagcagttggcggatcgcctggctgaggcgtaa

SEQ ID NO: 330562 - DNA, 1014 bp, Pseudomonas aeruginosa
atgaacctgcgaacgatcattctcgcgccgcttctgcccctggcgttggccggctgcaacgaagccatcgataccgtcaagaacggccgaatgaaaatcaacgagcaatacaccgtcgaccaagcgttcagcaatcgaagcatttgcgacagcgtcgagtgggacgtcatcaccgatgacagaaacagagagcttgtccagtacaagtgccatatcaccggcatcgagtcgtactacgcacaggaaaagcaacgcatacgggagaacttgctcagcggcttcgacttggaaaagcgggctgcccaagtccatctggaaccggcacgcatggaggtggaagccgccgagaacgcgctgaataaaccgcggcccgccaacactgctaccttggacagcgaccggctcacagacctgctggcccgggaggatctgctctccgaaaacgccccctcacgctcgcttcagaactactccggcagcccagagattgcagcagctgcacagcgttacttcttgagctacgtacgagacacaacctcccctcagttcgctgcgcacaagcagaacgaacaggagctacttcgcgccatggcggctgagcgcgaaaaggttcaagcccagatcgccgaggagcgggctcgcttgagcgaagtccagaatgctcgcgggcaagaatcggtggctcacgctcagcagcgcctgaaccgggcaacggagctctatgaaaacctgcagaactccgttgctgccaagcttgaggaactggatgcccagcacgccgccaagctgaagcagttcgacggtgcagccaccatagagtcagtagccgaggtctttgagtgggtcgtcaagggtgaggaaatcgaactcgtctggtcggggctggaaggtacttacagcgacgggcagatcaagaggtttggccacatcgatcggctcagcagccttcaggacgtctaccgcaataacgtgaagacctattccgacctacgccaaaaagcaccgctgctgtag

SEQ ID NO: 330563 - DNA, 465 bp, Pseudomonas aeruginosa
atgaagcgactgaccgcacttgttccgatattgctgctggcctcgatgaacgttcaggccaatgcctactgtgattccaggcgatctgctcaagaggttgagacctgctatcgacaatccctgacggcgctcaaacgagctgtcgacaagggcttcaataaaatcatgaacagtcctaactacagcgaagcaaccaagcagcgtgttcaggaggagcaacacgtttgggagcagagcgtccagaccaactgccagaactacgcttgcgttgaatatcagttccagggtcggctgcttcagctgggtcgaatgaaagcagatccagccccctcagcgatggatgctgaggcgtgcctggatgcctggatcgctgcctatcgccaagaagaaggagacgaggtcgcgatcatccacgaccagatcaccgaatggcagcaatggtgtagcggaggccgcctgccctga

SEQ ID NO: 330564 - DNA, 495 bp, Pseudomonas aeruginosa
atgactgccaaattcaaggccggcgagtccgctggcacctacatcgccgatgcaccggtgaccgaagccgatatcgtggaaatggctcaacatctggccagcaagcggctgcgtaaaggccaggccttgcatcaacccaaggaggtctttggctacctgcagctcctgctgcaggactatgaacatgaggtatttgcactgctactgctggacagcaaacaccgtgtcattcgatttgaggagctgtttcgcggcaccctggacagtgccagtgtctatccccgcgaagtcgtcaaagtagcgctggaacacaatgcagcagcaatagtactggtgcataaccacccttccggtgatccggagccaagccatgcagaccgtgtcctgaccagcaggctcaagcaagcactcgagatggtgggcgtacgcacgctcgaccacatcatcgtgggagctgaaggctgcgtatcgctcgccgaacagggatacgtgtga

SEQ ID NO: 330565 - DNA, 678 bp, Pseudomonas aeruginosa
atgtacgatcagccaccagtaggctcgccccaatggcgagacctttctgtccaattgctacctcatgagagtcatgaggcctacctgaataatatctactcgttgctctcaaatagtttgatggtgcacccgcggtggaccgtcatccggttggatctgcacgtacccaccggatgctttctgccccagcgggcaataaccgacttcatcgagtccctcaaaagccaactcgaacatgtacggtctatcaaggcagcggcagggaagagagcttacgatccgatgcttcggtatgtgtgggtgcgcgagtgggatactgcagagtatccgcattatcacttggcgctactgctcaaccatgatgcctacttttccgtgggcgattactcgaagttgcagtctgatgattgcagttatgaccagatgctcgccggtcgcatctacaaagcttggggtgtggcactgggggtggattgggcaatcgccatgaaaggggttctattcgcccctaaccctgtatcgcctttacaggtccagcatccgctgttcgagcagcagtatcagtcggtcttctaccgcctgagctacttcgccaaaaagaggaccaaggtgtatggggacggccagcgaaactttggcatgagtcagctgagtcgtcttaaaaccgaactcccctga

SEQ ID NO: 330566 - DNA, 1260 bp, Pseudomonas aeruginosa
atgtacatctcatgccgagcctttgcttgcaagagggcgattccgcttagggcgcgcgtccttcttttcaggctagttgagcggtatggtctggtgggagtggatgaggtaggggtgagtggcgtgcaacgcctcgctgaaagcacgggctttagcaagagcgcgttgagtcgagccctgagcatcctcgttggtcagggggtgcttatagagaggcgtgagccaaccaatgggaggcctagaacgatctaccgccttgcgcctgccttgaaagaagttgtgctttcaccgtcacggagagattttcacgcgccgtggctggttcgtttgctggggtcagatgacccggtgtttagcgatctttcgatatcagaaagagctctcttggcgatcctatggggtttgctccctcgcccaggtttgtgcgtacttgatggctggagtgtttcccgtctagcaaggttggccagtgtcgatccgtctactttttatgagattgttcgtaggctcgagcaaaagaagatgctcgtagtgtctggtgcagcgtttgcttctggcggggcgaaggacaaaaccaagacttactttttgttgggtcctgcagtgctgtcgtgctggcctagatcctatacatggcaggttgatctgacgggggtgttgggatggtttgcaggtagggaggatcagttcagcgccagggaactgatgcagcttgttaatagtccagcgctgaaagtgaatgaaattgaggtcggtgtcagggctgaattgcttgagcttttgaatgatgcggccggtcgtgactatgttttcaatcaatgctgcgctgccatatcacatgctttctccggtggtgggagtggttctttgaatgaaaatgttctttatcccagagtgcagtcggcgctgctaaggctgttgcgaatgcaagtggtaggtaatggcttataccacagggctattgaggatatggacttcggtaggcttgatgctaagtcccgcgtgttatctgtttttgcggagcaggtctcatttattttagttcgcgatttcaagaacctgctttcctttgctcccagatatagggagcttgggcaagggaataggcttatggtttgctaccttgtgggtgtggaagaagcatgcaagatgcgtattgactttgtcaccgatgatagtgatgcgggagataagttcggagcaggcttgcaggttcgatatcagcaaggcctgcttgatttgcctgatcagctgctctaa

SEQ ID NO: 330567 - DNA, 633 bp, Pseudomonas aeruginosa
atgagaaaaaagcaatcccgaagcgactggcttcacaaggacccaaacatccatgattggctgatagaaactgcccctcagtgggcacgtgatgaacacggattactgatatacctaaatgctctatcggaggatcaattcaagcagttaaagcagcgctggagctcgcgccttcatagagcaaaaagacgaaccctcagctgcgacatttcaccagcaaccttcagtacacttaaaagaatacaaggaaaacggggactaaccgaaacccttgaagagataatcaacatcaattacgaagcaaaaaaacactactcacatacttttgaagaaaagcttaaaagcataaagcaaaaaagagatatcggcatttcgcgagagttaagtaggttcagtagcactctagagaagaccgcagcccaccgatcagagctctctgagctaaaaagcaaaatagaagagcaagaagtccagatagccgcactaagacacataactcgcatcttgatagaaaagctaataaacgaaggactctcattggacttaagcactacagagcaactaaaaggaatcttacacccatcaatcctagataattacagcgcctccagcaacaaaagccaaagtatctaa

SEQ ID NO: 330568 - DNA, 1668 bp, Pseudomonas aeruginosa
atgatcaaggtcgacgcttggaagccttccgccggcatcaagcttgagcctaatgcagagattgccgcgacggagcaacagcgcagtatagcgctgactgctgggccaggctcgggtaaatcagagttgctggctcagcgcgctgacttcctactcactacgggtgtatgtcgttatcccaaacgcatcttggccatcgccttcaagatcgacgccagtaacaacctgaaggaacgcgtttggcggcgttgcggtgcggcctatgcaggccgcttcgacagctacactttccatggattggcgaagaggatcatcgagcgcttcaggccagtgctagctggcgccgatgcattaaatccagatttcaaaattgtcgcgaagggcaaggctcaccctgtgcagacggagtttaaagagctcatcccccttgccatcaagatcctggatgcctatccggcggcagtaaatgctatacgccagacctacagcgatgtcttcctagacgaattccaggactgcacggacgagcaatacgagctggtgactaagctgttcaaaggatcaggtcgtcgcgtgacggcggtaggggatgttaagcagaagatcatgggttgggcaggggccctggaaggcgttttcgccagtttcgttgatgactttgaggctcaacatctcaacatctatcggaacttccggtcgcaaccgcatttgctcaggctccagaacgacatcatcaaagtactagatcctgactcggaaatgcctgctcacttgctcgccggtgagggtggagaggtgcatgtattgtcctacgccgattgccaggatgaagccaccgacttggctaagcgcatcgctagctggataaatgtagaaggtatcgctccggctaaaatcgctgtgctaccgcgtaatcaaccggaggcgtattgcattcgacttatggctgagctcgacaattggggcatcagctatcgtaacgaaaacaaggcgcaggacatttctaccgagcctatcgcccaggttatcgtggattacctgctgtgcatttacggcctgagagagcccaaagcctggactcgtctgacgcgtcgaatcatccaagtagaggatgatgcagagagcgaactaaagaccaattggagccgttacatcaaggaagcacggaagtctgctgcggctgatcttgcaactaaaacctttgaccagcgatggacgctactggaggagttcctcaagatggttgggcctgcgctgctggcagggctctcccatgattacgagtcctgggtgcacctgcgagagcagattgagagtgtcaagaaatatatcgatgaagccttggcaaaagaacctgaccttctgaaagcactggcccagctctccgatgatcaatcgattcggatcctcactgtgcacaagagcaagggccttgagttcgacacagtagtattgctgggcgtggagaatcaagcctatttcggcaaggatcaccacgaagtgcagtgcacattcttcgttggtgtatcgcgtgccgagagacggcttgtggtgacgacggcaagtcatcgtcagaatctcgctcagcttgaatactggagatccgcccgcaccgttcaggcggaattccttgcgtacgtgaatctctggaagacccactccaactga

SEQ ID NO: 330569 - DNA, 297 bp, Pseudomonas aeruginosa
atgctctgcgccttcccacaagcctttggtgtcgaggccaaagaccttgtggcaccgaagatcggccagctcagatccgtgctgggtgatagcttctttgacgaaaaacagtacaccgtgactgagcgtaagcatttcgccgcgtaccacaggttgttcaaggtcgacagcaagcctaagtcgcacattgaggccctttcgaatctctctgacgatgatttgagggagggtatgccaccctcgctcaagcgactggtcaagcatgtgatcaaaatggccagggagcttcacgaatga

SEQ ID NO: 330570 - DNA, 384 bp, Pseudomonas aeruginosa
atgtcatccaagctcttgctgctggtcaaactactggtatgcctgcctgtccacgccgggattgacctaacgcgggataggcaggaccaccccgttattgccagcagtttctacagttcgatattgctggcgacaacgaccatcggcaccagcgacccaagagaaggtacagaactctctggagacgtatccaaggaaatcagcagctacgaccggaagctcaagctggcgcatgacgatgcggccgctttcatcgctagcaacggcgcgatccgcggtgcgatgctgcaatcggtgctggacaccttgcgccagcgcgccgagcttgcgcgctacagtgatctgcaactggcgttggcggtattgacctatccgccccgctag

SEQ ID NO: 330571 - DNA, 348 bp, Pseudomonas aeruginosa
atggaaacgaaaaaacgtcggggccgcatctggctcttccacatcgtattttcctgtcagatatgcgtcgccgccgaggtctcggacggattggaggagcttgcccgtggcaccgtcattctcactgtaatgggcacttcagcaaccggccacacaagcgatcatttcgggcacaacagctatgcctatgcccgcgaggacgcggcagcatttgtagcctcagaaggagcaatctacggcgtgcaactggagcgcgcctggaggaaatatcaagccgacactcctgaacccaggctggaactgagctcctttgctaccggactattggcgcgtagtgagatgcagtga

SEQ ID NO: 330572 - DNA, 330 bp, Pseudomonas aeruginosa
atgctggggcccgatcccgccggacacctccccttcaacgctgataatgacgtctccagcgtggtaggtcggcaaggcctgctgagtagcccaacgaactgcgaggccgctgccaaccccaacaaaagtgttgatgcgtttaccggctacacccgcaagcataccgaccatgccagcaacggtgacacgctgctggttcagagagtcagcctgagctcgggtcaggggcagcgagacaaaaaccctcagtatgcaaggtcggtcctttgcctgcatccgatcgaaaacctcaaccgcaagatcagcagtcgcgtgactggctttcactga

SEQ ID NO: 330573 - DNA, 264 bp, Pseudomonas aeruginosa
atgctggtcattcgattcaagggctggtcggtgaaactcgaccaccaggtgggtggagcagggaagtttggcatctggtcattccacggctcggagagcagctacgtcccagacatgcggacgattctccggcatgcagcgatccggccggcggagccgaaggaaagcggcgaagtcgaggtattcatctgcgacgcgcgcatgccgcagaatgagtggcgtgccatagggacgggcgttgctgcctatgaggcggagcgctga

SEQ ID NO: 330574 - DNA, 264 bp, Pseudomonas aeruginosa; identical to SEQ ID NO: 330177

SEQ ID NO: 330575 - DNA, 630 bp, Pseudomonas aeruginosa
atgcccatcactgagcagcaactgctgcatatcctcccgaacgccggccctcgagccggcgtttttgttggtgcgctgaaccgcgggatgacgcgcttcggtatcacgtcgcctgtgcgcgcggcggcgttcctcgcccaagttggccacgaaagcggccagttgacccgcttggtggagaacctcaactacagtgcccgtggcctggctgcgacctggccgagccggtacctcggcgccgacggccagcccaacgccctggcgcagcgcctggcgcgcaacccccgagccatcgccaacaacgcctacgcctcgcgcaacggcaatggcgacgaggcatcgggcgacggctggcggtaccgcgggcgcgggctgctacagatcaccggccggtcgaactaccgcgccgccggcaccgggctgggccagccgctggagcaggaacccgaactgctcgagcagccggagtgggcggcgatctcggcggcctggtggtgggccagtcacggcttgaacgacctggccgaccgcggcgagttcgccgccatcactcggcgcatcaacggcgggctcaacggccaggcggagcgcctggcgctgtgggagcgggcgaagagggtgctgtcgtga

SEQ ID NO: 330576 - DNA, 1683 bp, Pseudomonas aeruginosa
atgcgagcactctctatatcactttctataatttctatgctggcgtcgcactccgccattgcggggtgtcctgatattaggccggctccgagaaccataaacgacacggcagaaaattattcaaagtctcctggatttagcctaaatgaagaaggggttcttcagtttgactatggcgcacatcatggcggtctaggtaagtgggctaatccatttttcgattcgaattatgcgctggctctgtatcgggactggctaaacagcgagtgcaaagacgatgccttgaaagagaattttcttcatcaagcaaaatggctggcaaataccgctaaggttgatggagatatcgcatcttggccattgccattcagagatcagaacttcgatctagatccaggctggatctcgggtatcgggcagtctcgtattgctggcgttttgttacgagcggaatcaatcactgacgaccccgaacttcgtgagattgcaagaaaggcactccatgcgtatgacgtggatatcaaggatggcggggtagttactgttgacgaccaagtaacatggattgaagagatggctgacccaaagggtcgatcatacaaagtccttaatggtcacatcactggactgtcgggaatcttagatttctatgagattacccatgagcagaagtggaaggatctgttcgaccgtggcgtggctgcggttaagcgggatattcccaaattcgatgctggcttcagcagctattatagtctgctcatgccttcgcagaaaagaccgatagcacctctgggcgactacaacccacttcacgtttcgcagcttctttggctgtatgataagtcgagtgatccgctctttctcgactacgctatgcgcttccaggcctacgaaacgaacaaggattcctttagcgcatcctcctccatagatccagttaggcatggtcctgatagtgtgcgtgcgaagtatggtagctcatactggtctgtcgggcagttcccggcatggttcgacatcgccactccacagcctgaactgatcagggggttgtcctttgatgtgagcgaggtcgagcaggctccggccaagttcacggtgctggctgaggtcgacgggaaaatggttcaggtagcagcgtcgcccgatgtgctttccaagaacatggacatcatctttgacaagcctgtgctgacgggtcgggtcagaatcgatatgcctgtgcctggccccaagaagatggtcgccctgagaatggcgatgctgttacgccagaacacgctgcgtgcacctgtggcaaacgagtgcaatcacacctatgacagccgcaagaaggtgaatcctaacaacatagactccgcctttgacggtgacgacggaactgcaatgacagttatctgtgacggctggatcgtatctgaggtagataaggactcccttgtatcagtaaggtcttcagcttccgaggataaagccattaaattctatggatctgacgatttggcagcatggactgagattgaaaatgaagatgcgcgtagcgctcacataccattcaagttcgtcaagttcgacatcgatacttcaatgaagggcatcgtcgaggtcacagagacgaaggttgaggatatgggggttcttaagagaatcaagcttttcttcatgagactcttcgcttaa

SEQ ID NO: 330577 - DNA, 687 bp, Pseudomonas aeruginosa
atgagtttcggtgcgaaatttgttgggaatgccggtcaggtgataatcgatcaggaccacccttgtctgcatctggttgcgtctggaacctatccagccactaatgcccagatcatcaacgtctcgtacccatctccggtgcagagcccgctcccaccgtttgttttcttttgccctaatggttcgcatcacataacgatgttccagcatgctggttcggctgggaactggacgggtttcagcttctacgtgaaggtatttcaagatacaagcggcgtcgtactgggagggaagtggaaggcatgcgcggtgttcatgccgaaaactggcggatgggggatgcagatattcgacaatcagtcgagagtggtatttgacagtaacagggatcttgttcggttcataagtggtacccagatgctgaattattacggcacgaatggtaactatctggggtattacaccctgcattcatggtctgcaccgtggccgcatgggactgatgggtattttctggttagtcatttcaatgtacaggcgcaaccgccccaaggtgatactggagagtgctccattgggtttgttacttcggcccgaaacacagtcgtagcaactgttcaagtcggcggacctgggcaagacgcaatacgaacacctttcccatggcctcttctggccattgcatag

SEQ ID NO: 330578 - DNA, 3663 bp, Pseudomonas aeruginosa
atgggcgcagttcaccagcacctggccggccgcaagggcggcagtagcaagccgaaacagccggtcgaggcacccgacagcctgcgctcggtcgcgatggccaagattctgctcgccgtgggcgaaggcgagttcgccggcgttccgagcgagcgcgatatctacctcgacaacaccccgctgatggacccgagcggtaacctgaacttcccgaacgttaagtgggagtggcgcgcggggtcggtggaccaggactatatccctggcattcctgcggttgagaacgagacgtctgtcaacgtcgagttgcgcagcgatacgccctgggtgcgctcgctgagcaatatccagctttccgcagtgcgtctgcgcttcgcctggccagcgctccagcagcaggacaccaacggcaacatcggcgggtaccggatcgaatatgccgtagatctggccaccgacggcggcgcctatcaggaggtgctgcgcgaggccgtcgatggcaagaccaccacccgctacgagcgttcccgccggatcgacctgccggcggccaccaatggctggcaggtgcgcgtccgccgcctgacgccgaaccagaacaacaaccgcatcgccgacaccatgctgatcgccggctacaccgaggtgatcgacgcgaagctgcgctacccgaacacggccctgctgtacgtcgagttcagcgcagagcagttcagcaacattccggctgtcacagtcgactgccgcgggcggaaggtccaagtgccgagcaattacgatccggagacccgggcctacctcggcatctgggacggcacgatgaaacaggcctggaccgacaacccggtctggcacacctacgacatcgtgaccaacgatcgcttcggtgtgggtaaacgcatcaaggcctggatggtagaccgttgggagatgtaccggatttcccagtactgcgaccagttggtgccggatgggaagggtggccaggagccgcgacacacctgcaacctgaacctgcaaagccgcgccggggcctgggagctgctgcgcgacctcaccgctatctaccgtggtatggcgtactgggcccagggccaactgaagatccaggcggatatcccgcgcgccaccgacgtcgatttcgcctacaccagggccaatgtcatcgacggccgcttcagctacggctcggccagtgagcgcactcgctacagccgtgccttggtcagctacgacaatccggcgaacaactacgacaccgacgtggctgtggccaccgataagcgcctgcagcggcgttacggcgacaacccggtcgaggtggcagccattggctgcacccgcgagagtgaggcccagcggcgcggaaaatgggcgatcctgaccaacagccaggatcgcacggtaacgttccgtaccgggatggatggagcgataccgctgccgggatgggtgattccggtggctgatgcgctgttggctggacgggagattggggggcgggtttctgcggttgctggccgagtgatcaccttggatcgcgatacccaggcaaaggctggcgaccggctgctcctgaacctgcccagcggtaaggctgaggcgcgaaccgtgcagtcggtaaccgggcgcgcggtgaccgtgacgacagcctacagcgagaccccgctaccggaactggtctggaccctcgatgccgacgacctggcggtgccgctctaccgtgtgatgaaagtcagccagccggagcggggtgtcttcgagatcaccgctctgcagtacgagcccgggaagttctcagcgatcgacactggtgccaagttggagagccggccgatcagcgttatcccgatcaccaccgtggcgccgccggcgagcgtcacgctgacctcgcactaccagttcgatcaggggttggcggtcagcacgatgaccatcgcctggcctgcagtagaaggggcggtggcctacgacgtggagtggaagaaggacagcggcaactggatccgcctgccgcgtaccggcaccaccagcgtcgatgtgactggcatctacgcaggtggctatctggcgcgggtgcgcgcggtgtcggccttcgacatcacgtcggtctggaagagttcgatcctgacccaactcagcggtaagaccggcgcgccgccggcgctggcgttcctgcgtaccaccagcggaccgtggaagatcggcctggagtggggattcccggccagtggcgcggcggacaccgcctacaccgagatccaacagtcggttaccccgggcggcagcgaacagaacgcaactgccctgggcttgttcgcgtacccgaccgacacccacacgctgacctcgctggcggccggcgctcgcctggccttccgcgggcggctgatcgaccggacaggcaacgtcggcccctggtcggcctgggtcgacggtatcagctcgacggatgcgagcgagtacaacgaactgatcaccaaggagtacgtcgagtccgcgctgggcgagcagttcttcgccgacatcgatcagatgcaggtcgatatcagtggcctgcagggccagatcgataatctgtccgatgtgctggcctacgacccgacgaagacctacgcgaagaacgatatcgtgcgggtcggcaaccggctgtatcaggcaaagcaggcggtgccgctcaacgcctcgccgccgaacgcgtcctactgggccgacatcggacagtcgatcgagacggccaacggcctggcccagcaggtggccaccaacaccgcggatatcaccgagctcgacggtaaggtcgaagcggcggcttcgagcctggatgttctgcaggctgccgcccgccgggagccggcgaccggagagaaggccgatgcgctgaagggctgggacaccattgctcgagccgccaccgaagtcaccgtgcgggcgaacgaggacgaagcgcaggcgaagcggacgagcttgcttgaagcgcggactgtgacggcggagggcaggatcgcaaccgtcgagtcggtcgttgcgtcgaacaatgccgtaaccgtccaacgcctggatcagctatccggccaggttgcgagcaacgcctcggccatcagcaccgaacagaccgtccgcgccaacgcggacagcgccctggggcagcggatggataccgtcagtgcgcgcaccgataccaacgaggcgaacatccagaccacatctcaagcggttacctcgctggatggaaacgtcaaggcgctctacagcgtgaagctccaggcgcatgccaatggccagaagtacgccgctggctggcaactgggcttcgacagcggtacgagcgtgacgaccatggcgttccaggctgatcggttcctctggttcaacagttccagcgggcagaccgtggcgcctgtctcgatcgtcggcggccagatgttcatcaacaacgcgatgatccaggagggctcgatcaccaacgcgaagatcggcaacgtgattcagtcgaccgccctcggtgccaacggcgagccgctgtggaagttggataagggcggcgcgttcacaatgaacagcgcaacgtcgggagggtttatgcgtcagacggcagaggcaataaaagtgtatgacggaaacttggtgcttcgagtccagatcgggaatcttgatgtatga

SEQ ID NO: 330579 - DNA, 204 bp, Pseudomonas aeruginosa
atgtccatatctgatagaaacaccggcacgccctggagcgcagaggatgtcaccgaactcaagcgccttgccaaagagaacacgcctacacgtgttattggcctgaagcttgggagaacggaggacgccgtctatgccaaggcgtctgagctcggcattagtctgaagccgacgaaccagtctccctacaaccggcagaagtag

SEQ ID NO: 330580 - DNA, 294 bp, Pseudomonas aeruginosa
atgatgaactcgatcctcatgggcttggacgccgtgctgtgcattctggtggtactggccgcgctggagttcctgcgcgccgttcacctgttcgagcatccaatcctgagcctgtcgttctacctggtcgcagtcggagccttcggcttgctgaatgagctggcaaaaggctactgggtcaacccatgggctgtggtgatgcaccttggcgtggttggctacgcctggtcgcgccgcaagcagattttccagcaggacttgcagtggaatggggcggaacggcgtggacgctag

SEQ ID NO: 330581 - DNA, 324 bp, Pseudomonas aeruginosa
atggaacccacgacctccatcggtattggcgcgctgtttgccaagtacagcgtgaccatcgccgggttctggggctccatcctctcgctcggcttcttaaaggacctaactcgcttccaagcagccttggcggtcgccaccggcttcggctgctccacctactggacccagcctgttgctggctggctctcccgaacctacctcatcccgttggatgatgccttcctcgctggcgtcgcgttcaccatcggcctgctggccatgaacgtgatacccggcctgaaagcctttgcggagcgcttcctgacgccccgaggtgcctga

SEQ ID NO: 330582 - DNA, 276 bp, Pseudomonas aeruginosa
atgcaaatactcaactttagccaggctcgcgccggtctaaagcagacgatggacgatgtctgtcgggaccatgagcccgcagtcatcacacggcaacgcggcgagccagtcgttatgatctctctcgaggactataacggcatgaaggaaacactctacttgttggagtctccggttaacgctcagcgcctacgcgagtccattgatcagcttcggtccggccaagtcgtcgaacgggagataccgatcaatgtccagcaagaagaaagaaagtaa

SEQ ID NO: 330583 - DNA, 309 bp, Pseudomonas aeruginosa
atgtccagcaagaagaaagaaagtaacaaagagcaagcccgcaccaccgcaaaggtcaccttcacaaccaacggttgggaagactaccagcactggaagtccaccgatgccaagatctcccaggctatcgacgacttcgtcgaagagtgcacccgcactcccttcactggcaccggaaagcccgaagccctcaagggcagcctctctggcttctggtcgcgtcgcatcacccgcgagcatcgtttcgtctacctgtacgaaaacaaccagctgttcgtgatctcctgccgctaccactatgagaagtaa

SEQ ID NO: 330584 - DNA, 870 bp, Pseudomonas aeruginosa
atgaaactgaccagcgcccgccaggcatggcacgacgcactttacgagaaccgcgattcggtcctcgccgtggccgcggagaaggcgaaactcggcaagcgggggcgtgtggccaacgagacgcacccggaccgcaaggacaccaacgggcgctccgcccacatgctggccgccggcctggtgatggctgctatcggcacgctaccgaaaccgctgcagcactttggccatacgctgtactcgccgctggccactggtgacgatgtggcgatcgcccacggcctggtctggatcggcgccggccttggccaactcacacagcgccagggcgagcgggcgtattggatggcgctggcggcgatcaactctcacaagcgggcggtgaatggccgggatacgctgggacccggcgaggtctgcctgttcgtcgaggagcgcctgggctgtcgcgtcgacccctgcaactgggcgcgggactacgccgccacctgggagcgcctggcgcgccacgtcgacaagctggacgcgcaggcgctcaggccggttgccgaggttgtggcgaagcagagtgggctgcggaaagggccaggctggcgctggttgcaggaagatcgcgacattgtcgccgagcagcgcgccgagctttactcccgccaccgcgagcagatgcaggagcgccttgccgaacgcctgcgtagcatgtccaaccagcaattggcagcctgggcgggccggatgaggcgctacagtgacgcctatcgcgctgagtggaaggacgacgtctacgagcagccggacgtgcaccagcgataccacgaccgcgtggcggcgtactgggcccagcgggagcgccttcgggacgtcgcatga

SEQ ID NO: 330585 - DNA, 573 bp, Pseudomonas aeruginosa
atgcgaagcgaatcgcacaccctgatttccacgctgctcggcgtggtgaaccaatggcgccgccgagaggggtggagccgcgagaccgtcgtccagcacatcgtggaggcgcacgagcgcatccagggagcgctggtcaccggcatcgtcttcgatccgccaacgcgcgatgcaaccgagcggatgaaggtcaacgccgaccgcgtgttccgctggctcgacgacggaaccaaggacaccaacctggtgccggcgaacttcgtacccagcatcctcgccgcgctgccgactgacctgaaggtccaggccctgggcgacatcctgacgccgctgggcgtgtcggtgcgcttgatcggcggcgatgccggccagcggccggaggtgctctgcatgctccggacactcatcaaggagaacggtgaggcgcagcaggccgtggccaaccttgtcgatggcgctgatgaccaggaactgcaggaggcccaccgggagctctccgaatccagggcggcgacagatgaggcgctgcgaatgatcgaccagatgcgccggccgcgccttgttcaggggtag

SEQ ID NO: 330586 - DNA, 255 bp, Pseudomonas aeruginosa
atggaagaaaccagatctgacccgaaaaagaaaatcgaggacgcccatgaaaaacatgcatggacgctagcctttctggtattcgccatagctggagctattgcctatgggctggaccattggcttgctcgatacgcaggacatctctgggctgaattggcgcacttcgcactgtacgtggcgtgtttcttcgcggtctttgggctcggatggttaaaggacgccttccttgggcgactgatgcgcgagcggtag

SEQ ID NO: 330587 - DNA, 903 bp, Pseudomonas aeruginosa
atgaaaggtgtgccaatgcccgccagccaaatgccgctggccatagataaacaggccgaagttaacgggatcggaatgggcgtcctttcggatggcacaccattcctcaatgggaggggcttagctcgtctttgcggtgttcaccacaaggtaattcaggacatcgcagcgaactgggataccaataagcctgccatcgctcggattcaggagatccttggcacgcacggtctctattatgagcatccctataccgctgtgacagatagctctggcgccttcaatgcctaccctgacggcgtttgcttggcgattctggagtactacgcattcgatgcggggcagaatcggaaagaagaagcgctgatgaatttccgccttctggccggaaaggcgctccgggactttatttacgctcaggtcgggtatgaccctgataaccacgtaccatcccagtggaagcaattccacgacagaatgtctcttgtttacaacgcagcaccagccggatatttcggaatattcaaagagattgccgacatgatcgttcatctcggtcagaacggcatccatatcgacagtacttttgtgccagatggcagtgttgggattcactgggcgaagcactggaaggacaacaatctagaagcgacctttggccctcgccagaagtacgatcacaactatcccgactacttcccccaagccctatccaatcctcaggagtcgaactgctacccggagtccgcccttggtgagttccgcaggtggttcagggaggtctacatcggcgccggcaagttcgagacttatctaaccggtaaggtaaaagacaaatcgctacctgtctcctttgcccagcttgctgtggcttcctacaaggacccgcaaaagcttcagtaa

SEQ ID NO: 330588 - DNA, 219 bp, Pseudomonas aeruginosa
atgactcgcaatcacattcgcaccaccgtcgcccgagcaaatctcctgcttgatgcgatgccgcgtactcatcctctccattcatgcgacgacattgccaagacgcgcagattgatgactatcaagaaacgacttggccgcatcgttgtagccgggctctatgtagatgatttggtctcgtcagcgcacagcgccctcagtcgtacccacgaccgatag

SEQ ID NO: 330589 - DNA, 264 bp, Pseudomonas aeruginosa
atggctgcacagaaggagaacacccaggcgaaaggacaggtctctccggcagagaaggtgcgtctacgggtatcagcgatgatcagtagcccgcaggctcaggcggagcgcagggcgtcaatctggaaggcgcagggggattcggaagaggcctggcagcaggtgctggaggagttggccgaaaccgatggactcgagatgtcgctgggggaggatggagtggttgcgctcacctggggaggcgggagacgaggagggcgttga

SEQ ID NO: 330590 - DNA, 207 bp, Pseudomonas aeruginosa
atgaacactcaagctcaagcattccacctcatgatcgaagtcaaatatggcgatagcccgtcctattggcatccggctttcgaagctgagacccaagaggaagcaaacgagctgatccagcacttcccgcaggcctacggtgaaatttcccgtcgcatcgtggtaggcgccccttccatggactgcacagaattgcggccctgctga

SEQ ID NO: 330591 - DNA, 210 bp, Pseudomonas aeruginosa
atgaccacccgccccgttcgctcgatcatcgacgaccaactcgacgatatcgaagagtttgccggaaagagcatccgccaggccgtcgagttggccaaccgccacggctaccacaacccgctcttcgccaacatctgcggcgacctctgcgttctgcgcttccggcgcaacccccgccttcacgcaacaaccaccctcaccctgaaatga

SEQ ID NO: 330592 - DNA, 1746 bp, Pseudomonas aeruginosa
atgcgcatcacgaaactcgaaatcaccaacttccaagggctgcgtcatgcggcccttgatgtttctgcgccggtgctcctggtggccggccacaacggcgccggcaagagttcgctgctcgacgccatcagccacgccttcaccggtaagcccggccgcgttgcgcagaagcagcatatcggccaactgatcaccgagggcgccaagaaaggggaggcccgcgtcgagtggctggacgatgccggcgaggtgcaggcctgcggggtcgcgctgcccagcggcaaaggctccccgctcgccgactcgccgttcctgccatacgtgctcgacgccagcctgtttgccggcctgaaggcggatgatcgccgcaagctgctgctcagtctgaccggcgccagcgccagcccagccgaggtcggcaagcgcctgaaggccaagggcatcgacctggcgctgttcgagaaggtgaagcccctgctccgttccgggttctccgccatggtcggccaggcaaaggactacgccagcgaagcgcgcggcgcctggaaagcggtcaccggcgagaactacggcagcgagaaggcgaacgggtgggagccggaggcgccgccagtcatcgtcagcgaggaggaactggaatcggcgcgcgcggaactgcgagccaccgcccaggacctggacgaggcccagcagaccctaggctccagcaagcgcgcccacgccgaagcccaggcgcgggccagccgcatcaccgctctgcgcgaaaccgcagcgctggccgaccgccggcgcaacaagctggccaccgacgaggccaatcaggacgaatggtctgagaaggtgatggcagccgaggccgccgccagcggcgagcccgcccaccagccgctgacctgccctcattgccagggcgccgtggacctgcaggccggccagttggtcgcgcaccagccgccggcgaaggttgccgatcccgaggcggcgaaacgtctggaggagtaccgcgggtatcttgccagcgctcagcgggccgtcgccaacagccagcgggacctgaaggagagcgaggccgccgccgcgcaggccgccgccctggaagccgaaaccgcccaggcgcccagcgccgaggcgatcgccaacggcgaacaggcgatcaacgaactgcgccaggcgcgtgatcggcagcaggccaaggtgcagtcgctgcaggaagcgttcaacgccgccgcgcagcgccaggacgtcatcaagcaggccgccggcttccacgccgaggtctgcgcctggagcgccctggccgatgccctatcgcccgcgggcatcccagcggagatcctggccgatgcgatcggaccggtgaacgagctgctgcagcgcctatccggcaccgccggctggtcgcccgtgcagatcagcgcagacatcgacgtcacgttcggcggccggctgtacggcctgctgtctgagtccgaacgctggcggtgcgacgcgacgctggccctggccatcgcgacgatctccggcctgcgcctggcgctgctggatcgcctcgacgtgctggatatccctgctcgcactcagcaggcgatgaagctgttccagagcctggccgccggcggcgagatcgacacgctgatcgtcgccggcacgctcaaggaaccgatggcgaagacgccggcctggctacaagcggtctggatcgacgccgggcaactcgccgaccagcagcaacaggctgcggcctga

SEQ ID NO: 330593 - DNA, 174 bp, Pseudomonas aeruginosa
atggcagtagcaattgaagataacgatggccacacccagatctacgatacggccgtgaaggtcgaggtcgaaggggacaagtacgtggtttacggccctttcaagtcggttcttgccgttgtcccccgggacgacgtgaagcgcctggcctctgatgaggaatccccaatctaa

SEQ ID NO: 330594 - DNA, 612 bp, Pseudomonas aeruginosa
atgtccgcagaaaacaacaactccgccatgacgacgaaccagaaccaccccgacgatcacctcctgatgttccaggacgaggcctacgcgcttggccgcgcccaggggcgcctggacgtgttccgtttcgacctgcacctggagcgccagcgccggttcagcgaacgcacgttcgggccagggtcgcgcgccgccggcgtcatcgaccacatccgcaaggagctgcgcgagatcgatgaagcccctggcgacctggccgagtggatcgacgttgtgattctcgctctggacggggcttggcgtaccggcgccactccggcgcagataatcgacgccctggtcgcaaagcagacgaagaacgaggcgcgcacctggccggactggcgcacggcgccggccgacaaagcgatcgaacacgtccgagcggacgagccggtcgacgacaacacctacttcgtcatgcgcaacgccggcaaaaaggtgttcgtgaagcacgggccgttcttccgggatcagggcggcctgacggaggactggggcaagaactggacgcgcatcagggccggcagcctcaagcatgcccgccagatcggggaggggttgctgccgtaa

SEQ ID NO: 330595 - DNA, 330 bp, Pseudomonas aeruginosa
atgcgatacgtactcaacctggcgatgccagtggcctgcacctgtgcaggcctgctgatcctggcggtgttgtcctcgctcagcgggaaaggagggatgcttcaagctctgggcgagatggccaatacggcttttcccttcgtagcagttgcaacgctctctttcgctgtctggggctgctatcggtattaccggattgcacgttgggaaagcggggaaaggactggcgattgccaccagtgcggcggggatacgtcgcagcacgatggaaaatacggcccctacgttaagtgcaggatgtgtggctggaagcgggaagggtatctgtag

SEQ ID NO: 330596 - DNA, 1263 bp, Pseudomonas aeruginosa
atgtcatctacccaacaccaactgatcgagcagtgcgccacccgcctgcgcggcatcgtcgacgccctggacaacatccacgacaccagcccgcaccgctggtcgacggacctcgacgacgttcactcctcagccgagagcctgctggccctgatcaaggaccaggcgccggcgccctgcatcgactgcaagggcaccggcttctgcaacagcatttccggcgaggagatccgctgcccctgccacgcgcccatccaattcgccgatccggcgcaaacgcccgtggagcagttcgaacaggcaccgccgtccgaagaccagttgaccgccgctggcctcagctacccgcttgccaaggaagatgccgtgaagctctggtacgccggcttcaggtccgaagtagtcactgtgctcgaggcctgggaggcaatcggccacgatatcggcatgaacccgagcaagggcgaactgctggactccctgcgcaacatggcggcgatttgcgatgcgcacggcaatgacatgccagcccagtcggcgatcgaccagcgccaggtcatcgcagacgccatcaccggcgcgctagccttcggcgcccaggccagccagccgccggcggaggatcactggcttcgtccgttctacgacatcggccgcgccgagggacagcgcacccaggaactggcaatgctggttcgcatgctggccagttcgctgaagcggcatgccccggaaagcaacctgatggcacgcgccaccaactacctggcagccaagggcttggcaggcacaccgcttcgtgacgcgcctgcatcggtagagcaggcaggcggggatgagcgggcggcacttcaggagttaatcctagtgcgtgactgggtaaaaaatcgcaggggacagccggagaagctgaagaacactgggcagacctacatcatgatcgaaaagtgcgaaacgctcgacatgctggagtgggcgattgagcgtgcccgcgccgccctggcgcacgcgccgaccagtttggcatccccgtcgtgcaaatggaccgaaagcagcggcatctgggaaacaagttgcggccagacctggggcttcgttgaggacggaccagcagagaacggcgcgctgttctgtcaccactgcggcggacgcctggtcctcatcaagagcgacgatcaggaagatgacggtgagccgtgcccggaatgcttggaacacggctgcaacggcgaatgcgctggccacggcgcgatgggagactga

SEQ ID NO: 330597 - DNA, 384 bp, Pseudomonas aeruginosa
atgaagcaatcccaattcagggccgagctggtcaggatcatgcccggctacaactggacagttcatgcgagccgcagcagcgaaaagctacttgtggcagagggcatccagtccagcggctccaaccggctctcgacgctacgcgtggagcgccgcgacaactacggtagttccggcaagcctcgctacgaggtgaagagcgccggctacgggcgacgggcgccctggctgcataccgcagagggcacatcgctggcccgtgctctccgggcactgcaagaccactacgagtacaccgccagcacatattaccagcacgccggagcgctgaaggcaggccgcagggcaccagccgctgcgccggcgcagggaggtgaggcatga

SEQ ID NO: 330598 - DNA, 528 bp, Pseudomonas aeruginosa
atgagcatcatcttaaatggtcacgtcctcaatcagcgccagctcgatgcgatcactccggtgatgaacgacctgatccagggccgggttggccaggaagacctcgataaggctttcgagcgtgcgctcgagcaggccggctgccccctgggctacgacaccaccatgccaggggccggctccaccatcgaacagcgggcaaccaagtggctgcgcgacgggcaggtcggcgcgtcctctcgcgccatccacgatcacatgctgggccttactccgaagcgtggctactacgatcacccccacgacccggacgatctgaatcgctgcctgcttctgctggacctgatccctgaatggaagcctcgcatgcgcgaaatggcccagcacagtacggaatgggccgcactggcgagcagttgggaaaagctcaccaacctcttcctgagcgaagccggcctggactggcaacgcagcagcgaagccccggaaacctacgcggcgatgcgactcctacggggtgacgcatga

SEQ ID NO: 330599 - DNA, 333 bp, Pseudomonas aeruginosa
atgcagatgcacagcgtcgacgtggtactggtcatggccctggtgctccaacaccacggtacggccgacgctgttcgccgcgccgccggtcagcttcgcgacagagtatgtgccgagcaccggcccaagatgaccgcactcatgcgcatgcaagatgacgcggcggcgctgcaggtggcgctcaacatcgtccagcgcgccaccgacgccctgggcatcctggcgggaaagccgtttccggccagaccttcgcccagcgaaagcccaccggatcaggggcacatgcccgccaaggctggtcccgtcaccggtgagccggtgcatcctacctga

SEQ ID NO: 330600 - DNA, 978 bp, Pseudomonas aeruginosa
atgtcgcttaaggtgctcaagcccggcctcgccacctcggtgcaggacgccggccgcgaaggccactatcacctgggcatcccgccgtccggcgcgctcgaccagtatgccctgcgcgctgccaacttgctggtgggcaacgcaccgaccgccgccgtgttggagtgcgcgctgctggggccgcagctggagttccagcgcgacgccctggtggccgtgtgcggggcgcgcatgacgcctcgcctggagggcgcggagatgccgctggatacttccttccgggttcgcgccggccaggtcctggggttcgatttcatccgtgccggcgcccgtggctatctcgccatcgacggcggcatcgcggtacccgaggtgctgggcagtcgttcgacctacggtctgggggcgatcggtggcttgcagggacgacggctggcggagggcgacctgctgcctctggggcctgcctcgccctctgccgtggagggcttggcgctgccgcgttcgctgcaggtggaggtcggcggcgaggtgagcttgcgggtggttcccggactctacgtccatcgcctgacccccgacgcggtcgagcgtttcttcgccgagacctggaccgtcggttcggaggcggaccgcaccggctaccgcttcaagggcggcacggcgctccggttcgagccgcgcgaacagccattcggcgcaggctcggacccgtccaacatcgtcgacgcctgctatcccatcggctcgatccaggtaccgggcgggctcgaacccatcgtcctgcatcgtgatgcggtgtccggtgggggatatgccacgctgggcacggtgatcagccccgacctgaaccggctggcgcagatgcaaccgaaccagaaggcgcgtttcgtcgccgtcagcctggaggaaggtctcgaggcgcgtcgccgttacaactggcaagtgcaacgactccagcacttcttcctgcgctga

SEQ ID NO: 330601 - DNA, 546 bp, Pseudomonas aeruginosa
gtgaccgctaggccgcacctgcaacaggcgcggcatgctctgcaaaaacaagaatcgattaacaacctgcagaagaaccccatgaatgccttcatccgttacatgcttgtcgcaatgctgctcgtcctgtcgcagaaaagcttcgccttgatgtgctggaaatcggacaacaagcaaaccgaagattatgtctacatcgatacgagcatcgctgttccatcggtcctccccaaggacaccgtactctggcggtctccgaactactccatatcgatcacttgcttccaggatcgcgactgggggccagagcaggtctatttctacctgagtccaaccggtcagggcgcgctgggttcggacctggaggtgggcatcaacctgaacggcgaagacctgcgctgctcgacactcgacatagtgccgaaaggagatcggcatgcacttcgatggttgctggacgggacgaggttgcgaaggcagggcgaagaagatgaccgtcaacttcaacttctttctctccaagcgggcaggtcccagtaccggtaa

SEQ ID NO: 330602 - DNA, 1008 bp, Pseudomonas aeruginosa
atgaatgcaattacccgaacactacttgtgggaatgctggttgcgttggcgcagaaaggttatgcgctgacctgcgaaagagcggacaacaaggcaacgatcgactatgtcaacatcgacacgagcatcgccgtgccttcggctctgcccaaggacaccgtgctctggcgctctccaacctacgatttctccgtcaggtgttaccaggagcgcgaaaacaccggacctgaggacgtctatttctatctcagtccggacggccagggcgcattgggctcggacctggaggtgggcatcaacctgaacggcgaggacctccgttgttcctcgctccccggctgccggcagaagataggcatgcatttcgatggttgctggacaggaggacgagggggatgcgaaggcatggctcagaccaagcaggtccgtttccagatcttcctctccaaactcgccgcccccactcccggcaaggaaggtcccatcacgggcgtaaactcctacgcactgttccagttcgatggagtgggaggcatcaacaacctggggggccggaacctacgtatgtatgcccttggcatgaacaacctccgctacgtcgcctgcacctccacgctaagcatttctccaaaaaccctcaacttccagatactgcaatcgcaatttgccgcacagaatctggtcatcaaagaacttcccttcagcatcaccgccaataagagctgcaacagcgcctatggcctgaacgctatgttcattcccgccagcaataccaccctgtcgagcacggatacgttgctggccaaggacaatccaacagtgggcatcaggctcctcaatgaggatcgcagcgtcatcagtatcggtaaggagttcgagttcattccctacaccccaacccagacgacggtgacgaagaactttctcgcccaactgaggtggatgacgagcagacccattctaggcccgttcaacgccaccgccgcgatagaggtctattacaagtga

SEQ ID NO: 330603 - DNA, 567 bp, Pseudomonas aeruginosa
atggatgcaataaacctaaaggctattcacaaaaaatatggtgagcgtccgctaagggactacaagactattagttttcttgagtactatttctggtatccctttgtcaaaggaatgagaacggtccgtccgttgaatttcatggcctatgataaggccaaggctgaaaccttccttcaagaaacgataggctatcgttcttacgcgcgaaagcatggagagtcgattttcaccaagcttttccagaactactatctaccgaccaagtttggctatgataaacgcaaactgcactactccagcatgattttgtctgggcaaatgacgcgtgacgaagctcaggctaaactggctgagccgctatatgatgcagatgaactgcagtttgatatcgaatatttctgcaagaagatgcgaatcacccaggctcaatttgaagagttgatgaatgcacctgttcatgactattcggagtttgccaactgggattctcgacagaggattgcgaaaaaagttcaaatgattgtccagcgtgcgctgggtcgtcgcatcaatgtctactcgtga

SEQ ID NO: 330604 - DNA, 1137 bp, Pseudomonas aeruginosa
atgaccggggccgtcatgactaaagttgctcatttgacatcggttcactcgcgttatgatattcgtatatttcgaaagcagtgtagaacactctctcaatacggatacgatgtgtatctggttgtcgcagatggtaagggtgatgaagtcaaggatggtgtaaggattgttgatgtcggagtactctcaggtcgcttgaatcgtattctaaaaaccacccgaaaaatttatgaacaggctttggcgcttggggctgatgtctatcattttcatgatcccgaactgatacctgttggtcttcgactgaaaaagcaaggtaagcaggttatcttcgactcccatgaggatgtgccgaagcaactgctgagtaaaccttacatgcgaccgtttttacgccgtgtagtggctgtgttattttcctgctatgagaaatatgcatgccctaagctggatgcagtccttacggcaacgccgcatattcgtgaaaaatttaaaaatattaatgggaatgttctagatattaataactttcccatgttgggtgagttggatgcgatggttccttgggcaagcaagaaaactgaagtctgctacgtcggtggtatcacttccattcgtggtgttcgtgaagtcgttaagagtcttgagtgcttgaagtcctcggcgcgcttgaatttagtgggaaagttttcagagccagagatagaaaaagaagtcagagcgctcaagggatggaactccgttaacgaacatggtcagcttgatcgagaagatgttcgtcgtgtactcggtgactctgttgccgggttggtgacatttctcccaatgcctaatcatgttgatgcacaacctaataagatgttcgagtatatgtcgtcgggaatccctgtgatcgcttccaattttcctctctggcgggaaattgttgaaggtagcaattgtggtatatgcgtagatcctctaagtcctgctgccattgctgaagcgatcgactatctggtaagtaatccgtgtgaggcggcagcgctgggacgtaatggccagcgggcagtgaacgaacgttataactgggatttggaagggcgcaaactagcgcggttctattccgatctactgagtaagcgagattccatatga

SEQ ID NO: 330605 - DNA, 1065 bp, Pseudomonas aeruginosa
atgaaaattctgaccatcattggtgcgcgtccgcagtttattaaagcgagtgtggtttcaaaggctatcattgagcagcagaccctttcggaaatcatcgttcatactggtcagcattttgatgccaatatgtctgaaatatttttcgaacagctgggtattccaaagccggattaccagttggatatccatggtggtactcacggccaaatgaccgggcgtatgctaatggagatcgaggatgtaattctcaaggagaaacctcatcgcgtattggtatacggcgataccaactctaccttggctggagcgttggctgcctccaagctgcatgttcctatcgcacacatcgaagccggcctgcgaagtttcaatatgcggatgccggaggaaattaaccgtattcttactgatcaggttagtgatattctgttttgccctactcgagttgcaattgataatctcaagaatgaaggtttcgaaagaaaggctgcgaagatagtcaacgtgggtgatgtgatgcaggatagcgctctattctttgcgcagcgtgcaacctcgccaattggacttgcgtcacaagatgggtttattctcgcgaccctgcatcgtgccgagaacaccgacgatccagttcgcctgacttcgatagtcgaggctctgaatgaaatccagattaatgttgcacctgtggtgctacccctgcatccacgtacccgcggtgtcatcgagcgcctagggctcaagctggaagtgcaggttatcgatcctgtcggatatctggaaatgatctggctgttgcaacgctctggcctggtgctcacggacagcggcggtgttcagaaagaagcattcttcttcggcaagccctgcgtgaccatgcgtgaccagaccgaatgggtggagctagtgacctgtggagccaacgttcttgtgggagcggcccgcgacatgattgtcgaatctgcacggactagcctgggaaagaccattcaagacgatggtcagctttacggaggcggtcaagcctcttctcggattgctgaatatcttgccaagctgtga

SEQ ID NO: 330606 - DNA, 1242 bp, Pseudomonas aeruginosa
atgaacgtctggtatgtgcatccctatgctggcggccccggagttggtcgttattggcggccttattatttctccaagttttggaatcaggctgggcatcggtcggtcataatctcggcaggctatcaccatctgctggaaccggatgaaaagcgttcgggcgtcacctgtgtaaatggagccgaatacgcatatgtacctactttgcgctatttgggcaatggcgtgggcagaatgctatcgatgctcatatttaccatgatgttgctgccattctgcctgatcttggccctgaagcgtggaacgccggatgcgattatctactcatcgcctcacccgtttggcgtcgttagctgttggctggctgctcgcctgctaggtgcgaaatttgtatttgaggtgcgcgatatctggcctttgagtctggtcgaactgggaggcttgaaagctgacaatcccctggtgcgtgttaccggttggatcgaaagattctcctatgcgcgagctgataagatcatcagtctgctgccatgtgcggagccgcacatggccgacaaaggacttgccgctggaaagttcctgtgggttccgaatggcgttgacagcagcgatatctctcctgatagcgctgtgagttcaagtgatttggtccggcatgtacaagttctcaaggagcagggtgttttcgttgtgatctatgctggagcgcacggcgaacccaatgctctggagggattggttcgctctgccggactgctgcgcgagcgtggtgcaagtatcagaatcattctggtgggcaagggagagtgcaaagagcaactcaaggcgattgccgcacaggatgccagcgggctagtggagtttttcgatcagcagcccaaagagactatcatggctgtcctgaagctggcgtcggcgggctacatctcgctcaagtcagaaccgatcttccgctttggcgtgagccccaacaagctatgggattacatgctggttgggttgccagtcattttcgcctgcaaggcagggaacgacccggttagtgactacgattgcggtgtatctgccgacccagatgcccctgaggatattactgcagccatcttccgtctgttgctgctgagcgaagacgagcgtcgcacaatggggcaaagagggcgtgatgcggtcctggagcattatacctacgagagtctggctcttcaggtgttgaacgcccttgctgatgggcgcgcagcatga

SEQ ID NO: 330607 - DNA, 963 bp, Pseudomonas aeruginosa
atgaaagctgtcatggtgaccggtgcatcaggattcgtcggatcggccttgtgctgtgagcttgctcggacagggtatgcggtgattgcggtggtacggcgggttgttgaaagaataccttctgtgacgtacatcgaagctgatctgaccgatccagccacgtttgccggcgagttcccgacggtggattgcattattcatctcgctggacgtgcccatatactcactgacaaggttgcagacccgctcgccgcatttcgtgaagtcaaccgagatgcgactgtccggttggctacccgtgcgctcgaggctggggtgaagcgtttcgtgtttgtcagttcaattggcgttaacggtaacagcacccggcaacaggctttcaacgaagattctccagccggcccacatgcgccctatgccatctccaaatacgaggctgagcaggagctggggactttgctccggggtaaaggtatggagttggtggttgtccgaccgcctttgatctatgccaatgatgcgccaggtaacttcggccgtttgctcaagctcgtcgctagtggtctgccgcttccgcttgacggtgtccgtaatgcgcgcagcctggtttctaggagaaacatcgtgggtttcctgagtctttgtgccgaacaccccgatgctgcgggcgaactgtttctggtggcggatggcgaggatgtttccattgcgcaaatgatcgaggccctgagtcggggaatgggcaggcgtccagctcttttcacgtttccagcggtgctgctgaagcttgtaatgtgcttgctgggtaaggcttccatgcatgaacagctctgtggctcgttacaggtcgatgcttccaaggcccgccggctgctcggctgggttcccgtcgagactattggtgccggtctgcaagcagcaggtcgagagtacattcttcgccagagggagcgccgaaaatga

SEQ ID NO: 330608 - DNA, 1020 bp, Pseudomonas aeruginosa
atgatgatctggatgatcgcgtgtctagttgtcttgctgttttcatttgtcgctacctgggggctgcgtcgctatgcattagcgacgaaactgatggatgttccgaatgcccgtagctcccacagtcaaccgacgcctagggggggaggtgttgcaatcgttctggtcttccttgcagcgttggtgtggatgctgagtgcaggcagtatctccggcggctgggggggggcgatgctgggtgcaggttctggcgtggcactgttagggttcctggatgaccatgggcacattgctgcgcgttggcggctgctcggccatttctcagcagcgatatggatcttgctgtggacgggtggtttcccgccgctggatgtggttgggcatgctgtcgacttaggatggctgggccacgtattggcagttttctatttggtatgggtgctgaacctttataacttcatggatggcattgatggtattgccagtgtcgaggccattggtgtctgtgtaggaggggccctgatctactggcttacagggcatgtcgcgatggttggtatccctctgttgctggcgtgcgcggtcgccggcttcctgatctggaacttccctccagctcgaatcttcatgggtgatgcggggagtggttttcttggtatggttattggtgcactagctattcaggctgcatggaccgccccctcgctgttctggtgctggttgatattgctgggagtgttcatcgttgatgcaacctatactctgatccgccggatcgccagaggggagaaattctatgaggcgcatcgcagccacgcttatcagtttgcctcgcgtcgttatgctagccatctgcgggttaccttgggtgttctggctatcaacactctttggttgttgccgttggcactgatggttgcattgggttggatcagcggcttcatcggtatcctggttgcttatgctcctctttgcctcttggcggtaggatacaaggcgggttccttggaaaaatcctaa

SEQ ID NO: 330609 - DNA, 774 bp, Pseudomonas aeruginosa
gtggagtcaaaacggatagcgctgctgatcgattgtgacaacgttagccatgcagccatcggcggtgtgctcgacgagcttgccaaatacggcatggtgaacatcaggcatgcccacggcaactggagttctccaaacctcgcagggtgggtcgagaaggttcacccttacgccatccggcccatgcagcagttcgctttcacgaagggcaagaacgccactgactcagcgatgatcattgacgcaatggacttgctatacagcaagaacgtcgatgctttcgcactcatgaccagcgacagcgacttcacaccactcgtgctgcgcctcctcgaaagcgggttgccagtgtatggctttggcgagaagaagactcctaagccgttcgtagatgcttgctcgcagtttatctacacagagaacctgatgaccgacgatcaggagaaggctgcagagggtgagccacccaaatcgacgaagcgctcccgcaacgagctgcgaagcgatacatctctcgtgcgattgctcaggactgctgcagagaaaaccgccgatgatgctgggtggtcgcatctcagccaggttggggaattcatacgcaacaacagctccttctcagcgattaactatggctaccggacgttgggcgacctcattcgcacgtcagagcttttcgtgatcgatatgcgtcacggcggcacagccatgttcatcaagaacccgcgcaaaccagccgcagcaacgcaccatcaacacgagtccagcacatcgtag

SEQ ID NO: 330610 - DNA, 1368 bp, Pseudomonas aeruginosa
atgaaattcattgacgatatcttggagtcaatatctggaagcacgagaacaaaaattgaagatcctttcattggcgctttcattggctcgtggctaatttgtaattgggatagcttagcgctgctggtatggggagagggaaccgccacagatcgaattgcagccattagcaagcactaccacgaattgaagatattcgaattcaactcactcgtggcaatccccctactcatgacagctctatttatatttgcctttccttgggtgtcatgggttttgaaatctatactgaaatatgccaacgagcgcctgcacgaacaagctgtagcgatagaaatcagtaaggttgagcggcaagaagctctaaacaaaaaaagacttttagctgatcccgagaagaaattcttggaagagaacgtcaggttagacattgaacgtagaaaagaggtgattgagcaactgaaactcagaacggctcgattcaaggagaaagctgatgcagcggcctcggcagcagctgaagcgaaagctgcgttagaggttactgcggctgcagccgcagagacgaaaagtcgcgcaagtcaggctgcacttgacgaggagaaaaggcaagcaaatgcagagcttgaaaaacaacgtttcagcttagcaagcgcgcagctaaaatcagcacaagcatcaaatcggtttccttcagcttatgctcttatgcaaacgttagaagaaagcctcaaaaatgacgatatttatttatcattggaagggcttggagaaattgtagcaatgattttcggctacaaaagcttcaacacactcgtgcatgacgagaacttcaataacaaaaccttggcacaggttgcatacatctgttatgaccgagatgaatttgcaacgactctggaaaccatcgtccaaaacgaagggtccagaaacgaggacttggacgctgaatcgctattcgaccatgtgacctcgatcttcgacaatcttgattttaaactactcccaaaagatgaagtcgaagaagtctgccgagaagtatgtaacaacatgcgatatgacttactgaatagcgaggagttctcaggcccaatcgctgagtcggatactattttcgatgaggttgagattgacgatctggaagacatcacctttgaaaatgggctgagtgttactttttctggcacagcaagtggaaaccacagaaaagaacacgacatttctggacgtgatatagaattcagcatcgaaataaaaagtgcattattagtcggcaccaaaggattaggtgaactggagcgtggtaaagtgtcagccaatctggttaattacgactatgagccagaaaatgaagcggataaaggttga

SEQ ID NO: 330611 - DNA, 438 bp, Pseudomonas aeruginosa
atgaaatgggcggatcggatgcgcgtaagggttcatgctggggcaaacagccttgggaacctgggggttgagctgttccattaccttgcgcttttcgggatcggggcgatcacggtctacgcgggcatcaccaccttcattgacatgctccatcaagacaaaatcagcgtagatgacattctgctgctgtttatctatctcgagctgctggctatgagcggaatttatttccgcacaaaccatatgccattgcgctttcttctctacattggcgttacggctttgattcggctgctgattagtgacgtgtcgcatcataaatccccggacgagggcattctttaccttacggggggggtggtgctcctttccgtttcgattctcgtagtgcgatatgcctcggcccggttcccgtcagtaaaagagaagacagactga

SEQ ID NO: 330612 - DNA, 1332 bp, Pseudomonas aeruginosa
atgagcgggcaggcgcggttgcgcgaagtcggcgccggcggcgcggcgctggaactggacgagaagcgtttttcccggctcggctgggggctggtgctgctcggcttcgtcggctttctcctgtgggccgggttggccccgctggacaagggcgtcggggtctccggcacggtgatggtggccggtagtcgcaaggccgtgcagcaccctaccggcggcctggtcaggcacatccgcgtgcacgaaggcgagcgggtggaggcaggacaggtgctgctggagatggacgctacccaggcccgggcccaggccgatggcctgttcgcccagtacctggcggcgctggcgagtctggcgcggctgagcgccgagcgcgatgaaaaggcgcggatcgagtttcccgccgagctgctggcgctggacgacccgcgcctgccgaccctgctggaacagcagcggcagttgcacgacagccgtcggcgggcgctgcgcctggaactcgatggtctcgccgagacggtcgccggcagccaggcgcaactggacggcctgcaagccgcgctgcgcagcaaggagcagcagcgcgccgccctcgaggaacagttgcgcggcctgcgccaactggccagcgagggctacgtgccgcgcaaccgcctgctcgacagcgagcgcctgctggcccaggtcaacggcgagatcgccggcgacctcggcagcctcggcagtacccgccggcagatcctcgaactgcgcctgcgcatggcccagcggcgggagaagttccaggaagaggtgcgcgccagcctggccgacgcccaggtgcgcgccgaggagttgcgcaatcgcctggccagcgcgcgcttcgacctggccaacagcgaggtacgggcgccggtcgccggcctggtggtcggccaggaagtgttcaccgagggcggcgtgatcgcgcccggccagcaactgatggaaatcctcccggagcgccagccgctgctggtggacgctcggctgccggtggagatggtcgacaaggtccgcgtcggcctgccggtggagctgatgttcagcgccttcaaccagagcactacgccgcgggtggagggcgaagtgaccctggtctcggccgaccgcctgctggacgagcgcagcgaggcgccgtactaccgggtgcgcatccgcgtaggcgaggagggcgtacgtcgcctggccggcctggagatccgcccggggatgccggtggaggccttcgttcgcagcggcgagcgctcgctgttgaactacctgttcaagccgctggccgaccgtacccacctggcgctgggggaagaatga

SEQ ID NO: 330613 - DNA, 630 bp, Pseudomonas aeruginosa
atgcagcacctcaagggtttctatcgagcaacggtttcacttgccgtgctcgctttgctgtctctcccttcagcttcggcagctcaggtataccgatgcgtcgattccgctggaaaggtcacattttcggatcaaggttgcacggacggtcactcgtccccggcaattgatgtcgcccccgcgaacaccctcgacagctcgcagtaccgaaatccgccgcctcaacctgaggtgccatatcgcgttgcgccttcggtgcggtctggcgttcaagtcaacgtcgtcgggggcgacaacgattcagagcgtgagcggaaaagactttgcaaagaggcatcgacgccctatcccggatctcgaggagggctgacctctgctcagcttgccgccgccgcgcagttgtgcgcgggtgtttcagttcctatgcctgctacacccgcgccggccggtggcagtgcaaggcgagcaccgacggcacctggagcaccaggagtccttaccagttgtgatgacagtgggtgctgggacagcaacggggctaggtacaaccgaggcgctggaaatactcacttcccggcgaatggtgggccagcgtgtgagcttgttggcgggaacatggtgtgcccctga

SEQ ID NO: 330614 - DNA, 621 bp, Pseudomonas aeruginosa
atggcctacaccgcatatcgggtgctcaaggcacctatcgaccagatcgagcgcttcatgaccgaggccatcgccgatggctggcagccgctcggtgcgcctatcctgctctaccccgacgacaaggccgtctaccaggctctggtcaagggtacgccggatagtagtggcactggccctgtcaccatcgtggtggacgacatcaccgatgcttccgctatcggcaaatctctgctgactgccgtcaacgagggcgatgggcgtgcagcaatcggggccggcacttccaatctgcagttgggcaccaccgcaaccaccgccaaagcgggagactatgcgcctgcctggggggatgtgacagggaaaccggcggttattgcggctggtactgatgctgcaacagcaagggggctattggcgcgggaacatccagccttgcgatcggtacaaccgccactaccgcagcggctggcaaccacaaccatgcaatcgccgaagacgctggtagcggtctggcggcagcaccggatctgcaaactgcatttaccgcgctttccacccgaatcaaggcactggagtccgcagcgccataaggctgtcgtcacagcgctgcatggctga

SEQ ID NO: 330615 - DNA, 1164 bp, Pseudomonas aeruginosa
atgagtgactaccgcgacgactccaacgacacggcggtaatcagcgacacgacctggctggggttgtcggccgtcagcgaaggcaccgcgcgcatcagcgagacggtgctgtacgggctgctggtgctgcacaccgatacggcggcggtgtcggatgaggctatcgaccgaccggcgcacctgctggtggatcaggcaaccatcagcgatgcggcgagcgaccggctccgcgccagggtgctggtggtcgatacggccacggcggcggatcgcgtcaccggcacccttcgtgtcctgcacgtcgatgacgccctggtgtcggatggggtgctggatcgcgtgcgcggcctgacggtggacggtgccacggtggccgacgaagcattcggcacccgtcatgcgtacaccctggtgctggatgccgcgcgcatcagcgacagcactggccaggccgccagtgtcctggtcgaggacgccgccaccgtcagcgatcaggcgactggggcgctgcacggtcgcgtactgctggtggatggggcgtccctcgccgacgaggtggtggacgcgcatcaggccgtgcaggcgctgctggtggacggggcatccattgccgcgctggtgctggaccatctggcggcgcgcgacctggtatcggatgccgtggtgatcgaggacatcaccgtggggggcgaccaggacggcggccaggcttggaccgcaaacgtcgatagttgggcgatgagccgctacgcgccgtataccttccggtcgcttgctgtgatcgacggtcggctgtacggcatcgccgaagacggcgtttatgcgctggacggtgacagccagccggtggccggcagaatcgcgaccgggaaactggatatcggccagggcgcgctggtgcatccgcatagcgcctatctggagtatgcactggatgctgatggcacggtggccatggacgtgaccaccacgcaaagcggcagcgcagcgacctacagctacccgctggagagcgagcctgcagacgagttgaccaatgggcgcttcaagttcggccggggcctgcgcggcaggcacttcacgttcacgcttcgcctgaccggccggcacggctatatcaatgacctgagcgtcgaatcggcgccgaccaacaggagagtgtga

SEQ ID NO: 330616 - DNA, 1020 bp, Pseudomonas aeruginosa
atggctaagaaatacactcatataaagaacccactaacggttattgctatatttgcgacgtttgttgagatcggtgggacagtcgtgctgccgtttttggagggagaggttcaagagcggtacgtttggttcttgatggcttttccagtgttcttggtttggcaattttttcgagtgctgtggcacaagcatgaagttttatatgcccctaaggattatcgggatgataataattttctttcggcaaagggtataactcctgcgtcacaggcctcggtgatcgctaaagttattgatgaggcaagccaagccagtgatgaaattttgaacgatgattcgattggtcctgaggctcaggtgacttccggttcagacgaaataattaatggaactgtacatgaggatgcccatgaggaggaggagtcgaattacgagcctaagtctgaagcaaaaccgagaacctcggtcgaaagggaccataaatcagcagccgctgattccagtgctgcttggtcagcagcagatgctgcacgcacatttaccttaaaaaattatgaggcactcgcagcagctgccggtttaactgtctctggtgcaggtgggattgtagctgcctctgggttggccaatatgatccaaactagggcgaaagtagaagaacatgtatttaaagttctaagtgagaaggataagactgcattcctcaggaacgtatctgtacgcggtatcccagatcatgtttttagtggggtctcaacacgtccagatgaaacggttctggtggagatagtctctgcgtcgcacgtggtgcgtaataagaagaagattcatgagttgatagagaaagttagtaactattatcatgatccgtcttcgccgattggtaaaaattttcaattggtggtcgtcgttgtggaggattcaaatactttagagtctgttttggctgttaaggttttgaaggattcaattttaaaatataatgttccggttgaaatacgtcagataacgatgccatag

SEQ ID NO: 330617 - DNA, 417 bp, Pseudomonas aeruginosa
atggatcagagtaaattgacgttgagtttctcggttacggaggagatgcgaggagagaatggtccccagttggcatccttaacccttaaggcggatgattctgatgcaatcggcctgtcccttctgtgccttgaatcagtccatgaccagtatcacaaagtggtactaacggttgcgccggctccacctggtcattggtgcccgatcctttggattgaagtgcacagcaccgaccagaaggaattgtgggacccggtgaacaatgtgaagcaagcgaagttgttcatggcagatcctgccagcctaaccacgtcgggccggctagagaaaatgcgctcttatttgacgaagcactatccggaaggacagaaggtctgggctgctcggatgagtcttggcgcccacgccgtcgaatag

SEQ ID NO: 330618 - DNA, 348 bp, Pseudomonas aeruginosa
gtgagccagcatcgattccaagcgcttggccggctgaaaaccggccagatgaacaagaccgagcaggcctacgaccagcacctggcctaccgaaagctagcaggggaggtcgcctggtatcggttcgagggcattaagctgcgcctggccgataacaccttctacacccctgacttcgctgtgatgctcaccggcggtgagttggaactgcacgaggtgaagggggactggaccgacgatgcccgggtgaagaccaaggtcgccgccgaccagtatccgctccgtattatcgcggtgtcgccgaagcccaaaaaggctggtggcggttgggcagtggaggagttctga

SEQ ID NO: 330619 - DNA, 321 bp, Pseudomonas aeruginosa
atggcgaagatcgcgtcgaaagctgttcgggacgccgcccgagacgaggagtgcacggtacgaatcgccggcatctgcaactacaggaccgacacgacggtgttcgcgcacctgccggacgagagcaagggcatgggcacgaaagcggacgacctgagcggttgcttcgcatgcagtgcgtgccatgacgccctggatggtcggaggaagcacgacctgagtgccgaggaggtcgagtggtacatgcgtagggccttggtccggacctggcgccgcctctttgagaagagagtcatgacgatcaagggggcggcagcgtga

SEQ ID NO: 330620 - DNA, 231 bp, Pseudomonas aeruginosa
atggcttctatgacgcaacgcacttgcaagacctgcaaggagcccttccaggctcgcacagcagacgtgaagcgaggctgggcccgctactgcagcaagacctgcaaagcaattgagcaggagcaacgcacaggacagttcgccgaactgctgagcagaggtcgccaattggacgacctctacgacgtggacatctccgattcggaatggggcgcgagtgatggtgattga

SEQ ID NO: 330621 - DNA, 156 bp, Pseudomonas aeruginosa
atgcatatcacataccgcgagcgccgcaaccgcgcggctttcagcagcgcccagcacgcctgggacttcgccagagacccgctctgggaccagccggagccagatccagagcccgaggacgaagagcaggaggacaacgatggccttcagcgatga

SEQ ID NO: 330622 - DNA, 1017 bp, Pseudomonas aeruginosa
atgaccatcctgaaaaatgttgacctggaaaacggtaccgtcgaggtcgccgagtacaacgcaaccaacgccgccctggcaaaacttcgcgagaagtacgcgacgctgccggacgccaataccgccgatggctacgagttcatcaaggccggtatcaaggaattgaccacactgcgcaccagcctggaagccgctcgcaagcgtgaaaaggcgccttacatcgaggcaggccagatcatcgacgccgaggcgaagcggatcaccgccgcactggtgacgttggaagatccgatgaaggccgccaagaaggaggtcgacgatcgcgtcgaacgcgagcgccaggaacggatcgcacgcctgctgtcgaaggtcgacgccatcaaagggatgccggcccaggtacgcggcaagaccagcgacgagatcgccgcgatgatcgaccgctgtggcgaaattgacaccgcacacgacttctacgacttgacgaaggaagcccaagccgcacagcagacggccatggacgaactgacccaaatgctgaccgaccgcctggccttcgagcaagcggagcgccagcggcaggagttggaagcccagcaagccgaaatgcgccgccgcatggaggagcaacaggcggaaatgcgccggcagcaagaggaaatgcaacgccaacgcgaagaactggcgcgccagcagcaggagcttgccgccgcgcgccagcagctcgccgagcaggacacgcccgtcgctgtcgagccggaggcgccgaaggccgaagttgcaccagcgcccgcccagatcaagcccgccggcaaggcagcagagcccagcgctacccagtggcgcgcccgcgtcgtcgataaaaccgcgttcatcgccgccatcgccgaaggcctagccaccgaggacttgctcgttgtcgaccagccggcactggacagcctggccaacagcaagggccaaacgctgaatctgccgggcgtgatcgtcgagaagtcacccgcgaaagcagcctga

SEQ ID NO: 330623 - DNA, 927 bp, Pseudomonas aeruginosa
atgtggttccgcaacctactgatctaccgcctcacccaacccatcgacacaacggccagcgctctggaaagtgccctggcgagcaaaccggcacgcccctgcgcctcccaggagttgaccacctacggcttcgcgccgccggtcggcaagggtgacgcaccgctggtacgcgaggcgaacggattctggctgatctgctgccgcaaggaggagaagatcctgcctggcagcgtggtcaacgacgcactgaaggagaaggtcgaagagatcgaggaaacccagcagcgcaaggtctacaagaaagagcgcgaccagttgaaggacgagatcgtccagaccctcctaccgcgcgcgttcacccgccgcaagcgcaccttcgccgcaatcatgccggcgcaaggcctggtgatcgtggacaccgccacggcgaaggccgccgaggatctgctatcgaccttgcgcgaagccctgggctctctccccgtccgaccgatcgcaaccaaggtttcgccgacgacaaccatgaccgagtggctgcgaagccaagaaaccaatgcgggtggcgacttctggctgtgcgacggcgccctgctccgcgacaccgacgagcaaggcagcatcaccgccaagcaccaggacctgaccagcgacgttatccgccagcacctcgactcaggtaagagcgtcaccaagctcgctctcgcctggaagaaagacctctacttcgtactcgacgagggtctggtgatccgcagcctccgcttcgacgacctgctgcaggagcgggctctggacgacgccggcagggactccgacgacttcgcccaggccgatgccagcttcgtcctgatgatgctcaccttccagcaattcatccccgagctgctggtagcactgggcggcgaagaagtccccgtaggcgtctga

SEQ ID NO: 330624 - DNA, 1056 bp, Pseudomonas aeruginosa
atgcctatccgccattccatcatccacctgatcgacaagaagcccgacggcaccccgaccgtgctccatgcgcgcgacgctgagctaggtaactcccaggtcatcgagaacctgctggccgacctcaacgaaagctacaacgccaagaacaaagcctggggcttcttccagggcgagtccggggcctacccgttcagcggctggctcggcgagtacttggaaggcaaccgcgacttcgtggggttcagccgcgaggcggtggaacacctgcggaagctgatggaagagtccaacctctccaccggcggctacgtactgttcgcccactaccagcagggcatgaccgactacctggcgatcgccctgctgcaccacagcgaaggggcggcggtgaacgagtcactggacgtcaccccgtcgagccacctcgacctcggccagttacacctggcggcgcgaatcaacctctccgagtggcgcaacaacaagcagtcgaagcagtacatctcgttcatcaagggcaagggcgggagaaagctctccgactacttccgcgacttcatcggctgccaggaaggggtcgattcgccgggcgagacccgcaccctgctgaaagccttcagcgacttcgtggaaagcgagggcatggccgaggaacaggcccgcgaaaaaaccgtgtcgctggtcgactacgccaccgcgcaggcacgcatcggtgagccgatgaccctcgacgccctttccgaactgatcgacgaacagcagccacgggcgttctacgacttcatccagcacaaggactacggcctgtcgccggaaatcccggcggacaagcgcaccttcaaccagttccgccgcttcaccggccgcgccgaaggcctgtcgatcagcttcgaggcacacctcctcggcaccaaggtggagttcgactcaggctccgacaccctgctgatccatggcctgccggcacatctcgccagccaactgaagaaggttgcagcgcagaagcaagacggggcgatgagcgcgcacggatcgcgcgaggctcagccgtga

SEQ ID NO: 330625 - DNA, 2091 bp, Pseudomonas aeruginosa
atgacttccctcaagaagccctccccgctcgacttcaaaacccagtacggcctggccctggacgacaccgacgacgcgatcatcgtcgacctgttcgccggcggcggcggtgccagcaccggcctggaaatgggcctgggccgcaaggtcgacctggccatcaaccacaacccggcggcgatcagcatgcacgaggccaaccacccgcacgccgagcatctgccgaccgatgtctggggtatcgaccccattgcgagcacgaagggcaagaccgtgggctggctgcacgcctcaccggactgccgacaccacagccaggccgccggcggccagccgcgcaagaaagagatccgcgacctgtcctgggttgttgtgaagtgggccggcaagctccagaagctcggccgcgggccctgggtgatcagcctggagaacgtgaagcagatcctgcagtggggcccgctgatcgccaagcgcgacaaagcgaccggccgtgtcgtgcgtctcgacggcaccgttgcccagcctggcgagcgggtgccgcggcacgagcagttccttgtgcccgatccgaagcgcaagggtcgcacctggcgccagttcctgcgcgccctggaaggcttcggctaccacgtcgactactgggtcgagcgcaactgcgactacggcgacccgaccacccgccagcgcctgtacctggtggccaccgacggtggtttcgagccagttgcggcggagaagacccatgccgcgaagcccagcaaggggctgaagccgtaccgcacggcagcagagtgcatcgattggagcgacctcggccagtcgatccgcaaccggaagaagccgctggcggaggccacgatgcgccgcatcgcgaagggcatcgagaaagaagtgctccagcgcgccaagcccttcatcgtgccgatcgcgaactggtcgcgcgaagccgtgcatccggtggaccagccgctgaacaccatcactgcctggccgaagggtggcgctttctccgttgccaccccgacgctgatccaagttggctacggcgagcgcgacggacaggcaccgcgcgtccttgaactggatgaaccgctcggcaccgtggtcgccggcggcatcaagcacgccgtagcagccgcccacctggtcaagttccgcttcgacgccaccggcgcaccggttgaccagccgatgccgacgatcaccagcggcggcgagtgcaagcgcccggccggcgcggcgcacgccctcggcatggccagcgcggttctggtcggcgtcggcggccgcgccggccaaaccgagccgcgttcggtcgccgagccgatgtacaccatcaccgcgaaagctgcctgcggagtggccaccgcgttcatggtccaggccaacggcggctacaacaacacccacagtcgcccggccgatgccccgatcagcaccatcaccaacaagggcagccagcagcaactcgccacggcacacctggtaacgctgcggaagggatcgcatggcgccccggtggacggaccgctgggcacgcaaaccggcacggaccaccacggcctggtcgccgcccacctgctgcatctgcgcggcaactgcgacgcgcgcgccgccgacgagccgctgcacacggtcagcgccggcggcacgcaccacggtctggtcaccgcggaaatggtcgccagcagcctgaccccggagcagctcgacggcgctgtgtgggtggcggcgttcctgatgaagtaccacggcatgggcgagaacatccgcccgatggacgagccggtcagcaccgtaaccaccaaggaccgcttggcgctggtcacggtctggatcagcggcagcccctacgtgatcgtcgacatccggctgcggatgctcaaaccgcgtgagttgtaccgcgcccagggcttccccgacagctacatcatcgagcggggccacaacgggcaacggttcactctgtcccagcaggtccacatgtgcggcaacagcgtgagcccgaacactatggccgcatacgcccgggcgaacgacccatggaagcgtcggctacgcccgagaccgcagcaggtagcggcatga

SEQ ID NO: 330626 - DNA, 444 bp, Pseudomonas aeruginosa
atgaacaccgaacagttcatccgtgactcggccgcgcgcgggctttcccgccgcgccacccggctggccctgggcatcggcccctgggtgttccgcgaaatgctgaccgtgatgccggatatcgagtggccggcgaagggccagtcgctggaccaccagcgtgcgaacgagcagaagcgcggacactgtacgccggcgcaggccgcagcgctggagcgcgcgcacgaacgctggagcgagagccgacgcttcacggtcgacggcgtgaccgggaccatcgccgagctggtggagcacttccagagcccggtccacgcaacgaccgtccgccgccgcgtcgccgccggcatgagcctgcgcgacgcacttctctccccgcgccagcagcccaagcccgggcgccggcatccctggaaccgctcacagcagcaggtgcagccatga

SEQ ID NO: 330627 - DNA, 522 bp, Pseudomonas aeruginosa
atgacgacgaaccagaaccaccccgacgatcaccttgccattgaagcgctccacagccgctatctggacgtcctgaccggacgcaccagcgatcacctcctgatgttccaggacgaggcttacgcgcttggccgcgcccgcgggcggctggacgtgttccgtctcgacctgcacctggagcgccagcgccggttcagcgaacgcacgttcgggcctgggtcgcgcgccgctggcgtcgtcgaccacatccggaaggagttgcgcgagatcgaggagaaccctggcgacctggtcgaatggatcgacgttgtgattctcgctctggacggcgcctggcgcaccggcgccactcccgcgcagatcatcgacgccctggtcgccaagcagacgaagaacgagtcgcgctcctggccggactggcgcacggtgccggccgacaaggcgatcgagcacgaccgcacggacgagccggtcgacgatcggccatatgaaattaaggaaatgagtaaacagttacagtga

SEQ ID NO: 330628 - DNA, 663 bp, Pseudomonas aeruginosa
atgactgatgccattagtactgcgcaggatcaaaatatttatgtggcgcctggtgcctcgctaaccacgctgtacaaggggctgtataatatctgcagccctggcgcagtatttcccgaggctgagacgacagaggcttgggatattcctttaaggttgcatccggattttgttccaggtggagatgtaaatgctgttaaccaacagtatgtgacggctcttgctcaggaaacatccaatattttgctattggggttccagatgtctcaaaataaagatgtggtgtgtggcgatctgattccgctcattcaaagtactagggctaatctggtttctgtgaaagccaaatatggggcagggctacttggggtgttaggtcaaacgacaaatattttgcctaatagtgtctcgataacccccggcacaggaggcggtgcaaccgatagctcaggcctcctagttggctatggtgtgaacttagggacccttacggctgcacagctttcagcaatgaatctgccacaaagtatcaagtcgctcatcactcccggagtaggtctgcacttaggtgctgtaaacttcagtgcagtcttcaaccagattcgcgatggaatgcgttatgtgacgggcatggctctaactctggcctaccatgctctctag

SEQ ID NO: 330629 - DNA, 1005 bp, Pseudomonas aeruginosa
atggatgatgaagatttaaaggaattggagaagactatatctgatttgctttctccgtatgaaagtgaggggaaggtaggtgcctcacttgatgaatcgcctattactatatatgctaatcaagttccttattatataaatgatacctggctgactaactggagtgtggctgctcgtacagggatagctcagtcgctaattgactctataaatacgactattggacggcccatggtcgtgtctgatcactattttagagggcacgaaattagcataagaacggttccagagactggtggtagtaatttgataaccatgtctgatttgtcggcaaagctcaattctcaaataaatacatttatacaagataggattgatgaagacaaagaggcaaaggttgctctaatccagcagtcaatggagtcattggctgctgaacaaattaattccgactttacggcgaggcatgagcttccggctggttctcgtccaaacaccgtaacgattccccaggcaggtgactctgcaatcacggtcggatatggatttgacttaggacagcacgatgagcaggaactgatctccatggggataccggtttctaccagggacaaggttcggcctggtctgggcttgagtagaaccgatcctaatatatattctgcgcttgctttaatcatccctccatttaccgatgatgatgggatggtattgttctctacgaagctaaatagggtggctggcgctgttcgtagcaaattctctgacgtttggagtgggttgcctccagccgtccggacggtagcggtagatatttactatcaatatggtcaaggaaaagtctttcctaattttgaggcggcaataaggcagcatgattgggctgctgtagtctacgagttgagaaattgggatggtcatccaaatgtgcccggcgactacagaacaaatcgcttgaatgacagggcggactatctacaacaagctttaggtcttccgaactag

SEQ ID NO: 330630 - DNA, 699 bp, Pseudomonas aeruginosa
atgagattctcaaagaatttattggttgtgcttctttcttattctgcactagctgttgccgactcagagataaagagtgggatgtacttacgggtcggtgatggaggggtgttcaatgtttttcttgataagcatggagacaagatatttagaattaggacactaggcagtaatgggcactcttgctctctagggggaagggttgatggttctagggtcatagtggaagggccgtcatatgcaggtcgatgtgatattgatgtaaaaaatactgccggcaaaatcgagttgtctagaggtcgggagagtctcgggtgtagagactactgcgggcctagggctggcttctatgggagttacaagcttgcatacagtctgtgtgcatttggttcttacagaaagagactgtccataattgagagcgctttagattcgggggataaagataaagggtacttgctctcaaaggagctttatgagaagtgctcgcagttcatggactctcttccgcgtatggggctgataaataaaatatcaaccttgagtttggaacggggagacaagaaagtatgtcgtaaaatgcagggtgatgtggggttttttgactctataaagcctgaatacctcccgcaggatgaaagagtaacgtatgaagcattacgtgatgaacatgctaagttgcagagtgaatgttcataa

SEQ ID NO: 330631 - DNA, 915 bp, Pseudomonas aeruginosa
atgtcctctacccaactgatcgagcagtgcgttacccgcctgcgcggcatcgtcgaaacactggacaacatccacgacaccaacccgcaccgctggtcgacggacctcgacgaggtgcactcctcagccgagagcctgctggccatgatcgagggccaggcgccggcgctagatgcccagggcctagccagggtcgcggatcttgaggcgaagctggccgatctggagaagcaggagccgattggctggttcgcgcagtattgcgagacgcctatgcggcggatggtgcagtggggcgcgaaggtgccggattgcgccgctgatacgttttacccactctacgccgctcctgtagcccaggctcagcacggcacgggctatgccgaggctcgccagtgcgtgaactgccggcacatcggtatcaacgacgccgccgactacgccgcttgccatgactgcaattggactggaccagaaccggatgaggacaagtgctcagggtgcgcgggtgagaactgcatggcggcagcttgcccggagtgtggtggtcgttacgacctggtcgcggaggcgaacatcactgccccggctgggcaagtgccgcaggcatggctcgacgtccaggccgagcgccgccgacaggtggaggcggagggctggacgccggagcacgacgacgagcacagccacggccagatggcccgcgccgccgcctgctacgccctggccggctccagcgctccgaacgatggaaccgccgccctgctggtgtcgctggcatggccctgggatgaacagtggtggaagccgagcactgctcgacgcgatatggtcaaggcctgtgccctggcgctggctgagatcgagcgccttgacagggtagcggcgagtcagggagggccaagtgatgcgtag

SEQ ID NO: 330632 - DNA, 123 bp, Pseudomonas aeruginosa
atgcgtagagcactgaccgccctcggcatcatcgccgccctcggcctggccgtggtgctcgctgtggagatattcccgatcatccgcacgctggcggcctggcagacggggtgcttcggatga

SEQ ID NO: 330633 - DNA, 234 bp, Pseudomonas aeruginosa
atgcgcaacacccagcagcaccaagacgtcccccgcttcatcgacttgaatatggtcaagttgagaacggggatgggtaccacgttcatctacgaccatatgaagaaaggggacttccccaaagggcgcaagtttggccgcgccactcgctgggcagaggttgaaatcgaccagtactgcaacggaacctggacgccgcaggcgccaacaaacgaagcgggagccccggagtga

SEQ ID NO: 330634 - DNA, 1101 bp, Pseudomonas aeruginosa
atgaaaaagttaagggattctgattttattcggcaaaggaatgctactaggcgtgcattgttgatcgctaggaatccacgtagatatgatcctcaaagaaagctgaaactccaatcacggatcggctctcgaattgtagttgttgcgccggaagagcttaatttttttggtccgggctatgatgaattttggacctttataaacagtatcagacaagcttgctctagtgggttggttcttcttgattttaaatctgtgcgtgctgtaaaagttgcagcactacttgtcttgtatgcaaatatagagcagttgcaaaagcttcatggaaattcaaaaattattaaatcaactgcttgttgtaatcttaatatagcaaaaaaatttcagattttaggcttttgggacttgatgcgagagcgccgtcctaactttaaggatgcgaaggttcccggggttcctatctgtactgcttcatccgaggataaagagggtggggcagagcaaacggagctccggtctgttatttcatatgtgaaagatatatttgaaagttctaaagaggatgaacagggcggattggctttcgctgcgattacggaatctgttgggaatgtttggcaacatgggtatgctaaagaattcgaactggatctccctgctcatttgcagaattggtggattgttgttcgtctaattgaggatcagctttttataggtgtttatgacatgggtgtgggtattccaaaaaccttgtccattaagccaaatatggttgatatgatgagagatacttatagtgccttgaaaaagctgctgaaaaagagtccgtcatttcccgtaagagcatttcgcgatgctgcaagtattaaggccgctgttgactatgggaagtctcgcttcaatactagcgggcgcggaaaaggtctatccgaagcaaaagattttgtcgaagcgaatccaatgggaacgctaatgatctatagtggtagtggttggtatcaataccaaacaaaggggcagaaggaggaggctaggccgcttccgtttgaatttcatggaaccttgattcaatggaatatcaagcttaaggtcccagggtga

SEQ ID NO: 330635 - DNA, 1233 bp, Pseudomonas aeruginosa
atgccgctcacggatactgctgtccgccaggcaaaagcagaagctaaagactacaccctcgccgacattgacggcctctctctcttcgtttcgcacaagggcaccaaaagctggcacttccgcttttcgctgaatggccagcagaagcgagtgtcgcttgggacgtatcccgagttgagcctgcgtgatgcccggcagcgccgtgacgaggcgcgttcgttggtggcccaaggtatcgatccgcgggggcagcatcgagcggaccggaagacggtcagcgtcgaggagacgtttcgacacgtggctgaacagtggctggagttgaaacaggggcggtgggcggacgatagccggaaaggcagcgcaaaccaggcgcgcagagtattggacaatgacctatacccggccctggcgaatatgaagtttcgcgaaattcaccgtcgtgacctggctgcggttgtcggagccatcgagcgccggggagcgctgcacgtcgcggagaaggcgcggagttggttgcgccagatcttccgcgttgggatcgcggccggattacgagaggacaaccctgcctcggacctggacattctggcgaaagaacagccgccgactgagcacaatccgattcttgcgcatgatggcgaagagcttccagcccttcttgtgagactgcggtcttaccaaggatccgagatcacaagggtcgccgttcgtttgatgcttctgaccgcggtacgtacgatcgagcttcgaaaggctgcgccggcagacttcgatctagaaaaggggatatggactgtcccgcccggaagggtgaagcaattgcgcggcaaggtgcgcaaggacggggaagaggtgccgccgtatatcgtgccgctgtcgcggcaagcgattgaggaggtcagggggttgctgcagaagacgggcaaatacccgttcgcgtttgctggtcgaaatgacccaacgaagatgatgagcgagaacaccatcaaccaggcgatcaagcgccttgggttcgatgggctgctgactggtcatgggttgcgagggactttctccactgcgctgcatgaaatgggctacgacacgacgttgattgaggggcaactgtcacatgcggatccgagtaaggccagggcggcttataaccatgctgcacatgtggaaaagcgaagggaaatgatgcaggcctgggctgattttctggatcagcgggagctggctgagggctga

SEQ ID NO: 330636 - DNA, 693 bp, Pseudomonas aeruginosa
atggatgatggagattttcgcaaggccaggggattcttagtaaccttctcaaccttgacaatacttgcatggtacttctcagtagaccttacttcctttagcatgttgggcgtcccactaagactgaaggaaaacaccgatgacatatggctggcagtatctttagttaacatatactttatatttagatatatccaaacaactcccgacccaatattcaagcaatacaacaaaataatagattatttccacgcataccttgtaaaattcaccatatcggaaaactttaaagagatagttgatatagcaaaaaagtcatgcgagacaggtccgcccaagaatgtgacattggtcgagccaaagccaagaggtgctatggcttttaaaatggcgggaagaagtgagctagatgatatattcgagtttggcctgactaagcgacgccctccagattaccgagtacgaatagatattccatatgtattttccatgaaaacaggttccctgggcgaagcatcgggaacattcataataaaaaaccctagtaaaataaccatttacagagcaagagtcctatctactataaaaggctctattctcaccccatggtttacagataaattattccccataatcctttctatctcatcatcattgctatcaataaataactggataaacataaaactataa

SEQ ID NO: 330637 - DNA, 291 bp, Pseudomonas aeruginosa
atgaccgccactccctactacctacgccaaacccacgccccggactgcgcctgctctgtgtgctggtccgcaaggcaggtcatcccattgcacagcccgtcgccgtgtccggactgccggccccctgggctgccctatcgggaagatggccgctggctctgccgtccccgttccttctgcgcgaaacacgatccgtcccggcgtccgccgaagtactggcacgttgtgtacgacagcgggaaacccacgcccttcgtgcccgtgcgcgaagcattccaactggagggctga

SEQ ID NO: 330638 - DNA, 1275 bp, Pseudomonas aeruginosa
gtgtcgatcaagatccaccacggccccaatggctcctacaagacctccggcgcgatccaagatgacgccgtgcccgcgctgaaagacgggcgggtgatcatcaccaacgtgcgcggcttcaccctggagcgggcctatcaggtcttcccggacctgcccaacacggcggaaatcatcaacctcgatctggagtcgctggaagacctcgaaaagatgcgcacgtggtttcagtgggcgccccgcggggccttcctgatcttcgacgaaacccaactgctgtttcccaagtcctggcgggaaaaagacctcgaacgcttcgactaccccggtggaccggaagcggcccacgcggccgaccgccccatgggctggctcgacgcctggacccggcaccggcatttcaactgggacattgtcctcaccacgccgaacatctcctacatccgtgacgacatccgcatgacctgcgagatggcctacaagcattccaacctcgcggtgatcggcatccctggccgctacaaggaggcccagcatgacgcccaactcaaccgtccgcccgccgatggcaccatcatcgagtacaagcggatccgaaagcagaccttcgccctctaccagtccacggccaccggcaagacccaagacaccaaggcgggcaagagcctcttccggtcgcctaagctggttcttctactggcattgctggccggcactattggctttgtctggtatatggggcctctgcgcacgattggcgctccggctgctgcgacacctgccgacgctcctggcgaccctgctcaagcccctgctgcgcccgctgctgtggctgctccagcgcgtcctgctgcgaatagctttcttcctcctgggcttgtacctgatgggcctgctgctgcgcctgttgatctgaacgcccatcccttcgctgatcggcggatctccatcctcgcccacgcctaccgcaagtcgcggggcgacatttacatgttcgccctggaggatcccacgggccggcgcctggaactcaccagttggcaactgatcggctccggctaccgggtgacgcccaagggcgagtgcgtcgtagagcttcgctatgaggactggaaacagaccgtcacctgtgccgggaggcaggccggcgcggtggccagcatcgctccggcagcgcctgtcgccgcgtccgcaaacgcaccggccaggggccagtcgccgctgaccatcgtccccgattccgaatacgcctcgcggccctggaggcacaaatga

SEQ ID NO: 330639 - DNA, 225 bp, Pseudomonas aeruginosa
atggacgagatgttgcggcgtaggctccgggcggagttactggaggtggggttcctcaaccagtgttgccttgacctgatggaaagcatggaggctgagttcagcctcactgatgaccagcgcgagtgcatcgagcagctcagccgatttctgcaggaagggatcggcaagctgacatctctgtccgagcgtgtggcggctggcgatattgtcgtgctttgttga

SEQ ID NO: 330640 - DNA, 873 bp, Pseudomonas aeruginosa
atgaaatctagattaaatgtactagctctaggtttgatcttcgcggcaagctcagcacttgccggcaatattgtccctcgcggccttaacagcgttggtaaacttgccgagtcccctaatggagtctaccgcctagagcttaccaatacaggcgaccttgccatctttgataaaaacaacaagttcatctggcgagctgacgagtccacagggattgttgggaagatgacaggtgatggctgccgacatgacggatggagaatgcaggtccatgagggcatcagcatcgaagatcgcaaagggtgttttaaatacctaaacaagatagatagcaacctgcctgcgaatgctggtgattacaccaactatgttttgcaggatgacggcaacttcgtcgcgtatcttacaaacatccgatggaaaacaggtgcgtatcgcgcagctgccgccggtgccactcagtcagttattattcctcccggcacggtcatgccgcgaggcaccgtatacgtgaatggcaattacagcttccgctttcagacagatggtaacttagtagtttatgatggctctactccgatctataatgcggaacttgacggcaagggcggggtcaaagcgcaaatgcagtacgacggtaacttcgtcgtctacgacgttaacgacaatgcgatttggcatacacacacagatgggaaccaaaatgcctacatggccttccagccagatggccatttgcttattgtgaaacaggatgtaatctgggcccgttttgggcaccagtcaacatactgggcaccggccaagccaggctctccgtttttcatccctctcggctggttgatcccagactccgtcagcaactggctttaa

SEQ ID NO: 330641 - DNA, 1230 bp, Pseudomonas aeruginosa
atgcatcccactccccgcctggctgccgcgctgctcgccggcagcgggctgggctggccgctgctcgcccaggccgacctggtcgaggacagccacgccagcctcgaactgcgcaacttctacttcaaccgcgacttccgccagagcggcgcgcgcgacaacgccgacgaatgggcgcagggcttcctcctgcgcctggagtccggcttcagcgaaggcaccgtcggcttcggcgtcgacgccatcggcctgctcggcctcaagctcgactccggcggcggcagcggcggaaccgggctgctgccggccgacggctccgccgggggttcccaggacgactacgccaagctcggcctgaccgccaaggcgcgggtctccaacagcctgctcaaggtcggcgcgctgcacttcaagagcccgctggtctcggccaacgacacccgcctgctgccggaactgttccgcggcgcgctgctcgacgtgcaggagatcgacggcctgaccctgcgcggcgcgcacctggaccgcaacaagctgaacagctccagcgactaccaggtgttcagcgccaaccgcatcggcgggcgcagcgatgccttcgacttcgccggcggcgactatcgcctgaccccggcgctgaccgccagcctgcaccagggtcggctcaaggacatctaccgacagaccttcgccagcctggtacacaccctcgacctcggcggacagcgttcgctcaagagcgacctgcgcttcgcccgggccagcgaggacggcggcttccgcgaactggacaaccgcgccttcggcgccctcttcagcctgcgcctgggcgcccacgcggtggccgccggctaccagcggatcagtggcgacgatccctatccctacatcgccggcagcgacccgtacctggtcaacttcatccagatcggcgacttcggcaacgtcgacgagcgttcctggcaactgcgctacgactacgatttcggcgcgctcggcctgcccggcctgagcttcatgagccgctacgtctccggcgacaacgtcgcccgcggcgcggccaacgacggcaaggaatgggaacgcgacaccgacctcggctacgtggtgcagagcgggccgctgaagaacctcggggtgaaatggcgcaacgccacggtgcgttcgaatttcgccaacgacctcgacgaaaatcgcctgatcctcagctacagcctggcgctgtggtga

SEQ ID NO: 330642 - DNA, 549 bp, Pseudomonas aeruginosa
atgcccgaaccgaccttccacgaactcgcgcaactgccgccgccggtcctgcgccaactgatccgccgcggcgactacaccggccataccagcggcctcggccagcgccacctgcaggccaacctggtgatcctgcagaaatcctgggccgacgagttccttcgcttctgtgccctgaacccccgggcctgcccgctgctcgacgtcagcgaacccggctcgccgcacttcgccaggctcggcgcggatatcgacgtgcgcagcgacctgccgcgctacagggtgcatcgacgcggtcaggagcccgtcgaggtgagcgacatcggcaccttctgggaggcggatttcgtcgccttcgccatcggctgctcgttctccttcgaacaggcgttgctcgacgccggcatcggcctgcgccacctcgagctggggcgcaacgtggcgatgtaccgcagctccatcgctacccggccgagcggtcgcctggccgggcccacggtggtatcgatgcggccgttgaaggccgccgaggcgatccgggcgatctag

SEQ ID NO: 330643 - DNA, 1101 bp, Pseudomonas aeruginosa; identical to SEQ ID NO: 323866

SEQ ID NO: 330644 - DNA, 705 bp, Pseudomonas aeruginosa
atggcgcgggttattgtcagaaatccaagcggggcggtcgttattgacgacagctttgtaaatacggcactgaaagcaaagggggcggtgactactgcgaatgatggcaatggagtcatttcggcggtggtctcgcacaccgcgatcagttctagcagactgccgatactggcgctatcctcgaatcagcttgtgtatctgtcgaaggtgcaaaggaatggcacatcagtttcttggaaggtggcaactcagtccgaggggagtgtttcgtattatattttcgatgacccatcatcaacttccgctgctggcagtcttgttttaagaaacgcagccacagatgtagtgactttcgatagtgatcttgattacttgaaagttgttggggtgtatgtcacccccaagggaacaggtgtcgctacttaccagcttccccctggcagggtctatgcgatagtccctctggcttcgtcatattctactcaagtaggtcccgctccttcgccaccgaatcctccgcctccctttccgccgaaatggcggattgagttgatggatgcaagcgcatctcgaatctctggaagcactctgacagttgagcgcgtaacggtatacaacaggcttttacagggcggagtgacaaaccaaacttactacagtggtggagattccgccgtaatgattgtcgatattacctctctttaa

SEQ ID NO: 330645 - DNA, 1437 bp, Pseudomonas aeruginosa
atgagcatgaacctggtcaccctcctgtacctcatcgcctcggtctgcttcatccaggccctgaaaggcctgtcgcacccgaccacctcgcgccgcggcaacctcttcggcatggtcggcatggccatcgccgtggccaccaccgtcggcctggtgttcaagctgggcgcggagatcgccaccaccggcgtcggctacatcgtcgtcggcctgctggtcggcggtaccgccggctcgatcatggccaagcgcgtcgagatgaccaagatgcccgagctggtcgccttcatgcacagcatgatcggcctggccgcggtgttcatcgccatcgcagcggtggtcgagccgcagtcgctggggatcgtcgcgcacctgggcgacaccattcccaccggcaaccgcctggagctgttcctcggcgcggccatcggcgccatcaccttctccggttcggtgatcgccttcggcaagctctccggcaagtacaagttccgcctgttccagggcaccccggtgcagttctccgggcagcacctgctgaacctggtgctcggcctggcaaccctcggcctgggcctggtgttcatgttcaccggcaacctcaccgccttcgccgtgatgctggcgctggccttcgtcctcggcgtgctgatcatcatccccatcggcggcgccgacatgccggtggtggtgtcgatgctcaactcctattccggctgggccgcggcgggtatcggcttctcgctgaacaactcgatgctgatcatcgccggctcgctggtcggctcctcgggcgcgatcctctcctacatcatgtgcaaggcgatgaaccgctcgttcttcaacgtcatcctcggcggcttcggcgccgaagccgacgccggcggcccggcgggctccaaggagcagcgtccggtgaagtccggttcggccgacgatgcctcgttcctgctgaccaacgccgacagcgtgatcatcgtccccggctacggcctggcggtggcccgcgcccagcacgcgctgatggaactggcggagaagctgacccatcgcggggtcaccgtgaagttcgccatccacccggtcgccgggcgcatgccggggcacatgaacgtgctgctggccgaggccgaggtgccctacgagcaggtgttcgagatggaggacatcaactccgagttcggccagaccgacgtggtcctggtgctcggtgccaacgacgtggtcaacccggcggcgaagaacgatccgaagtcgcccatcgccggcatgccgatcctcgaggcctacaaggccaagaccgtgatcgtcaacaagcgctccatggccagcggctacgccggcctggacaacgagctgttctacctggacaagaccatgatggtgttcggcgacgccaagaaagtcatcgaagacatggtcaaggcggtggagtga

SEQ ID NO: 330646 - DNA, 438 bp, Pseudomonas aeruginosa
atgcgacagatcgcgctggcggcgttgagtggcgctggagccggttcggagccgggcaaccctggccgcgaacctatttctggaccgggtaatgccggcgagcgaccccaccccgcgccgggattggtcggcgatcacaccgaacttcgccgaattgctatcgcgctcaagaacccgcagctcagcggggaggaggcctcgaacctgatggtgcgttacgaggccttgaccatgcctgaccacatcattgcgctgatcgacggacaggccaaggaggattcggccctccgcgagcttgaggaaagcctgctgatcctggagcactggatcgagcaagtcgggatgacggatggctacgtgggagtggttgagatcgaggccgtagaggcggtgatcaacgcgctgaggcgccagcaggcgggcgggaacggggcatga

SEQ ID NO: 330647 - DNA, 600 bp, Pseudomonas aeruginosa
atggaaaagagcagcagccagtcgaataaaggtgcaacctctcaagaaaacaacgccctgccggcagccggagatctgggtaagattcttcaggctgccgtcagccctaagggcgagctaactccccagcagcaggatgctcttgaaggcgttcttgagaaaatcgcaagcaaacaacccgggcttgtcgctcaagccgttatccgtcaagaagtgttcagcgggccaattccacacccgcaaatcctgaacggatacgacgagaagaccagagcccaaattctcgagatggctgcaaaagagcaatctcatactcatgagatacgcaaaacggggctgtcaggcgaaataaaaaaggacaagcgcggccagacctttggtttagtcgttgccgtaaccggccttctcacggctggctgggttgctcagtacagcgctgtagcagcatcaatcataggctcccttgaccttgtgacaatggtggcaatttttgccgttcccagagccttcgaaatgatgatggctgttcgtgctcaaaaagctcaagaagagcagcaggcagccactaaaaaaccacctaacaaacctaaaagaaaataa

SEQ ID NO: 330648 - DNA, 948 bp, Pseudomonas aeruginosa
atgagcgccgccactcccctgatcgtccagcaggccgaagccgagcaactgctcgcccgtatcgacgtcctccaggccatgcgccagctgttcctcgacctggccgccggccaggcgctccagccggcccagcaactggtggagttccccgccggtcgcggcgacttcatcaactacctcggcgtgctcgcccaggaacaggtctacggagtcaagacttcaccctacatcgttcgcgaacagggcccgttggtcaccgcctggaccctgctgatgtcgatgcagaccggccagcccttgctgctctgcgatgccgcccggctgaccaccgcgcgcaccgccgccaccaccgcggtggcggtggatgccctggctccgaccgaggccggccgcctggcgctgatcggcagcggaccggtggcccatgcccacctgcaatacgtgaagggcctgcgtgactggcagggcgtgcgagtccattcgccgagcctggacgagcgccgcctgcaaagcctccgcgccatcgacccgcgcgccgaagccgccggcagcctggaggaagcgctggacgaagccgatgtgatcctgctctgcacctcctcggcccgagcggtgatcgacccgcgccaactcaagcgcccggcgctggtcacctcgatcagcaccaacgcgccccgcgcccatgaggtaccggcggaaagcctggcggccatggacgtctattgcgactaccggcacaccaccccaggctccgccggcgagatgctgatcgccgccgaacagcatggctggagccccgaggcgatccgcggcgacctcgccgaactgctcagcggccaggcgccacgtccggaataccggcgcccggcgttcttccgctcgatcggcctgggcctggaagacgtagccctggccaacgccctctaccgcctgcgccaggcaggctga

SEQ ID NO: 330649 - DNA, 1128 bp, Pseudomonas aeruginosa
atgatcgaagcggattacctcgtcatcggtgccggcatcgccggcgcatccaccggctactggctgtcggcccacggccgggtcgtggtgctggagcgcgaggcgcagcccggctaccactccaccggccgctccgccgcgcactacacggtggcctacggcacaccccaggtgcgcgcgctcaccgccgccagccgggccttcttcgacaacccgccggccggcttctgcgagcatccgctgctcagcccgcgtccggaaatggtggtcgacttcagcgacgatccggaagaactccgccgccaatacgaaagcggcaaggcgctggtgccgcagatgcgcctgctggacgcggaacaggcctgctcgatcgtgccggtgctgcgtcgcgacaaggtcttcggcgccacctacgaccccaccggcgccgacatcgataccgacgccctgcaccagggctacctgcgcggcatccgccgcaaccaggggcaggtcctgtgcaaccacgaagcgctggagatccgccgggtcgacggcgcctgggaagtccactgcgccgccggcagctaccgcgcggcggtgctgatcaacgccgcgggcgcctggtgcgacaccatcgccgggctggccggcgtccgcccgctgggcctgcaacccaagcgccgctcggccttcatcttcgccccgccgccgggcatcgactgccacgactggccgatgctggtcagcctcgacgaatccttctacctgaagccggacgctggcatgctgctcggctcgccggccaacgccgatccggtcgaggcccacgacgtgcagcccgagcaactggacatcgccaccggcatgtacctgatcgaagaagccaccaccctcaccattcgccgtccggaacacacctgggcggggctgcgctcgttcgttgccgacggcgacctggtggccggctacgccgccgatgcggaaggcttcttctgggtcgccgcccagggcggctacggtatccagacctcggcggcgatgggcgaggccagcgccgcgctgatccgccaccagccgctgccggcgcacctgcgcgagcacggcctggacgaggcgatgctgtcgccgcgccgcctgtccccctga

SEQ ID NO: 330650 - DNA, 633 bp, Pseudomonas aeruginosa
atgagcccgagccaagaccccagcctggagaactaccgggcgatcgccgacggcatcgccaccctgttcttcccccacgccgaagtggtcctgcacgacctgcgcagccagcgggtcgactacatcgccaacaacctgtccaagcgcgaggtcggcgacgactcggcgctggaagacatgctcgaaggcgatagcaacgagcgcaacatcggtccctacgagaagctcaactgggacgggcagaagatccgctcggtcagcaccgtgctgcgcgactccgccggccagccgctggcggtgctgtgcatcaacctgaacatcagcctgttcgagagcgccaaggcggcactcgacctgttcctctcgccgagcaagctgatcccgcaaccggacgcgctgttccgcgacgactggcaggagcgcatcaacaccttcctgcacggctggctgcggcagcgccagctcggcttgaacctgctgacccgcgagcacaagcgcgaactggtcctggccctgcacgccgagggcgcgttcaagggcaagagcgccgccaactatgtggccaacgtgctgaacatgggccgggcgacggtctacaagcacctcaaggagctgaaggaaggcggcgactga

SEQ ID NO: 330651 - DNA, 792 bp, Pseudomonas aeruginosa; identical to SEQ ID NO: 319732

SEQ ID NO: 330652 - DNA, 2295 bp, Pseudomonas aeruginosa
atgacaaataatagtgcgccaccacttgtcgtgaccagaggaaatgataatggttacgagcctgggtcgatggttattacgcatgtacaggctagtgggctagacataatccagtacattacaggtcggtcaagctacggtactccaccatttgtcccgccaggaccaagcccgtatgttggccctggaatgcaagagtacaggaggctaagagatactcttgataagtcccattcagaactcaagaaaaacctgaagaataaaaccttgaaggaggtggatgaactcaagagtgaagcggggttgccagttaaagcggtcagtgccaatgacatccgcgatgaaaagagtatcgttgatgcactcatggatgccaaagcaaaatcgctaaaggccattgaggatcgcccggccaatctttatacggcttcagactttcctcagaagtcagaggcgatgtaccagaatcagttgctagccagtcgaaagttctatggagagttccttgatcgacatatgagtgagctggccaaagcgtacagcgctgatatctataaggcgcaaatcgctatcttgaaacaaacgtctcaagcactggagagtaaagcccggtcaatggaggcgcaagcccagcaggtcactcaacagctcggtgccgacttcaacgcgatcaccactccgaccgccaccaaggtccagcaacgtgtgaaagcagtggatgctagtctgtctcaggtttccacccaggtcagtggtgcagtcgcctcggcaacccaggcggtgcaggtcaagacagcgcaagcccagcaacaagccaacagccagatttcgtccagccagaacctgatcagcgcggcatttcggaatcagattgccttggcagcacaggccagtggagaagcccaggtcacggctttcaacaccaaagtcaagcagatcgtcaacgaagccacggcgttttcgacagcacgaaaacaagcgctggctcagtttgctgccaatgcggccgccgaggtcgaaaccgaggtcaacaggctaaccgcccaggtcaaggcaagccccaccaaggcggcttcgcaagctgcacaagcaacccttcgacaattcactgaaagcacctatgccaaggtgaacacctatgcccagcagaccgaagcagagctgcaggccaaagccaaggaggtttcggcagcggtagccgaggcacagcgtgcggcgaccaacgatttgcaaaaaacagccgatgtagtaccaggtcagatcatccaggctgcgaacaccttggcgatgccggctacctctacgccgctggtttcggtggccgggtttggtagtgcggcagtggagacggctcgcctggcggcttccctaacgaatgctgtcaatcgcctggttcagattgctggtagtggacccggcgcatacgttgccaccttcgcggtgctgtcgctgtattccgaccaggctggtaaagacagtgacaaggttcctgccggcgttcgcaatgcattggcactggaggcgtccgctctggggcttcctggcacggctgatttgcaaagcgtcgccaaggcaggtggcacggttgatatgccggtacgactcacgagtgctgcacaagagagcccgagtggtaaatcgcagattgccgcgatgttgaccaacggtgcaactgtccccaagggcgtgcctgttcgcgccgcgaccctcaatgctgcgacgggccggtatgaggtgacggttcccgcaaagtccaccgtgccgaatacaccaccgctgatcttgacctggacccctgccacccctccaggaagccagaacccctcaagcaccactccggtcgtaccgcagccggttccggtgtatgagggagcaacgatcaccccagtacaggccgagccggagtcctatccgggagtgccgttagatctggacgatctgatcgtgatcttcccggtgggctcgggggttaagccaatctatataatgttcaatcataaccctcatgatgttgttattgatgataagatcagagagcaaattccaattagagggtggactgaggttgaaattagagatgttatcggaaaaggtgcaacaggtagttcttcagataagcgtcggcctaataagacgatagatgggctggggcggaatgactctgcaacagtatatggaagtcctcctaatggatatatagttgtgaacgataggacaggtgaaattattcaaattgcagatcggaacgattccgcatgggcggttgacgggcgaatcatctggagaaataagtaa

SEQ ID NO: 330653 - DNA, 990 bp, Pseudomonas aeruginosa
atgacgcccttcgcctatgccaagccggccgacatcgagcaggcgctgggcctcgccggtccggagtcgcgctacatcgccggtggcaccaacctgctcgacctgatgaaggaaaacgttgccaggccccggcgactcatcgacatcaccggcctcccgctgcgcgacatccgccggacgcccaccggcggcctgctggtcggagccctggtcagcaacgccgaactggcctggaatcccgctgtggaggcggactatcccttgctagcccaggcgatcctcgccggcgcctcgccgcagttgcgcaacatggccagcaccggcggcaacctgttgcagcgtacccgctgccagtatttctacgacaccggcacgccatgcaacaagcgcgagccgggcagcggatgccccgcgcgcagcgggctgaaccgcaaccatgcgatcctcggcgccagcgaacactgcgtggcggtacatccatccgacctgtgcgtggcgctggcggcgctggaggctcaggtactggtgcgcggccgcgctggcgagcggcgggtcgctttcgccgacttccatcgcctgccggcggacacgcccgagcgcgacaactgcctggccgtcgacgaactggtcaccgccatcgagctgccagcgccgcgcttcgcccggcattgccactacctgaaggtgcgcgaccgggcctcctacgccttcgccctggtctcggtggcggcggccctggaaccggacggcgagcgcattggcgaactgcgcctggcgctcggcggcgtggcccacaagccatggcgcgtcgcagagctggaggaacgtttcaggggccacccggcgaaccgggacagctatgtccgcttcgccgaagcgctgctgcgtgacgccaggccgctggcccacaacgccttcaagatcggattggcgcgcaacaccatcgttcgcgcactggaagaagcccactcgggagggatcggccaatga

SEQ ID NO: 330654 - DNA, 864 bp, Pseudomonas aeruginosa
atggacgacttgacctacaccctgcggcagctttgccagcgcaaccgtgacggcagctacaacacacaggccgaccggatgcgttcgctgttgctggtcgcgcggcaactaagggaggccggtttccggcagatgaaggcttcgtcgctcaagggcaagcacgtccatacgttgctggatcgctggcggggagaaggcttgtcgtccggcactatcaagaatcggctttctcacctgcgctggtgggcagagaagatcggcaaggccggcattctgccctcggacaacacacagcttggcgtgcccgagcgtcgctacgtgaccaatatcagcaaggctcgcgaaccggatgacaggctggccaagatcactgatccccacgtccgtgtaagtctacgcttgcaggccgccttcggtctgcggcgggaagaatccatcaagttccagcctcgtcacgctgacggtggcgaccacatcgctatcaagggttcatgggccaagggcggacgcgaccgcacagtgccgatcacgacgccggagcagcgtgcggtgctggacgaagcacatcggctggccgggtcgggctcgctgatcccagcgcacaagacctacatccagcagcggcatgtttacgacggccactgcaaggcggcgggtttgagcaacatgcacggactgcggcatcggtacgcgcagatgcggtatgaggcactcacaggctggaaagctccggcggcgggtgggccagctcaagccctgttcagcgcaagccaacgaacaattgaccagcacgcccgacagcagatcagccgcgaactcgggcatgaaagactgaaagtaacgtcgatctatctgggtacctga

SEQ ID NO: 330655 - DNA, 258 bp, Pseudomonas aeruginosa
atgacccaaccagacttgagccaacggctggacagcctggtcgctacttgggaaaacgaggtggtggaattcaagcaggctggcgataactacagcaccgacgatatcggcaagtacttctctgcgctagcaaacgaagccaacctgcgcggaagcgatggcgactggctggtgttcggcgtgaacaacaaaacccgtcgcgtggtcggcacggactaccgtctgcaatccgaacgcttgcattcgctgaagatgtag

SEQ ID NO: 330656 - DNA, 3153 bp, Pseudomonas aeruginosa
gtgagcgtaaatgaacaacaactcgaagacgccgccatcggctggtttggcgaactgggctggcaatacgtcaatggtccggacattgcgccagatggcgacagccctgcccgtactgactatcgccagaccgtactgcgagaacgcctcctggcggcgctatcccgcatcaacccccatgttcccgccgcggcgctggagcaggcggcacacgagcttctgacggtcagcgagccgctgctgatcgcccgcaaccgccgcgtgcatcggctgctgctgtccggcatccccgtcgagttctccgaaggcgaggaaaagcgcaccgacctggttaacctgatccacttcgccaacccacgcaacaatgacttcctgctggttagccaattcaccgtggccggcaccaagcagccgcgccgtcccgatctggtggccttcgtcaacggcctgccgctggcggtgatcgagctgaagaacccggccaacgagcagaccgacatctgggatgccttcaaccagatccagacctacaaggaagagatcggagacctctttaacaccaacgtggcggtggtggtcagcgacggcttcacggcgcgcctgggttcgctgacggccaaccaggagcgcatgcagccctggcgggcgattgccaatgaggacgaccggccgctgctggagttcgaactggaaaccctggtgcgtggcttctttgagcctgcgctgtttctggactatgtccgccacttcgtgctgttcgagcaggatgccgatgagatcatcaagaagattgcgggctaccaccagttccatgccgtgcgcgaggcggtgaaagccacggtgatcgccgccagcaacccgaacaagggtcgtctggaagtgcaggagccgcgcgccacctatggtaaggaagtgcagcccggcagccgcaaggccggcgtggtgtggcatacgcaaggctcgggcaagagcatcaccatggcctgctacgcgggcaagctgttgcagcagccggagatgaagaaccccacgctggtggtggtgaccgatcgcaacgatctggacgggcagttgtacggcaccttctgcgcggccgaagacctgctccggcagacgccggtgcaggcgggcagccgcgaggaactgcgcgagatgctggcctcgcgcgaggcgggcggcatcatcttcaccacggtgcaaaagttcgccctgctggaagatgaagaacagcatcccctgctgtcgggtcgcagcaatatcgtggtgatttccgacgaggcgcaccgcagccagtacggcatgaagggacggctggataccaagaccggcaagtacgtgttcggctatgccaagcacatgcgtgatgcactggccaacgctaccttcatcggcttcaccggaacgcccatcgcgctggaagacaaggacacacgggcggtgttcggcgactacgtcagcatctacgacatccaggatgcggtggacgatggcgccacggtgccgatctactatgaaagccgcctggccaagctggacgtgaaccaggccgagatcgacgcgctgaatgcccaggtggacgaggtcatcgaggacgaggaagacatcaccgcccgcgagaagaccaagagcgattgggccgcactgaccaagctggtgggcgccaggccacgtctggaacaggtggcggccgacctggtgcagcatttcgagacgcgcacggccacgctggaaggcaaggcgatgatcgtgtgcatgagccgcgacatctgcgcggagctatacaacgccatcgtcgccctgcgcccggactggcacgacgccgaccccgaaaagggtgctatcaaggtggtgatgaccggctcggcagcggacaagcccttgctgcaaccgcacctgtacagccagcaggtgaagaaacgtcttgaaaagcgcttcaaggacccggcagacccgttgaaactggtgatcgtgcgcgatatgtggctcactggcttcgacgcgccctgctgccacaccatgtatgtggacaagcccatgaagggccacaacctgatgcaggccattgcccgcgtcaaccgggtgttccgcaacaagcccggtggattggtggtggattacatcggcattgccaacgaactgaaagcggcgctcaagacctacaccgaatccaagggcaagggcgacccggcgcacaacgcggccgaggccctggccgtgctgctggagaagttggacatcgtgcgtgggctaatgcacggcttcgactacagtgggtttgaaaccgatgcgatgaagctgctggtgccagtggccaaccatatcctggggctgaaggacggtaaacagcgtttcctcgatgccatgctggccgtgagcaaggcgttttccctgtgcagcacgctggacgaagctgccgccctgcgcacggagattgccttcttcgccgctgtcaaggctgccatcgtcaagttcaccacggtggatcgcaagcgttccgacgcggacaagaacagtgcgctcaagcagatcctggacaacgctatcgtggcggacggggtggcggacatcttcgccctggcgggcctggacaagcccaacatcggcctgttgtcggaagaattcctggaagacgtgcgacagatgaagagccgcaacctggcggtggaactgctcgaaaagctgttgcgtgacgagatcaaggcgcgggcgcgtaacaacgtagtgcaggagaagaagtacggcgaccgcctgctggaaaccttgcgcaagtaccacaaccgagcggtggagacggcacaggtcatcgaggagttgatccagatggccaaggacttccaggcagcgctggagcgtgaagcagcgctggggctgaatccggacgaaatcgccttctacgatgcgctggccaacaacgaaagcgccgtgcgggagttgggcgacgataccttgaagaagatcgccgtcgagatcaccgagaaactgcgcaacagcaccacggtggattggcaggtacgcgagagcgtacgcgcgaaactgcggattctggtgcgacgcacgctgaagaagtggaagtacccgccggtgggtgaggatgccgccatcgaactggtgctgaagcaggcggaatcactgtcgaacgcttggtcgaagtga

SEQ ID NO: 330657 - DNA, 1311 bp, Pseudomonas aeruginosa
atgagtgttgcagaaatgttctcggagttcattggtaatttggcgataagcaatgctgaaaccataagcatgcgctacggtgaattaactgctgcactcaacaaacaattccgggatacagaatcaaagacggccaatacgcttcaggttggctcatttggtagaagaaccggtattaacggaatctccgacttggacatgctctatatcatgcctcagaccaaatgggatgattatgacaagattggtgggcagttaaaacttttgcaagacacaaaagatgcgattctcaaacgctatccatcaacgaaagttcgagttgatcgcctagtggtaacagtgacctacacgaactttcatgtcgaagtgcagcctgtttttgagcaggatgacaagagctacaagtatcctgataccaaaaatggcgggagctggaaggtcaccaagccaagagaggaaatggatgcggttgccaacctggatgcagtcaagaactcaaatctgcgtcgtttgtgcaagatggtgcgtgcctggaaaaacaaacacggtattggtatcggtggattgttgatcgatacgttagcttataactttctgaattccacctcggactatgacgaaaaaagctacctttactacgactggctaagtcgagattttttcaagtatatctctgaacttccagaccaaagcgaatatgccgcgccgggcagtcggcagcgggtaaaagtcaaaaagaagttccaacggcgggccaagaaggcctacgaactttgcctgaaagccatagaggctgaaggaaaagaaagcgccaacgagaaatggaaggcggtttatggtcgcccatttcctgctgcacaaaaaaaatcggctgaagccagcgctgcacaaacttggaaagataccgaggaatttattgaagataaatttcaggttgatatacgctatcaactaaaaattgattgcgaagtgatgcagcgcggatttcgaaaattccttctccgcaatatgttggggctaaaaatcccgctaagatcagacaagaagctgaagttctgggtatctgaactgccgcagattaacggcccatttctaatctactggaaagtcctaaataggggcgacgaggcacgccggcgtgactgcgttcgtgggcaaattacgctcgatggcgggtggcgaacaaaagaggaaagcagtaactttcgaggagatcatatcgttgagtgctatctcgtcgaaaatgagactgtggttgccaaggatagaattcatgttccaatcgtagcagatggaagcgactatgactga

SEQ ID NO: 330658 - DNA, 1278 bp, Pseudomonas aeruginosa
atgcaatctgatgctagttggaaagagctcaatctgggtgatgtgattgagttgaagcgtggttatgaccttccaaaaggaaagcgatcggtaggagtgattcctatagtttcatcatctggcatatcagatttccattcagaagccatggtcaagggtcctggagttgtgacggggcgatatggaaccataggtgaagtgttctatatagatggcgatttttggcctttaaacacgacgctttatgtttgcgactttaaaggaagcgatcctcgcttcattagttattttctaagaacgctggattttcaggcttactcagataagggggccgttccgggcgttaacagaaatcaccttcatacagcaaaggtcagaattcctgcgctgcctgtacaaaaagcaattgctaggattttggacgcgcttgattcgaagatagaccttaaccaccgcatcaaccaaaccctcgaagccatggcgcaagccatcttcaaatcctggtttatcgatttcgacccagtcaaggccaggatcgcagccatcgaacaaggtcaagacccgctgcgcgccgccatgcgcgccatcagcggcaagaccgacgccgaactcgaccagatgccccgcgagcaccacgaccaactcgccgccaccgccgcgctattttccgatgcaatggaagagtcggaattgtgggagattccgaaggggtggggaattaaatccgtctctaatatagcgcgctttgcaacgggtaagattgaagtgtcttctctgactgttgagaactatatttccacagaaaatatgctggaaaaccggggcggcataagccatgcgtcgtccctcccagcagtcgctaccgtgccgactttcgagagtggaaatgttctagtttccaacatcaggccatattttaagaaaatatggttagcccgttttgacggagggcgatcaaatgatgtgctctgtttcgaggcgaaggaagacggctgccaagagtttctgtacaacttgctctatcaggatatttttttcgagttcatgatgcgcacgtcaaaaggggcaaaaatgccaagaggggacaaggaagcaattgctggctggaaatttccttgcgcgcccttggagctgaggaaagccttctcaaaaaaggtgcgcacattctactcgtacattgaaagtatcaatctagaatcgaaacagctatctgaacttcgcgacacccttcttcccaagcttctctctggtgatttgtctgttgcggatctgaaatga

SEQ ID NO: 330659 - DNA, 1716 bp, Pseudomonas aeruginosa
atgagaccgatcgaacaacaattcttcaacgacctggaaaaaaagctctggaccgctgccgacaagctacgttcaaacctcgatgctgcggtgtacaagcacgtcgtgctcgggctgatcttcctcaagtacgtctccgatgccttcgaagaacggcagcgcgaactgcgcgagcagttcaccaacccggatcatgactactacatggatccggccgaatacggcggcgcaggcacccaggagtacgaagacaacatcgccgtcgagttggaagtgcgcgactactacaccgagaagaacgtgttctgggtcccggtggaagcgcgttggcaaaccctacgcgattgcgcgcaactgccgcccaaggcggcgctgccgtggaacaagccgggcaaggacgagccggaggaaatgcgctcggtcggctggctgatcgacaacgccatggaggctgtcgagcgcgagaacgcccgcctgaagaacgtgctcaacaaagacttcgcccgcgtgcagctcgattccagcaagctggccgggctgatcagccacttctcggataccgacttcagcgccaaggagtacaagggccagccgctggacctgaaatccaaggacatcctcggccacgtctacgaatacttcctcggccagttcgccctggccgaaggcaagaagggcggccagtactacactccaaagagcatcgtcaccctgatcgtggaaatgctccagccatttaaaggccgtgtttacgacccggccatgggctccggcggcttcttcgtgcaaagcgaggagttcatcgaacagcacggcggcaaagcagccaatggcaagagcggacaaatcagcgtctacggacaggagagcaaccccaccacctggcggctggccgcgatgaacatggccattcgcggcatcgacttcaacttcggcagcggcccggccgacaccctgctcaacgacctgcacccggacctgcgcgccgatttcgtcatggctaatccgcccttcaacatgaaggaatggtggaacgaaaagctggccgccgacccccgctggatcgccggcacgccgccgcagggcaacgccaacttcgcctggttgcagcacatgctctggcacctggcgcccaccggcagcatggcgctgctgctggccaacggctccatgagttccaacaccaacaacgagggcgaaatccgcaagcggctggtcgaggacgactacgtggaatgcatggtcgcgctgcccggtcagttgttcaccaacacccagatcccggcctgcatctggttcctgacccgcgacaagcagaacggctttgctctggacaagaaaaagcgcgaccggcgcggcgaattcctgttcatcgacgcccgccagatgggctacatgaaagaccgtgtgctgcgcgacttcactggggaggacatccagaaaatcgctgataccttccatgcctggcagcagggcgaggggtacgaggatgtggctggcttctgctattccgccaagttggacgaaatccgcaagcatgagcatgtgctgacgccggggcgctatgtgggcgcgatggagcaggaagatgacggcgagccctttgccaagaagatgcagcggctaacgacacaactggcggagcagttcgtggaaagtgcgaagctggaggaagaaatccgacagaacctggcgggattgggttatgcaatctga

SEQ ID NO: 330660 - DNA, 1236 bp, Pseudomonas aeruginosa
atgagtgcggcttttatcaaccgtgtcgcacgagtattagtaggcaccttgggagcacagctcataacgattggtgtcactctgctactggttcgtctgtattctcctgctgaaatgggcgctttcagtgtttggctatcgttcgctacgatttttgcagttgtagttactgggcgctatgagttggctattttttcgactcgagaagagggcgaactccaggcaatcgtcaagctgatacttcagttgacactattgattttcgttgccgtggcgattgctgttgttataggtagacatctgattgagtcgatgccagttgtgatcggtgaatactggttcgcattggcggtggcttcgctggggttggggataaataagctagtcttgtcgttacttacatttcaacaatcttttaatcggttgggagttgctcgtgtaagcctggctgcatgtattgccgttgcacaagtttcagctgcatatttactggagggcgtatcagggctgatctatggccagctgtttggtgtcgtcgtagccacggcgcttgcggccctttgggtaggaaagtcgctgattttaaattgtatcgagacaccgtggcgtatggtacgacaagtagcggtacagtacatcaatttcccgaagttttctctgcctgcggatctggtcaacacggttgccagtcaggtgcctgtgattttattggcggcaaagtttggtggagacagtgcaggctggtttgccctgactctgaagataatgggagctcccatttccttgttggctgcttcggtgctcgatgtgttcaaagaacaagccgctcgtgactaccgagagtttggtaattgccgaggtatcttcctcaagactttcaggttgcttgccgtcctcgcgctacctccttttattatattttggttcattggcgagtgggcctttgggttagtctttggcgaagcgtgggctgagtcggggcgttatgctgtattgatggttccgttgttttatatgcgtttcgtggtgagtccgctcagctatacaatctatattgcccagcggcagagtatggatttgttgtggcagctagccttgttgctcctgacgtttatctgttttaccttgcctgactctgtcgactcggtgttgtggttttactccatagcatatgctgttatgtattttgtctatttctggatgtccttccagtgtgccaagggagatgccaagtga

SEQ ID NO: 330661 - DNA, 1317 bp, Pseudomonas aeruginosa
atgtatatacttgctcgagtcgacaggtctattctgctgaacacagtgttactgtttgctttcttttcagcgacagtgtgggtgaataataattatatctatcatctctatgattatatggggtctgcgaaaaaaactgtcgacttcggcttgtatccgtacttgatggtcttggcgctcatctgtgccctgttgtgtggaggggcaattcgcaggccaggtgatctgttagttacattattagttgtaatacttgttcctcattcattggttcttaatggagctaatcaatattctccggatgcgcaaccatgggctggcgtgcctctggcaattgcttttggtattttgatcatcggcattgtcaataagataagattccatccgctaggtgcattgcagcgagaaaaccaaggaaggcgaatgttagtgctactgtcagtactcaacatagtagtgcttgtgtttattttctttaaaagcgctggttatttttcctttgactttgctgggcagtatgctcgccgtgcacttgctcgtgaggtttttgctgcgggttctgcaaacggctacttgtcgtcaatcggtacccaggcattctttcctgtgttgtttgcctggggggtctacagacgacaatggttctacttggtcctgggtattgtcaatgcactagtgctgtggggagcgtttggacagaagtatccttttgtcgtgttgtttctaatttatggcctgatggtttattttcgacgattcggtcaggtcagagtgtcttgggttgtctgcgcactattgatgcttttgcttttaggggcgttggaacatgaggtgtttggctattcattcttgaatgattattttctacgtcgtgcttttattgtgccttccaccctgttgggggcagttgatcagtttgtgtctcagttcggatccaattattacagggataccctgttgggcgcgctcttgggtcagggtaggactgagccgttgagctttcgtctggggacggaaattttcaataatcccgatatgaatgcgaatgtaaacttcttcgcgatagcctatatgcagttgggttatgtgggggttatggctgagtcgatgttggtgggcggtagtgtcgttctcatgaatttcttattttcgaggtatggtgcattcatggccattccggttgctttgttatttactacaaagattcttgagcagtccctgctaactgtaatgcttggctctggtgttttcttgatgctgcttttccttgcgctaatttcttttccactcaagatgtctttaggaaaaactctatga

SEQ ID NO: 330662 - DNA, 1080 bp, Pseudomonas aeruginosa
atgattgaattcatcgacctgaagaaccagcaagcgcgtatcaaggacaagatcgatgccggtatccagcgcgtgctgagacacgggcagtacattcttggcccggaagtcactgagcttgaggatcgcctcgccgatttcgtcggcgctaagtactgcatcagttgcgccaacggtactgacgctctacagattgtgcagatggccttgggtgttggcccaggtgacgaagtaatcacccctggttttacttatgttgcgacagcggagaccgtcgcgcttttgggagccaagccggtttacgtggatattgatccacgcacctacaatcttgatccgcagttgctggaggctgcgatcacaccgcgtacgaaggctatcattcctgtttcgctgtatggccagtgtgcagacttcgatgcaatcaacgccattgcctccaaatatggtatccctgtcattgaggatgctgcacagagcttcggtgcttcgtacaagggtaagcgttcttgtaatctgagtaccgttgcctgcaccagcttcttcccgagcaaaccgttgggttgctatggggatggtggagcgatcttcactaacgacgatgaactggctactgctattcgtcaaattgcccggcatggtcaggaccgccgctatcatcacattcgtgtgggggtgaatagtcggttggacacattgcaggctgcgattcttctaccgaagcttgaaattttcgaggaggagattgcgttgcgccagaaggtagccgcggagtatgacctatcactgaaacaggtcggtatcggcacgccgtttattgaagtgaataacatcagtgtttatgcccagtatacggtgcgtatggataatcgagagtctgttcaggcttctttgaaagctgccggggttccaactgctgtgcattaccctattccgcttaataagcagcctgctgttgcggatgagaaagcgaaactaccagtgggtgacaaggctgctactcaagtaatgagcctacccatgcatccctatctggatacggcatccatcaaaatcatctgtgctgcgttgacgaattga

SEQ ID NO: 330663 - DNA, 576 bp, Pseudomonas aeruginosa
atgagttattatcagcaccccagcgcgatcgtcgacgacggtgcgcagatcggtagcgactcccgagtttggcacttcgtgcacatctgtgcaggtgcccggattggcgcaggggtttcgttgggtcagaacgtattcgtcggcaacaaggtcgttattggtgatcgctgcaagatccagaacaacgtgtcggtatatgacaatgtcactctcgaagagggcgtgttctgcgggccgagcatggtatttaccaacgtttacaacccccgctcgttgatcgagcgcaaggatcagtaccgtaacacgttggtaaaaaaaggtgccacgcttggtgccaactgcactatcgtctgtggcgtgactattggtgaatatgccttcgtgggtgcgggtgcggtcattaacaagaatgttccatcttatgccctgatggtaggcgtgcccgctcgacagattggttggatgagcgaattcggtgagcagctgcagctgaacgagcagggcgaagctgtctgctcacactccggtgcgcgctatgtactcaatggaaagatcctgagcaaggtggacgtgtga

SEQ ID NO: 330664 - DNA, 1890 bp, Pseudomonas aeruginosa
atgtcatctagtagctctaaattgctgaacggtatggtcgcggtaagttcaggcagaaacattcggctggatgtccaggggctgcgggctgttgcagttctggctgtgctagcttaccacgccaacagtgcctggctcagggctgggtttgtcggcgttgacgtgttcttcgtcatttccgggtttatcattaccgccttactggtcgagcgcggtgtaaaagttgatctggtagagttttacgcgggccgtatcaaacgtatttttccagcctatttcgtcatgttggcgattgtctgcattgtctcgacaattctgtttctgcctgatgactatgttttttttgaaaaaagtctacagtcatctgtatttttttccagtaatcactatttcgctaattttggtagttactttgctccgagagctgaagagctgccgctgctgcatacttggtcgttggccatcgagatgcagttttatctgttctaccctgtactgttcatgtgcctgccatgtcgatggcgcttgccggtgttcatcctattagctattttgctgttcatttggagtggctattgcgtattcagcggcagccaagatgctcagtacttcgccttgctagctcgtgtacctgagttcatgtcgggagctgttgtcgcattatcattacgtgatcgtgagctacccgccaggcttgcgatacttgcggggttattgggggcggcgttgctggtctgctccttcattatcatcgacaagcagcactttcccggattctggtcgctcctgccatgcctgggagccgctctgctcattgctgcccgacgtggccctgccagcctgctgctggccagcaggcccatggtctggataggtggtatctcctattcgttgtatctgtggcactggccaattctggcattcatccgttactacaccggccaatacgaattgagcttcgtggcgctgttggcatttctcacaggttcgttcctgctggcctggttctcataccgctacatcgagacacctgccagaaaggctgtgggtctgcgccagcaggcgctgaagtggatgttggccgccagtgtggtagctatagtggttacggggggggcgcagttcaatgtgttggttgtggcgccggcgccaattcagttgacgcgctacgctgcaccagagtcgatctgccatggtgttcaggtaggggagtgcaagcgaggcagcgtcaatgccgtaccccgtgtgctggtgatcggtgatagccatgctgcgcagcttaactacttcttcgacgtggttggcaacgagtcaggtgtggcttaccgagtactcaccggaagcagttgtgtgcctatacctgctttcgatcttgaacgtttgccccgttgggcgcggaaaccctgccaagcgcagattgatgcagttgcccaatcaatgttgaactttgacaagatcattgtggcgggcatgtggcagtatcagatgcagagtccggcatttgcccaggctatgcgtgccttccttgtcgataccagctatgccggcaagcaggtcgttctactcgggcagataccgatgttcgaatcaaacgtgcagcgtgtgcgtcgtttcagggagctgggtttgtcagctccgcttgttagctccagctggcaaggtgcgaaccagctgttgcgtgctctagccgagggtattccaaacgtacggttcatggatttttctaccagcgccttcttcgccgatgctccttatcaggacggagagcttatttaccaggatagccatcaccttaacgaggtgggggctcgccgctatggatatttcgcgagccgtcaattgcagcggctgtttgaacaaccacaatcgagtgtgagtctcaagccatga

SEQ ID NO: 330665 - DNA, 951 bp, Pseudomonas aeruginosa
atgaaaaatttcgctctcatcggtgctgccggctacatcgctcctcgccatatgcgcgccatcaaagacaccggtaactgcctggtttcggcctatgacatcaatgactcggtcggtattattgatagcatctctccccagagcgagttttttaccgagttcgagttctttcttgatcatgcgagcaacctcaagcgcgactctgctaccgcgctggactacgtatcgatctgctcgcccaattacctgcactacccgcatatcgctgcaggtctgcgcttgggttgcgacgtaatctgcgaaaagccgcttgttccaaccccagagatgctcgatcagttggctgttatcgagcgcgaaaccgataagcgcctctacaacattctgcaactgcgtcatcaccaggcgatcatcgcattgaaggacaaggtcgcccgcgaaaaaagtccgcataagtacgaggtcgatctgacttacattacttcccgcggcaactggtatctgaaaagctggaagggagatccacgtaagtcgttcggcgtggctaccaacatcggtgtgcacttctacgacatgctgcacttcatctttggcaagctgcagcgtaatgttgtgcacttcacttccgagtacaaggcagctggttatctggagtacgagcaggcccgtgtgcgttggtttctgtccgtggatgctaacgacctgccggagtcggtcaagggcaaaaagccgacctatcgttcgattaccgtcaacggtgaggaaatggagttctctgaaggctttaccgatctacatacaaccagctacgaagaaattctcgctggtcgtggttatggcatcgatgacgctcgtcattgtgtggaaactgtcaataccattcgcagcgccgtcatcgtaccggcctctgataacgaagggcatccgttcgtcgcggcgcttgcgcgttga

SEQ ID NO: 330666 - DNA, 1311 bp, Pseudomonas aeruginosa
atgatagatgttaacacagtggtagagaagttcaaaagccgacaggccttgattggtatcgtgggtctgggttatgtcggtttaccactgatgctgcgatacaacgccattggtttcgatgtcttgggtatcgatatcgatgatgtcaaggttgacaagcttaatgccgggcagtgctatatcgaacatattccgcaagccaaaattgctaaggcccgtgcaagcggtttcgaggctacgaccgatttcagccgtgtcagtgaatgtgatgccctgatcctttgtgtgccgacgccgctgaacaagtatcgcgagccggatatgagctttgtcatcaataccaccgacgcactaaaaccgtatctgcgcgtagggcaggtggtttcgctggaaagtaccacctatccgggaactaccgaggaagagttgttgccacgcgtgcaggagggtggcctcgtggttggccgggacatctacctggtctattctccggagcgtgaagatccgggcaacccgaacttcgagactcgtaccattccgaaagtgatcggtggtcacactcctcagtgtctggaagtcggcattgccctgtatgaacaggccatcgaccgggtcgtgccggtcagttccaccaaggccgccgagatgaccaagctgttggagaacattcatcgcgcggtcaatatcggtctggtcaacgaaatgaagatcgttgctgatcgcatgggtatcgacatctttgaagtggttgatgctgcggcgaccaagccgttcggtttcactccttactacccagggccgggactgggcgggcactgtatcccgatcgatcccttctacctgacttggaaggctcgcgaatacggactgcatacccgcttcatcgaactgtctggtgaggtcaaccaggccatgccggaatacgtactgggcaaactcatggatggcctgaacgaggcaggcagggccctcaagggcagtcgtgtactggtattgggtatcgcttataagaagaatgtcgacgacatgcgcgagtcgccatccgtggaaatcatggagctgatcgaagccaagggtgggatggtcgcctatagcgatccgcatgtgccggtgttcccgaagatgcgtgaacaccacttcgaactgagcagtgagccgctgactgccgaaaacctggctaggttcgacgctgtagtgcttgcgaccgaccatgacaagtttgactatgagctgatcaaggccgaagccaagctagttgttgacagccgtggcaagtaccgctccccggcggcacacatcatcaaggcttga

SEQ ID NO: 330667 - DNA, 1047 bp, Pseudomonas aeruginosa
atgactgacgaaatacaaaagcacggcggtgtagctggcgatatcgatctggttgagctggttcgaggattatgggaggagaagtggatagttcttatattttctttgctaggtattttgtttgcagctatctacgcttttctcagtactcctgtctatgaggcccgcatagcgattttgcctccgtcgttgagtgatgtggcaggtttcaatcagggacgtaccagggaaaccgggcttggtcccttcaaggtccaggatgtgtactctgtttttgttcgcaacctgcaggctgatggaactcgtcatcgttttttcaatgagacctatttgccttctttggatgaagagcttcgttcggtttcgcgtgatgcgctctataaaaggttcactgatcagataagtattagtttgccggggaaagactttccgggtcgttatcttgttgcgattgaacaggaggatccggagcgtgcggcgagttgggttcgtcggtatatagctgatgcggccgagatttctattcaggaaatgttgaacaatgcgcatcgcgagattgaggtcaaggctcgagatattgagcagcgcatacagaacttgcgagagaatgccaaggcaagacgtgaagatcgtattgttcagctcaaggaggcgttgaaggtcgcaggtgcgctgaaattggaggagcctccactgatcagtgggcaatcctctgaggagctctcggctatcatgaatggaagtctgatgtatatgcgtggcagtaaggcgattatggccgagattcagacattggaggcgcgtagctctgatgatccttttattccggcgttgcgtactcttcaggagcagcagttattgctgagtagcttgcgtgttaattcggagcgggtttctgtttttcgacaagacggtccgatagaaacgccggactcaccagttcgtccaaggagagcgatgattttgatttttgggttgataattggtggtgtgcttggtggttttctggcgttgtgccggatttttttgaagaagtatgctcgttag

SEQ ID NO: 330668 - DNA, 198 bp, Pseudomonas aeruginosa
atgagtacaaaccttccccagctcgaacaaaccatcatcgagatagcgcgccaggaactggctgctgtggcggccttctatcgcaagaaggaaaaggggcccgtgaatggaaactttgacgaggcatggagcgaatacctaggtcgctaccatgcattgagtgacctgcccccagttttagtaccgctgcctagttag

SEQ ID NO: 330669 - DNA, 918 bp, Pseudomonas aeruginosa
gtgccttttgggcttttttcagctagtctacgcgccatttcaagtggtctatctcaaatgaaactgcttcactctttcgtaaccccgctacgatatccaggtggtaaaggccggctaggagtttggctggctgagttaattcagcataatggccttgagaatggcttatatgtagaaccgtatgctggaggagcaggtgcagcaatgttccttctagctaacaaccatgttgaaagaattgcaataaatgatctagacccggtagtccatgctttttggtgggctgtgcttaatgacactgaccggctagtcgagctagtaaaagagacaccagtaacgatggacgtctggaacgagcagcgcaatgtaattacagacaaagaaaataaagatctcaccacactaggattcgccaccttctttttgaaccgaaccaatcgatcaggaatcataaccggcggagtaattggaggaaaaaaacaagacggaaaatacttaatggatgcccgatacaacaaagaagacctagcaacccgcattcataacattggaaagatgagagatcgaatccagctattcaacattgacgccgtcaaacttctaaaacacaaagacctagagttaaccaataactctctaatttacctagaccctccatattatgaaaagggaagccagctatatcgaaaccactacaaaccggaagatcacgctcagattgccgaagcagtaacagttttgaaaaccccctggcttgtcacctatgacaactgcaaggagatagaagagctttacaagaatgaaagcaaaatagaatttcagctgcactactcaacacacctccaacgcccaaaggcgaaggaggttatgtttagtggaaacatcgacattcatactccccccaagcttaaacggtaa

SEQ ID NO: 330670 - DNA, 1248 bp, Pseudomonas aeruginosa
atgcttcatcttatcaaggatgtggcagagaatggattgaccactgcacctatattggtctgccctgaaggtgataaatgggttgtgtgggatggtaatagaagagttacgagtctaaagttgctttctaatccgaagctttgtgaagatccgatagttagggctaagattgagtctattaagaaaaaatataattttaccctaaggtctgtggagtgtctatggacagctaataaaaaggctctaattgaagaggttaagaaaaggcactcaggggaactaagtggggttggccaagttgattggtcctcatacttgaggactttattcttgctggggcatgacgaggtctcagaatataagagggctgggcagtatctttattggtttgaagaaaatggattggatgttgatgatggatttccaatctcaacgctgtcaaggtttttaaaaagagagaaccttctcaggttaggttttgaagtggttaatgacgagctggttcctgttctttcaattaatacggttaagaaaatagcggcgcgggtgattggggatcttcaggataagatagttaaagttgagcatgtatggacagaggctgcggctacaaagtatatagatggtgtgctgctcgcttgcggtgttactgaaaatgaatatagaaatatcgatgttgacagtaacggcggtgaggccccaacggatgagggaaaggaaaatgacgtgaaagatgatgattcgggctcaaagggaaaaccgacatctccccctggaagacccgcaaaacctcgttctgggagtagtaataaactgtttggtgttaaagggcatgggttggtaataccaaatgaagagaggaaagtgcatgatattgtaagggagttggctacattgaaacactccgggaaagacggtacgccgatttctgtagcttttctgcttagggcgctagttgaactaagctcggataactacctaaagaacaatccaggggctatccggaagttagagcttaataccagcttaagggaaaaggtgcgtggtgctgcgagggatatgtatcaaaaagaaattctgtctaaagatagagtggaggtcatggaaaggcactgcaatgaagaaggggggatgctaaatataaatacgttgcaaaggtacttgcattctacagcttactttcctaatggagagactctcaattctatgtggaacgagtttaaggattatgttatagcctgttggtga

SEQ ID NO: 330671 - DNA, 135 bp, Pseudomonas aeruginosa
atggggcagcaggaaatcatcatctcctcgctggggtatttttcacagatgttcggcactgtcctgatgggccaaggaaggatgaagcaggctgctaattatcgttttgcggagttgggcatctatcagaactga

SEQ ID NO: 330672 - DNA, 231 bp, Pseudomonas aeruginosa
atggaacgcaccgatctgtatccccttagcattgacatcggtgaccgcgaggtgtttctcaagacccactttctcaaagtcatcgatgaaggctatgcctgcgttgttgaacagcacatcaatggcgccagcactctcggacgcaaactcacccaatacggtggcaaactcattcggttgagtaacgtccaggcgacgatagaaatgaccttcgccgagtttctcttttaa

SEQ ID NO: 330673 - DNA, 852 bp, Pseudomonas aeruginosa
atgtttaatttgcaggataaggtcgtattaattactggcgcgggcggaggcattggtgccgcaaccgcacgagcaatgcatgccgtcggcgcgaaggttgtactgctggacgtaacagaaaacgctgtccaagagcttgcaacggagcttggcccacgaaccctggcgatgttcgcgagcgtcacctcccgcgaagatttggatcgggcggttgcgagggctgtagagacctttggtggaatcgacgtcgtgttcgctaatgcgggtatcgcctgtgatccgcccacgaccatcagaaatatggacgaggtgacattcgaacgagtcgttgaggtcgacctattgggtgtatggcggacggtgcgcgcgtgcctgccccaaatttgcgcccgcaatggccatgtcctagtcacgtcatccgtatatgcgttcgtcaatggggtggtgaatgcgccctacgccatgtccaaagctggagtagagatgttcgcccgctctctacgggctgaacttgcagggacaggtgctactgcaggtgttctgtacccaggttgggtatctacagcgatcgcccagagcgcttttgggggtaatgcagaagccactgagcttgtgaagctggcgtacccaagtgtgttgagagcgcctattcagccagagagaatcgcggaggcagtcgtcaaaggggtgcaggctcgttctgcccgcattaactgtccgcgccgttggatccccatttctattcttcgtgggttcttcaatcttctcacggattggactttagaccgcgacaaaagaattcaggcgctgattcgaaagatgagaaataactgccctgcgcagatgaattga

SEQ ID NO: 330674 - DNA, 912 bp, Pseudomonas aeruginosa
atgtcccaacgtctcgacgtctcatttccatccggcgacgcaaggtgcgccgcttggctgtacctgccagaacaacctaagccacatcccgtcatcgtgatggctcacggcctgggtggcgtacgagaaatgcgcctggacgcgtttgccgagcgcttctgtgaggccggatacgcatgcctggtgttcgactaccgcaactttggtgcaagccaaggcgaacctaggcaactgctggacatcaagagacagcaggaggattggcggtcagccgttgcctatgctcgaacccatgaggatttggatgccgcaaaggtagtcctatggggcacttcgttcagcggcgggcacgtgatctacaccgcagcggctgatgcaaagatcgcagctgtgatggcccagtgcccttttactgatgggttggcgtcattactaaaggtcgacctgttcacttcgctcaaattgactgcgcggggtgtcgccgacgtggcgtgctctctaattggtgccgggcctgtaaccgccaagttagcggggccaaagtggtcagcggcgcttatgaccgcacctgatgcggagtctgggtatcttggattggtacccgctaaataccctttcaagaattacgtagcggctcgatttgcgctggctatcgggctctataggccggggaaaaagaccccgaagcttctttgcccaattttattctgcatctgcgaaacagatagcgtcgcacctacaggccccactttgcgccatgccaaaagggctcctgacgctgaaattcatatgtgcaaggaaggacatttcgacatctatgtcggggaggcctttgagcatgtcatccagaagcaaatttcctttctaaagcgtcgcgtctcacgcggagccgcatgcttccacgctgcatga

SEQ ID NO: 330675 - DNA, 1920 bp, Pseudomonas aeruginosa
atgtttcaactcctttcttggatatccaggaagccgtcccccaccctaccaaccaaagctaccctagggggattcatccctcctctgagcagcatggaactgctcggcacgcctcggcgccggcagctactggagaacatctggcagcgcgcctcgctatccaagcagcaattcgaggagatctaccgccgaccactggccaactacgccgagctggtccagcagctccctgcttcggaaaaccatcaccatgcccatccaggcgggatgatcgatcacggcctggagatcgtggcctacgcactcaagatacggcagacctacctgctcccgatcggcgcagcgccggaatcacagtcagcccaggctgaagcctggtcggccgccgcggcgtatggcgccctggctcacgacataggcaagatcgtcgtcgacctgcaggtggagctgcaggacggcagcacctggcacccttggaacggaccgatcaaccagccataccgcttcaagtacgtgaagtcccgcgaataccagctccacggcgctgcctcagcactcctcatccaccaactgttaccgcgcactgcactcgattggctcattcgctttccagagctgtgggctcaattgatctacctgttcgcagggcagtacgagcacgccgggatcctcggcgagatcatcgtgaaggcagaccaggcctctgtcgcgcaggagttgggaggtaatccggagcgagcgctagctgcaccgaagcagtcgctgcagcggcagttggcagacgggttgcgcttcctggtaaaggacaaattcaagctgaatcagccgggcggcccatccgacgggtggctgactcaggatgcactctggctggtgagcaagcctgcagccgatcaactgagagcctacttgctggcccagggtatcgagggggtgccctcctccaacagcacgttcttcaacatgctccaggaccaggccgtcatccagacgaacgccgaggacaaggccatctggacggccacgatagacaatggtgctgggtggagaaacaagttcacgctcctcaagatcgctccagccttgatctgggctgaccctgccgagcggcctgattcctacagcggatcactcatcattgaagagggcaacgcctcctctgaaaagccggaaacgacctgcgaaatccccaacgatccgattgaacagcgacaggcgccagaagccaagatgacgctccgccagcctgcgccgaccattgcgaaaccgtcaaacgacatacaggcgattgcgagaccaacaactgctgatcaggaagaaacagacgatttgtacgcgcttcttggtaatatcacttcgccactagaagagctagaaactagccacgactcaccggctgcttttcctacgaacactcgcggggaggagaacctacagcagccactagggaacaaggagccaacagattgcgctcctgaagcagttgaagatgtatttatgcctagcagaagcactgatctgggacagggattcattggctggatgaaatctggtatcgcgacccgtcgcctgttcatcaacgacaccaaagccttggtgcataccgtcgacgggaccgccatgctggtcacgccaggaatcttcaagcgttatgtccaggagcatccagagctcgaaaagctggcccaggccaaggagacgaccggctggaagctggtacagcgcgcgttcgagaaacaagggcttcaccggaagaccagtaaatgcctgaacatctggaccatcaaggtttcaggtcctcgcaagacaaaagagctcaaggcttacctgctccaggatcccaaactgctgttccctgaacagcctctggacaatccaagcctcacggtcatcaccgacgccgaagggggtgtcgaatga

SEQ ID NO: 330676 - DNA, 690 bp, Pseudomonas aeruginosa
gtgaggcacaagcccctccgttatcggcactacgaactctttgtgagtcttctctgtctcgccgcggatgaggatcagttgattatcccagtcgatgtcgcgcttgcggatgcacagcagcgcgttcaaccggatgccggtgtagtagaagacctcaaacgtgcaaagccagaaccaggcgggagtgatgcgtgcgcgatcgccggtgcagcgctcggcgccgacctgcatgttgagccaattgcgggcgcgcaggatggcttcggctgcgacggttttgcttgctcgcctgggggggatgacggtggtctttctgaacgggttgacttgggagtgcgtcaccagctcgtgctcgatggcatacccccagatcgttcgcagatgattcgaatacgtgttccagctccgcttcgacaggccttgttccagtaccttgcgccgccatcccaagacagccctgtggtccacgtcatgtacggtcgccgtaggaccgaagtgcttgagcagcgccttggtcgcggcgcggtagatcttcgcgctggcttctcggagatcgtgcgcgaagatgtactcctcggtgagctgctgcggcgtcattcgacacccccttcggcgtcggtgatgaccgtgaggcttggattgtccagaggctgttcagggaacagcagtttgggatcctggagcaggtaa

SEQ ID NO: 330677 - DNA, 810 bp, Pseudomonas aeruginosa
atgcgaatttaccgacttgcagcactttgtgttgcagttgctctggctggctgcggagaaccgaagctggatggttccagtgatgaggcgatgaaagcctctattcagaaaattaccgagcagctttcaccagagaaacgaacgaagtttcaagaggccttaactctagttgtttttcaagggctagattttaaagcagtcatgaagggtgacgtaactgcggaagatatcgcaggtaatgccatggcatccctgagcggaaagacggctgatgaactgatcactcaggccgaggctatcaaagcagccagagaggctcgtgaaaaagagcaggcgttagctgagatcagggagctggaagctaagcgaagtagcgcagagcaggctaaaggtgaactagcgaagtttactgttacgcgctctcggtttttcctgcgagatcaggagtatagctttggcaaagagccagtgattcagctgtcggtacacaatggaacggaaaagcctgtttctcgcgcatacttcaagggaacgattgctagccccggccgttcggtcccatggttggttgaagacttcaactaccaaattcgaggtggcttggagcctggtgaaagtgcagattggtcgcttgctcccaatatgtttagtgagtggggcaaggttgatgctccagaggatgcactgtttaccgtggatgtggtgcgtatcgacggtgctgataataagattttgtacgactctcaagggctaagtgagcatgaaatcgcacgtttgaaaatgctcaaggaaaagtattctattccctga

SEQ ID NO: 330678 - DNA, 996 bp, Pseudomonas aeruginosa
atggctgacatcaacgtcttcgaagacgaggctttcagcgtctcgtccctcaccgctgcgatcaacgaagcccccgaggtgcctggccgtctggcggctctgggtctcttcgaggaagagggcagcaccaccatcacccagcagatcgagaaggacggcgacaccttgcacctggtgccggccgccgatcgtggcgcgccgggcctggtggtcaccggcagcaagcgcgtgctgattccgttcaacaacgtgcacctgccgcagaccttcaccatcctcgccgacgagatccaaggcatccgtgccttcggcgagcaaaccgagctgcaggccgtgcaggacgtggtgaacaagcgtctgggtaagatgcgtcgtcagctcgacgccactcacgagcaccaacggatgggcgcggtgctcggtaccatcctcgatgccgacggcagcactgtattgctcgacctctatgaccgcttcggtatcagtgctcaggtcgttcagatggagctaggtagcgcgaccaccaaggtacgcctgaaggccggcgaagcactggacgcgcaggaggatgccctgggcaacatccccagcagcggctcgcgcgcgctttgtgggaagaacttctggaatgcgctgatcacccacaagtcggtggaggagacctacctcaacaccatgcaggcctcccaactgcgcggtgatgcacgcgaggagttcgagtttggcggcgtgatctgggagcgctaccgcggcaaggtgggcggtcgctccttcatcccagatgatgaggcacggcttgtgcctatcggagtgccggagctgttcctgagcatcttcgcgccggccaactacatggagaccgtcaacaccctgggcctgccgtattacgccaaacaggaggtcatgccgttcaacaagggcgtggctggcgaagcgcagtcgaaccctctgcatatttgcacccgccctcgcgcagtcatcaagttggtgaagtag

SEQ ID NO: 330679 - DNA, 360 bp, Pseudomonas aeruginosa
atgaccaaaaccgaaggctttcacgccggtgagttcctcctctcggagggggccggttccatttcccgcgaacaggtgaccctggccgctaccgcgaaggccctgccagccggccaggtgctgggtatcgtcacggcgtcgggccaatacgcgccctacgacgatgcggccacagatggcaccgaggtggcggtggcgatcctgtatgcgcccaagccggcctcgcccgatcctcaggcggtgaccgtgattgctcgtctggccgaggtgatcgatgtggcgctgacgggtttgaacgacgctgcccgtggcgacctcatggcccgcaacctcattgtccgcaccggtacgccgtactga

SEQ ID NO: 330680 - DNA, 1197 bp, Pseudomonas aeruginosa
atgaccgaacaatcagcgcttcgtgcgcaggcgcttgcactcggcctgcacattttcaacaaggtcccggatgtaccggcgccccaggacgagacctggtaccgcatcaaggctgcagccgagggtgagccggaccaggccatcgaggtctacatctacggtgagattggtacttgggggatcacggccaaccagtttatccaggacctgaaggccgtcgacgatggttcttcgccagtgctggtggctttcaactccattggtggcgacctattcgacggactggcgatccacaacgtgctcaaccgcctgggcgagcgctgtaccgcccgcatcgatgcactggcggcgagtgcggcaagcgtggcggcctgcggcgcgcatcggttggagatggcttccaattccatgctgatgatccacaacccctggacctgggccggcggcgatgccgacgatctgcgcaaggtggccgaggtgctggaccagacgctggaagccatcgtcgcctcctacaagcgcaaggcgcccgagatcgacgatggtgagctccggcagatgatcaaggacgagacttggctgacggcgagtgaagccacgacgcttggtttctgcgacgaggtgctggacggggtggctgtgaaggcggtggtgggcgatggcggtgcgttgcgcaaataccgcaatactccccagacgctgcttgctcaactcgataagccgccgctgagcgatacacctgcaccgacagaggaccctgttcttgaacctgatcccgaaccccctgtaacccaacccaccgccgccgccctggcagcacggattatccgtagctgctcggaggccggtatcagtaacctcgtggaggccctgaccgtgtctggagacctgaaagacgaggcgagtgtggatgcagcggtcaaccgggccaaggcggtccgcgatctgtgcgtcagtgcgcgcctgccggaacttgccgccgactatgtgaaagctggcctcgaaccagacgccgtacgcgccaggctgttcgacaagctggctggcaacggcttcggcgaaatcatcaacaccccgccgctcgaggatgatccgacgccccccagcaaggccagggctgcgacgccgtcgaaggtgtacgccgcgcgtcgggctgcccaaaccgctaaacccaaggcttcgaaaggagaagcatga

SEQ ID NO: 330681 - DNA, 1476 bp, Pseudomonas aeruginosa
atggccaggtatcctcatctgactcgggcgggcttcatgcttccagaccggattaagaacagctatgacggtgccggaacaggccgccgcgcgcagaactgggatgcgccgccgggctcgatcaataccttgtcgctccctgcactgccactgctacgcaagcgctcccgagctgcgacgcgcaacgacccctacgcgggtggtgcgatcgacacacgggtgagcaacctcattggttccggcatcgtgccaatgccgacgattcaggacaaggcgctgcggcggttgttgctggagctctggctggactggaccgacgagtcggatgccgacgagcggaccgacttctatggacagcaggcactggcggcgcgaatggtcgaggagagcggcgagtgctttattcgtctgcgcccgaggcggccggaggacgacctagccgtgccgttgcagttgcaattgctgcctgccgagttcgttccggtcgagaagaacgaggtggcacgcaacggtaatttgatccgggccggcattgagttcaacgccctgggcaagcgggtggcgtactggatgtatcggcgtcaccccggcgacagcgcagtgatggcggcgggctacaaccaactggtgcgggtgccggccagcgaggtactacacgtcttcgagccgttggaggcaggacagttgcggggggttccccgactgtctcgggttctactgcggctgcgctcgttggacaacttcgacgatgcggtgctgttccgccaggaggtagccaatctgttcgccggattcattactcggccgagcccaggcgacttgcctcccatcgatcccatcaacggtggaccggtgcgtatggacggtgacggcttcacgccaatggtgggattggagccgggcaccatgcaggagttgctgccaggcgagcaagtggagttctccaagccgccggaggctggtaacaactatccggacttcatgcggcagcaactccaggctgcggcgatgggaactggagtgccctacgagctgttcaccggcgatctgaggaacgtaaatgaccgggtgatcagggtagtgctcaacgagtttcgccggcgcctggaacagcttcagttcagcgtctacatccaccagctttgccgaccggtgagggcggcgtggatggacatggcgtacttatccggtgccttggatctacccgactacgcacgccgacggcgcgagtatttgcgcactcgctgggtgccccaggggtgggagtacatccacccagtgcaggacgtgcagggcaaggttctagagatccaggcggggttggcctcgcgtagcgaggtagtgctgcgcaagggctatgacgcggaaaccatcgacgaagaaaacgctgcagaccagacacgtgcccacgagcttggtctcaactacacaacggctccggggtcgccggatcccgccgatgaggaaacaccatga

SEQ ID NO: 330682 - DNA, 225 bp, Pseudomonas aeruginosa
atgaccgaagcgcagcaacggttggcggatgtgcgcgcggccatccatgacattctcaccaaggggcagaccatcaccaaggatggtcgcaagcttgagcgcgcgcagttggcgagtctgcggatgctggaaagccagtacgtggcagatgcgggacaggagtcggcgctcagtggtcggcgctcccgggtgtgtcggctgtaccctgccgggaagggggtgtga

SEQ ID NO: 330683 - DNA, 1923 bp, Pseudomonas aeruginosa
atgtcgagtccttggctgaatgacctgcagaagcaagttcgcctcggccttgagtccctattccgcgaaccaccgctgactgcggtggagtgggcggacaagcatttctatttgtcgtccgagtcctcttatcaggaaggaaagtgggaaaccgcagcgttccaggttggaatcctgaacgcgatgggcaacgacctgatccgcgtggtgaacctgatcaagtctgcacgggtcggctacaccaagatgctgatggcgaacatcggctacaagctccagcacaaaaagcgcaacgtgctgagctactgcccgacggaccctgacgccgaagagctgatgaagcggcacgttgagtcgttcatccgcgatgttccggtcttactcgccctcgcgccgtggtatgggaagaagcaccgggacaacaccctcgccgcgaagaagttcagccaccagaagatgctctggtgcctgggcggtaaggccgcgcgaaactaccgcgagaagtcgcccgacgaggtcatctacgacgagctgtcgaaattcgacgccgacattgagggcgagggctcgccaacctttctcggcgacaagcgcctggagggggccaccttcaagaagtcgatccgcggttccacaccggggacggtgggcgagtgccagatcacaaaggctgctgaagagtcgccgcatttcatgcgctttcacatccgctgcccgcattgccacggagaacagttcctgaagtggggcggcaaggactgctcgttcggcatcaaatacgagaccaacgcgctgggtgaggcggagaaggcctggtacacctgcgagcacaacggctgcgtgatcgagtatcacgaggcggtagaggctgcgaacgatggccgctggatttgtgagcggaccggcctctggacgcacgattccatggactggttcaaggccgacggcgagccagcccgtacgcctcgctctgtcactttccacatctggaccgcgtacagcgtcttcaccacctggctcgacatggtcggcgactggctgaacgtgaagggcgaccgcgaaaagctgatcaccttcgtcaacaccaccttgggcgaaacctgggagggtgaccagggcgaaaagctagagtgggagaacctctatggtcggcgcgagatctggcagcacctgcccgcgcgcgtagccgctctgaccggcttcatcgacacccaggacgatcgctacgaggcgcgcatctgggcctgggccgcgggcgaggaaggttggttggtcgaccgctggattctgcagggcgacccggctagcgccgagttgcgccggaaagtcgggctcaagctccaccagcagtaccagcgtgaagacggtgtgagcatgcgcgttgcgctctggggatgggactccggcggtcactacaccgacgaggtgtacgaggagagcaagaagcacggcctgttgtgggtcatcccgaccaaggggcacaacgtctacggcaagcccattgcaatgttccccaacaacaagaacaaggctggcgtctacctgacgatgatcggtacggacaacgccaaggagctgatctacagccgtctgaagcttcagcccgagccaggcaaggttctccccggcgtgatgcatctgccagccagcgacgcgatctgcgacgagagcgaactgaagcagctcactgccgaaaccaaggtgatgaagatcgagaagggccagcgcgtgtatcgctgggacgcgaaggggcgccggaacgaggcactggactgcgccgtcggcgctctggcaatgctgcgagtcgcccagcagcgcttcggcctggtcctcgatacgccgcccaccacttccactgcaccatcggtcccgaccaccaaacgccgcagctccggcagcggctatctgaaacaacgtcgataa

SEQ ID NO: 330684 - DNA, 495 bp, Pseudomonas aeruginosa
atggcgacgagcctcggtataagcacgcaagcctttgataaatggggcgtcgagccggttgcaaggattggccgagaggccttctatgacgtccgctcggtactggaaaaccgcctcgacttcgcggagcggaaacaccaaccagacggtgatgttccggaaggcatcgacccgctggcagaacataagctgacgcaggagcgtctgcgcctcacttcggcccaggccgacgcccaggagaagaagaacctggtcgccgacaagcatctggtgcctaccgaatttgcggtcttcgccctgggcaagatcgctgcccagattggttcaattctcgacacggtgcccttgaagttgcgccgcaagcacccggacctcgacgtgcgacacgtcgaggcgctgcagcgagagatcgctctggcgcgcaaccgcgcttccgagttgggcgatctactcccgggtatgctggatgaatatgtcgagtccttggctgaatga

SEQ ID NO: 330685 - DNA, 267 bp, Pseudomonas aeruginosa
atgcagttcttgcacagccgcaaatacttgaacgagggcgatgttgtcgaagtcaactgctctcatcaatgtaatgttcgccttaccaccgacacgcaattttcaaacttcaagaacggccgcaggcatacctactacggcggtttttatgaacgactacccgctcgcatcactgtgcctcacaccggatactggaacatcaccattgacttgggcggaggatccgctcgcatcacccattcgataaccatccacagcaacagctag

SEQ ID NO: 330686 - DNA, 747 bp, Pseudomonas aeruginosa
atgagaggcagtatctccgcccgagacctcgatgatgcggtggcgtccctacggggcctcggtggtgacctgccgaacaaagtgttggccgacgccttgaaccacaccgcgaaccaggcgaatcaggccctggtcggggagatcgaccaggtcttcgaccggccgacaccgttcacccgtaacgccatccgcatcctgcatgccacctcaatccggcttgaggcggccttgtgggtgaaggacgaaaaggaccatgcctcgaaggggcagtcgccggaggactgggtagctccccaggtcttcggagggccgagggtggacaaggcgtcggagcggaacctccgggcccggggcatcctgccggcgggcatgttcgtggttccagcggagggcgcccggctggaccagtacggcaacatgagccgcggccagatgatccagatcctttccggcctgggcgccctggaataccgagcggggttcaaaggaaacgccacccagtcggcgcgttccttggcgaggggacaccaactcgcgtacttcgtgatgcaccgtggccgccgaccgattggcatcgccgagcgccgtggacggacgttgaccatggtcctcgccttcgtccgccagcctcagtaccgcgtgcgcttccaatttcacgaagtcgttcggcgtgttgccgaggacgacgcgcgcctagaggcgaacatcgagcgggccctggcgaaagcgttgcgttcaagttcgtga

SEQ ID NO: 330687 - DNA, 2136 bp, Pseudomonas aeruginosa
atgtcaatagatattctggtaactaccgacagactaaacaaagatccgctaggtcgagaattcattagctatatagaaagtaatagtgaccgattaaacctggcgggaagtgctctttattacgattttccggcatactccgactacgacacggtaactcacaagccagatgtgcttatacttagtcccgcccacgggattttagcaatacgactaataaacctggcgagactaaatcaaggtgcactctcacaagccgatgagtcacttaatcaattctgcagcatactgattggccgcctgctaaaaagcaagccactaagagaagggagatcaaagctttcctttgaagtcacacccgttatatattgcgatcaaaaaacagatgtattacccgaagatcttgattgtgagctcgtgtcgtcgtatggcgcatttgaagccttaattgaaaaacttaaagacagagagtctaacgcagagactctttcagagattcgatctgttctggaaggtgcaaaagcgctaaccagagcctccaaaaggattgttgaagatccggaagttacaccagcagctgccgccctagccaaacttgagtcagaaattgccaactttgatcagaagcagagacgggcagcacttgtaacaatagatggccctcaacgaatacgaggcctggccgggtcgggaaaaacggttatcttggctatgaaggcagcacaccttcatatgacaaggcccaacgataaaatactggtaacttttttcacaaaaagccttagatcaccgattaaagacttagtaacaaagttctataggcattacaaagagattgatcccgactggaacaacatccacataaggcatggctggggaggtagcaatagcagcggaacctacgcagatgcttgcagaagatcaggtagaatgccccgctcatatagttcagcaagggatgctgcgcccaggggagtcgagccatttagcttcgcatgtgaggaattgatcaatagcgctcaaagccttgaatactacgaccatatactcatcgacgaagggcaggactttccagacgggttttataaactttgctttgaactggcaaagggcgatagagacaaaaaaaatatagtatgggcatatgatgagctgcaaaatattctaaatgtaaaaatgcgctctccagcagagctattcggacaggacgatgatggagagccccgtatctctctagctagggccgaaaagaatctaccgcctggagcaactaacgatacagtacttagtaaatgctatagaaaccaaagagaagttctcgtagcagcacatgccctagggtttgggatatattcaaatattgttcagctacttgaaagccctgatcattggcgtgacgttgggtatgatgtgctaacaccagattttcaagtcggaaatgacattgaaattcttagaccagtagagaatagccctgtagcccttgatacggatggcctcccccctttaataggtaacttcatagcaagcagttttgaaaaagaaataagctggataactaaagagataataaactttcttgatatgggacttcttccggaagatattattgtggtggcgttagatgaccgtcacatgagaaattatttccgttatttgtcagaaagtctcgcatcgcatgaaatatcagtgaataacatacatgcagacccctattcagaaccgccattcagtataagcgggaagatcacgctatctacggtgtatcgtgcaaaaggaaacgaggcggctgtggtttttgcgctaggtgttgatgctttgtctttacgccttcgcgctgatagaaacaagattttcgccgcttttacaagaacaaaggcatggctcagggtctcaggacttggtgattcagcaagaagagtagcagtcgaaatagacactgcccttaggaacttcccacaccttaaattcaaaatgccagacatttctgaaattgaccttatacaaagggatctaagcaagagaagtattaaggccaagaaaatcaggaatgaatatatacaaaaattgaaggacgaaggcttcaccgaggacgaaatcgcagacattctttctctggaggagaaagatgaatag

SEQ ID NO: 330688 - DNA, 438 bp, Pseudomonas aeruginosa
atgggtaacgtccaaaagttcttggaactgatccatgaagaagccgttgtgctgagtggcgaactcgacccctccatctacccacacgagtacgcacttatcttccgctgggagtcgatcatcgatcgcgacccacccgttctggtcgcacttcctctggtccttgcgcagagcggctgcctcttgctcgacctgggccaggtgttcctccagcggaggcaggtcctgagcagcttcctggggctggtcggtggtgccggtgatggggtcgaaggcagaaggcttcagcccctgtgctggcgcttcgttgaacgtctgagcgtgccgagcaaggccgagcgggtcgcgctcgcgggccaatcccggcgcggggtagggtcgctcgccggcactacccggtccggacagaggttcgccgccagggttgcccggctctga

SEQ ID NO: 330689 - DNA, 123 bp, Pseudomonas aeruginosa
atgaccatgcgcaaggcactgaccgctatcgcactcgtcgcgctgcttggcctggccactgttgccgccggtgcagcgctccagccgttcaagaatctgttcatctgggaggtatgtcagtga

SEQ ID NO: 330690 - DNA, 258 bp, Pseudomonas aeruginosa
atgatcgactactgcatggacgaagaggatttggccggattagtgctggagctgcgatccaagcattaccatgattcggaatggtgcaaagcatcgcctaaaagtccctggtttgaagctgacgcctacaggatcaccaaagctgagagactacccatggaaagggatctagcccagttgaaatattatattaaattcagtgttaacaagcttggaaatatcttgctctttttttcggtccatagagattacgtatga

SEQ ID NO: 330691 - DNA, 618 bp, Pseudomonas aeruginosa
atgaaaaacttagagacctgtccagtttgctgctccggcgtgctgcgaccttacacgttctcaaaagagatttcatataaaaacgtaacttgcagcgtggaagttttccagtcgtcaagatgcgaaacttgcgaatcagaagttgcactgcacgcacaaagcaaacacaacaaattgattagcattaactttcagcgcgctgtcgatggactactcacgactactgagattatcagaataagaaaaaagcttggactttcacagcgggcggcatcgcagttgataggcggtggtggaaacgctttcgctaaatatgaaagcggagccactaaacagtccgttgggattgacaacatgctgaaagttctagatcagcatccaaaaataattaagacattaatcgaagcggatcagcagcggaaagctctcacaagtgctcaagtaaaaatttgcattcctagtccacgagagaaggccgaaagcggaatcctcactttcgtcaaggattgctttggcttctcaagccccacgtttgatactgccgtatcggattcaaattcgactaatacgataacatttgcaaatagaacctcgatttccgcaagttggtcgctatga

SEQ ID NO: 330692 - DNA, 231 bp, Pseudomonas aeruginosa
atgaaacgagcagccgttgtaaccgaactgccggccagcaccagccgggacatggacaagttcgttgtccgactgccggacggactgagggccgaggtcgaagccgaggccaagcgagacgagcgcagcatgaacagcgtggtcatcatcgccctgcgcgagtacctgcatggccagcgccgaaagcatgcgctcctcgatgctctgaccgctgccgccggagatcgctga

SEQ ID NO: 330693 - DNA, 654 bp, Pseudomonas aeruginosa
gtggccctgattaagtgcaaggaatgcggcgcccaggtgtcgaacaaagccaaagcctgtccatcgtgcggcgcaaaggtacccaagagcgtcggcgtcatcggctggctgtttgtcatattcatcgtcctgcctatcgcttggcagtttgggacggggatcggctcctctggtgatgcggctcagtcgcgatcgaacagcccgcagccggcaaccacaagccctactaaatccccttgggagcgccatgaatacaaggacccgatgagcgatgaagtaaccaggatgctcacgcttcagtcgaagacgtccaccctcttcgatttcccatatcgagttgcagggggctcatacctgaatcttaccttccgcaaaaaaggcaaagacctggacgccttcctcaagatcaccaaagggcagatgcagtgcggttatcgagactgcggtttcgttcttcgggtcggtgaaggcaaggcgcaaaagtggaccggggtccgcagttcgaccaacgacagcgacctgatgttcgttcgggacgctaagcaactggaggctatcgtcaaatcgggtaagcctttccggatcgctatcgagttcttccaggcaggagagcgcgttttcgagtttgacccggcaggttacccaggtctatag

SEQ ID NO: 330694 - DNA, 609 bp, Pseudomonas aeruginosa
atgggcggcgatctctttcgcaagctgcgcaccacggatcgtgcaccgatactccatgccgtcagcatccttcagcaaaagcgggatggtttcatcgcggccgccaatcttgattacctgccccgataccgtactagcttggtcaatcactatttctttgactggctctgccttggctcgccctgggaatgggtaaatcacagcaccttcagggctcttcaactcacccttcttgccatcttgggagagaagttcgttgatacggtgaagggcccgaatcgcctcttcgtcagcctcgtccaaatgcctagtagccagggcgactctttgggaaaccgctggtgctgcttcggggtcagcccatacctttacggcagcgctccctacggacagtttgtcgaagtggatgtgctcgcgctcgcccagcagcttcgcaagctcagccaaatacaaggccagccgatcaagcgggagcttgcgcgggtgcgagcctttgattctgagcgtgtaggtgttgggctttttcatcgtttgattatggcattcgcctggcgtcccaatctatgggcattttcctacagcaggccgaaagagatagtcaatgcataa

SEQ ID NO: 330695 - DNA, 741 bp, Pseudomonas aeruginosa
atgaacagaaacgaacgaatagcacgggctatccaggtcagcggaaagacgaaaagcgaaatcgcgaagctttgcgacgtggccccgtctgccgtaacccaatggatcagcggcgaaagcaagaccttgaaagcggagagcgtctttgctctggccaaggcaacaggctttcgagcggagtggatcacactgggtacggggcctgaacgtgcggtcgaggccagacctgctcacagccagggcgaactggtcggcttggtctctgcctgggatgcagacacgccactcgaggacgacgaggtggagcttccgtacttctctgaggtggaactggccgcgggcgacggccggatagctgtacaggaaatacctgggcgcaagctccgtttctcgctccccgcgctccgcgaggccggcgtcaatccgaaaaaggcgatctgcgcaaaggtcaggggcaacagcatggagccactgatcatggaccgctcgaccatcggcatcgatcaatcagccacggacgttatcgacggtgagatttacgccctggagcacgaaggcatgctgcgggtgaagtacctgtatcggttgccgggcggcggtctgcgcctgcgcagcttcaaccgagccgagcatgacgacgaggagtactcgccgaaggagatgcagtcccaaggcatcagcatcatcggctgggtgttctggtggtcgacactgcggacgcgtggacctttcaagcggtaa

SEQ ID NO: 330696 - DNA, 252 bp, Pseudomonas aeruginosa
atgaacatgagcgacgccattaggcattttggctccaagaagaagctcgccgaggctttgaggataaggccgagcgctgtgactcagtgggggcaaacgatccctctagctcgccagtaccagctccaggtcatcagtaaaaacaagctgaaagcttcgcccgaccttgaacccattctgccgtccgattcccacatccggcagtgcgctgatgctgctgtgcaggcatccagtgtgggaggggagcaatga

SEQ ID NO: 330697 - DNA, 510 bp, Pseudomonas aeruginosa
atgagcaagccacgaccgcgactgaccctggatagagtccaagagctgttcgagtatcgcgatgggagcctgatcaacagggtaaggcgggggccgttttcctttgctggccgccccgccggctcaatcaacggcaatggatacctgcagacctgggttgatggtcactccttccgaatccacacgcttgtttggtttcttcaccggcaggagtggcctgtcgaagttgatcatatcaatggcattcgcactgacaatcgaatcgagaaccttcgcgaggtaactcggcgcgagaacatgcggaacaagcgtgtttcggtagcaaactccagcggcatcactggcgtgggctggtccagcgcaaagcagaagtggcgcgcgtgcatcaaggtggacggcaagttcatccatctcggctacttcgaggagaagcgtgccgcaatcgcggctcgcgaggaagcgaatcgcaagtatggctttcacgaaaaccatggaaaggctttcgcctga

SEQ ID NO: 330698 - DNA, 513 bp, Pseudomonas aeruginosa
atgccgatcaaaaccgcacgcgcaatcctggatcgctactgggaccgctcgatccctgtagaccccttcaagattgcccagatggctggagctagggtcctggctgatcacgatatgcctcaccaggatttgagtggcagcttcacccttgaaggcaacgtgcccaccatcaggttcaaccctgaggatgcgcgtgtgcggcagcgcttcaccgtggctcatgagattgcgcactgggcgctacagcatggcccggcgatgcgggacaacgcccgaaactatagctccagcactgcttactaccgtgagcgggacgctaacacctttgccgccgagctattgatgccccaagaggtggttgagtggatggtgtacagcaagaacatgaccgacgtgcaagaaatggcgagcctgcttgatgtctcgggggcggctatgcactatcggttgcagaatctcggattgctgcggaacccgcagagttcctactcgccgccgccccgctactactga

SEQ ID NO: 330699 - DNA, 795 bp, Pseudomonas aeruginosa
atgagtgcatttagccacttgctaaatgatggcatcgtgcatgccatggatatctatcagatcagaaagcaaaatctcattcagctcattggcggtcagcgtaagagtgcttgtgccgaacgctgggagatgagcccggcccacctcagccagattctttcagataagacgaggaaaaacctaggtgacgacgttgcgcgccgcattgaacagctagagggcttgccgcgcggatggctcgacctagctcacaagcgcgctcagcaactacttctcatagactcaaccaaggaagcggagtatgccggccctatctccgtttgggacaatgagactcctctggacgaggatgaggtggagctaccgtactacgaccaggtggagctggccgcgggcgacggccggatagctgtacaggaaatacctgggcgcaagctccgtttctcgctccccgcgctccgcgaggccggcgtcaatccgaaaaaggcgatctgcgcaaagatcaggggcaacagcatggagccactgatcatggaccgctcgaccatcggcatcgatcaatcagccacggacgttatcgacggtgagatttacgccctggagcacgaaggcatgctgcgggtgaagtacctgtatcggttgccgggcggtggcctgcgcctgcgcagcttcaaccgagccgagcatgacgacgaggagtactcgccgaaggagatgcagtcccaaggcattagtatcatcggctgggtgttttggtggtcgacgctgcgctcgcgtggagctttcaagcggtaa

SEQ ID NO: 330700 - DNA, 504 bp, Pseudomonas aeruginosa
gtggatcgctggcaggaactggaacagcaggcttcccggccactgaccgccgccgagcaactactggccagcgtgcaactcacagtcgatctggagcggcggcagcggctgaccgagcagcaggtggcagcgctgaccgaaaccgtcggcgacatggaccgatcgcacccgctgctcgactcgatccccaacggcatggagagcatcaccgctatccggcagcggatagggaagcagtacggccttccgcccagggtgatcgacgcggtggtgcgcgacatgccgcacagcccgcgccccttcgccatggtgcgcagcaagcacgaggaactgaacgcgcgcccctacgcggtctgggcaaaggccgagatcagcagggtgttcgagcgcttcgcgcgcggctgcaccttcgtgacccaacaccgagccacgcacccggatttcggcgccggccgggagcgcttccagatgcgcggcaccccttcgcaggagatcggcgaatga

SEQ ID NO: 330701 - DNA, 315 bp, Pseudomonas aeruginosa
atgaagatgccagagaaggacccgtcattctgggccacggtgctgctcgcgctgcgcgagcaagggctggcgatggggctcgccttcatccttacctggctccgtacccagtacgaggggaaggagccgagcattgttcggcaactgatcgaagccgctcttggcgcgatgctggtcatggttgtcggtctcaccgccaaggagtttggctggagtcctgcctggcagttttttgccgccggcttcgttggcgtcctcggggtaagtaccgtgcaaaagctgggcgcgcgctgggctgaaaggaaggtgggctga

SEQ ID NO: 330702 - DNA, 240 bp, Pseudomonas aeruginosa
atgctcgggttcacgacgaaagccgaagctcgacagatcagcgtctcgcaccatgggagctattacggcattccgatgtggctgggggatgtcgatagcgattgcccgctggcgttcgccaagtgggcgccgcttgaacttgtcgtctccctgttctcggtcatcgagggcatcgtcaactcgatgctcgatcaagagccgacgttcaagttcaaggttggtcggaggatcgatcagtga

SEQ ID NO: 330703 - DNA, 261 bp, Pseudomonas aeruginosa
gtggcgcgtaccctgtatctccaaggcctggccaagctggcgggtttgccgttcgatctcggcgacgcggccgagttggcgttgctgttcagcgagaacgccggcctgcaggtcgatcatctgctgtttacggtcacgctcggtctcagcagcttcggcgcggcgttgctcagcttcgcgatcctgtgccaggtgatccatgcgccaaaacaccagcgcggttaccagggcgaccaccaaccatggccgccaggtcactga

SEQ ID NO: 330704 - DNA, 1083 bp, Pseudomonas aeruginosa
atggatccgctcgacgaactggttgaaggcatcgccgagcacgccgaattcatcgcggctggtcacggcgaggcgcttggtcaggtcgccctcgccctgggcgatgtcctgcatggcacggcccatcaggtgcagcggctgcatcagcaggcggatcagcaggccgagcaggaccaggatggcgacgatggagatcagcgcggcggcgatggccgagacgcggaacttgctgagcatggcgtaggccttgtccttgtcgatggacagcgccaggtaccaggtcaccgaaggcaggcccttgataggggtaaaggcgaggatgcgggtatgcccgtgcaattcggcctcgctgaaaccggtggcgatcttcggcgtgttctgcgggtagacctcgctcagggtcttcatcacctgctctttgtccgggtgcaccaggatcttgccgtcgccgctgaccaggaaggcgtagcccatgccgctgaagtccagcgaattgatgatctgcaccagggtcttcaggctgaggtcgccgcctaccacgccgagggtgttgccagcggccttcaccggtgtcgccgcggtgatgatcaattcctgggtggcggcgtcgacgtagggttcggtcagggtcaggccgccggccgccacggcgtccttgtaccagggccggctgcgcggatcgtagccggccggcatcgggctgtccgggcgcatggtgaagacgccgtcctgctggccgaggtaggtgaagctgaaggtcgaggtcagggccggctgttcgagcagggcgctgacggcttccgggctgtggtcgcgggccagggtctgggcggtctgctcgaccagcagcagacggccgccgagccagttctgaatgttgctggaagtcacgtcacccatttcccgcaggtagctttcgaggtcctcgcggatcgcgttgcgctgcaggtaatcgttgtagagggtgaacagtgcgaaagcggcgaacaccacgagggaggccgcgaggaggatcttgtggctgaacttcagacttttgatcatgttgtattgcgtccaggagtatgtagcgccagtctttga

SEQ ID NO: 330705 - DNA, 618 bp, Pseudomonas aeruginosa
atgaagatcaccgctgaccaactcgaccgcgctaccgggtgtggtgctgctactgcctcgacctgggtcgaacacatcaacggcgccatggctcggttcgagatcaacacgcccgagcgcgtggcgatgttcctggctcaggtcgggcacgaaagccagagtctgcgccgattggtcgagaacctgaactactccgcagaggggctgctcaagacctggccgaagcggttcacgccggccgaggcgaagcagtacgcccgccagccagagcgcatcgcgaaccgcgtctatgccaacaggatgggcaatgggtcgccggatacgggcgatgggtatcgataccgtggtcgcggcctgatcatgatcaccggccacgacaactacgccgaagctgcccgcgcactggcgctgccgcttgtggcgcaaccggaactgctggagcaacggacctgggcagcaatcgccgcggggtggtggtggaagtcgcggggtttaaacgacctggctgaccaaggccgattcgagcggatcactctgaagatcaacggcggctacaacggtgctgaggatcgagtggcgcgtctcgaatgggcgcgcgcagcgctggcgggtgcgtga

SEQ ID NO: 330706 - DNA, 336 bp, Pseudomonas aeruginosa
atgaaaatgcccgacaaagaccccatcacgtgggctgcgctgcttgcgtggctgtctgcgcactatccgcagttgtacgccgccggcctgtcctttgtggtcgcgctgacccgggtgatctacggcggtggaacgcggcgccaggcgctgctcgaggcaacgctctgcaccttgattaccttgggcctgattccggtccttgagtggttcggcctgccacagaacatggctaccgctgctggggtgttcaccggtttcctaggggtgaagaagatcgccgagttcgctgatcggatcgccgactggaagtttccgcgccggggggctggcgaatga

SEQ ID NO: 330707 - DNA, 558 bp, Pseudomonas aeruginosa
atgactggggtctaccgcgacgtgatgccggcgatcgttcgcgtcctggcggctgatgccatcgacaacacggcgaagcagagttggcagaggcttatcgaccgaaaggtcgacggcggctttcgggctctgctttctgcccaggaccagttcgagttcgattgcatcctgcacgccctgctgcaccgggagctttcgccggccgagtgggacgtgctgcacgctcgctactcgacgcactttgatcggcgtgggcaggccatcgagcgactggcgagcagggtgcattcgcctgcgccttctcggtttctggagcgtgctgtagcgacctgggctatcccgatgatgaagggcaaggacggaaagcgatcaaccgctatcctgatgctccccaaggagtggtacgacatgaacaactgggatgaggacgcgcgaccggactcaactcgaaaccgctggcgcagggatattcggaaacagcttgatcgtttcgaggaagaggcgttggtgcatgtaaccgagatccttgaccgcgagaagttgctcgatgcggcttga

SEQ ID NO: 330708 - DNA, 666 bp, Pseudomonas aeruginosa; identical to SEQ ID NO: 323670

SEQ ID NO: 330709 - DNA, 1062 bp, Pseudomonas aeruginosa
atgccccgcctttccgccctgctgttcctcgccctcgcaccctggctggcccaggccgaggagaccctgcgcgtctacaactggaacgactacatcgacccacaggtgctcgagtccttccagaaggacaccggcatccgcgtcgagtaccacaccttcgccaccgccgaggaactggacaaggcgctgcgcagtggcgaggcgatcgacgtcgccgtcccctcccacgacaccctgccggccctgctgaaggacaacctgctgcggccgctggacttcacccagctgcccaaccgcagccatctcgaccgtcaattgctgagcaaactggccgcggtcgatcctgacaatcgccacgccgtcccctatctatggggtgccgtaggcctggccatcaataccccgcaggccgaagccgcctatggcgggccgctgcccaacagctggagcctgctgttcgacgccagccagagccagcgcctgaaaagctgcggcatcagcctgctggacgcgccggacgaaaccctggcgatcctcctcaactaccagggccgcaacctcggtcgtactgcgccgagccaggtacgccgcgccgccgaggcgctgcacggactgcgaccgaacctgcgctacgtcgacagcgagcgctacatcgccgacctcgaaggcggtcgcctctgcctggccatggcctgggtcggcgacgccctgcgcgcggccaaggcgggccagccggtaagtttcgaggtaccgcaggaaggctcggtgctgttcatcgacaacctggtgatcccggccggcgcccagcatccacgcgaggcgcaccgtttcatcgactacctgatgcaaccaaagatcgccgcacagatcaccgccgccaccctctaccccagcggcaacgccgacgccgccggcttcctcgatcccgccctgcgccagcaaccgggcctgtatccggaccgcgacaccagccgccgcctgttcgccctggaaacgccgccggaaaagctccggccggtggtcgacgagatctggaaggccttccgcggcgccagccactga

SEQ ID NO: 330710 - DNA, 339 bp, Pseudomonas aeruginosa
atgatcgaagagctgcaagtcggcgcccgcgaggcggtggccaccatgaccgagagccagcgctacagcctggagagcgtggagatcgccaaccgtgccggcgaaagcctgagcagcgtgacccggcggatcggcgagatcgacgggatgaaccagtcggtggccaccgccaccgaggagcagaccgcggtggtcgactcgctgaacatggacatcaccgagatcaacaccctcaaccaggaaggcgtggagaacctccaggccaccctgcgcgcctgtggcgagctggaaacccaggccgggcgcctgcgccaactggtggacagcttcaagatctga

SEQ ID NO: 330711 - DNA, 570 bp, Pseudomonas aeruginosa
atggccggccaggcgttccacggtggaggcgtcgaacagatcggtggcatagtcgaaggaggcccagatgccgttttcgtcttcctgaatatccagcgtcaggtcgaactgcgcagtctggccgtcccaggccaggccttccagacgcaggtcctccaactgaacctcgggcgtcaccgagcgtatctcgctctgatggttgaacagcacctggaacagtgggttatggctggcattgcgctccggctgcaaggcttccaccagttgctcgaacggcaggtcctggtgcgcctgggcctccagcgcgcgttggcgggcctgtgccagcagctcgtcgaagcccatccgaccgtccaggtcggccttgagcacctgggtgttgacgaagaagccgatcagccgctcggtctccacgcggttgcgattggcgatcggcacaccgacacggatatccgcctgcccgctgtagcgatacaacagcgcctggaacgaggccagcaacaacatgaaactactggcgccttcacgctgggccaaggctctcacggcctcgaccagttcccgcggtag

SEQ ID NO: 330712 - DNA, 507 bp, Pseudomonas aeruginosa
gtggacggggtgaagctccagttgccgctgccgtcggcagtgacctgcccgatcggattgccgctgccatcggtcagggtcaccgtggcgcccggttcggcggtgccgctgatctccgcgccgttgctcggattgaccaccggcgcggccggcgccaccgagtccacggtggtgctggccggagcgctggtattgccggtcgggtcgctggccgtggcgttgaccacggtgccgttggccagcggcgtgcccggtgtgaagctccagttgccgctgccgtcggcggtgacctgccctatcgggttgccgccggcatcggtgagggtcacggtggcaccggcctcggcggtgccgctgatgacgacgccgttgctcgggttgatcaccggcgccggcggcgcgctggaatcgacggtcaccgtcgccggcgggctgctgttaccggcggcgtcctcggccaccacgttgaccacagtaccgttggcgatcggcgtggacggggtgtag

SEQ ID NO: 330713 - DNA, 366 bp, Pseudomonas aeruginosa
atgaactaccgcggcttccgcatcgagaacgagcgtgcgtacatctggcgcacctactgctggggcttgcacgccggccataactgggtggcctgctggtacgtgtacgacaccaacggaaagcgtgtcgccggaggctacgactcgggggataacactcgcagcgggtctgcccacatggcgcgccggaaagacgcaaaggcgtgggtagatggctatcacgcctaccgcgacgagccggagaaccgcaagacgctgggcaatgggtacatcgtgcatgcgccgacgtactgcaatccacgcaacgagcgcgacgataacgcccaggcgtggttcgagcacggctaccagcagtcgcaacgctaa

SEQ ID NO: 330714 - DNA, 159 bp, Pseudomonas aeruginosa
atgaaccaagaccaagcctatctgctgagccagtcctattgcttccaaatgggttttcaagactttcgcggtggcgagcaatttgacagcaggcggaatgccgaatggcaacgcggctggcgttgggcgaacgcaaaaagcgtgtctcgctcgaaataa

SEQ ID NO: 330715 - DNA, 495 bp, Pseudomonas aeruginosa
atgattggcgatctgtcaccatgggatgacagcacgccactggacgatgatgaggtggaattgccactctacaaggaagtcgaactggcagccgggtcaggccgcacaacagtgcaggagattccagggcgcaagctgaggttctcctacaccactctccgggccgctggggtagacccggctgcggcggtatgcgcccagctcaagggtaacagcatggaaccactaatcatgaacggggccactgtcggaatcgacaaggcaactacccgtgttgttgacggtgagatctacgctctggagcacgatgggatgcttagggtgaagtacctataccgactacctggagggggcttacgcctgcgcagcttcaaccgcgacgaatacggcgacgaggaatacacaccggaagatatgcaggccaagagcatcagcattataggatgggtgttctggtggtcgacgctgcgctcgcgcggagccttcaagcggtaa

SEQ ID NO: 330716 - DNA, 201 bp, Pseudomonas aeruginosa
atgcgacgcatcaccctaagcgaattcgcttccaagcaccgccaaaccaaggctgcaaagtttctcggcctcactcagggcgccttgcacaaggcgctcaactctgggcgcgagatctacgtcaccgagcacgacgacgggacctttaccgctgaagagctgcggcctttcccatctcaacctaaaaaccaagccgcataa

SEQ ID NO: 330717 - DNA, 189 bp, Pseudomonas aeruginosa
atgtacgacaaccctagccacctgaaggaccgggaaatcaagctccgcgtcgatgagacgacctacgaactcatcggcgcactggctcgtttccaccgcactcagaaagcggttctggtccgtgaccttgtagaggccgcattggaacgcctggcagagaacgatagcgaacaacaaaccgtggcctga

SEQ ID NO: 330718 - DNA, 807 bp, Pseudomonas aeruginosa
atgacaaatattgttcagcttgacaagtccagggggttcacccggatggacaatgaattgtacgaggcccttattggggctgatctttccgggcgcgagcttagggtagccctggcggttcatcgcctcactgctgggttcaatcaagacgagtctcgcatcacagcttcggtgatcgctgacatgtctggaatccgtcgtgagcatgtatctcggatgctgtgtgagcttctgcgtcagcgggttatttaccgggttggtgggtctaaaggcccaatcggtttttctccggtttctgagtggaagattgatgaaaagatgtgtgccgaaaacggcacaaaggatttggcacagagtgccgaaaacggcacaaaagtagtgccaatttcggcacactataaagacagtaaagacaatacaactcctaacggagttgttacgcccgcgaagcctgtcgaagaaaaacctgcgaaggctaaatcgtttggtctggccgatctcctggctgacaacccgcatagcatccccgaacaactcctggctgactggatcaccacccgcaaggcaaagcgagcagcgctgaccccgaccgcctggaagcgactgaataactctctggccaagtgcaaggctgctggattcaccgctgaatacgctgtggaaaccatggtttcgaagggctggcagaccgttgaggtcgactggctgaagaactcaactcggagtttttcagggcctcaatcggtccctgcgtacgacgccaatgatacctcgtgggccattggcctggaacaggacctgttctga

SEQ ID NO: 330719 - DNA, 651 bp, Pseudomonas aeruginosa
atgaaacgcgccggcagcttgatcccgcaagcgatgtcgaccgcgccgagtcaggtgcaggctccgcgtgagcttgacgatgcaaccgtaagcgtcgtgaaccagttgttctctgagcttcaatcgattttcccggcctggcgtcaggcatggccgacaactgaggctatcgccaaggccaagcgtacgtggatcaaggcgttcatggacgcgggcctgagcagcttggagcagatccgctacggcattcagcaatgccgtgcatctggcggcgacttcgcaccgagcgtcgggaagttcatcaagtggtgcaacccgagtcctgagcatcttggtcttccaagcctggagaaggcctatctggaggccgctcgaaaggcgcatccggcattcactggcggctggagtcatcaggcggtgtatcacgcagccacgatgaccggcttctacgaactggcgaacctctccgaggaacgcagccggaagctgttcgagcgtaactacgaggcgactgttcggatgatcttctccggccagccactgcgccagatcccgaaagctctacccgaatccgtatctatcagaacgccagagatcggcaaagccgcgctcaacgaactgcgcgcgactctggcaaggagtcaccaatga

SEQ ID NO: 330720 - DNA, 153 bp, Pseudomonas aeruginosa
atgacccaagcaaacaacggaaagatcaccaccgaaggcctgcagcttccaagcgcctgcgacatctgcggaaagtcccgcgcacatggaagccacgtgaagtgcagcaagatccggcaggcgcagtaccaggcgaagagggcggccaaatga

SEQ ID NO: 330721 - DNA, 417 bp, Pseudomonas aeruginosa
atggttgaccgcactttccgcatccaaggcgctgccggcatccgtccagctttcgttgcggcctggaacctcatccagggtctgatgaaagaagcacagggcggctatgagctggtccttcgccctctcaagtcgaagcgctctatcgaacagaacaagcgctactggtcccttctgcgtgaactggctgccgtggcatggatcgacaaccgccaattcgacgatcaggtctggcatgagcagttcaagcgctggttcatcggctgcgaggacgtgaagttgccggacggctcgaccgaactgcgcggcatcagcacgacgaagctgaccgtcgacgagttcggaatctacatgaccaagatcgaagcgtgggccgccgagcaagggtggccgctgatgatgcaggaggctgcatga

SEQ ID NO: 330722 - DNA, 252 bp, Pseudomonas aeruginosa
atgtcgacgtttatgggctccgccagggaaacccagatagctgctgttcgagtccgccgcgggtggttcggcaagctggttgtccaggttcgctacaagatcgagcgcccagaaagcccgctccctggccgggagttgatctaccacgtatgcgggctctcccgttggcgagatgccaacgcaaatgatttcgctgagtccctgatggtcgcgaagctcatcgggatgtctgatgaaggaacgccctcatga

SEQ ID NO: 330723 - DNA, 261 bp, Pseudomonas aeruginosa
atgaagagtcacccgatccctgcaggagtcgaggtcaaccccaatcggccctggacgcctgatgacattgctgggtacagcggcgaggtagtgagcgccatgaaggttctcgagcccctgctgcgctccggactgttggccctccatcctgatgaatggcaaggcggcaagctctcgttcctcagaccggcacaagctaggcggcaaggctggaccccgccggatcaggcagccggcaatcaggtatccagaagtgcctga

SEQ ID NO: 330724 - DNA, 360 bp, Pseudomonas aeruginosa
atgaccgacgaagcaatcgaacaagaaatccaagccaagggcctgactgcgccacgcatcacgccggcagacatcgaggcgaatatcgctggcgagtactacttcactgcggctgatggtgtgaatcagaggcctgactgcaatcctgacgccgtggttgcgggcgtacatggatcgctcggcctgctgaccttctgcgtactggtactgaagaacggcttcaccgtcaccggcgagtcggcctgtgcgagcccggcgaacttcgacgcggagatcggccggaaaatctcccggcagaatgccgtctccaaaatctggccactgatgggctacgaactgcgtagcagactggctgactga

SEQ ID NO: 330725 - DNA, 186 bp, Pseudomonas aeruginosa
atgaccacgaaatacgctctcggctccgatgagggattgatcccgactgttgacctcgaatcgctctcttcctatttggttgacggtcgggagtatgttgacctttgcctgacagaagcaggttacgaacgactcaaacagcacttcttccgcttgttcgaaagtgagcaggagggccaggcatga

SEQ ID NO: 330726 - DNA, 630 bp, Pseudomonas aeruginosa
atgcctatcactgagcagcagttgctgcatgtcctcccgaacgccggccctcgagccggcgtttttgttggtgcgctgaaccgcgggatgacgcggttcggtatcacgtcgccggtgcgcgcggcggcattcctcgcccaggtcgggcacgagagcgcccaactgacccacctggtggagaacctcaactacagtgcgcgtggcttggcggcgacatggccgagccgatacctaggcgccgacggccagcccaatgctctggcgcagcgcctggcgcggaacccccgggctatcgccaacaacgcctacgcctcgcgcaacggcaatggcgacgaggcgtcgggcgacggctggggtttccgcgggcgtgggctgctacagatcaccggccgggcgaactaccgcgccgccggcgccgggctgggccagccgctggaagcggagccggaactgcttgagcaaccggagtgggcggcgctgtctgccgcctggtggtgggccagtcacggcctgaacgatctggccgaccgcggcgagttcgcagccatcacccgccggatcaacggtgggctcaacggccaggcggagcgcctgcaactgtgggagcgggcgaagaggttgctgtcgtga

SEQ ID NO: 330727 - DNA, 369 bp, Pseudomonas aeruginosa
gtgatctccgcccgtgttgtctcgatcgtgctgggctgcatgctgctgatcggcgtgggagccgccggcggtgtctggctcggcgcgcggcactaccggccgcagttggatgccgcgagcgcggatctggctgcctgccgttccgctcgtgggagcctggaggccgcagtagtggagcagggcgggcagattgccgcgctgcgtcaggctggtgagcagcgcgccagggaggcagcccttgcggtggagcaggggcggcagcaggccgcggagcagtatgccgcggcacaacgcctgttgcgtgagcgctccgctggtgatcagtgcctggcagccgaagtggtcatcgatcaggagttaggtctatga

SEQ ID NO: 330728 - DNA, 264 bp, Pseudomonas aeruginosa
atgctggtgattcgattcaagggctggtcggtgaaactcgaccaccaggtgggcagcgctgggaaacatggcatctggtcgttccacggctcggagagcagctacgtgccggacatggagacgattctccggcatgcggcgatccggcctgcggagccgaaggagggcgccgaggtagaggtattcatctgtgattcgcgcatgccgcagtatgagtggcgtgccatagggacgggcgttgcggcctacgagtctgaccgctaa

SEQ ID NO: 330729 - DNA, 648 bp, Pseudomonas aeruginosa
gtggtcagcggccaggtggtcgacccggtcaccccggcggtggtggacgccttcggcgcctgggccgagcggcccttcgtcacagtggtgctgatcgccttcgtcgcctgcgtggtgtcggtgcagacctacatcggccgggcgatcttcggcatggcgcgcgacgccatcctgcccggctccgccctgctgcgccgggtcgaccggcgcaaggtgccgatggcggcgatggtctgcagcacgctgctggccagcctcggcctggccctggggctgaacgccacggcggtcggcacgctgatcgcgttcggcagcggcggtttcttcgtggtcttcctgatcgtcgctgcctgcgctctctgggcccgcctcgtcggccgctgggacccggacaagggcgccttgcgcctggggcgcgcggggctggcggtgaacgtcctggcagtcgcctggctgtcgttcgaggcgctcaacgtcgcctggccgcgggccagcctcgccccgcccgacgcgccctggttccaggtctgggcggtggtcgtggtgttctccgcgctggccgcgttcggcctgctctacatgctcatcgccaagccgcatcggcgcatcgccaccagcctcagcttcgccgctccgccggcggactga

SEQ ID NO: 330730 - DNA, 2289 bp, Pseudomonas aeruginosa
atgagcgatgattcacctattattgtttacgcaaacagtccagcggaagttattctaaacccgactcgcgacaggaatgacatattaaacaattacccggccgggaatccctttattggcttaacgtatgccattgaaaaagatttcaaagagaggaaaaagaacctggaagcaggggtgcagtcagaactggatgcgatagacgcaaaatatccatcattaccgaaaggctttacaccggagcaatggttggagagggctactgccgttgtcaccgagttgctcaatcaaaagcggccgaagctagattatgagctgggtatagtcaagaattcggctagttttgataagctgcaagcaagctacaacgcaatcatcctgaatgatcagatcaatagtcttcaagagcgcttgaacaagctcaatgctgaaaccgaccgccgccgggcggaggcagaagcccagcgtcaggcagaagcggacgccaaacgcaaagcggaagaagcggcacgcctggaagcccagcaggtcactcaacagctcggtgccgacttcaacgcgatcaccgctccgaccgccaccaaggtccagcaacgtgtgaaagcagtggatgctagtctgtctcaggtttccacccaggtcagtggtgcagtcgcctcggcaacccaggcggtgcaggtcaagacagcgcaagcccagcaacaagccaacagccagatttcgtccagccagaacctgatcagcgcggcatttcggaatcagattgccttggcagcacaggccagtggagaagcccaggtcacggctttcaacaccaaagtcaagcagatcgtcaacgaagccacggcgttttcgacagcacgaaaacaagcgctggctcagtttgctgccaatgcggccgccgaggtcgaaaccgaggtcaacaggctaaccgcccaggtcaaggccagccccaccaaggcggcttcgcaagctgcacaagcaacccttcgacaattcactgaaagcacctatgccaaggtgaacacctttgcccagcagaccgaagcagcgctggaggctaaggcaaaagaggtctcagcagcggtagccgaagcacagcgtgcggcgaccaacgatttgcaaaaaacagccgatgtagtaccaggtcagatcatccaggctgcgaacaccttggcgatgccggccacctctgcgccgctggtttcggtggccgggtttggtagtgcggcagtggagacggctcgcctggcggcttccctaacgaatgctgtcaatcgcttgattcagattgctggtagtggacctggcgcatacgtggccaccttcgcggtgctgtcgctgtattccgaccaggctggtaaagacagtgacaaggttcctgccggcgttcgcaatgcattggcactggaggcgtccgctctgggtcttcctggcacggctgatttgcaaagcgccgccaaggcaggtggcacggttgatatgccggtacgactcacgagtgctgcacaagagagcccgagtggtaaatcgcagattgccgcggtgctgaccaacggggcaactgtccccaagggcgtgcctgttcgcgccgcgaccctcaatgctgcgacgggccggtatgaggtgtcggttcccgcaaagcccaccgtaccgaatacaccaccgctgatcttgacctggacccctgccacccctccaggaagccagaacccctcaagcaccactccggtcgtaccgcagccggttccggtgtatgagggagcaacgatcaccccagtacaggccgagccggagtcctacccgggagtgcctttagacctggacgatctgatcgtgattttcccggcgggctcggacgttcctccgctctatctggtcttttccaagccgccggttaagctactggaggtggacatctatggtaactttgcgggacgacctcgtgatggaaaccatcttgaccatatgccctcacagggcgcgcttgccgaatcgttgctctcaaaaaatcctgggctcacttacgataatattcgagggtacctgaaaaatggggccagcgttgcaattcctgcgcgcatacatcagaaatatagtgaaacatacggcggacgcaacacgaaggaacggcaaagaaaagacgcctctgacttgcgagccgcagtagatagtaatttcgatgcaatcaagggagccctgttggaacagggggtttctgagaaagaactagagatagctcgtgcatccatgcacagaatcaatgtagaacaagggtggtacgaatga

SEQ ID NO: 330731 - DNA, 1179 bp, Pseudomonas aeruginosa
atggttcaggtaacactgttggttatcttgggtctaggcagcgtttccgcatttctctccgccaatccttcctgggcattcaaggaatggtcggtattcgccggcctgatgctgttctccttcaatatttccgtcagtcccgagtgggttcgccgtgccgctatctgggggctggtcgtgttgggagggttcttctgctaccagttcctgctttcctatctcgcggccttcgtcagcgggctccgtgagttgaatcccagggttctgctcagcggcttttccaacgtccggaccatggggcagttccaggccatgctgctgccgctgatggctgcgctggggttgtacctgcgagagaccgggcggttcagactgtcctggcttgtcatgctgctgctggccatccaatggtgcatctccttcgccttggctggacgcgggctctggttgggtttcgccgtcgcgcatcttgcgctttgctggatcggccccgtggggcgccgctttttgatcgtccagttgtccgcggcattcgtcgggttggcgctctatttcctgttaatggttgccttgccgacctggctaggtatcgacatgaccctcatgtccggtatgcgcagtggtctgtctctgcgcgacgtgttgtggcgagatgcctggggcatgttcgtagcccatcctttgcttggggtcgggcccatgcatttctcggcggtgccgaacagcgtcggtgcccacccgcaccagatgctgctgcagtggttcgctgaatggggcggggtcgctggccttctggtggttggactgatgacccttggtctgcttcgcggcgcgcgttacctgcgtgaacagggcgatccgatggatgccggactgtggctggccctcgtttcggtcctggtcctggcccaggtggacggcgtgttcgtcatgcccttcacccagaccgtattggccttgctggtaggcatcgccatggcacgctggtcgaagccggtcgcgccgtcccccgcacagcgctggctctgtcggggcctggctgtcgttgtcattgtcgtgctggggcgcgtgctgctgctcgaggtgccggggctgaccgcggccgaggagcgctacctggaaatccacggcggcggtgaggcgccacgtttctggattcagggttggattcccatgtga

SEQ ID NO: 330732 - DNA, 225 bp, Pseudomonas aeruginosa
atgaagaacaagattgaagatctgcgtaatcacctctttgccaccatcgaagggctgctagacgaagacaagcctttggatatcgaacgcgcgaaagcggtggctcacgtaggctcagtgatcatcgagtccgccaaggtggaagtgaaagcgctggagatcatcggcgccccggacggcagcgcaagcacgttcctgcagatcggccgggaggactcgaagtga

SEQ ID NO: 330733 - DNA, 681 bp, Pseudomonas aeruginosa
atgagccccttcattgaacttccgatctctcgccggcgggagccggcaaggagtctagtcatgcgtgaccagcagcccgctaacaatctcctttcgatagcgagcgccgaatggatacaagccttgcagaacttctgccaccacggacgagtgtatgacgggtccgccgccaatgcctggctattggatgcctgcctacttgttcccagcgcagccctcatccacggtgtcatcgagtacgttcttaacagccgtgaggacataccatacggagggctacgcccaagctgggtagctcagcggctcgagcaggagggattgattagtcaccggtgcggggcagtcttgcactggcaggagcacggctatcgcttttccacggtggtcaggatcgaccccgaacagatttggcccgataagcgctcgagacccgaagcattcgttaccggaccactagatagccaggagcttggggtaattgaaatcctggcgcatccgaacgccagacgtcgtagtccgtccccggtgcgcctggcagcactggttcgatcttcgctagccatacctgctgagcctttgcatcccattgcaagtccgccagctcttcatgcagtgctagccacctatcccgaattggcatctcccgaatggtttccagcggccaggagtagcgacgcatga

SEQ ID NO: 330734 - DNA, 186 bp, Pseudomonas aeruginosa
atgagcatttcccagcacctggtcacccaccagtgcatgaattgcggtcagcaccaccctctccacctggtgcgccaaatcctccctgcagagaacaccccggaaggtgaagccgaggtcttggtctgcccctgctgcgggagctacgacgtccatcagttaaaggctgtccgtgatgaacactga

SEQ ID NO: 330735 - DNA, 234 bp, Pseudomonas aeruginosa
atgcgtagtttccttcgcggcgcccgggaaagcgtccgccggctggtggccttcgctcaagccgaaggctggagcgtcgaccgctccgccggcggccacttgaagctcagcaagatcggctgcgcctcgatcttcatctcttccacgccaagcgacgcacgcggcgagctcaatgcccgcgccctgctccgtcgagccgacaggcagcgttccctgaaccaggagtctttctga

SEQ ID NO: 330736 - DNA, 219 bp, Pseudomonas aeruginosa
atggctacaaaggatcacgaattcacagtaggcaaaggacaaacgatctgggccggaaagtcccactaccccgacctagtgcgtctagttgttccgaaggatcaagcagttgctctggcacataagattctccgcgcctatgagctggcccgtcccgaagacatgtatttggatgaaatccccctctatggggagttggaacccctggacgacgaataa

SEQ ID NO: 330737 - DNA, 198 bp, Pseudomonas aeruginosa
gtggataagttcacaagcgtgcccgagatcgatggcctgttttggtacttcgagaacggtgtctccgagcctctcccggtgctgatcaaccaggcgaagtggggagggaaattcaaatcgttcaacggcgctgagcagtcttggctccgtgacggcgagtatctggttggcccgcagcccactccggctgctcagtaa

SEQ ID NO: 330738 - DNA, 411 bp, Pseudomonas aeruginosa
atgctcaagttcatgcttgacaccaacatctgcatcttcactatcaagaaccgcccgcaagaggtgcgcgaggcgttcctgcgccaccacgaccagatgtgcatcagcaccgtgacgctgatggagctgatctacggcgcagagaagtcctcgaacccctcgcgcaatcttgcagacgtggaaggcttcgctgctcgtctggaggtgctcaagtacgaccaggaagctgccgcccacaccggccagctccgcgctgaactggcccgcctcggcaagcaaatcggcccctatgaccagatgatcgccggacacgcccgctctcagggcctgatcgtggtcaccaataaccgccgcgagttcgaccgcgtacccggcttgagagttgaggattgggtcaccccaatcgtatag

SEQ ID NO: 330739 - DNA, 1920 bp, Pseudomonas aeruginosa
atgcaccttgtaatcattgaagccccgggcaagctgaaaaagctgcggtcccttctcccctccattcgtcccgacgtgacctggcaggtcgaagcgactgccggacatatcagagacctacccgttcacggccaggatccgcagatgctcaccgtcggcgtgggccaggatttcaaaccgcactaccagatcctctcgggcaaggaaaaaaccgtcgcacggctgaaggatctgcagcagaaagctctggagatctacgtcgcatccgacccggatcgcgaaggcgaaagcattggctggcacatcctccaggctgccgggatcaagaactacaagcgcgttgccttcaaagagatcaccaagtcatgcatcagcgccgaactcagctcgccgcgtcgcctggacctcccgaaggtcgcctcgcaggaatgccgtcgcgtcatcgatcgcctggtggggtatctggtcacgccagagttgcggcgcgtgatgggcaggccaaccaccgccgggcgcgtgcagtccgtcgctgtgtacctggtggtcctgcgagagcgggagatccgcgccttcacagcaatcaagcacttcggggtggaactgaccttcgtttcgccaagcgacggccgtacctggacggcggaatgggatccagtgcccgtgtttgccagcaaggagttcccgtatgtccaggatcgtcaactcgcagaactggtgggggctatacgcaatgtcatcgtcgagacctgcattgatggcgaagaaaccgttacgcctccggcaccgttcatctcctcctcgctccagatggccgccgggaatgcgctgaagtggtcacccgacaagacgatgaaggtcgcccagcggctgtatgagcaggggctcatcacctaccaccggacggacaaccccaatatttcgaaggactcgatgccggatatccgtgctgtcgccaaggccttgggcctgaagagcgttgagcaacagcggatgttcaaggctgatcaggacgcccaagaaggccaccccgccatcacccccaccgattggacggccgctaccgccggtgaaactgctgatgagcaggcgctgtaccagctcattcgagtccgcgcgcttgccagccagatcgaagctgccgtgtacgccgtgagaaccatcaccctcctgggcgtcggccccgacaagaagccactgcgcttcactgccaaagggaagctgttgagcgtgcctggctggcgaaaactgctgcagggggatgacgccgaggagcagaagaacgaaacgccctcaaaccccaccccggcgctggagccaggccagatcctgcaggtctacagcggcgaggtcctggagaagaagaccacccctcccaagcgattcaccgatgccagcctggtgggcgagatgaagcgccgcgggattggtcggccatcctcctacgcctcgatcgtgaagaacatcatcgacaaaggccaggtgcagataaaggggcgaagcctgatccccggcgagctgggcgaggccaccatcgcgctcctggagcacaacttcagcttcctcagcctcgacttcacccgcaacctcgaggtagccctggaccggattgccaacagcgaagacacctacatgaacgtggtccagcagttctaccagctcctgcagtcagagctgcagacgctgcgcgcgcaccccagcgcacagggcgacccgcgagcaagctctaccgccagcgctcccacggcgccggctagtgacttcctctgcggcaagtgcggtctgcccctggtccaccgcaagaaagccggcaagggcggcttcgacttctggggctgcagcggctaccgcaccaccggctgcaaggtcaactatcccaccaagaacggccgacctgacttcgacaacccgcgtgggctatag

SEQ ID NO: 330740 - DNA, 1974 bp, Pseudomonas aeruginosa
atgagccgtccacgcctggtcaaccgtacctccgcgactccttcgacgcttctgcagcgggctatcttcgacggctacgacttcggcttgaagatcccctacatcgcaggcagcaaccgcgcgctgctggaactgtccggcttcttcatcagcgcccgggagcatccgttgcaccgctactggcgggtccccaagggcaagttgctgcccgaactggactcgctgtacaaccgactcgccgagctcgctggaggcctccactcacagtcctggcgggacttcagcggcatggtcgaatctgcacaggcctcgcttgaccgacaggccttcacctgtggtttgctgctgcgcatcgcgccgctggccgagggcggcgtcttgctgtcaggcgagttccatcccggtgtggtggcggtggctcggcggatgcgcggggtgttcctgcgcccatcgagctcctggcgcatcgacgccacacctgagctgctccgcagcaacctgatcctggagcttggcctcgccgaggaacaattcgagatactggataccgtccaggagctgctcagcgacggtagcttcgcgccggcgaccgagctgcccagcatgagcatcggcggtccacagcaggaaccggcagcgccatccctggaggacgagtcagcttgtgacatctacctcgccgcggtgccagagatcgagcgcaccgagtacagctcggctgatatcgaggcggcgcttcagggctactcgctactggcccaccagcctgccggcatcgctcacttgctgcagagaaccagcgccctgttggccgacgacatgggattgggcaagacccgccaggcggtcatcgccgcttcgatccgagcggcgggcaggccaattctggtcatcaccctggccaccctgttgatcaattggcagcgcgaaatccaggaggtctatccctcggccaccgtggccatccagcaggacaacccagaggcgcagtggatcctggtcaactacgagcagttgagccccttcgtcgccaacgcttcgcgcttcgccgtgatggtcatcgacgaggcgcagcggatgaaggaaccgacggcgcaatgcacgcggcacggtttcgacattgccgcccaagtgccgaaccgctacctgcttaccggcacgccggtgctcaaccgtgaaaccgagctgcacaccctgcttcgcctctcaggccaccccatcggacaactgccgctgaaagagttctgcgaccgtttcgccggcaacccggagttccgccagagtctgcgggcggagctgggtgactggatgctgcgcaggcgcaaagatgtgctgcccagcctcaagggcaagcagcggcagttgctgaaggtggccctctccaccgaggaacgccagcaatacgacgtgctgcgtctcgaggaccgaccggtcttcgcgcgactcggcgcgctgcggcgttacctggaaacggtgaaggttcgcgtggcgatggacctgttgagcgagctcgacgccgaggacaaggtgatcctgttctgcgagttcaagccgaccgtggctgcgctgaaggaactctgcgagcaggccgggcacggctgcgtcacgctggtgggcaatgactcgctcaccaagcggcagaaagcgatcgatcgcttccagcaggatcccgactgccgggtgttcatctgcaccacggcggccgccgggacgggcaacaacctcactgcggcgaactacgtgtttttcctcggcctgccctggactcccggtcagcaggaacaagccgaggatcgcgcgtaccgcaacggccagctccgcatggtcgtggtgaagatccccttagtcgaggccacgatcgacgagcagctgtggcaactgctcaacgcgaaacgccaggttgcccaggacctcatcgagcccgagcaggtcgacggaaaccgtgaactcgttgctaagacattgatttcatag

SEQ ID NO: 330741 - DNA, 783 bp, Pseudomonas aeruginosa
atggcagaaacacagatcgaatggaccgactccacatggaaccctgtagcaggatgctccataatcagttcgggctgcaagaattgctatgctatggaaatggcaagaagattagagtcgatgggggttgagaaatattctggcctaactcgactcaaaggtaaacgtacagtttggaacggtaaaatcactgaagaccatgatgcgctctcgattccttatcgctggagaaaacccaggaagatatttgttaattcaatgagcgacctctttcatgagaaagttagcgatgactttattctcaaggtttggaatgtcatgagagaaacgccgcatcataactaccagattctgaccaaaagaccagagcgaatggccgacatgctcaccaaatacattagagaggtacttcctaatgtgtggctaggcaccagcatagaggagcaagaaactgcccagagggtctttcacctaaagaagaccccagcccaaataagattcatctctttcgagccattaatcggaagtgttggcgagattgacctttcaggcatcgactgggccattgttggaggagagagcggaagctctgccaggccaataaaagaagagtggatcgatgagatccatgaacaatgcatagaatatggaacagctttcttctttaagcaatggggcacttgggggaaagataacatccgacgttcgaagaaagctaacggtcgagagtaccgaggcaggacctgggatgagatgccggtaaaactagtcagcatcgcttaa

SEQ ID NO: 330742 - DNA, 1254 bp, Pseudomonas aeruginosa
atggtaagaaaaaaatttgactgggagaatggcgcaaagcttgaagaccactcaagaagaaagcataaaatactgcgagaatacttctaccaatacattattactcgctgccaacttcccaagcaagaacgttttaggttagccataattgatggcttctcaggcgcaggtcgctacatatgtgggacggcaggctcgcctattattttcatggaggagctcaataaggccacgaaatatatcaatattcaaagagcagagcaaggccttcctctaattgaaatagagtgctttctaatcctaaacgactctgagccaattgcggtagaactcctaaaagaaaacatctacccactgcacgcagaaataagagacactaacagacagctacatatcaagactcattatatgagcaatttttttgagcaggcatattctgagatcaaaagtcttcttcgtgcaggccgttacaaaagcacaattttcaacctcgaccagtgtgggcacagccaggttcggaacgaaaccctggccgatataatacgctcaaacaactccgccgaaatattctacacttttgcaatcgagacacttcttgcctttcttcaaaaaacaaatccaaagcaacttgcaacccagctatcacatttatcaataaacgaatacgacattgctcagcttgacaccatcatggataagaaaagttggctgggaactgctgagagaatagtttactcaacttttaaaaaatgcgcacaatttgtaagccccttctccatcaacaacccaaatggttggaggtattggctcatccacttagccagcttttatagagccagacaagtctacaacaacattcttcacattaacagtgggtctcaagctcattacggtaggtccggactgaatatgcttgcgcacgacccaagcgaagaaggcaaattatatctgtttgactcatctgctagagatgatgcaaaaatccaactactcgaagacattccgaaacttatttcctcgtctggtgatgctgttcgcattgaggacttttatagtggaatttacaactccacccccgcccacagtgacgacataaacattgctctaattgaaaaccctgacatagagataataactgagagcggaggaactcgtcgcaaagcctctcaaataaaaatagatgacactgttcgacttaaaaaccaaagaagtttcttcccaatcttcttgaacaatacgaataagaaagactag

SEQ ID NO: 330743 - DNA, 144 bp, Pseudomonas aeruginosa
atgttttttcttgcggcgggattaccgctggggggcgggcaagggggagtgcctgccctttgcgaaaattcgatgaggccccgcgtggcctccgaacagaaggtcatcggtttcgagcccaaccaaagatatgtggccaattga

SEQ ID NO: 330744 - DNA, 1101 bp, Pseudomonas aeruginosa
atgctcaagccaatgcttggcgtcgttgcactgacgctcttcgccagccaggcggccctggccgtgaccggtggtggcgccacgctgccggaagcgctctacaaaggctctcccgacagcattctgccggctactttcagctatgagggggtggggagcagtgccggcaagcgggccttcctgaccaatgacccggtgctgttcggcgcgaccggcagcgtgcactacgccggaagtgactcggtgctgcggaacgtcgagctgctggactacctcgtgcgcttcaacgaagaatacggtccgctgatccagattccctcggtggtcactccggtggtcgttccctatcggaaggctggaaccacagcgctcaacttgagcagcctgcaattgtgcgatgtcttctccggcgccaggactacctgggggcaactgctgggcagcggcgacaccacgccgattcgcatcgtctaccgtgtcgatggcagcggcaccaccgagttgctggcgcgtcacctgaacagtatctgtccgacgcgattcgccaccggtccgctgttcgccaatgcccgtttgccgctcaacggcccgctgcccgccaactggaccggggtatcgagcgatgccgaggttcgctccgcgatcaatgcagtggacggttcgatcggctatgccggaccggaggggcttcctctttccgacaatgcgaagatcgcgcgggtgaacgggcttctgccgagcgcggccaatgtcgtggcggccgtgtccaccgtcgtacctccgactaccactaccgctcgcgccaaccctctggaatgggttccgacatttgccaaccccacccgtggctatgccatcgtcggctataccaatttcatcttcagccagtgctatcgggacgccaacgcggccagtcagatccgggcattcctgaccaggcactatgggtcgagcgtgaacaacgcggcgaccgtcgcccatggcttcgtccccctggttgcgatctggaagagcgcggtcatgaacaccttcgtcagcggcaacggcgaaaacctgaacatcaacaatccaaacatctgcaccaaccgcggccgtccttag

SEQ ID NO: 330745 - DNA, 1089 bp, Pseudomonas aeruginosa
atgaagcgtaagttgcaggtttttgtatcgagtactttcacggacctcattcctgagagacaagctgcggtaagtgcaattctaaaggcaggccacatccccgccggtatggagctattcacatccggtgacaagtcgcaaatggagaccataaaaaaatggattgacgagtccgacgtatatatgctgattttgggtggacgctatggctcgattgagcaagtctctggcgttagctatacagagcttgaatataactatgctgttgaacagggcaagcctctctttgcagtcgtaattaccgactcatctctcgaagctaaaatacaaagacttggaacaaccttcctcgaaaaagaaaacccgcaagctcttaagcaattccgacagaaagtgcttaataatatctcttcgttttttgacgatgaaaaagacattcgcttagccgttcatgaaagcttatcagactttgctgctagcagagatttgaaaggttgggtccaagcggatgaagttgtagacacaaaaccccttttcgaagagataaaaaaactttctgaagaaaaccagaagctaaaagaatctctggcggcacaagagagtaaggctgtatcagctcgatcccgttacgatgaggatttttctgagatagctgatattctgaaatcggtggaaattaaaatccccgccaagataaataacggcaaagagtcggtgtcagatcttttcagtatttttattaataataaagacgctcttcttaatggtgtcaccgatgcagcaagcggcagtgattcggaagaattcttctttttcaatatatgcccaaagcttcaaattcatggtttcgcagaaatagagaaagtagctggagttcgctggcgcagatacagtatcacgaaaaaagggaccgctttcctagctgattatgaacgaagaaaatttaagctcagtcaagagaaaacgaaaacagagcaaccgaaagccaccgccaagaaaaccgcaagtggtcccaagtctgcaaaaacagaaagaactagtcctgccaacgatgtttctcaaggtttagagcaatcgccaaaatcttaa

SEQ ID NO: 330746 - DNA, 315 bp, Pseudomonas aeruginosa
atgcgatgcgtttccttgctgctgcccgtgctgctggtcgcttgcagccagcagccgaccgaagacctggccgcagccttggctgccaatcccgcgcggctcaaggttttgcgtgcgcagtgtgcagccgaccgggctacggcaggcgaagacgcttgcctggctgcggctgaagccttccggcggcgcttcttcgccggtgaaaccgggcctgacgagttccacacgctggccgatctgccgccgatcccaccgagcttcgacacacccatcagtgaccaggacgccatgcccttcgagggggacgtgccatga

SEQ ID NO: 330747 - DNA, 744 bp, Pseudomonas aeruginosa
atgaaaacccaaccccgtttgcggtccgtctcgctcgccgccgtgctgtcggcatcgctgctggccgtgcagcctgcatccgcgctgacggtgttcgacccgtccaacttcgtgcagaacacgctgaccgccgtgcgcacgctggagcagatcaataatcagatcaaccagcttcagaacgaagcgcagatgctgatgaaccaggcgcgcaatctgacgaatctggacttcaacatcgtcaatcgcctgcgctcgacgctggcgaccaccgagcggctgatcgccgaggctcgcggcctggcctacgacgtgcagagcatggatgccaccttcgcccggctgtacccggagcagtacgccgcgaccgtcagcggcgaccagatgctgcgcgacgcgcaggaacgctggaagaacaccttgaacggcctgcataccgcgatgcggatgcaggcgcaggtgtcgcagaacctggcgcaagacgaaagcgcgctgtccgacctggtcagccagagtcagtccgccaccggcgcactgcaagccatgcaggcgaccaatcagcttctggccttgcaggccaagcagtcgatccaggcgcagcagctccagatcacgcaggaacgcgccgccgcgctggaactggcacgccaagcagcggctgtcgaacgcggccgggaagtgacgcgccgcttcctaggcgacggcacgccatacacgccgcagcgcgtggatttctacggcaactga

SEQ ID NO: 330748 - DNA, 2451 bp, Pseudomonas aeruginosa
atgctgaaccttgccgaataccgccagcggccagcgctcttggccgactggttgccttgggccgggctgatcgcgacgggcgtggtactgaacaaggatggctcgttccagcgcacggcacgctttcgcgggccggatctggacagcgccacgcaaggcgaactaatagctacatcagcgcggctgaacaacgcactgcgccggcttggttcgggctgggccttgttcatcgaagccgagcgccgcccggcagcaggctatccacgctccgaattcccggagccgttgtcatggctggtggatgaagaacgccgcgcggccttcgaggaatccggccagcattttgagagtgcctatcacttcacacttgcctatcttccaccagaagagtcccgcgcccgcgccgccaaaatgctctatgagaacccgccaggcgatggcgtggactggcgtgggcggctggaagccttcgtggcggaaacggatcgcgtgttcgacttgctcgacggcgtgatgccggaaatcgcctggctcgatgacagccagacactgagctacctgcacgccacggtgtccatgcggcgctaccgcgtcggtgtgcccgacgtgccgttccatatcgacgcactgttggccgactgcgccctggtcggtggtctggcgcccatgctgggcgaccagcacctgcgcgtggtgtcggtgcgaggctttccgacttcgacgtggccagggattctggacgacctcaaccgcctgggctttggctaccgctggagcacgcgctttttgtgcctggacaaagctgaggcggaaaaagaactcggccgcctgcgccgccagtggtttgccaaacgcaagaacgtcgtcgcgctgttgcgcgaaacgatcttccagcaggaaagcccgctggtcgataccgatgctagcaacaaggcggccgacgccgatgccgccttgcaggaactgggcagcgatcaagtcgctttcggctacctcaccgtcactgtgacggtgctcgatgccgacccggccgtagccgacgagaagctgcgcatggtggagcgcgtcatccagggccggggcttcgtgaccatccccgagaccctcaatgcagtcgatgcctggctgtcgtccatccctggcaatgcctatgccaacgtgcgtcagcccatcgtctcgacgctgaacctggcgcacatgatgccgctgtcagcggtgtgggccgggccggagaagaacgcgcatctggatggcccgccgttgatcgtcacccgcaccgatggcgcgacgccttttcgcttggtcacgcacatcggcgacgtgggccacacgctggtcgccgggccgaccggcatgggcaagtcggtcttgctcgctacgctggcgatgcagtttcgccgctatcccggctcgcgcatcttcgccttcgatatgggccgctccatgcgtgccacaatcctcgggctgggcggcgagcattacgacctaggcaatgacggggcgattgctttccagccattggcccgcatcgaccaggagggctaccgcacctgggccgccgaatgggtggaaggccgcctgctgcatgaaggtgtctccattggcccggacgagaaggccgcgatctggtcggcactcggcagcctcgccggcgcgccggtggagcagcgcacgctgacgggcctctcggtgctgctgcaatcgaacgcactgcgccaggcgctcgcgccctatgtgctgggtggtgcccacggcaagctgctggacgccgattctgatcggctgggttccggcagcgtgcagggcttcgagatggaagagctgatgcacagcaaggcggcagtgctggccgtgctgggctacctgttcgcccgcttcgatgaacgcttcgacggcgcgcccacgctgttgatcctcgatgaagcctggctgttcctcgatgatccggtgttcgctgcccgcatccgccagtggctcaaaacgctgcgcaagaagaacgtcagcgtcatcttcgccacgcagtcgctggccgacatcaaggattcaagtattgcaccggcagtgatcgaaagctgcgccagccggatttttctccctaacccacaggcgaccgagcctcagatccgcacgatctacgagggcttcggcctcaacagccgccagatcgagatcgtggcgaccgcgcagcccaagcgtgactactactaccaatcgcgcctgggcaatcgcctgttcgacctcgacctggggccagcaactttggccttcgccggggcatccactccgcaagaccaacgcgacatggatcgcgtgctgctggacgcaggcacaccgggcttcgccggtgcctggctgcgtcatcgtggcctcgattgggccgctgatctgctgccgtcctcgccggcggcagcgtccttcctcgcttctcaaccccaggaggtttcaccatga

SEQ ID NO: 330749 - DNA, 2007 bp, Pseudomonas aeruginosa
atgcaggctcaaggtgtgttgttcgggcagatcgccgccgtgttcggcatcgtgatcgccggtgtgtgggttgccacgcaatggacagccgcagccttgggctaccaactacgcctgggctcgccctggttcgacttccacggcaagccggtctattacccgtggaagcttttcgagtggtggttcttcttcgatgcctacgcgccgcaggtcttcgacaccggcggcatgatcgcggcaagcagcggcctgctggccgtggcggtcgccatcgccatgtcggtgtggcgctcgcgccaggcgcgcaaagtgacgacctatggctcggcccgctgggccgatgccgccgacattcgcaaggccgggctgacgcagcctgctggcgtctttctcggccagcatgacggccactacctgcggcacgaagggccggaacacgtcctgacctttgcgccgacgcgctccggcaagggcgtgggcctggtggtgccgacgctgctgtcctggccggcatccgccgtcatccatgacataaagggtgagaactggcagatcaccgctggctggcgcagtcgattcagccactgcctgctgttcaacccgaccgatgccagttcagcggcctacaacccgctgctggaagtaaggcgcggcgcgcatgaggtacgcgacgtgcagaacatcgccgatatcctggtcgatcccgaaggcgcgctggagaaacgcaaccactgggaaaagaccagccacgcgctgctggtcggggcgatcctgcatgtgctgtacgcgggggaagacaagacgctgcgcggcgtcgccaacttcctcagtgatccggccagcccgttcgagctgaccttgcaccggatgatgacgaccaagcacctgggcggtgcccagcatcccgtcgttgcatccgctgcccgcgaagtgctcaacaagtcggacaacgagcggtcgggcgtgctgtccaccgccatgtcgttccttggtctgtaccgtgatccgaccgtggcggaagtcacttcgcgctgcgactggcgcatcggcgacctgatcgcagcagagtatccggtatcgctgtatctggtagtgccgccttccgacatttcgcgcaccaagccgctgatccggctgatcctcaaccagatcggccggcggctcaccgaatcgctcgatggcagtgacggtatcgagcgccggcacaagctgctgctgatgctcgatgagttcccggcgcttggccgtctggacttcttcgagacggcgctggccttcatggcgggctacggcatccgcagctttctgatcgcgcagtcgctcaaccagatcgacaaggcgtacgggcagaaccattcgattctggacaactgccatgtgcgcgtgaccttcgccaccaacgacgaacgaaccgccaagcgtatttcagaaactttgggcaccgccactgagttgcgcgcccagcgcaactacgcaggccaccggcttgcaccgtggctggggcacctgatggtgtcacgccaggaaaccgcacgtccgctgctgacgccgggcgaagtgatgcaactaccgaccgatgaagcggtggtgatggtgtccagcgtcgcaccgatcaaggcgaagaagctgcgctacttcgccgacgccaatttcaaacaacgggtattgcccccgcctgtagtaacggctggcccctacgccgatgtaccgcctgcacgacctgacgattggagcggcctggcaatacccgcggttcctgcggcaccggccacggcatccgccgatgacctggaggccttgggctcgactgacgacggcggcccacgccgccagcccgaactgtcggaagccatcgcctatgcccccgagatggacgccccgaccagcgatctgtcgctgctcgatgacgacgacatgcccccggtgcttcccgaccagctcgaccccgcactgcaacgcacggcgcgactggcttctctcgaccccaacgacggaatcaacctatga

SEQ ID NO: 330750 - DNA, 273 bp, Pseudomonas aeruginosa
atgattttgaagctgattgccccgttcttgctggttgctgcaatcaccgcctgcggcccatccgagccgtcgaaccaggaagctattgtgccgaccgtcgaagagctggccgccgatcccgagcgcttgaaggaactgcgcctccagtgcaagaccgagcgcccgacgatgggcgacgtgctgtgcaaccgggtggccgaagcgacgaacaagcgcttcttcggcgacggcaaggtgccttacacgccatcggaaacgccgccgaagttctga

SEQ ID NO: 330751 - DNA, 864 bp, Pseudomonas aeruginosa
atgaaaaacgaaaataaagtgcttgcttgcgtcgatcaatcacgctacgcggttcatgtggccgactgcgctgcctgggcggcacgccgtattgatgctccgctggagcttctgcacgtgatcgacagccatcccgagcgggcaacggatgacgatcacagcggcgcaatcggtatcgacgctcaagagagtctgttggcacatctgtctgcagaagatgaagcacacgccaagagcgcgagggagcaaggccggttgtttttgaaccgactgcgcgaacgcgcaatcttggcaggtgcagcccgtgtcgatgtgcgacagcgccacggttctctggaagatacgttaattgagcaagcgcaaggcttgcgtttgctggcgttggggcgaagaggcaaaggggccagaacgcacgaaaatgagctaggccatcacgtcgaaaacattattcgcgctttaaagcttccgattcttactgtaagtgaagaattcaagcctcctgagcgcgtcatgatcgcttttgatggcggcactgcaattcggcgtggcatggagatgttgtccagcagccctttgctgcgaggcttgcccatcagaattttgatgtctggaaatcaatttggcggtcaagccaaatcgcttgaatgggcgaagcaaactctgtcgagagcgagctctgaagtgaccgcttcgctagtgcccggagatgccggagcagtggtcgaaaaggcagtgaaagaacaggaaattgacctgctcattatgggggcattcagtcactcgccactgcgcgctcttctgttcggaagcaagacggctgaattactgcgttcgtcacacattccaattcttctactgcgttaa

SEQ ID NO: 330752 - DNA, 1287 bp, Pseudomonas aeruginosa
atgatctcggcagccacaggcgcgatggcattgctgatggtcaccctcgttaaagagcacgggctgcagtacctgctcgctgccaccgtcttaaccggtgtactccagatcatcgcaggctggctgcaactgggcacgctgatgagatttgtttcacgctcagttattactggcttcgtaaacgccttggccattctgatcttcatggctcaactgccggagctgacgaacgtaagctggcacgtctatgccatgacggttgcaggcctgggcatcatttacctcttcccttacgttactaaggcgataccgtcgccgcttgtcgccatcgtggtgctgacagccgtctcgatcttactcggcctcgacattcgcacagtaggcgatatggggcagttgcccgacaacctgccggtgttcctactgcccgatgtcccgttgagcttggagacactccagatcatcttcccagtatctgcaactttggccgtagtgggtttgttggaatccatgatgacggcttccatcgtcgatgacctcaccgacacgagcagtaacaaaaaccgggaatgcgtaggtcaaggcgtcgcaaatatcgcgagcggctttcttggcggaatggccggttgcgcgatgatcggtcagtcggtcatcaatgtgaaatccggtggccgcggccgtctctccacattggccgctggcgtatttcttctgctgatggtggtttttatcggtgactgggtggcccgtatcccaatggcagcactcgtcgctgtgatgatcatggtgtccatcggcacctttaattgggcctcgatccgtaacttgcgagagcaccctaaaagctccagtgtggtgatgctcgcgactgtcgctatgacagtgggcacccacgatctggccaaaggcgtgctggttggtgtgctgctctcgggatttttcttcgcccaaaaggtcggtcggatcttccatgcctcctcgcacacggaggacgaaggccgcatgcgcgtttacaccattaccggccaagtgttctttgcatcggccgaacgcttcgtcaattcattcgacttcaaggaagccattgaaaaggtgcgaattgacgtcggccgcgcccatttctgggacatcactgcggttagcgccttggacaaggtagtcatcaaattccggcgagaaggtacggaagtggaggtgactggcctgaacgaggccagcgccacgatggtggacaagttcgggattcacgacaaggacggcgcagcggacatgctcgcaggccactaa

SEQ ID NO: 330753 - DNA, 1989 bp, Pseudomonas aeruginosa
atgaccgaccaccgcgacgacgatttccgcgtgcgtcccagcgccccgaagaaccggggcaagggccagggccagagcttcgtttccaaggtgctcaagcaggcgggcaaggccagcggcggcaagtcctcgatacgccattccgccgtgtccggcggccagcgcgcaggccagcggcccggctcgcgcctggggcgcggccacacggcggcgcgtttcgccggggcgaagctgacgcccatgtcgcggcgcgtgaccatcaagacgctgctggtcaatcaccaacgggccagcccgcagtcactcgccaagcacctgcgctacatcgagcgcgacggtgcgggccgcgatggcgagccgggtctggcctacggggcgcaggccgacgatgccgaccttgaagccttgaaggaacgctgtgccgatgaccggcaccatttccgcttcatcgtctcgcccgaggatggcgccgaactggacgacctgcgcacctacacgcggcatctggtgaaccgcatggaagctgacttgggcacgcggctggattgggtggcggtggatcactggaacaccgacaacccgcacacccacctgatcgtgcgcggacgcgacgacaccggcaaagacctcatcatcgcgggcgactacatcgcccacggcttccgccaccgggccgccgagctggcgacggaatggctggggccgcgcactgaactggagatccagcagaccttgcagcgcgaggtggaacaagagcggtggacgagcctcgactgcacgctgcaacgcgaggccggcgaggatggccgggtgcagatcgaacgcttcaatgaaccaaagctgcaacgccagcgcctgctgttgatcggccgcctgcaacgcttgcagcgcatgggcctggccgacgagacgcagcccggcacctgggccgtccatgcggatgccgagaagaccttgcgcgccctgggcgagcgcggcgacatcatccgcaccatgcagcgggccatgagcggccagccgcgcgagctggcggtgttcgagcccggcgacgacggccgcaccgtcatcggccgcgtggccgccaaggggctggccgacgagttgcacgaccgcggctatctggtcatcgacggcgtggacggcaaggcccactacgtcgcgttgaacacccgcgacgagctggcgaactatcccaccggagccgtggtggaggtacgcggttccgccgtggtgcgggcggccgacaggaacatcgccgcgttggcgagcgatggcctctaccgcaccgatcatcacctggcgatcgagcaaggccgagctgagcccggccgcgacccgcaggaggtcgtcgcggcccacgtccgccggctggaagccctgcgccgggccggcatcgtggagcgcgtggccgatggcttatggagggtgccggacgacctggccgaacgtggccgccagtacgactcgcaacggctgggcggcgtggccgtagagctgaaatctcatctgccgattgagcggcaggcacgcgtgattggcgccacttggctcgaccaacaactgatcggtggcggcaaggggctgggcgactcgggctttggcggtgacgccaagcaagccatgcagcagcgcgccgacttccttgaagaacaggggctggccgagcggcggggacagcatgtgatcctcgcccggaatctgctgggcacgctgcgcaatcgagaactggcgcaggtcgccaaggacattgccgccgaaaccggcctggagcaccgcccgaccacagacgggcaacgtgtagcaggtatctaccgccgatccgtcatgcttgccagcgggcgctacgcggtgctcgatgacgggatcgggttcaacttggtgccgtggaagcctgtgattgagcggcgactaggacagcaacttgctgcgacagtccggggcgatacggcggtttggcatttcacgcggcagcgcgggttaagccagtga

SEQ ID NO: 330754 - DNA, 588 bp, Pseudomonas aeruginosa
atgaccacgatttctgttcccactgctctcacgcatccacactcgcgcctgcgcgcccgcctcatgctggcgggcctgtccgcctgcggcctcgctgcgctggcctgggcgtccttcgtgcatccactgccgcgcctgacctacaacccgtccgacagcgtggcggtcggctggtatcgcgtcgatccgctcgaccatcgcaccagctcgctgccacgtcctttgtccgtgggcagcatcgtgctggtgccgatgcccgcagaggctgccgccctcgctgcgcatcgcggctacctgccgacgcgcatcccgttgctcaagcgcgtgggcgcgatggcgccgcaagaggtgtgtatcgctgacggcaaagtccgcatcgacggcgtgccttcagccgccgtgctgcctgccgatcgctggggccggccgctgccatcctggcagcagtgccgtcgccttcagcctggcgagctgttcctgctcagcgtgaccaatccggcgtcgttcgacagccggtatttcgggccggtcagcgcagccgccgtgatcggcgttgcgcgcccggtttggctggagtcgcgcccatga

SEQ ID NO: 330755 - DNA, 525 bp, Pseudomonas aeruginosa
atgaacacacccgcctcgacggcttcggcaccgccgtccatcccgcctgtcggcgtggccgacggcgtgccgctgacgcgcgttgcgctcgcatacatcgaccaacgcttcgacctctacctgcgcttcggtgatcctgctcgcatcatccggttcgaccgctggcgccgctgcgcggtgttcacaccgaacgcggttctatgccgcatccgttggcaggccaacgactacggcacgatccgctggcagctcatggtgatgcaggcttgcatgccgatggatggcgcgcagcgcatccccggcgtgcaaccaggcgcacgcctgttgctgcacgtcgagggtgagcaatcggtgcgtgccgtgctggcacgcatcgacgccattgaggcgctgagcatcgcacctgctggcacttcgcccgcgtactggcgcacgctgggcaaccggctcgcggcgcgcttgccgttgcccgaatacagcgccgagcggcacgccgcctggctggccgggagggcgctgtcatga

SEQ ID NO: 330756 - DNA, 846 bp, Pseudomonas aeruginosa
atgtccagccccttggggcaagttcggcaggaacgcgagcagctcgatctgttccgtgccctgccgggcgacatggcgccgcgcgacagccaggacctgatggcctttccgttcttctcgctggcgaagtcgcggcgcacggagccgatcgacttccgcgccagcggcatcacgatccgcgtggagggcacgcaggagcatggcatcgccacgatctgggatgcggacgttctgatctgggccgccagccagatcgtggaagcgcgcgatgcgggcttgcgcccgtcgcggctgatgcaggccacaccctacgagatcctgcgctttatcgggcgcggtacgtcgctgcgcgactatcagcgcctcaaggcggccttggatcgcctgcagtccaccacggtggccacgtcgatccgggagacaaccggaaggcggctgcaccgcttctcgtggatcaacgagtggaaggagctggccgatgcccagggcacacccttggggctggagctgatcctgccggactggttttacgcgggcgtcatggatgctgcgctggtgctgaccatcgacccagcgtatttccggctgaccggtgggatcgagcggtggctgtaccgactggtgcgcaagcacggcgggcgacagcctggcggctggcagttcgacttccagcacctgtaccgcaagtcgggcagcgtggcgcggtactacgacttcgccgccgacctgcgggcactggtggcgcggcaagccttgcctggctaccagttgggcatcgagtacgtctcgggcattgcctcgccgctgctgacgttccggcccgtgccgtccacggcacggggataa

SEQ ID NO: 330757 - DNA, 348 bp, Pseudomonas aeruginosa
atgaaccagctcatcaccgaggacgagcgcaggctgttgctggaacacggccaggcccgcgccgctggccgggccatcgacccgctgcccgtggtgcggctgttcacgccggacgcacacgccacctggctgctggtatcgctcgaccccgccgacggcgatacggcccatggcctgatcgacttggggatcggcatgcccgagctgtgcgagatcaagctgtccgacctcacatccatcgtcgggccgagcaaacagcccgtgatgcgggaccggtatttccgggcggtgcgcccgttgtcggagtacctgcggctggctcaggagaatggttccatcctcgattga

SEQ ID NO: 330758 - DNA, 294 bp, Pseudomonas aeruginosa
ttggcagcgaaacatacattgtcggaggcactaaagaccatcaggaaagcgcgtggattgagccaggaggcgttctccgacgtgtccagccgcacctacatgagcacgctggagcgcgacctcaaaagccccaccttgaacaagctggccgagctgtgcgaggtcatggaggtgcacccgctcacgctgctgaccctggcctatgcctgcgacgacctgcagcaggccgaccagctgctggcgcaggtgcgccaggagttggagactgtggcgaagaagagtgacacgccatag

SEQ ID NO: 330759 - DNA, 303 bp, Pseudomonas aeruginosa
atggagcaccacgacctgctgtcagggctgatccgcctgcatgtgctgcaccacgcggccgagcaggagatctatgggcaatggatgatcgacgagttagcccaccacggctaccgcctgtctcctggaacgctgtacccaatgctgcacaagatggagcgcgacggatacctcgtctcccgccaagagcgtgaggggcgcaccgtgcgcaagctctacacgattacacccaagggcaatgaaggcttggcgctggccaaggaacgcatccgagaattcaccggggaggcgatgcacagatga

SEQ ID NO: 330760 - DNA, 1230 bp, Pseudomonas aeruginosa
atgacagattccaccaacaccttgcagcatgaggccgcagccgcacgtggctcacccgtcgaagtcttcggcgccttcctcaaactgggactgacctccttcggtggaccgatcgcgcatctgggctatttccgctcggagtttgtcgagcgccgccgctggctggacgaccgcagctattccgatctggtcgccctgtgccagttcctgccagggccggccagcagccaggtgggcatggcgctggggctgggccgcgcgggctggttggggctgctggcggcctgggcggggtttaccttgccgtcggcgattgcgctgatcctgttcgcctttggcatcgccgagtaccacgggctggcccagtccggctggatccatgggctcaaggtggtagccgtggccatcgtggcgcaggccgtatggggcatggccaagtcgttgtgtcctgaccggccccgtgccgccctggccattctggcggcactgctgaccatgatcatgccctcagccgcgggacagcttgccgccatcgcggcggcgggattcctgggctggtggagattgaagatcgcgcaacctggcggcggccaggcccacagctacccggtttcgcgcaagctgggcatcgtggcgctgctgctgttcgcagtgccactcgtcgggctgcccctgtgggccgctgccacgggctcgtccacggtcgcgctgctggaaggggtgtaccgctctggtgcgctggtctttggcggtgggcacgtcgtgctgccgctgctgcaggccaccgtggtgcccagtggcatggtcagcaacgctgacttcctcgccggctacggcgcggcgcaggcagtgccgggaccgctgttcacgttctcggcctatctcggcgcggtcgcccacgggccgctgcatggctggatcggcgggctggccctgctgggcatcattttcctcccggccttcttcatgctggtcggcgcgctgccgttctgggaagggctacgccaccgcgcgggtatccagacggccatggcaggcatcaatgctggcgtggtcggcattctggtgtcggccctgtacgaccctatgtggaccagcgccatccacggcaaggcggattttgggctggcgctgcttgcgttcgggctactgacggtgggtcgcgtgcctccagcgctcgtggtgctgctggccgggctggcgggctgggtcatggcgatcggtatctga

SEQ ID NO: 330761 - DNA, 957 bp, Pseudomonas aeruginosa
atggccaatcaagttgcagtcggtatcgacatctccaagaagaccatggatgtagccatcgggcacgagcagtccacggccatattcagtaacgatggtgctgggcaccaagcgctgatcgcagcgttgaagaaccatccggtctcgctgatcgtgatggaggcgactggacagtaccaactggcctgtgcttgcgctctacaagctgcgggattcgctgtcattgtcatcaaccctcggcaggcccgggacttcgccaaggccatggggcgattggtcaagaccgacagcgtggatgccaggatgctggctgaactggcgcaggtgctgaaccagcgtcctgatcgagatcgcttcatcaaaccgatgccagaccaggtacaacaacacctgcatgcactggtgcttcgacggcggcagttggtacgcttgctggtcagcgagcgccaacgcaaacacatggcgcatccggaggtcgtgcaagatattgcggaactgatggatatgctcgcgacgcagcttgaggcgctggatcgaaggattgcggagcatctggctcaataccagtccgatctggccacattgctcaagagtgtcaagggagttggcccggcgacggctgcgacgctgatttccgagctgccggagcttggccagctcaaggccaagcagatctgcgcgctggtaggtgtcgcaccgatgaaccgggactcaggccaggctcgcggtaaacgcatcatttgcggcgggagggctacggtcaggagcgcgttatacatggccgccatcgttgccatgcggcacaacgccgtgatacggcgttgctatgagcgcctgctggcggctggcaagccgaagaaggttgccatcgtggcctgcatgcgcaagctgctgatcatcatgaatgccatggtcaaaaccgggcggccatggaatgaccagcctgctccggcgtga

SEQ ID NO: 330762 - DNA, 300 bp, Pseudomonas aeruginosa
gtgcagttctacaacccagaagccaccccgatactggtcaagtgcaactgggaagagcccttaccgatggacaagatgatcccgctgtccatcgcagtgcctttgatcctggagaaagaggttccgtgctggacctggtcccaggtcgcggagacatgggagtcgatgcgctcgtatttcctgggcgccccccatggcgcgcgatcgtcgctgttcgtgagccaggagaccggacaggggatcaagaaggtttgggaaacgctgatctacacggggatgtttggcccgatcaaggtgtga

SEQ ID NO: 330763 - DNA, 2049 bp, Pseudomonas aeruginosa
atgaacgccgttacctacaccgaagcccaagccctcgacacccgcgccaacgtgctgcaagccgccgacccgagcaagcacatgattctggttcccctgtcgcggctggtgctgcgccccacgggccgcaacgtgcgcaagaccccgcgcatgtccattcccgaactggccgcgagcatccagcgcgtgggcttgctgcaaaacctgatcgtgattcccgctgccgatggcgagcattacgaggtggtggccggtggtcgccgccttgcggccctcaagctgctggcgaagaaacaccgcatcgccaaggattggcaggtgccttgcctgcaagtggccgatggcacggcccgtaccgcgagcctcaccgagaacgtgcagcgcgaagccatgcatccggcagaccagtttgaagcgtttgcggcattggtggccgaaggccgccccatcgaagacattgcagcggatttttccgtcacgccgctggtggtgcagcgccgcttgaagctggcgaacgtctcgccgcgcctgatggcggactacagggccgatgccgtgacgctcgatcagttgatggcgctctccatcaccgacgatcacgccgcgcaggagcgtgcgttctacgatgcgccgctgtggcaacgcagcccctccgcgctgcgcgaacgcctgaccgagcgcgagattgacgcctaccgccatccgctcgtgcgcttcgtggggctggatgcctacgagcaggcaggcggcggagttcgccgtgacctgttcgcggaggatgacgcgggcgtgtacctgagcgacgccgccttgctggaacggctggcgcaagacaagctggcaggcatcgccgccgaggtgaaggccgagggctgggcttgggccgatgccacgcccggcatgacccatgccgacctgcacgcctttcagcgtgcgccgagggagcggcgcgcacccaacaagcgcgaagcacagcgcatcgagaagctgcaagagaaaatgcgcgccattggcgaagccgtggacgccgcgatggatgccgaggacgaggagaaggccgacgccttgcaggaggaaggcgaagccctgggcgagcagttgcaggcgctggaagaaggcttgcggggatacggcgcgaacgtgaaggccgcagccggtgccattgtgaccatcgaccgcaacggcgaagtcgtgattcatcgcgggctgctgcgcgaggccgaagctaaggcgctgcgcacgctcgaaaagctgcgccaaggcttcagcgacccggacgccgcgaacgatgacgaaggcgaggaagacgaagcgcccaagacagcagcgatttccgaccgactggctcagcgcctgagcgcccatcgcaccgctgcactgcaaatcgaggtagcccggcatccacaggtggcgctggccgcgctggtgcatggcatggtgcagaccctcttgcagggccgctactacggtcatgatctaccgctgggcgtgcgcctgacggtgcaagaccggctggaaggcatggccccggactggcccgattcacccgccgccgtggcgctgcgcgaattgcagcaggcgtggggcggcaagctgcccgacgacagcgccgaactgttcgccgcgctgctggcgatggagcaaggcgaactggtcaagctgctggccgtgtgcgtggcttcgaccgtggacgtggtgacgccgcgtgccacggtacagcagccgggcgcggaactggtgcaggctgtgggcctcgacatggccgcatggtggaggccgaccgcagaaggctacttcaagcacgttccgaaggcagcgattctgcaagccgtgggcgagttggtgcccgagagcgtcaaccggctggcgaagctcaagaaggccgacattgccagtgaggccgagcggctggtgaacggcaagggctggatgcctgccatcttcaagacggcagacgcgcccgaggaaggcctgcaggatgcggcgcaggacggcgcggaagcagccgccaccgtgacgcatgaacctgccgaggcattgaccgcctga

SEQ ID NO: 330764 - DNA, 807 bp, Pseudomonas aeruginosa
atggcaacggccctccctgtgtgccgaccgcacggcaagcgcaagcgcgcaggcccggatctggaagccgggccggaggcgtcagccaagcggagcgagggaacgatggaagcccgaagggggcgagacgccgtggccgaagggtgcggcggctcgatgcgctacgcgcacgacagcgcgaccggccatgtccacttggccggggatgcccacgcaagtcaccccaaatttcaacaaatgaagatacttgttgtaaattgtgacttggatggaaatcgtatctttagccgcaaagaagcatcaggagaaaaaatgacgcgtagagccttttacagctttcactaccagccagacaactggagagctgcccaagtcagaagcatgggtgttatagatggaaacaagcccgcttccgataacgactgggaagatgtgaaggcaggcggagatgatgcaattcaagagtggattgatgagcaattaaaaggaaagacggttgcaatcattcttgttggagagaatacggctgggagaaaatggattaactacgaaataaagaaagcgtggaaggataagaagggggtgcttgggatctacatccacaatctcaaggatagcgacggagatcaagcggaaaagggaagcaatccattttcaaaattcactataaatggtgtctccatggatgaaatcgtaaaaacttacaatccgccatattcctccagtactaatgtgtacagtcacatcaaggaaaaccttgaggactggatcgaaaaagccattgagatcaggggaaattactcgtaa

SEQ ID NO: 330765 - DNA, 1620 bp, Pseudomonas aeruginosa
atgattccaagacaacctcttgcaggggtgcgaattcacctctcaggatctgctccagatgagcggcaagaagaaatatgcttgtttgtgaaggcactagcatcgcgaatatttagcgagggaggttcagtgattcatggcagtcacccgtccttgtctaaaccattagaagatgccgcgagagattttcttcatgcgggaggtgaggtaggagccttaacattggttcgtgctcaaaaatttgccgaaacagatgaacaaattgcagaaatagaaatccaacgccaattcgcagcggtgcaaatagttcccgcagaagctgatggagtaagcaatagtgatttaactccaatgcgagactggatggccgagcgatcggatgcggttgtctgcgttggaggtaagtggtgggacataaataaggccaaagcaggggtccccactgagcttgatgcgatgctagaactcggaaagccaggtttcgttgttgcaggatttgggggagcaattgcgggttatctaaaggacaacccgagcttgccttcaagattgcaaaatggactatctgagaatgcaaaccgagaaattgcgaacgatacgtctatcgaacgtattgtagaaaccattgtcaatcagctaaagcttctgccgctcgtgcggcgcagtgtttcacgggggcgtaattttcgaattcttgctcttgatgggggaggattgcgagggacgtttactgccgccgtcttggctaagtgggatgacatgctcaggagtggtggcggtaacaatctagtatcgcatttcgatttagtggctggcacatcgacaggtgcaatactcgcaatcgggcttgccctcggaatagctccgcgcgatatattgaaattctaccaagagcaaggaccgttaattttcccaaaagataggaagcttcgacattggttgaaatccaagcacgaatcttccacgctccgagatttactgtgcaaagtgtatggtgataggagaataactgatgcctcatgctgcaggctcgttattcctacagtaagagccaaacatggacaagctgaagctattgtcacagcccataccccagatagaacagcatttcgagatatctcagcggtcgatgccgcacttgcatcttcagctgcccctacatattttgacgaatctgtctgggatgggccggttgcgcctgaatcttttcttgatggtggtgtttgggcgaacaatccaattctccccgcactggcagaagctgttcgctatctaaaaatacccttggatcgaatagatgttttaagtgtcggcacaatgggcagtgaaagcgatttcacggagtcccttggaaaagggaaagctggatgggcacccaatagtgccgatctcttctttgctgcccaggagcatggggcactagttttggccgatggttttttaggcccaacacgccatcttcggattaatcaacagactccggtagaaattaaacttgatgatgcagaagcgattgaagatatggccgtgcggggaaatgatgtaggcaaggattcttttgtttccgttcgatctagattcttggatggactgttggctccagaatggcaacggtattaa

SEQ ID NO: 330766 - DNA, 1143 bp, Pseudomonas aeruginosa
atgccttctctatatcagcttgcaatacttggggcaccaagtgctgctcagatttctgagcttgagaatatcgtggctcacgccgtaggcatgttcaatctgaggctgggtcatgaggtcggatgggatatttgtcccgaatcgttcgagccgccgcagcaaagatcagccgccgcagttttttttggaggtgagaatgctcctattgccaatgttgcaaagctgttagagcgtggcatcccattgctgccggtggcgtcggatgtcagtagagtcagcgcagagattcctgcaatgttgcaaccgctcaactgcctagcgtatgcagcaggtggtgcacaacgcgttgcgaccgcattgctggaatgtgcaggattactccctcggcagcggcgggtttttgtgagctaccgccgaggtgaagcccgagaagctgctttgcaactgtttgacgctttgtcagttcgacttttcgacgtattcctcgacacgcacggcattccacctgcggaggacttccagaccatgctgtggcatcggctctgcgattctgatgtgctcgtgatgctcgacacgccaggttatttcgaaagtcgctggacgagcgcggagttcggacgcgcgttggccaagggcatcagcgttcttcgggtcggctggccggatgccacaccttctgcgcgcacagctactgcaagccgggcagaactattgcccgaagaagtagacccgggcacagggcgtctggccgacggggcggtagagcgcatctgcttgcaacttgaggaagtccgcagtcagagccatgccgtgcgttccgtcaatcttgtgagcaatctgcgaaatgccattcaaacgatcggtggtcaagtaatcggagtggggagtaacagggccgttcatatccgactgccagatggtcgggcagtggtggtgtatcccacggttggtgttcctacatcgacaacactgcatgaggcctcgacaaattcacctgatcagtcagtcgccgttgtctacgatcacgtcggcttgcatcctcgatggctaggacatttggactggcttggccagtacatccattccgcacgatgggtcaagtcgagcgaggcaggttggcaatttgcagattgggtggcttga

SEQ ID NO: 330767 - DNA, 483 bp, Pseudomonas aeruginosa
atggctgtgattcgtcggcacaagattgtctggggcggccatcctgccattacgccgatgatctggacaatctgtgaagacttgggtgtggactactcccagtcagtgatcttgtatcagagtagattctttgaggaccgctatcccgaagagaacaagcacttccagaatgtcgtttataccgaagcgattcccaatgagcgggaagcgagcctgttgatgatgcgcgagcaaatgctgtcacgtgaagacttagttgcggcagtattcatcgggggcatggagggcgtagaggcggagcacgaactgttcagacactttcacccagccgccaaggtattgcctgtcccttcaccggggggagcggcgttgaatctctccaaggatcgaggctacttcgccgatggagatcttgccgacgtggacttcgctcggctctttcacactcacctcacgatggccatcgatgataagggacgctag

SEQ ID NO: 330768 - DNA, 627 bp, Pseudomonas aeruginosa
atggctcgcattcactcctacgtggtgcgctacgacagtggttttgcacccaatccgttttatggtcactgtacgctagtaacctgtaagccaggtattcgccgcagtgccgaagttggtgactgggtcatcggcagcggcagcaatgcccatggcgtgggtcgaggtggacatcttgtgtacggcatgcgcgttaccgaggtaatgacactcgacgaatatgcgctgaatcccaggtttgaatcgaaaaaaccttttcgcaacggaagccggaagcaaagttgtggagacaacatctactttagagatgggcctgaggcagcttggcagcaacgagattcttttcactcccgggaagacggaacacttaatcctcagcacgtacagcgcgacactggagtaaacagggttttggtcagcaatgactttgtttatttcggagggacggggccaaagttccctctagaactgcaagaccgaaatggtagacctctgtgcaaaagtggcatagggttgacttgctttaatgatcctcaactgcttgccaatctagagaaatggatacgtagtttgggtgttgccggctatcaagggcccccattcgaatggctcactcttcgcggataa

SEQ ID NO: 330769 - DNA, 306 bp, Pseudomonas aeruginosa
gtgacgagcaagctcattgaatccctgcgcggcgatctggccgcgctgcacgatgccggcgcgatcggcaaggtgacgatgcgcgagttcgacgccatctgcccgccgccagtacgggagttcagcgcggccgacatcaagcggctgcgcgaggaactgaagttcagccagccggtgttcgcactgcacctgcacaccacggcatccacggtacgcaagtgggagcaaggcgacacccatcctgcagggccagccctcaaactgctcaatgtcatcgcgaacaaggggctgcaggcaatcctttga

SEQ ID NO: 330770 - DNA, 384 bp, Pseudomonas aeruginosa
atgaatgtcctcaagcgcaaggactttgcacggtggcaggcgggcgagaagctgcccgatgccgccttgtgccgggcggttcacgagatggaggctggcctgattgatgctgacctgggcggcttcctctacaaaaagcgggtggcccgtcttggtggcggcaagagcggcggttatcgaacgctgctgtcagcgcgaatcggtagccgctatgtgtttctgcatggattcccaaaaagcgataaggcgaacatcacgcaggacgaaaggaaggcgctgcagttcgccggaaaggtgtttctggagctatcggcagaggacttgatgaaagcgctgcagataggcgttctattggaggtgtgttgtgacgagcaagctcattga

SEQ ID NO: 330771 - DNA, 1206 bp, Pseudomonas aeruginosa
gtggcaaaaatcaagctcaccaagtccgcagtcgatgcggcacaacctcaggcgcaggccgtcgaattccgggacacgctggtgcccggcttcctgtgcaaggttacgccagcaggccgcaaggtgttcatgctccagtatcggacgaacgccggcgaacgccgcaagcccgccttgggcctctatggggaactcaccgtcgaacaagcccgttcccttgcccaggagtggctggccgaggtccgtcggggtggtgaccccggtgcggccaagaccgccgcgcgcaaggccccgaccgtcgctgaactgtgtgtgaagttcatggaggaccactccaagcagcgcaacaagcccagcacgcaggccggctaccaaaagtgcatcacccgtaacatcatcccgatgctgggccgcatgaaggtgcaggacgtgaaacgcccggacgtggccggggcgatgaagaagatggcgcacaagcccgcggacgcgaaccgcacgttcagcgtgatgcgcaagatgttcaacctggccgaagtctggggctaccggccggacggcaccaacccgtgccgccatgtcccgatgtaccccaacggcaaggccacgcacctcatcagcgacgaggagatgggcaagctgttccggtatctcgactatctggaaaccgatgggttggggctggatcatgcgatccttccgctggccatccggttgcaattcgagttcgcgggccgccgctccgagatcgtcaccctgcaatgggattgggtggatttggagaaccggcgcgtggtctggcccgacagcaagaccggcggcatgtccaagcccttaagcgaggaagcctaccgcctgctttccaccgcgccgcaccaggacggttgcccgcacgtgttcccgtccccgaatcatccggggcagcacctgaccacgggcgagtattacagcggctggacgcgcatcctcaagcgcgccggcgtgacccacgtgggcacgcacggcatccgccaccgttcggccaccgacatcgctaactcggggattccggtgaaggtcggcatggcgctgacggcgcacaagaccgtggcaatgttcatgcgttacgtccacaccgaggacaaaccggtacgcgaggcggccgaactggtggcgaaccggcgcaaggcgatcaccggggcgcagcgcccggtagaggtggcagcatga

SEQ ID NO: 330772 - DNA, 1317 bp, Pseudomonas aeruginosa
atgtcgtccgtgagttcgttgtcgcgcctggccgtcgccatcgcgctgggtgtgtccatgcaggcggcgcaggccgaagaggaagccaaggagctgggcacggtcaccgtggtcggcgactggctgggcgaagccgaccaggcggtggtgcagaaccatcccggcgcgcgcagcgtggtgcgtcgtcgggaaatgctcgagagcggtgcgcagaacgtccgcgacgtgctgcgcaaggtgcccggcgtgcaagtgcaggacaacaacggtaccggcggcagcgacatctccctgaacgtcggggtgcgtggcctgacttcacgcctgtcgccgcgctcgacggtgatgatcgacggcgtgccggcggcggtggcgccctacggccagccgcagctgtcgatgatgccgctgtccatcggcaacctggagagtatcgacgtcgtgcgcggcgccggctcggtgcgctacggcccgcagaacgtcggcggggtgatcaacttcgtgacccgggcgattccggagaagttctccggcgaaatcggcaccaccatcgagcatgccggccacggcggctggaagaagctcaaccaggcgttcctcggcgggaccgccgacaacggcctgggcgtggcgctgctgtattccggggtgaagggcgccgactaccgcgacggcaacaacgacaacgatatcgatgacgtgctgctcaagacccattggcagctcaccgacagcgaccagttggcggccaacttccactactacgacgcctacgccgatatgccgggcggcctgacccaggcgcagtacgacgacgatcccttccagtcggtacgcgactgggacaatttccgtggtcggcgcaaggacttctcgctgaagtacacccgccaggtcgacgacctcacccagttcgaggtgctcacctactacagcgacagtttccgcggcagcagcatcgccgcgcgcaacctcaggaccatcacctcgtacccgcgcgactaccatgtgttcgcggtggagccgcgggtctcgcggatcttcttcgccggcccgaccacccaggaggtcggcatcggctaccgctacctgaaggaagcgatgaacgagcgcgccagccagctggccctggtcgacaatgtgccgaccgtgcgtcccggctcggacggccatacctaccaggaccgtaccggcggtaccgaggccagcgccttctacatcgacgacaagatcgatgtcggcaactggaccatcaccccggcatccgcttcgagaagatcgatagcgactggcgcgaccgcccggtgctcggcctga

SEQ ID NO: 330773 - DNA, 1335 bp, Pseudomonas aeruginosa
atgattgaaattttcacacgactaacgtttgaaagcgagtcattagatactgcgttctatcgtccagagaaaccggatgactcaacgctcgcacaggatttaaatatactagcaacgcgagaaaacgttgacttttcgattcaaattagtgacgccttcgacgagcagatagcccttccagcacaagaggatctatcgagcttcaacgttgagctagtatcatttataaaaaacaacaaacccgatactcaatattttttcactactcaagggctactaaaaaaccttgagtccagcgagatatcaaaatcctctaacatatacatactcgaagattttaccgagttcaaaacactcacctgcaacttcagaaaatgggacttatgtaagccgaacttaacccacaagcaggacagcgagcatcgtgtagacgctcgaaaaatcgtaaatgattatacaggctctcagattaattcaaaccacctcttttgggtaactaccgatattgcgaccgcccccagcgaaattattacagcatggcttaaacactccacccccaaggcctcaattttacttctttctgaaatatcaactaatagcaacaagacaatatatacactaaaaggaaataagaatttagaatttcatgccaatgaaaaggctgtcgaactacctcacagcgcacacatcaatattcacaacgccttaaactggatatttgacacagccagagagaccgaaataagacacacgctgttgtgccagcgactatcacacaacaaccctaaaaaactagaaacctggactgaattcattgcaagaacaataaccccctcattatcagcagctaaagaagactacaaaaaacatctacttatcaaaacaggggatttacttaaagccattacagacattcgaaaagcagttgccgacgaaacaaacaaaataatagaaagaacgagtaaccttacatccaacctcctccgggatgcaagcatagcattcgtaatagcagttctaagacaaactttaattacgaaaaaccttctcacaaaagagaacgcatcactattactgctggctactgctgcatggttagtgactagcatttgcctcaccagctaccagaacaaactcgtcataaattcacaaatacgctttcgtcggaactggagcaaaggattaagctctttagtacctgaaagcgagctcaaaaaaatatcgagacgccctttaaaagacgcaatatctaattataaaaaaataaaaattatcgtaagcaccatatacgcaacactagtactaataattgcaagcatccttattttcacatag

SEQ ID NO: 330774 - DNA, 948 bp, Pseudomonas aeruginosa
atggaggtcgacacacctgaagactactctaaattcttcattgaccgcctaaaagaaacgctaaaaggaacaacttatatatttcaagaagaatcttgggtgaaagcccagattaaaaatgccatgacaagcccgcacgcatttgtagacacctcagagagactcgcacaaaaattccaagagctattcaaatctgacaaaagacttatacctggagcgctaatgctcctaaagataaaaaatggaaaagacacttatggcgcattaatcaaatatgacgacatgagcgtcatctcttacaaaaccaaaacactagataatggaaaagtaaaaccagtacttgatcagtttttaaataatttcgtacaagacaagagagccattcagaaatctgtacttttcaacattaactccccacactcaaatataatctgcaccgacagaagcggcaccaaaggagacataacagacaagctcaaggggtacttacaagccgacagacttttcacacgcacgctattaacagaaagacttatatccgcgctagaagaaacagcacgatcccaatcagacctcatcccgccagaaataaagagaaagcttaaaagcgcggtcaggcatgccgtcaaagaaattgtcgaatttgatccagagaatcatgagcaaattcttactgccgctttcggtgaggctcacaaagaggaaaaattaagaaaagcattcagcgccgcattgaaaagtagaaaaattctacacgagaaatttgagatagcgcatgaagcggtcaaacaaccatcaaaaagaattaaacagacacacgaaggggtaaaagtaatctacacaagtgatgacataggaaagaacattttcttcgaggaaaatggcgcaaagaaaacaattcgcatcgtcactgaccgatacacattagacgacgaagcagatgattga

SEQ ID NO: 330775 - DNA, 402 bp, Pseudomonas aeruginosa
atgcaatcaagcaaaaactggctgctggcgattgccgtcacagcgctcagcgctggaacacacgcagcggacgatggctacagcgaaacctataccgcctgcatggatgactccggcggcgtgacggtgaatatgctcgattgcatgggcagcgagacggaacagcaagacgcccgcctcaacaaaaattacaaagccgccatgcaagcgctaacacccgcacagcaaacacaactgcgcgacgcgcagcggctatggatcaaattccgtgatgctgattgtgccctgctcggtagctttactggaggcaccatcgaccgcataaacagcgcctcgtgctttttggatatgaccaagcagcgcgccgatgaccttgcgggattgaccgacccaagcctgtga

SEQ ID NO: 330776 - DNA, 1122 bp, Pseudomonas aeruginosa
atgaatgacccgctctggatctggcagcagcccgactggccgcacttcagttggcaagccgaagcgctcgccccgctgttgcgagtatgcagccaggctcagggtcgtttgttgggaatggtcggtgcggtgggcagtgacaccgaagtgcagagcagcctggatgccatgctgcagaacatcgtcacctcttctgccatagagggtgagcagttgaatgtcggttcggtgcgttcatcacttgcgcggcgtttggggttgaacgaagaaggccgtaccacctcgcgctccgaaggcctggcggaactgctgctcgatgccacccatgcgcatcaacaaccgctggacgaacagcgactcttcacctggcaccgttggctattccccagcgatgaccaacttctggctagacctctgcacatcggcacactacgcggcgaagagccgatgcaggtggtttccggtcgcatcgaccaaccgaccgtacatttcgaagcgcctccgcgcgcagggctggaagcgcaattggccgactttctcgcatggttcgagagcagccgcagggatgccagcctagatccctttctgcgcgccggcatcgcccatttctggttcgttaccctgcaccctttcgatgacggcaacgggcgcctcacgcgcgccattaccgaccttgcactggctcagggcgaacaacaggccatccgcttttacgcgatgtccgcgagcatcctcgacgaccgcgccggttactaccgcatcctcgaagccagtcagaaaggtgggctggatatcaccagctggctgcagtggtttctcgcaaccttactcaacagcctggagcaggcccttgctcgtatcgaccgcgtgctggtcaaggcgcgcttctggcaggcacaccgcagccaaaccctatcggcggagcaagtcaaagtacttaaccgcctgctcgatggcggcgaacggggttttgaggacggtatcagcgcggcgcaataccaggccgtagctaaggtctccaaagccaccgcgacccgccatctaagcgacctgctggaaaagggctgcatcgagcggctgcccggcggcgggcgtagtacccgttaccagatagcacgctga

SEQ ID NO: 330777 - DNA, 807 bp, Pseudomonas aeruginosa
atgcagcagatatctacctgccaatactggatcgacactgcacaaggacagctctttgcgcagagctggactccatctgaggcgtgtggcgctcctatcgtgctgctgcacgactccctaggctgcgtggccttgtggcgagacttccctgtgcacctggcgcatgccagtgggcgtcgtgtgatcgcttacgaccgcctgggctttgggcgctctgccgcttacctcgataagctgccgccgagctttatcgaggacgaggcgcatggcagttttcgcgccctttgccgacaactcgacctgagccagttcgtgctgcttggccacagcgtcggtggcggtatggcagttggttgtgcagctgtttatgcagatgcctgccggggactgatcaccgaatctgcgcaagccttcgtggacagcgcgacgctggatgggattcgtgtcgcagagcagcaattcgcaatgcctgggcagttggagcgactacggcgctatcacgccgaaaaagcagagtgggtgctgcgcgcctggatcgacacttggttgtcggatgccttcagccagtggagcctagatgagcagctggctaaggtggactgtccactgcttgccctgcatggcgatcatgacgaatacggttcacgacagcatcccgagcgcatctgtgctttggcatccggccccagtgacctgctgattctgccggattgcgggcacgtgccccaccgcgagcacccggacacagtgctggcagccatcacgagatttctcgctcagttagattgtgcggcgttcactcgttag

SEQ ID NO: 330778 - DNA, 384 bp, Pseudomonas aeruginosa
atgcaagcaggcagcaccggcgcttcagatcacttcgccgagcttctcggcatcgagtcgttgcacagcagcttcgagcagtcggcctgccggctacgtatcgcagaacagcatcgcaatgcactgggtggtatccacggcgggctgatcttctccctggccgatatcgcctttgctgcggcctgtaatgctggcgcttcggtgtatatcggcctgcaggccgaggttcgatacatgggcaaagccgagggggatgtattgaccgccaccgctaccctcatgggtagctccagaaaaatcgcccattaccaagtactggtgacggacagtcggaacaccagtattgccatgttcagcgcctcggcatatcgcctcagcgagtag

SEQ ID NO: 330779 - DNA, 969 bp, Pseudomonas aeruginosa
atgaagaaggttgcaatcctgtcctacgaaggctgttggggcatggggatattctctgcgacggattttttccgcatcgtcgccttgctcgaacagcacctgggtatggcacaaacctatgcggtcgaagtgctttcctcggacggtgcggaaatttgtgcggcaagtggccacatgatccagcccgatgccgctatcaccgatgcaggcgactacgatctgctgatcattcccccggttgaaggtgtgcgccttgctgcaggctttactcccgaagctcatgtgctggcctggcttgccgaccgccatcaaggcggtgctcgcctgctggcaatgactaccggagtttgctttgtggcagcggcaggttttgccgagcatctgctgctggctacgcactgggcctatgtgcgccagctgaaaatgcgctaccccacctgtcacttcatcccacagcagtctttcttgcaggctggcgacatttggagcacgggaacactgaacggaggtttcgacgcactactggaaatcctggcccaggatcgtggtgatcagttcgcgcagctgtgtgcaacccacctgctagtctcgtcacccgaacgactcaaccccatccttcccggtcatcgtaaccaccgtgacgaagcgattctcaggctgcaggactggatcgaatcgcatcatgccgaagccattaccatcgagcgcatggggcacgaagtggggctggctgaacggacgctgaagcgccgattccagcaggccacccggctgtcacccaacctctatgtgcaaaaagtgcgagtcgacaaggccaagaagctgctgctggccagcagtctgccggtcaaagcaattgcttatgaggttggctacgagaacgtaagcttcttcgtgcgactgttcaaaacccacgtagggcagacgccggcagaatggcgaaagtgcgagtcaatactcacgccttag

SEQ ID NO: 330780 - DNA, 297 bp, Pseudomonas aeruginosa
atgagcaaaggtgtaatgacatgccttccacctcacgatggccacccaggtgtggagatcacctgggctgcggactgcagtgaggcattcaaccagggggccaagctagcccagagctggcttgataatgcacgtacgggctggctctgggcagtcatgatcgccgagcgcgacttactgccatacgcgatagagcgaagagcgttcgaagtgggcttcctcagccgcgtccaccagcgaatatgctcacacaggtgctgcggccagtcggctaaaccccattccctggagctgtaa

SEQ ID NO: 330781 - DNA, 777 bp, Pseudomonas aeruginosa
atgaactgggcatgggagcagccgctcccgcccgtgccgaagctagtcctcatggcgctcgctgataacgcagatgatcacggctactgctggccgaagatgaagacgattgcagcgaagtgcagcacttcggagcgcaccgtccaacgcactatcaaaaccctactggctgccggtctgctcaggaaggacgctcgattcgatgccaacggccggcaggtttctaacggctacacactcgctttgacctaccccgacaaattgtcacccccggccgatgacaacgccagggagggtgacaccactgtcacccccggggtgacacagctatgtcagggggagggtgacatagctatgtcacccctagaaccaccatatgaacccccatatgaatcatcagtaagccgcacggcaaaactgacacgtctgagtgccttggagagtcaacaggtcgccctgttgatcagatccgctcctgctgatcaacaggaagcgatcaccacccaattgttgaacgccctggccaagggagctatccgaacctccccatcacgctggttgaaagcggtcattcgccggacaggcagccacgtgcatccgcagaatgcgccagagctgtcggaagcggactatgtgaaacgtctggttcaaggcgggatctcgacggaagacgcacagcgcattgcccagaagacctttagtcgccgtggagtcagcccctctgttaaaccctcaccaaccaaaccgcccaagacagcggctgaaggggcagcttga

SEQ ID NO: 330782 - DNA, 219 bp, Pseudomonas aeruginosa
atgacagtcgaagaaaccctgctgaaccgctacggaggctcaccactactttcccttgagcagctcgcagaggtgctgcatcgcagcaaaaacggcctgagaatctccctgagcggcgacaacgagctgtccgcgaagctacgcccgtgcaaggtcaaaatcggccgacggatctatttcaaaacctctgcagtcgctcgcgtcatcgaagaagcctga

SEQ ID NO: 330783 - DNA, 759 bp, Pseudomonas aeruginosa
atgtcaagcacgattgaagaccgcgtcattctgattctgaaggagcagatgtctccggctgaccttgagagcctgaaggggcatgaagggccgttctcagcgctgctcagcctgtggagtcagccgccgtacgctggtcgcggcttctgggaaaagctctcccagctcacaggcattccgtccgcccggtggcgtagcgcgttctcgcgcaagcagaaaccgacctcagccatgatcgagtcgattgcccacctgtggccgaaatatgcgttctggctggttactggcgtgaccgatgcggccaatggtcatgtggcgccattaacggcgctgaccttccctgagtttcttcatgcggagcagcctggcgctgatgcgtatttcagcaaggccattgccctggcaaagcgactgtatgaagagggtgaggtcgatctggagagcgatgaagcgcgccttgcggcagttgagaggacgcttcccttggcgcattgggttggaagcgatctagttgacgtggcttatcgactggcaaccagcgatgagtatcaggagcttgtcagagcttgggagggccgagaagagtctcgtgctgagcatcttggtcgggtgctaggcactgaccggccctgggagcggcagttggaggagggcaagtccctcggcctcaaactgactccgatcccaggacaagaccctcgcgttacgcaccagagcagctgggatcttttctacaagccacacagcgaagatgcctga

SEQ ID NO: 330784 - DNA, 1095 bp, Pseudomonas aeruginosa
atggcaacaatcgtcaaaacacctgccggcacatggaaagccgtagtccgaaaaacgggctggccgaccaacgccaaaaccttccgcaccaagcgcgacgccgaagactgggcacgccgcaccgaagacgaaatggtgcgtggcgtgtacatccagcgcagcggctctgagcgcatgacgctggagaaagctctagagcgctacctgtccgaggtgacgcccagcaagaagcccactacgcgcaaagccgaagccaccaaggccaagcagttgatccagcacctgggcaagtactccatggccgccctctccgctgaagtcatcgccaaatatcgcgacacaaggctcggcaccctgagcaagcgcggcctccccaccagcaacaataccgtgcggcttgagctagcccttctcagccaccttttcacggtagctattcaggaatggggtctgggccttaccttcaacccggtgcttaatatccgcaagccgagccctggagacggccgagaccgccgactgtccgccgacgaagaaaagcgcctgctcgctgcagtgaacaaccacagcaaccccatgctgggctggatcgtccgaatcgccttggaaacgggcatgaggtcgtcggagataaccggcctacgctgccatcaggtagacctgaaaaaccgcgtggtgcggctcgcagacaccaagaacgacagtgctcgcaccgttccccttaccaagctggcaaccgaaacatttagggccgccctggagaaccccgttcgccccaaagactgcaacctagtgttcttcggtgaaccgggaaaggacgagaaacgtcgcccctatgccttcaccaagacctgggggctgctgaagaagaagctcgggatgcccgacctgcgcttccacgacctacgtcatgaggcggtcagccgcttggtcgagggcggcctctctgatcaggaggtctcagccatcagcggccacaagtcgatgcagatgctcaagcgctacacccacctgcgtgctgaagaccttgtcggcaagctggataagttggagaggaaaacgaccaaacgcagcaagcaacaggctgacaactga

SEQ ID NO: 330785 - DNA, 1803 bp, Pseudomonas aeruginosa
atggctccaaaagctccaaggaaaaaagttatggaagaagctctggatgaagtcgcgccgagggctcgcctgcataagttggtaataaaaaatttccgtgctattgggcgggcagaagtctccattgaacttgacgatattgtggtcttggtcgggcctaataactcggggaagagttctattctgcgtgcgtatgaagtagtgatgcagtctgggaggctaaatgaactatcgttggaagactttccgggagggaaagtgcccgaggaagatgcggatgcgttccctactatagaactagagacagtgctttacgaagggagtaagccccctgcggagaaatggatagaagttaagcctaatggtgataggcatgttagagaaagatgggtttggaaaaatgttgggaagccagaaaagaggggatttaatgtcgaggaaggcgactgggataagaaccatggtccatggggtataagttcggtagcccaagtaaatcggcctgagcctcatcggatagatgcttttcatgatcctcaaactcaggcggcagatatagtaaatctccttcatacggcactaaaggagaggataaaagatataagtcaagctaaggcggaaagggaagaagaaaaaagtcaatatgagttgctgttggagtctgttgcggcccttcagaaacaagttgctgtcgatgctctgggtgcaattgaacaagttcagaatagtctgaatgattcaatatcagaggtatttccaggctataggatcagcttggatgctcggccagaggatgatttagataaggtcttatcattttttaaaacatctcccttgttgcgtatgggacctgcagatggccatcaggcaactctggagcaccaggggagcggggcgagaagaacgttgctgtggactgccctacggatattagctgagcacaaaagggggaaggtagagaaggaggaattagccggtagaccttacgttttgcttttggatgagccagagatgtgtttgcatcctagtgcaattcgtgatgcctgtaatgtcctctactcactaccagcaggtaagaagtggcaggtaatggtaacaacacactctcctgtttttattgatctttctcgagataatacatccatagttagagtcgagagaacggttgatggcgatgtctctgggacaactatattcaggcccgaacgtgcaaagttgagcgaagatgatcgagaagaactaaaaatgctcaatctgtacgatccttacgttgcggagttcttttttggtggaagaacgattgtcgtagaaggtgatacggagtatacggcgttcaaggaggttatggccgagaataaggctaggttcggtgatgttcacgtagtgcgcgcacgtggtaagtatacgattgttgcgctctgtaaagtgctaaaccaatttggtaagccgtatgctgttcttcatgattcagacaaagagatgattgaaggtaagaaaggtcttagaagaaattccgcttgggccgcaaacgagaagattttggatgccgttggtcctcagcgtggaaatgtaatacttgccgcatcgattcctaactttgaaatttctatgtttgatgggccagcagaaggtgagaagccatatggtgcttgggagcgagtgaggaaagatccagaaacgagagaacgggtttccagtttgcttgagtttttggttggtaagcgagatgttccaccgaagaacatactagcttggaatgctattgaagatttaaaggctgcagtggacaactatgagttgtaa

SEQ ID NO: 330786 - DNA, 972 bp, Pseudomonas aeruginosa
atggaagaagctgtaacccgtatcgtagaacggcaattccccgaactctccggcggctatcacctgccgcgctacgctcgcgtcacagctgtggccgacccgccggcggcgaacggcttgtgcgacgacttccgcccgcgcttcgccgtggatctggagatcctggacgtgaacggcgaggccgacccggcattgccgcccatgccgggcgtcccgctaccgctgccgaacggcggcggcgaacgcgggttcctcgccttccccgaggaaggcaccatggtggtggtgggcttcgcctacggcctgccgaacaaaccgttcatcctgcagatcctgccccacggccagagcctgccgaagctgccgaaagaggatcagctgtggcagcacagcgaagccgttctgcagcgcgtagacggcgcggggaactggacaaggctgacggacgggcgaatccacgaccaggccatggagcgcgaggtagaggccctggagaacgtcgaacgctaccaaggcagccgagtcgagatcgaggaccatgcgaccgagcaggtgggcggcgtcaagcggatcgaggcgctgggtgcgctcaagctgttatccggcggatccgccagcctggccgccgtggacgatctacaccaggccaccgggcgcgacctgaacctggttgccggccagcgctacaacgccaccatcggcgccggcatggacgagcgtatccagggaatgcgccggagcgtggcggccgtcgcccaacacctgcaggcgccgaagacatggctggggtctgctgacgtgaatgtcctgcaggtattgtgcgacctgctggacctagtgcagcagatgaacacccagttggccggtcacgtccacccgccggcaggaccaccgaccaatgccggcgacttcaccgctgacgcggcccaagcagccgccttggccgggaagctaaagccgatcaccggatag

SEQ ID NO: 330787 - DNA, 543 bp, Pseudomonas aeruginosa
atgacgctcatgctcgacggcgaacaggtccacggaaaggaactgcagatcaccgccaacctgcgcatcgaaagcgcggatctgtccgggcagacaagcaacaccgctacagctcacaagggcttcaagcccaaggggctgaccgtcagcctgatgattccctacgttgaccagacgcacctggtggccttggtgcggatggcagagaagactgcaggcggcggacaactgcatacctaccgcgtcgtcaacaagaccgccgaggccttcggcgtgcgccaggtccagttcagcgacaacctcagcgtgcgcgaagacgacctgctgcgggcctggcggatccagttcaccctgaccgaaaagctctcgaaccccgagcgtgtagagacacgccggcccggaaacaaggtccagcagcaggccggcaccggcgccacggtcgcagatcccgccgccggcggcgacggcaagcccacccaggaactgacagggttcgaacggatcctgcagcgcgttgaccaggcgctggagggtacgccgtga

SEQ ID NO: 330788 - DNA, 924 bp, Pseudomonas aeruginosa
atgacctgggcatcagtgaccatgcgctggcctgcccaggccacgcgctggctggacgacttgagcaacgcgcagaagctcgccggcggcgagctggccagcacgaccaagcgtatgcgcgacctgcaggggctggccaccaccaacccggggccggtcggtgcggcggccgggccggcgatctccgccgggcgcaacgcgatggccaccacgctgggccaggctcccacttgcatggccgtgacgccgttccaggccggaatcggccagggcaaaggacaccagcgcttcctgtcggcgccgaacctcctgcagttgctgggcgacaagctgctgcagctgccgcagcgcaacgaccaggaacagcacgccctagtcctattgttcctgggcacgcgctacgaccagttagcggccaccctgggccgtttcaacgcgatgatgccaattcccgacctgcagcgcgccgagcggcgcgccggacacctggcccgcctggaaacggaaaagtggatcctacccaccgccggccccttacctcgctggcaggatctgcccctggagcgctgcaccattacccgcgcagcccgacaaaccctgtccgggcaattggccgttctggaaggctacgccgccgacagttcaccgatggcggacctagccgccctggccagccgcaaaaccacgctacaggcgagcaaggacgccgccctgcaggcgctgcgcgcgcaactggagaatggcgccgaggacagcacaatgcaggcccgcctagtcggccccggcaacgccagcgagctacgccggcagttgctcaggggcaaggcgccagggcatgagtgggtgctgtgcgccgggctggccctggtcggttcgctcgccggcctggcgttcgtgcgtgagctggtggggctggatccatga

SEQ ID NO: 330789 - DNA, 468 bp, Pseudomonas aeruginosa
atgaacaccagcgactatgttttctccccctctgcggcggcgttctaccccgtgtcgttgcgcgaggcctacgagtccggcaacggctggcctgcagacggaatccccgtcagcgctgaggtccacacgagaatcctgcaggaacaggaagctggccgggtgatctgcgcgggcccggatgggcagccgatgacgaaagagccgccgccgcctgaactggcggcgatagagcgcgcctggcgggatcaccaactggacgccaccgacgccctggtggcgcgccaccgcgacgagatcgaggacggcgacactaccctgaccggcgagcagtaccaggccctacaggcctaccggcgcaccctgcgcgactggcccgagcacggcgagtttccgcttgcggagcaccgccccagcgccccggcgtggctcgccgaagagctggagcgcgacggcaggtactccgcatga

SEQ ID NO: 330790 - DNA, 2634 bp, Pseudomonas aeruginosa
atggcacgcatcaccaccgccggcgaacgtttgattgcccagaagctgggcgaaaagaagatcctggaaatcagccgcgtcgtgctcgccttggtgcctggcctggatccgagcaagccggtagaccgcgacgcggccaagccgccggccaaccagatcgtctacaccgccaacgtgaccaaggccgggtacgtgaacccgaaccagatcgtttacagcctgatgatgggtagcgacgtcggggacttcgactggaactggatgggcctggagtccgccgagggcgttctattcgccgtcgcctgggtgccggtccagcagaagcgcaagaacaaaccgccgctgcagatcggaaacaacgtgacccggaacatccttgtgatgttcgacggcgcacaggagctgaccgcgctgaccatcgacgccagcacctggcagcacgacttcaccgtgcgcctggccgggatcgacgagcgcgaacgccggagcaaccgggatatcttcgggcgggcgaccttcttcaataccggtctgctgcttgagaaagcggccacgaactatcggctgaaagccggactggcctacgtcgaagggatccgcgtcaacgtcacggcggacgtgtccgtagcggcgccggcgctgccgaccactgcatggctggacgtgcgcctgcagcgtgaccagtccgacgtggtggcgtcctggtccatagcctggggcgccgccctgcaagacttcaccgacagcgccggcgctctgcattacctggtgccgcttgctgacctggccgccaatggtgccgtcaccgaccggcgcgctgtcgagcccatcgccggcgacctggtgcgctacctggccgcccgcgtcggtacctatcccaacctgcgcgcccaggcaacgacaaagggggatgtgggtctgggcaacctgcccaacgccatcagcgacgacccgaccaacaacaacggccaggtgctggccaccaccaagatggtccaggccgtgcgttcgatcctgcagggcgcgctggatgccatcgtcagtggcgccacggtggtgggcaaggccgcccagctggccacccctcggcgcatctccatcagcggcgcggcgacaggttctggcaccttcgacggcagcgcaaacactgccctggccatcaccctggcggactccggcgtaaccgctggcacgtacccgaaagtgagcgtcaacgccaaaggcctggtcacgggcggcgcggcattgacggctgcggatatcccgtccctggatgtggggcagatcggcaccgggatactgccggttgcacgcggtggtaccggcaacgccatcggtcaggccgcgacggcggtccaactcgcgtcacctcgcacgatcagtctcagcggagccgccaccggcagcgccaagttcgacggtagcgaaaacgccggaatatccgtcacgctggccaactccggggtcgacgctggcacgtacacgaaagtcagcgtcaacgccaagggcctggtcactggcggcgcgagactgggtgctgcggacattcccgtgctggatgcctcgaagattgcaaccggcctgctcgatttggaacgtctgccgttggtttcccaaggtctggccaccgccgtgcccacaagcgtggatcccaactccgtagtccttccgctggtgctgaccaagcatgcgaatggacccgtggcggatcggtactactacattcaaacgatgatgtatccgaccgtggggggcaacgctgtccagatcgcggccgggtatgccggcgtggctgacatgtacgtgcgttatgcgtattcagcgacagctacgacggacccgactaagcgggaatggtcggcctgggtccgctgtgacctgggaggggcgttcgctcactcgcccgatggcgaattgggggctggggtcaatctggactcgatgattgcgtcgggctggtggcaccaaccgttcaccgcgaacgcaaagaacggctcgaactatcccgtgggagaggccggtttgctgaccgtccatgcgcccacttcatcgatgatctaccagacatatcgtggctacgccgccggcggcgtgtactggcgctgccgctacaacggaacatggtcagcctggtatcgcgcatgggactccggcaatttcaacccgaactggtacgtcgccaagtcagagtacagctgggcggcgctgccaggaaagcccgcgaccttcccaccttccggtcacaaccatgacgcctcccaaattacatcgggcattttgccgctggcccgtggcggcctcggtgccaacaacgccgcaacggcccgaagcaacatcggcgccgggactatcgcgaccgcctcgctgggatccagcggctggtggcgagacaacgacacgggactgatccgccagtgggggcgggtgactgtaggcggggacactactgcaggcatcactttcccgattccgtttccgaacgtttgcctgggcggcttcgcgggccagacagcaaatttccaccccggcacagacgcgagcacctcgttctataacctgacgacgacaggtgcgactgtggaaaacgggtaccaactacagatggttctgttctgggaggcattcggccgatga

SEQ ID NO: 330791 - DNA, 2337 bp, Pseudomonas aeruginosa
atgagcaccaacagcaccgcgagactggactttgtgctgcgcctgatcgaccaggtgacggcgcccgcagcgcaggccagcaaggccctcatggacgtggccgaggtcggcaagaacggattcatgcaggtgggcgccggcatcgccggcgtggtcggttccgttgtcgcgttccgccagtccctggctccggccttggagcagaccggggccctgggcgagatccagtccctgggcgtcgcccaggacgccctggacgggctgaaccaggcgtcgatggagttcgccgcgaactacggcgagcacgccaccgcctttgtccgctcggcctaccaggtcgaaggcgcgataaaggggctggtgggcaacgagctggcagcgatcaccaacgcgtccaacgtgctggccaaggccacccgcgccgacgccgacacgatgacaacctacatcggcaccatgtacgggctgttccagggccaggccgatgcgatgggccgggcaaagtgggtcgagcaactgaccgggcagaccgcccgcgccgtccagttgttccgcacgtccggcgcgcagatgaacgacgcattcaaggccgtgggcattggcgcctcggccgccggcgccgacctggtggagcagatggcggtcctgggcacgctcagccagaccatggaaggcggcgaagcaggcgggctctacaaagcgttcttcgaaaacgtcagcgccgcccaggacaagctgggcatgaagttcaccgacgccggcggccggctgctgcccatcatgcagatcctggacaagctgcagacgaagttcggcaacctgaccaagcagaccgacctggacgccattaccggcgcgttcggcggcgaggcggcgcggatgatcgtcacgttgctgaaggacaccggcgccctggccaacaacctggaccaactgggcaaggtcaaaggcatggagcgagccgagcgaatggcccggaccatggtcgatccatggcaacgtctcgacagcgtgatcgagaacatccgcatatcgttcggcatggtgcttttgccagtcctcaacccgctgatcgagcgcgtggccgaggccggcaagacattccagcgctggctgggcatgttcccgaacatcgctcgatggctcggctacatcaccctcggcgtgctggccctgaccgccgccgccggcgcgctcacgctgctgggcggcctggtcacactcttctcggtcctggtcagtccagttgcgctcctggtcgccgggttcgccgccctggtggtcgcggtcggcgccaccatcatctggtgggacgagctgcaggcagccttcggcaacacgacctggttccaggcgctggtgacgatggccaccccggtggtgctgaccttccgcatcctggtcgccgtcctgtcgggactatgggacgtgttcagcgcgctttggaccatcggcggcgaatacgctcaatccctgggcttgctcagcgaaggggcaggcgccgccacgggtgcctggggaaccttcctccaggtgctggcaaacgtcagcccctttgcattgatcgggaaagccctcaagggcttgatcgcgctgctgaacctgattccggggatcaacatcgacgccgaattcggcacgctgcccaccctgccgcaagcgtcggccgagggggcaacggtgccgatcgttcccactgcgagccaggcacagccacgcctcggcgccgacgtgctcgagcgcgtcatgccgaaagccccggaactgccgctggtcctgcaggcgagtgtcacccctccaagcgtcccggcacagccgcttcaactgctgccccaggcggcgccgctgcctgtcctgcagcagcctctggcccccgtactgggtcgggtcacaccgccgagcatcccagcccagcccctgcagatgctgcccgaagcggcgccgctgccagacctgcagcagcgcctggcgcccacgctgggccaggtcgaaccgccggccgccctgcggcaaccgctggacccgctactgggccagctcaagcccccagccgctcaaccgctgcacctggttccccaggtgccaccgctgccaccgcaacccatggaggccaccaacgccctggaaggcgccgagaaagcccgagagtcgatcaatagggcaatccctcgcctcgcccctaaacaggcaaccagcgtgccacctgggggcttcctgcgcgccatccagaacaccagcacggtgaaccgaggaatgcacgtcgagaaagtcgagattcacaccagcaagacacccaccgcgcacgacctggaaggcctcctggagatggccggatga

SEQ ID NO: 330792 - DNA, 297 bp, Pseudomonas aeruginosa
atgaccgaacgaagcgaaaaaaccgaaatcaccctgcagatccaggacaaggaattcacctttgccctcagcccggcggacgtgacccgctatttcaacggcctgaacccgaacaacaaggtagcgccctcgaacaacctcctgaccagcaccgtacagcaggaccaactggccgccctgcgcccgtacctggtcaaccccatgaccgtcatgaagctggccggcgcgctcctggaggaatacgccccggacgttgaagtgaccgtaaaaaagcgctcggccgcgctgagcgactga

SEQ ID NO: 330793 - DNA, 516 bp, Pseudomonas aeruginosa
gtgagccgcttcggcctgttactggtcgccgggctactggccctcctggtgcttctggtcctggagcgtgggcggatcctgcgcaccaacgaccaggtgcgccgcgacctgcaggacgcccagcgcgaagtcgccggcctgcagcaagccgcacacatcgccggcgagctactggccgcccgtgacgcactcgacctcaagcacacccaggaactcaacgatgaacgcgaccagaacgcacgcctgcgcgctgctgttgacgctggccgtcagcggctgcgcgtcaacgccacctgccccgcagtgtccgccaatgccggcgccgccggcctggctgatgcaggaaccgccgaactcactgcagaggctcgacaggattatttcgccctccgcgacgaactcgccctgacccgccgcatggtgctgggcctgcaggactacgtccgcacgctccagcgcctgtaccccttccccatttttcccgtgatccaactaccccaaggaaacgcaccatga

SEQ ID NO: 330794 - DNA, 306 bp, Pseudomonas aeruginosa
atgagcagccgcgccacacccgccgttcgtatcggcaagctggaacgcgacctggccgtgctcgatcaccgcttgggtgacgtcgagcgcctgaaccgcgacgtgcccccccggctcacccggctggaacagcagttcgagcacatgaccgagcagttggacgacctgaacgccggccagcagaagttaaccagcacggtggacaacatcggccgaaagatcacctgggcgctgggcgtggccagcacgctgtgggcgctgctgcagatgttcgggccggtcctgctgcgtctggtgctgccatga

SEQ ID NO: 330795 - DNA, 450 bp, Pseudomonas aeruginosa
atggcccgcatttctggaatgaacttcgacgtgaacatgggcgacaccctggttcacgtcgagaaagccaccctggatatcaccgacaacagcgccgttgcacagaccggcggcgtcccggacgggcatgtggacggcgacgtgaccgccagcggcgaactggagctggacagcgcgaacttcgccctggtgatggaagcggcacgccgcgccggcagctttcgcaagatcgatcctgtggactgcctgttcttcgccaaggctggtgtcgatgaaatccgcgtagaggcctttggctgcaagctcaaggtctccagcctgctggacattgatccaaagggcggcgcgaagaccgtccataagatcccgttcgacgtcaccagtccggacttcatccgcatcaacggcgtgccctacctcgacgccagcgaaaccgaggatctgcgctga

SEQ ID NO: 330796 - DNA, 1116 bp, Pseudomonas aeruginosa
atggctttaggcactgtcagcgtcaataacctcaacctgggccaaggtccggtgactgagatcgaacgctatttcctgttcatcggccccgcgccgaagaacatcggcaagctggtccccctgaacacccagtccgacctggacgtgcagctgggaatcccagattccgacctcaagcagcagatcgccgccgcacgggccaacggcagcagccgctgggcggccatggcggcgccgattgcaccggacggcagttggcaggacgcgctggcctacgcccaacgcgaaggcgtatccgtcgaggccgtggtgataacccgcccggcggccgatgcaaccgagctgcaggccatgcacacggccgcagtcgaactcggcaaccggtacggccgccgcgtgttcgtgatggcggcagcgccgggcctgaccgacgcccaggactggtccacctacctggatgccgcccgcatgctggtcgcggacattgccgcaccgcgcgtgctgtgcgtcccgcagctgcaccgcaacaacctgggcgtgctggccgggcgcctggcgtccgcagaggtcagcatcgccgacagccccatgcgcgttgccagcggcgccgtggtcggcctcggcgagacgccccgcgacaaggacggggtgcctctggatatggccgtgctggccgagctggacaaggcccgctactccgtccctcagacctaccccgactatccgggcaccttctggggcgatggcaacctgctcgacgcccccggcagtgacttcaacgtcgtggagaacctgcgcgtggccgacaaggccgcccggcgcgtgcggatcctgctgattcagcgtgtcgcggatcgcaaggtgaacaacacccccaacagcatggcgtccacccgtaccgccctcatgcgcccgctacgcgaaatggcccgcgcaaccacctttgccggccagaccttccccggcgagatccagccgccccaggacggcgacgtggtgctgacctggaagagccgcaccgaggtagaggtcttcatcaagatccgccccttcaacagccccaagaccctgaccgcgaacatcgccctggacctgtccggcggcgacgaggagtaa

SEQ ID NO: 330797 - DNA, 708 bp, Pseudomonas aeruginosa
atggtgttcggggaatgcttcctttacctgcgcgagaacatcgccggccaggtcctggagctggagcacctgccggcgatcaacatgcgttgccgattggacggcgggtacaccatgttactgccgcatggtgaggaactggagtttgaccaggacgaagtgctgcacctgaaagaatacgacgtggagcagaacatctacgggatacccgactacctgggcgggctccagtcgctgctgttgaacgaagcggcgacactgtttcgccggcgctactacagtaacggcgcccatgccggatatgtgttctatacgaacgacgagaacttgtcggaagaagatgaagagaatctgaaacagcagattgcggcaagtaagggtgtcggaaacttccgttctatgttcgtcaacattccaggcggctctgaaaaggcgatccaaataatcccggtcggcgatttccaggcgaaggacgaactggagaaggtcaagaacataacccgtaacgatgttatcgccgcttggcgaatgaacccggcgctggcgggaatcattccagagaacagcgccgggtttggtgacattgagaagatcgaccgggtgtacatgaataacgagattcgtccgatccaacagctgttccttcaggtgaatgaagtgctcagagaagacaggcacatttcgtttaaagaagcctcagcaggctag

SEQ ID NO: 330798 - DNA, 210 bp, Pseudomonas aeruginosa
atgggagacctcacaattactgagctgcgcgaccaacttaacgacgtacagcacgcgcttagtttcgtgagtggggcagttggctccgttccgctaacagagcctgagcgcctaggcgctcaagtggttatcaactgggtgaacagcgacctagcgggaacctccaaactgttggagaagattgggcgtcagggcaacaaccccagttga

SEQ ID NO: 330799 - DNA, 279 bp, Pseudomonas aeruginosa
atgatcggcgcaccggttcacctgcaagaacgccgcgtgttcaatgtcagcgaagagcgtaaccggcaagcacgcaagcaactgtggctgccgtccacgttcgtgatcgtcgaagcctcgccggtgctgaactacttcagcggcctgggcgtcgtccagatcccgctgccgccgggggagttcctagtgggcatgcaggatcccgccggcgcccggcgcttcggaatggtcaggttcgaggggatccacgacctggagggatgggaggaacaggcatga

SEQ ID NO: 330800 - DNA, 231 bp, Pseudomonas aeruginosa
atgaaagctgaccgtcacggcaccctggccgagcagaagcggtttgccctgcgttggcaggacgtgaaccaacgtccggaatgcggcaattgccgatacctgcgcaccgagaaagccccggccgcgacctgcccaggcgctgccgtccaggcgatccaccactgcgaccgaggcggattcctgacgaccaggaccgcgatctgcgaccagcacaagaggattagccaatga

SEQ ID NO: 330801 - DNA, 246 bp, Pseudomonas aeruginosa
atgtctaactcccgtaccgccgagaagttcgtagtgcgcctacctgacggcatgcgcgaccgggtcgcggagactgcgcgggataaccatcgcagcatgaattcggagatcatcgcccgcttggaacagacactgctcgacgaccagtcccgccagcaccaggaccggctggtccagttgcttaacgcacggatcgatgccctggaagaggagctgcagctctaccgcaaaggagcccacgcatga

SEQ ID NO: 330802 - DNA, 267 bp, Pseudomonas aeruginosa
atgaagaaacaccccagcggtagcactgcgaaggctaccacagcaccgcgccatctggttgccaccgccatcgtcggcggcgccctggttgcattcctggtcatgaaaacggacgcggcccgagccaggctgcagagcgtcgccgccctggcctacagcctgggcgaactcaccgaccaggacgtctccgtagtcgcccagttgctggcccgccccatacgtcctgcagcccctgccatcacgttcggagaacacctccatgtctaa

SEQ ID NO: 330803 - DNA, 360 bp, Pseudomonas aeruginosa
atgacgaagaacgaagaaagcctgggcaagctctttggagcccaactggtcaagtcgctgatcgatatacaggcaactaaggtactgcggcgcctggtgccggcagcgctctgtcacacggaaacagggggagtcgttgggcgccttctgctcggcctcgaggacggagaggcacaccccttcaacctgaacgacctgcggcgcctggatccgatcctgcaggacgaatgcctgttggtcatcgctctggacgggaccgccatgttgaaagtccgccagcgcatcgagcgcgacgacaacggccgcgtggtatgggccctgctgaacagcatgtgggcaccgaaacagccgaatgcctga

SEQ ID NO: 330804 - DNA, 348 bp, Pseudomonas aeruginosa
atgaacgaatccatcagcgccgccctggccaagatctacgcctacgaccaggagcgtctcgccctgatcgccaccgggaaccaagcgctggtccgcctcgcccccatagcgctccagcccaccgaccaagcgcgcaccattgggcgcttcctgctcggcctctacaacggcgaggaattcccctttgacctgactgagcttcgcggcctggacctggatctgtttcaggactgcctggcggtcctggtcatggactacagccccgagctggaggtccacgagcgggtccccaacggcaatgccatctggcagcgcctgatcgagctgtgggccccggaagcggcttaa

SEQ ID NO: 330805 - DNA, 402 bp, Pseudomonas aeruginosa
atggacgccacccaaccactcgcccaggacctggcccgcctggtcggcccgttcgacctggccagcagcaccgcgcaccaggactttctgtactggtggcggcgcggcgccaagctgctgcgcctaccgcagctgcagccccggcaggaccgtcactgggaagtccccgagatcgaggacgcccagctcccgcggatgctgaaagcgctgcacgccctggacgagccccgccaggcgctgctgctaacgatgctcggcctggccgggttcaagcgctcggcctggctgcaccaagaagccggcctggagttcggccaactggccgcctgccggctcggccacgacgtgttccaagtgatggtcggcctgctggccaaccaccgcgaaacccccaaccactga

SEQ ID NO: 330806 - DNA, 2691 bp, Pseudomonas aeruginosa
atgaacgcacgtgtaaaccaggaccagttcgacgagatttaccgccaggacgttctgccggcgctggaaagcgacgccgagctggatttcaagccgcatgaggcgtcggaaaagtacctgaacaatggggtatgccccggctgcgggaagcgctcgctgtacatcagtcgccagaagccctttcagctgaaatgcaatcggctcaacaagtgccagtacgaagagaagacccgcgaccgttactcctacctgttcgaaaacctctccgatcgcttcccccgatcggaggccgacccgcacgccaccgctcgcgcctacctacagcgtgctcgcgggttcaacactgatcgacttgccggttgctacgagcaagcgcgatacaagaccaagagcggcgagtgggtggaaaccgtccggttcccgctgtgcgacggctactgggaacgcctgatcgaccagcgcgggatccaggccaacgaaggcaagaaggcccacatcaagtacggcaccaactaccagaacaaggggtggacaccacctggccaggtcatcgagaagaacgacaaggtgttcatcgtcgaagggatcttccatgccatcgcgctgtggctcgccggctataaggtgatcgcctcgatctcggccaacaacttcccttgggcctacgtcgacgagcaccagggcaagctggtgacgtggacactcgccctggacaacgacaaggccggccgcaccttcacggtgaaataccgcaagcagttggtggaaaggaacgagctggtggccgtcgctctgctgccgcagcaggccaacggaacggcccaggactgggacgacgcctacaggatcggccagttggacgaaaccctggtgaacgatgccctgtatgagggccggctgttcacggcgcccacaccgctgaacagggcctatgtcatgttccagcgcctgaaccggacgttcttcctactggagttcggcaaccgcctgtactcggccagggtgaacaagaacgagctgcagacggatggcgaaaccccggatggcggtttcctggaagagttcaagaaacacgccacggtcgagcaggtggccaactgcgtgccggccttcgaatacatccagcgcgacaccatcaccggcgaacagcagttcttcttccgcttcacctttcccaacgaccggaacagcgtgaccgtcgccctggcgcccagctcgatcagcgagccgcgggcgttcgcaaaggccctcctcgagcgcaccccgggcgggatcttcgacggtggcgaaaaggtgctgtcgatgctccgtagccaatggatggacaacccggacaccgtgcgaaccctgccgttcgtgggatacgacgaggaaacgggagcctactgcttccaggacttcgggttcgtcaacggccgcgaactgcatgccaacgagcatcgctatctcgacaccggcaaaggatccctgaaaaccgcactggccagcctgcatatcgcccacgttgagcagatcaacctggactggttcgacgacctggtggccgtacaccagatgaacggcctagccgcgctgtcctggtggaccgcctcgctgttcactcagcagatcaagcagaagctcggcgctttcccatacctggaattcaccgggcaaggtggatcggggaagtcatccctactccgcttcctgtggtgcctcgtcggccgctccagtcatgaggggatcaagccaaacggcggaggtaccagtagcgtaggcctggcccgcgtactcgcccaggtcagcaacctgccggtagtgctgatcgagtccgacagcgaaaccaccgacagccagggccgggtgatcgtcaaccagttcaactgggacgaatacaagaacctcttcgaccacaacggcaccttgcgcaccatcggcacgaagtccaacagcaacgacacccacgccctgattttccgtggagcgctgtgcatcgcgcagaacaaccgcgtgtcctccaccgaacagttccttactcgaatcgtccacctacatgcgaccagggaacaccacacgacagccctcaaagtggttgccgaccggctccacagcctgacggtcgaggacctggccggatacctacggctctgcctggccaacgagacccaatggctggaacgcttccacaggtcgcgggaaacgtacctgaagctcctacgcggcgtggatgccctcaagaacatgcggatcatcgactgtcacgccacggtcatggcggccgcctacgccacccaggcgctcttcccgagttggtcggacgatctactgcgtcaagtcgtgcagcacctcaagaaccgagcgctggaccgccagcaggtcatcagcagcgaacccgagctgctgaccaagttctggagcatctatcacttcgtgaacgagcgagtggtgacgatcaccgaccagaacggtacccgggaggagatccacgaaaccctcaatcactcgacggatccagcgctgatcgcgatcaacctggagcacttcacccaagcggccaaacacgccggacaggaactgctgcctacgactctgctccgccgtgacctaccacggagcgaaacgtacccctttgtcggtaacgcaaaggtccgttccgccctggagaaacgcccattgcaatgctggctcttcaggaagcgctgcgggtga

SEQ ID NO: 330807 - DNA, 243 bp, Pseudomonas aeruginosa
atgaagatcgtcatcgacacgccgtatgtgaccgtaaacgagttcatccgccgttccggacagtcagataaagccgtccgacgagagatagaaaagggcaactacatcattcgcccgaaagctgacgagagcctgaagacagctgttcttatcaacatgattcacctggctatggaagcagcagaacaagccgagcgcgtgcgcgctgaaaagaaaaccaagacccaaatcggcaaacagtaa

SEQ ID NO: 330808 - DNA, 1044 bp, Pseudomonas aeruginosa
gtgtcgatcaagaaactggagaccggggagtggttggtggactgccggccagaaggccgtgccggcccgcgcatccggcggcgggtgaagtcgaagaacgaagccatgcatctggaacgccgcatcatgggcgacggctccaagggcgagttcgagaagtcgccgaagctggacgaacgccggctgagccagttgatcaatctctggtacacactgcacgggcagaccctgaaaaccggtgaacagcgcctggcgctgctgctggccatggccgagcgcatgggcgaccccaaggcccataagttcaccgccaaccactttgcggtttaccgtgccgagcgggccgagggtaagcacggcagggcgaaaccggggcgcggccgcagcaagtcggacgagaagcccaagccgatcagcgccaatatgctgaaccacgaacttgcctacctgcgggctgtgttcaacgagctggagcgcctgggcgagtggaaaggggcaaaccccctgtcgaagattcgcaagctgaaattcgacgaagccgagatgacctacctgtcggccgagcagatccaggagctactggtcggcctgggcgaggagacggcgcacgtccggctgatcgccgaagtctgcttggccaccggcgcccgctggggtgaggctgagtccctgcagccccgccaggtgcgccatgggctgatccactacagcaagacgaaatccagcaagaaccgctcggtgccgatcaccgacgccctggagaagcgcctggccaaggcgctgccgttcaaacccagctactcgaagttcggcgaagtggtcgacgccatcggcctcgagctgccagacggccaactgacccacgtcctgcgccacaccttcgccagccactacatgatgaacggcggcgacatcctgaccctacaacgcgtcttgggccacgccaccctggccatgacgcagaagtacgcccacttcagccccggccacctggctgatgtggtgaacctgaatccattgagcagtgctgctaagaggagttga

SEQ ID NO: 330809 - DNA, 228 bp, Pseudomonas aeruginosa
atggcttttgtgagtttgcttgttcgtcgtggcgagttcgctaccgctacccagctcatcgtgaacacggattacattgttcgaattcggaaggaaggctcaccggaaagtaaatgggcagacggtgcggtcatcactatggacaagtctgcataccctcacgagctggatttgtatgtgggtggtactcaagtggactacctcttgaacgtcctgatgccagagtga

SEQ ID NO: 330810 - DNA, 699 bp, Pseudomonas aeruginosa
atgagcgatattctgatcctgacccatgccgagttctgtccgccaggccatctgggtgccgtgctggcggcgcgcggcctggacttccgcgtgatccgcgccgacctcggcgaactcgccggtctcgacgccgaacgcccgcgagcggtggcgatcatgggtgggccgatgagcgtcaacgacgacctgccctggttgcgcgacgaactggcgctgctgcgtcgcttcatcgagcgacgcatcccgctgatcggccattgcctcggcggccagttgctggcctgcgccctgggcgcgacggtgcggcaacagccctacaccgaaatgggctggcagcccatgcagcgggaaagccgcgacagtccatggctggccgggctgccggagcgcttctcgatcttccagtggcatggcgatgccttcgacctgccgcagggcgccgagcgcctgctgtccagcccgtggtgcgagaaccaggggttttcctggggtggtcacgtactcggcctgcaaggccatccggaaatgaccgaggaactggtgcggcgctggatcgccggctggccgcacctgctcgatccctcccagcccagccagcaatccgccgaggacatgctggccgggttgcctgccaggattgccgggctgaatcgggtggccgagggtttctaccgtcattggctgtcgctgatcgattga

SEQ ID NO: 330811 - DNA, 399 bp, Pseudomonas aeruginosa
atgcgccgccctcacctgatcccactctccaagcaggcggtggccgcactgcgtaagctggaaagcatcactggtggctacacgctcgcgtttcctggccgtatcgatccggcaaagccaatgagcgaggccgccatcaaccaactactgaagcgctctggctacgatggacgcgccacaggtcatgggttccgccacacgatgtccaccaccctgcacgagcagggatatcccagtgagtgggtcgagactcagttagcgcacgtggacaagaacagtattcgtggcacttataaccatgcccagtatctggaagggcgacgtgaaatgctgcagtggtatgcagaccaactggatgccttggcgggcaacagcagcgaggggaggaaaatcgcatga

SEQ ID NO: 330812 - DNA, 744 bp, Pseudomonas aeruginosa
atgagtgacgatgtaatgcggctttctgatctagtgccagagtacgctcgttattacagggtaggcacacaggatgcggcttatgcgctgcatgagctatttgtcgaaatggattctgaacaaggccggaccattcccgataacgtcatgtggattgggagagtcggtagttctgctccggcgtactcggccaaagtgctcgatatacgcgtattggaattttcgaatcttgctaaatacttcagtgattttgctggcttgagctgcaactccgaatctcggtttgtgggatgcacgtatattgtcgatgggcgcatagagcataaatatataccgcccagcatggtgtatctatccaaatccttgcttggcaagctgatctatgacgccgccagtgaggctcttgggtttctagttaacaacacgcctagcctcatgccgcatagcaatacagataaggggcttacaacaaaagagcgaaactctgttgttaaaattattaaaggtctcgttggcttggttcaggaggttggcaaggcctattctgatcagtctcttgatgataaagcccggaagcgtgcggagtctattaagcgcgatgtctctaggatcatcaatccgtcacgtaaaaagcaaaacttgccgttgagaatcatagatctcgcggatgtggccggggtcgagatggttcgtgatccggaaacgctaaggcggtacatggacgatgaggatagttcttcataa

SEQ ID NO: 330813 - DNA, 408 bp, Pseudomonas aeruginosa
atggtgaacgatccgcaaacactgaccatcggggctttcgccaaggccgctggggtcaacgtggagaccatccggttctatcagcgcaaggggttattgccagaaccaggtcggcccgtcggcagtattcgccgctacggatcggcggacgtggcgcgggtgcgtttcgtgaaatccgcccagcggctggggttcaacctggacgaagtcggccaactcctacagcttgaggacggcactcactgcagcgaagccgccgagctggctgcgctccagctcaccgacgtgcgcaccaagatggcggacctgacgcgaatcgaagcggtgctgtcacggttggtcaacgagtgccatgcgcagcgaggcactgtgtcgtgcccgctgatcgattctctacacgggagctag

SEQ ID NO: 330814 - DNA, 351 bp, Pseudomonas aeruginosa
atggcagaccccagcaacggccgcggtgcactggccgccggtggcctcgccgccatcctcgcctcgacctgctgcctcggtccgctggtgctgatcacgctgggtttctccggcgcctggatcggcaacttgaccgcgctggaaccgtaccggccgatcttcattggcgtggcgctcgtggcgctgttcttcgcgtggcgtcgcatcttccggccggctcgcgcctgcgcgccggacgacgcatgcgccgtgccccaggtgcggacggcctacaaggtgatcttctggatcgtcaccgccctggtgctgatcgcgctcgtgttcccctacctcatgcccctgttctactga

SEQ ID NO: 330815 - DNA, 279 bp, Pseudomonas aeruginosa
atgaagaaactcgtcgcattgctcgctctgaccgttgccctcagcgctcccgcctgggccgccaccaaaaccgtcacgctgtcggtgccgagcatgacctgcgccacctgtccgatcacggtcaagaaggcgctgaccaaggtcgaaggcgtcatcgaggccaaggtgacctgggagcccaaggaggcggtggtaacctacgacgatgccaagaccactccggccgcgttgaccaaagccaccgagaacgccggctacccgtctaccgtcaagaagtga

SEQ ID NO: 330816 - DNA, 1695 bp, Pseudomonas aeruginosa
atgaccgaggcgatcacgctgcacatcgatggcatgacctgcgggtcgtgcgccgagcacgtcaagcagaccttggaaaaggtgcccggcgtgcgttcggcctcagtgtcctacccacagcgccgggccgagattgaggccagcgtaggtaccgccgcggacgtgacctcgctggtcgcggcggtatccgcactcggttaccgagcgcagcttgccgatgcgccggggcaacccagcgacctgctgaacaatgcacaagagcggctgggcggcgaaccaaagcgcgaggacgatgaggctgcactgcacgtggccgtgatcggcagcggcggcgcggcgatggcggcggcgttgaaggccgtcgagcaaggggcgcgtgtgacgctgatcgagcgcagcactctcggcggcacctgcgtcaacgtcggatgtgtgccgtccaagatcatgatccgcgctgcccacattgcgcatctgcgtcgcgagagtccgttcgatgacggcattgccgccgcctcgccgaagattctgcgtaagcgcttgctggctcagcagcaggggcgcgtcgatgaactgcgccacgccaagtacgaaggcatcctgacgagcaccccgaccatcaccgtgctgcgcggcgatgcccgattcaaggatgcgcacacgctgaccgtggcaaccgctgacgacgggatgcgcgaggtgagtttcgaccgctgcctcatcgccaccggggccagtccggcgattccaccgatcccgggcttgaaagacacgcccttctggacgtcgaccgaagcgctggccagcgacacgatccccgatcggctggccgtgatcggctcgtcggtggtggccgtcgaactcgcgcaggcctttgcccggctgggcagcaaggtgaccatgctggcgcgcagcacactgttctttcgcgaagaccccgccattggcgaggccatcacggccgtgttccgcgccgaaggcatcgaagtgctggaccacacccaggccagccaggtcgcctatgaggatggggaattcgtgctcaccaccgaacgcggcgaactgcatgccgaccggctgttgttcgccaccggccgcaccccaaacacccgcacgctcaacctcgacgcggccggtgtggtggtcaatgcgcaaggcgccatcaccatcgaccacgcgatgcgcactaccgtgccgcacatctatgccgccggcgactgcactgaccagccgcagttcgtctacgtcgcggcggcggccggcacccgcgctgcaatcaacatgacgggtggcaacgcgacgctggatctgacggcgatgccggcggtggtgttcaccgacccgcaggtcgccaccgtgggctacagcgaagccgaagcgcaccacgacggtatcgagaccgacagccgcacgctgacgctcgacaacgtgccccgggcgctggtcaacttcgacacgcgcggtttcatcaagctggtttcggaggccggttcgggacgactgatcggcgtgcaagcggtagccccggaagcaggcgagctgatccaaaccgcagtactggcgattcgcaaccgcatgacggtgcgagagttggccgaccagttattcccctacctgacgatggtcgaggggctgaaactcgcggcacaaaccttcaccaaggacgtaaagcaactgtcctgttgcgcggggtag

SEQ ID NO: 330817 - DNA, 1341 bp, Pseudomonas aeruginosa
gtgacggactttctccagctgcgaagcctgaagacgcttgaaatcctgaccagcgaggacagttacgtcgtcaaggccgaaggcgtcaatcagtgggtgacctgcccgctgtgcaagaccggacgcctgcatggtcacggctcacaggaacagtcgtttcaggacacaccgacgcacggcaaacccgtcgtgatcttcatccagcgccgtcgctatcgctgtacaagctgcaccaagaccttgtttgagcctgtggcggaccttgatggaaaacgccaagccacggcgcgtctggtgcgttatatccgcgaccagtccttctccaagacctttgcggcccttgcccgggaagtagccgtggacgaaaagacggtccgccacgtcttcgacgatttcatcgaggaggtcgaggccaagacccagttccggacgccgcgggtgctgggtatcgacgagctcaagatcatcggccagtaccgggccatgatcaccaacgtcgagcgcaagaccgtgttcgatatccgccccagccgggccaaagccgagttgatgccctatttccgcgacctgcgggacaaggactcggtcgagtgggtggcgatggacatgtaccacgtttatcggcaggtggtgcgcgccacgctgccacaggcccggatcgtggtcgatcgattccatatccagcgcatggcgaacgacgcgctggagaagctgcgcaagcgcattcgcaaggatttgtccacccggcagcgcctcaaactcaaggacgagcggttcctgctgctcaagcggcagcacgacctgacagggagagatatggaccggatgcgggaatggttccaacagttcccgctcctaagcgaagcccacgcgctcaaggaaggatttctgtcgatctgggatcagaagacccgcccagcagcagaagccgcctgcgcgaagtggcaggccaatattccgaccgaattggcggccacgttcaaggacctgaccaccgccgtgcacaactggcacgacgaaatcttcgcctacttcgagcagccgattaccaatgcctatactgagtcagtcaaccgagtggccaaagacatgaaccgcatgggcaggggttacagcttcgaggtgcttcgggcgcgcatgctctacgacaagaaggcgcgcaaggatggctcggttatcgaaaccgtgttggtcgatgacgacgacccaatgaccacggacttcgtgttccagcggatgaccacggcggcaacgcgcaagaagaagatcacgcgcgtggtcgagtacggcccctatctcccgacgctggcgcggctactcgaagaggggtatttcgaatag

SEQ ID NO: 330818 - DNA, 591 bp, Pseudomonas aeruginosa
atggttagcacgctggcgagaccgcaaactcaatggtttcacgtgttcaaggcgatgattgatcagggcgacattgcgaggatggggcctcacgcatttgcgatctacgcggtgattaaatcacacacaaatatcacgtcgggaatagcattcccgagcattgagttgatatctgagaaatccggcgttagcttggcgcaggtcaaacgcgagctcagggttttggagaatgcggggtatgttatgagacagagagttggtcgctctaatcgatatacactgcgtgaaagaatacatattagcgacgagaacgggctcactcaggctattgcgagctgggactacgtcccggccggcgtgcaacaggctgtgaccgatctgaaaaatctgctgatcgccggtgatttagacggtggaagaatcgtccacattgagcgactcaatttacagataaatctcggcggcgagaacacgcagataaatgtggatacggcggcgctactgagcgggttggagcgactcccggccaaactgcgaaaaaaactgatgagccgtctacaactcgacgaggttatacacagctcagactga

SEQ ID NO: 330819 - DNA, 951 bp, Pseudomonas aeruginosa
atgaatcggacgggggcgaggctgcgcggcagattttcaaagccgccgcagcaggcggcggcagtgatgaaaaatttgcagggctcgatactgcgatccgttggtacagtccggaactatgaggcggcgttaacgcgcgtagcgcagcacatgcgcgaggagcgactcggggccttggtcgacctatccccggtggcggcccttgattatctacgccaacgcgccaccgctgtcggtcaaaaacagctcgacatggagcgccaggcgatccagtcgatgctgcggcatgtcactgcccgactcggggagggggagacgctcgcgatcatcaaatccaccgccgaacaatcaccaggaaagcctggccagccatcgctcggccgacggctcagtgaggaatcgcgtgtctatacgcgcgagcagatcgctctgatcgctgctcggcaagctgaacataactccctagcgacggaaatcgctgcagcagcaggcttacgtgcacatgagctgctaacgctgcagcggacgcacaggcaatcggcggacgcgcgtccggctcacgagcgtaaattttccgggctgcgagagtcctcaattggttacaccgtacgcggcaagggcggcctcgtccgcgaggtgcgcctgccattgccgttggccaaacggctggaggcgcggcggctttctgagccacgccgggtcacggatcgaggcgtgcattatcggcagcactacgaactcggcggcgggcagccctggtcaaaatcgttcagtgcagcctcaaaaactgcgctgggttggtcgcgtggggcgcatggcctgcggcacgcctatgcacagcaacggctagccgccctgcagcgagatctacctcgtgaagcggcgctcgtcgtggttagccaggaaatgggacatttccgcccagacattacgctgatttatttgcgctaa

SEQ ID NO: 330820 - DNA, 216 bp, Pseudomonas aeruginosa
atgatgcaggctgacctggacgagttgatggtcgtcagctgcctgttcccgagcatgcagtgggcagcctccgagacgcgacctgtgctcatcggcagagacggcaacattctgcgtctgtactggatgcccttgctgttatggctggatgaatgttgcgccgcgcttttcattgagcagctcaaccgcaaggatgtgcgtcagcttaatgaatga

SEQ ID NO: 330821 - DNA, 501 bp, Pseudomonas aeruginosa
atgagaacggatgagcatgtgtggacatatgaccccgaagggccgtatgacgtagatcagatgctcaaggagcaagcccgcaagaatgaagaggcattgaatgccgaactggaaaaaatgcagaaggaagccttggagcaggcacgcaggaattcagaggccccgaaactgacaccttatgaaggcgattgggtctatcaacgcactacgaagcatgatccgttgaccataatgggtatctggcgcgagaagcaaatcagggtctggtcgttcaagttcgagaatatggatcgcctggggtatgaggtgccagggtttgaggtaacggatgccggcttgaagatcggcgatggcgctaaaactcacctgtacaccctcagcgctgacgaaaaggtgctgacctgcatggactgcagcaagccggtgctttgggccaaggcagaccccaaaaaggatctcagtgatcgtcactacgcccgtaagatggctggcaacctgtga

SEQ ID NO: 330822 - DNA, 777 bp, Pseudomonas aeruginosa
atgccgcatatccctggcgatgtgttggcatcccaatttgacggcaaggctccagacttctggatgctttcgtctcattcgtgcaccgtgcatgcacgaaattttgatgacgcaccgttggtagagtgggtggctgttaaggtcaagaaaaagccatatgcactctatttgaatgctcttaaccctcgaatattgcagcttgaaattgctgcaaaacaaatcttcgagctgaagatccatcgaagggcgtggactagccgggcagttctcccgactcagcatcgaaatgcgacagtcacgctgaatgacgatcagcgtcgaactttctccttctggatgtcgcatgcctacaatcgaattgctatgccggacgccttggtcgaacgccttaaagcggagatcgatcgtgatggtatgcaaggtatcgccttgcttgtggacgaattcctgaaaaggaataaccatatgctcgctagtgcttgggtttcctttaaccccaagtgggaaattcaggaccccacagagccatacgaggtcctcttccgcttcctaacgaagcgcgagtgcgcccgccacgccacggagctgaatgctgagctaactaaaattgttggcgtgagtaggcaggtaagcgagggcttatacttcgagggagcggaggtcacggtccttcaagacttcacaatgctcgatgctgaggacttcgttcgttataaccagcacgactggctgagcattggcgaaggggatgaggctcccgcagaagatgaagactga

SEQ ID NO: 330823 - DNA, 684 bp, Pseudomonas aeruginosa
atgactgccatgattaacggggggtgggtaggccaggttggtggggccactacttcatctgccctgagatgggagagtccggaaatcgctccccgcgttgctaccagcacagttagtcctggaatggcgttggctttttcagtcatgctggcagtcgcgactgcaactaccccggccagcggaggtgagatctcacctcggcttatcagctctgcaggtataagcccttacagtgtgacgacgggagcgtggactgaggttgataccagtcaccccgacattaccgatgaggtggctccacacctcattgaagagcttcgtagcgaatacaagttgtcagatagctccattgccgagatctttaatgtgtctcggcagacagtctacaattggcgaacaggaaaaactgcgactggttatccggagcggctgggagctttggcggaagctctccggcaggtcaagtcggaagacgtaccatatctacagcgagtgctgttctaccctacctcagatgggcgtctcattcaggacactctctctgataaggcatgggttcaaaatggtgccgctggactcaatggggtggttgctgagctgataggtaaagcccagcaattgcgtgaaagagatttaaagaccatagccaggttggagaaatcgggcagctctcattcggtttga

SEQ ID NO: 330824 - DNA, 837 bp, Pseudomonas aeruginosa
atggctgagcgtgaaggtgtactagcaggggcaccactaatttttgcgttcagcgtggtgagattttcgcccattcttaagcttcctcagctcatccctgacatccatcaggccattcgggatcgccttcctgggtttttccaaatggtcaaaagcatgcagcctggtatcgcgcagggatcagaaccgaattcatgggctttcctagatcgtaatgctgagtacgcttgcgttctgggcgtggatcacctgatcctgcaaagcacaaactacttgcattttgccaaccatctggacctctttcgagagtgtttgacggccttgacacagcattctggcggtctcgacgtcgctggtatagggatgcgttatgtcgacagaatcgaaccgttagatggggagactcttgcagattatcttccagatacgctgctacccctcaattgcgaggcgcttgcaaagagagaggtaaaggctctgatgggggtatctactactacctatcagctagaccctgagttcctgcatatcaggtgctggcgtcagactggcatgtggataccggatgacttggcagagtcagctatggtcttcgagatcgctaaacagactcggcagccttctaagtctttcggtcaatcacagagtgtgttcgtgcctgttagtgaaaatggtgcgcttctagataccgacgcctattggccaatgcctatgactgagaggctggctactgaggacatctgcgctaggctcgataaactgcacgggactgctaattttgctttcaggaccgtagccaaagatcacgcctttgaggtttgggggaagtcaagatga

SEQ ID NO: 330825 - DNA, 1014 bp, Pseudomonas aeruginosa
ttgtctgacctgaattaccaaaaacaagctcaggactattacgggaaggcccctgtcatcattttgggcagcggtgcttcggctgcacacggcatgtctgggatgggagcgcttgcaaaacatctcgtcgcgcacaccgacgtttctggtctgtctgctgctgagctggaggtctgggagaagttctgccaggttttgagcaatggcgtagacttagaatccgccctgcaccaggtaacagctactgaagagctgacgtcaagaatcgttaaagccacctgggcgctaattgaatctgaagacatagaaatctttcagaagagccttcaagataactcaatgtttccattgagtcgtcttcttgaacatatgttcaaaagtagcctcaaaatgctaaatattgtcactacaaactatgaccgcctggcggagtatgcttgcgatcaggggcgcatccatcattacaccgggttcacgcacggattctttcgacagctcgcggcccctacagaaatcacctctgcgcgcagggctaatatctggaaggtccatggatctctggattggttccagtcccctctggaagatactgtcgccctctcaaatatccaaggaataccggataactaccaaccgcagatcgtgactcctggcacccagaaataccaaaaaacgcatctggagccgttccgctccattatcaataacgctgaccaggctataaatgaagccggctcgtacctttgtattggctacggctttaatgacgagcatatacagccgaagctgatggtgaagtgccttcggcagaaaacacctataaccatcatcactcatacgctttccgaatctgccaagaagcttattcttgatggtaaggcacagagctatctggcaatagagcgaggtgaaacagacgaccagtccatcgtttattcctccttggataaaaatcctttgatggtagaaaagaatatctggagccttgaaggttacctgtcactcatcatgtag

SEQ ID NO: 330826 - DNA, 1728 bp, Pseudomonas aeruginosa
atgccgattttcaactttaaggacgaagaagcgcttgggaaggttgcctccgtcgacactacaaatgtgatcgtagaggtagagaacgtcgaccagctcaaaaggttgcaggttaaccatctcgctgtactgcaaagcagtaggcctgggcagcacctcatcggactcattacgcaggtgacccgcaaacgtggcaccggagacattatcaatgacggtataaacgaccacgtgtcagagttaaatctgtgccgtatcgccctgattggcacgatgctggatcgtgacggcgaaaaggaaaacgtattccgtcgtactctcgaaagcgttcctgaaatagacgcgaattgtttctcgctcgaaggcgagaatctcacaggcttcatgcgcacgctttccagtgtatcagccgatggaaatgccctgactctcggtaaatacacactggacgaacatgctgtcgcctacctcaacggcaacaaatttttccagcgccacgccttcattggcggcagcaccggttcgggtaaatcttggacgactgccaaaatcatcgagcagatgtcggggctctccaccgctaacgctatcgtctttgaccttcatggcgaatacgcgcctttggtcggcaatggcatccagcatttcaaggtggccggccccgcagacgttgaagctaaacgcaccctcgacgacggtgtgatctaccttccgtactggctgctttcttatgaagcgcttgtttccatgtttgtagatcgcagcgaccagaacgcgcccaaccaggccatgattatggcgcgtgaaatcaaccacgcgaaacgcaaatatctagaagataacggccagcacgacgtgctgaagcacttcactgttgacagtccggttccgtttgacctggatttcctcatgagcaagctgaacgagatcaacgttgagatggtcgctggagcacgtggtgagaagcagggcgatttcttcgggaagctcgctcgcatgatttcccgacttgagaacaaaatctccgatagacgcctcggatttatgttcaacggtggtggggacgtgctggattttgcttggcttgagaaatttaccactgccgtactgggtagcactgatgagaatggcagggccggtatcaaaatcattaacttctcagaagtcccatcagacgttctgccgctgatcgtatccctggtcgcacgggtcacgttctccgttcagcaatggacgccttctgaactacgccaccccattgctcttctgtgtgacgaagcgcatctctacatgcctcagcgcaacatggccgactctgccgatgatatctcgctcgatattttcgagcgtatcgcgaaggaaggccgcaaatacggtgtcagcttggtggtgataagtcagcgtccgtccgaagtgaataagacgatgctcagccagtgcagcaacttcgtatccatgaggctgaccaatgcagaggatcagggtgtaatcaagcgtctgcttcccgatagtcttggcggattcagtgacattttgccgaccctcgatacaggcgaagctctggttgtcggtgatgccagcctgctgccaagccggatcagaatcgacgagcccaaaaacaaaccgaatagcggtacggtcaatttttgggatgattggcagaagccagtcaaggataagcgcttgctgattgccgtcgataactggcgtaagcagaacatccagtaa

SEQ ID NO: 330827 - DNA, 2460 bp, Pseudomonas aeruginosa
atgaaaagcatttaccaaaatcagcttgaactagctagcaccatagagaacaactctgaaaaactgactttcttaaccgcagtattaaggtccgttcttcagctagcagtaataagtacttttgaaatagcaaaaaaactcaccccgcacgatgaaagtgacatggctgagttggcagaacgtttttgcaaaccagcagacggcatgccactgcaaattattgattgcctcgcgccatttcttagggcctatgtagacaaaacgctatatccaggttggtttgaaactacaaaaaccgtacccgttccgttatctagacagcttattgaatgggtaaatttcagaaacaagcatccaggacacggagtcgttgacatccccactgcggcagtttgggcaaccaaaaccgagtcgctaatcaactcgtgccttcatgttttttcgtcgatcataccttccattagcggacctgaagagcttcggctgaccaaaatatctggcgagccactgttaagcactccagtaaccttcaaaggccaagcaatcgtcgttatgggagttgcggcaaaaaacggtatctggaaacttaaaggacaagtgctttccaatgaaaattcggaagaattcacgacatctcttcctgatgacaatattttttcatcacgaagcataaagtcggtgggagcctacgatttatcctatatagtttccaataataaagatcattctttctatcacaacatccccgttcggcagactgatacttttgaaggtcgggaatcagagcttgaactattgcgagaatggtttgacgacaagggttccagatactgtggcgtatacggggatggtggttatgggaaaaccactttggtcttagagtttttgaataaagtcctcgaaagcgagtatgacctagaagagccaattccgacaataataagttatcacactgccaaaatgaccaaatggtctgaagcgggaattattcacttcaccgggatatccccagtgatggacgaatgcttacgagatctgattaggtgcctaatacctgtgctgccagcagaatggtatagcgtgagtggtcgtcaacttattgacaagaccgtcagtgagcttaacaagcacaagcttaccaaagacgacatcctgctcgttattgacaatactgaaactttagctacaagcccccaagaagtgaaagatttgggtgcgtttttcaaacaggtcgggaagcttgttgggcgtatgatcatcacttcgcgcaggcgcgaatttttaccagctgacccggtgatgattgaggggctgtcagaaatcgaatgtgtaaatttgatgcgccgtttggctaacgaacacaatgcaacagccattattcaagcgggagaagccaaacttagacgtgtatctaatcagttgatgcgcaagccaatcttacttgaagcactagtcaaatatatttcacactcagcaattggcattgactcggcaattgataatgtctttaagaaatcaaatgaagatttgattgagtttctctacgaagatgcatggctaagaataaacgagcttcaaaagcatgtgtttctcactctgatccatgttgcaagcccacttgacaaggttacaatcagcaaggcatgccaagagattggaattcagcactcagaattccaatcaagcctaacggaaactcacttctctgtgataacggattatggcagaacatactctttagaactggtggaactcgcaaaacgctttttcctacaacaattcagccgattgtcctccgaagaaaaagaccgtttaaaatctatagcaatagcaattgacaaatacgcggatgagcgagaaaaaatagaaagagagtacagggaggatcgtgtagctgaagcatttaggagcgagtttgcgaaagctgcaaaagtccatgcggaccgagggaacgccaccgaggcgataggaatgtatgaactcgctattgaagatgacccgctaaactctgctttgcatgatagattttcttggttcctactcaataaaggtcgcgatccagaacgtgcaaaaacactctctgagcgcgcagttgaattggatcagaataattgcgatgcacttgttggactggctctcgccaattacaggcttggtgatatccctaatggggattccaacattgacaaggccggccgcaaaggacgtccaccttcgttttgcttcctgagaaaagctatagcgcgttatcataaggcttttgaagaaaatgatataaatgctcaaatagcgctactagaggaggcagaacttttgctaactcaagcccagaagctggcgtctagaaatgatgcctacaatacgaagactcaacgcgaaatcggtagatatcaaagcctgacgaagactaagctttcggtccaacgtggcaagcgcactaaagctgctaacgcagtgtaa

SEQ ID NO: 330828 - DNA, 273 bp, Pseudomonas aeruginosa
atggcaactcgaaacgtcgtccttcccgatccgctggagcaggatatcaacgagctggttgagaccggccgctatcagaatcgcagcgaggtcatccgggcaggcctacgcctgttgctgcaacaggaagcccagaatagcgccaagctcgaagccctccgcaacgcaacatccagtgggctgatgcaactggagcgcggcgagtacgacgagatccccagcgacgacctggcccaatacctcgacgagctcggcaaccacgcgagccactga

SEQ ID NO: 330829 - DNA, 339 bp, Pseudomonas aeruginosa
atgaacgcgcacaccaacaaaggttttgcctcccgggtcggttttggtctgggtacgcttgtgcgtttctgcctgcatgatcgtcggcctgtcgtgcgctgggtcaaacgagttagcctcttggtggtgctgttcgttatctttgttcagaactttacctggctggcaagcaccttcatgaccttgttgtcgtttgggctgatgggtttggttttggtaaaaggaaacttagatatttcaaaaggcaatagtcaaatctcgtatggtactggatacggtcctgagggatatggctactatagagccgggcgtaaggtggatgacgatgatgacgagtaa

SEQ ID NO: 330830 - DNA, 1260 bp, Pseudomonas aeruginosa
ttgtccctacccgactacctacctgatggctacttcgacctgctggtggtggatgaggggcatgagtacaagaacagcggttcggcccagggccaggccatgggcgttctcgcagccaaggcacggaaaaccgtgctgctgaccggaacgctcatgggcggctacgccgacgacctgttctacctcctgttccgcatcctcacccagcgtatgatcgaggacggctaccggccaaacgcgcgtggcagcatggctccagcagccatgtcgttcatgcgcgaccacggcgtgctcaaggacatctacaccgaacgcgatggtgactcgcacaagaccgcccggggcaagaagctctcggtacgcacggtgaaggctcccggcttcggcccgaagggcatccaccgcttcgtattgccgttcaccgtgttcctgaagctcaaggatatcggtggcaacgtactgcccgactaccaagaggagttcgtcgacgtgcccatggcgcctgagcaggcttcggcctatcagcgcctgtcggccacgctgacagcggagctccgccaggctctggcgcgacgagataccacgctcctgggcgtggtcctcaacgtgctgctagcttggccggactgctgtttccgaccggagatcgtcaagcatccgcgaagccgggacaccctggccttcgtgccaccgatcttcggcgacgagcaactgatgcccaaggagcaggcactggtggggctctgcctcgaggagaaagcaaagggccgcaaggttctggcatacaccgtctacagcgggacgcgcgacactacgtccaggctgaagaaagtgctcgagcaagccgggctgaaggtggcagtgctacgtgcctcggtcgataccgctcggcgcgaggactggatcctcgaccaggtcgaccgcggcatcgatgtgctgatcaccaacccggagctggtgaagaccgggttggacctgctggacttcccgaccatcgcgttcctgcagacggggtacaacgtgtacaccctgcagcaggccgcgcggaggtcgtggcggatcgggcagaaacacccggtgcgggtggtgttcttcggctacgccggcagctcgcagatcacctgcttgcagttgatggcgaagaagatcgctgtggctcagagcacgtcgggagacgttcccgagtcaggtctcgactcgttgaaccaggatggggattcggtggagatggcgttggcacgacaactcattgcagcatga

SEQ ID NO: 330831 - DNA, 1830 bp, Pseudomonas aeruginosa
atgccagggactgcactgttcgaaaagccacgctggttgcgcgacctcctgcgcttcctgcccctcaagagtcaattcgtcctctccgggaacatccgcgacctgcaagcctgcgaagtggtgccgggtacggtcaccgcgcagagcttcaaccagaccctctgcgacgccctgctggacgccggctacacccaggtgctggcctgggatccgctggccgggttccgcgtgctcggccggccgggcagcgaggcgggggccactccgcaggtgcttctcgacctcggcctgaccccggtggacggcgccgcgccggccggcatcgacctgctcggcgcgaccctgcaacgcctggtcaaccgtagcggcgagccgatcgccctgatcgtcgacttcgcctcgcgcctggcggtgcgcaacgacgccctgagcgccgccgagcatcagttgttcacccaggccctggtgctctcccaccaggcccgcagccgtcccgccggggaacagcgcaaaccgttcttcaacagcgtactgtgggtggtggaaaaggaaggcgacctgcccgactggctgctggtggacaacccgcgcctgcgccatatcccggtgtcgaagcccgaccagccggcgcgccgggccctggccccggcgctgctccgcgggctcggcggcgcgggcgtcgccgaggaggccctgcaacaggccaccgcgaccttcgtcgagaacaccgaaggcctgctgctcctcgatctcaacgccatcgtccagttggcgcgcgtggaaggcctggccatggaacgcatcgccgacgccgtgcgccgctacaaggtcggcgtcaccgaagacccctggctgaagatcgaccgccagcgcatccgccaggccgacgagatcgtccgccgccgggtcaagggccagcagcacgcggtgacccacatgctggacatcgtcaagcgcgcgatgaccggggtcggcgccagccgcaagggcaaccgcccgcgcggcgtggccttcctcgccgggcccaccggggtcggcaagaccgagctggcgaagaccgtcaccagcctgctgttcggcgacgagagcgcctacatccgcttcgacatgtccgagttcagcgccgagcatgccgaccagcgcctgatcggcgcgccgcccggctacgtcggctacgacgtcggcggcgaactgaccaacgcgatccgcgaaaaacccttcagcgtggtgctcttcgacgagatcgagaaagcccacccccggatcctcgacaagttcctgcagatcctcgacgacggcgtgctcacctccgggcgcggcgatcgcgtgtacttctccgaggcgctgatcgtgttcacctcgaacctgggcatctaccgccagggggagaacggcgaacgggtcgccaacgtgctccccggcgagcccttcgaggcggtgcagggcaaggtccacggcgagatcgagcgctacttcaagctggttctcaaccgcccggaaatcctcaaccggatcggcgagaacatcatcgtcttcgacttcatccgcgccgacgtcgccgagcagatcttcacccagatggtcgacggcaccttcgccgacctccgcgagcagcgcctcgtcatcgaactggccgaggcgccgcgccaggcgctgcacgacctctgcctgggcgacctgtccaacggcggccgcggcatccgcaaccagctcgaagcgcgcctgctcaacccgttgtcgcgggcgctgttcgaccaggacgcgcagccgggcgagcgcttcctgatcagcgccctggacgccgacggcctgaccctggaacgccgctga

SEQ ID NO: 330832 - DNA, 1950 bp, Pseudomonas aeruginosa
atgagtttggctgagtactttaataatgcgggtgtgaagtgtgctcacataatcgatgacgcatttgatcaaacaccgaccgtcgcattctctagagatgaagctcaagctctcattgataagcttgatgatgatcgttttggactgctttgtgaaattatagggatgcctgaggcggatgagcagtcggtcattgatgctctccagaatattgaggcagtagctgctttctttaatgctcgtgagagttttggtgatatttctgcagtttttgatggtttctttcaggatcgggcaggaaagaaaggggatttggagttattgattaagtttttgagggcgaacggagttgaatgcttcgcctttggagccgattattccttaagtggccatgctgagcctcaactggtttttattgacttgcgtctaaaggagaatggtgggcaaatatccattgcagatgctgtgaatgtgtgtggtaaagtttattctaattatccggagtgcaagccttttgtattcttgatgtcaactttgtcggctcctcttagtaatcttagagagagcttctatttgagtgcaaagctgtttgcctcgcagtttgagtctattgagaagtcaattttcagagactcgtctgagctggaatctatactggcaagatatactaagtgttttgttgaactaggtaggcttcatgatagggtcggctctgtcggaaacgctattattaaggcggctgacaatgtgaaggctacattaagaagcttagatctccccgactacttcgttcttcaccataatactgcttcaattgagcgggttgggttgggtacatatgtagttgaccttcttttggagtacttggttagagaggttgagtcctctcctgagatatgggggtttgcttcagagttggatggatgggagatcaaaaatcttcctagatcaaggtttgggttaacctattcggcaggaaaaatatattctggaaatatgcttcattccaagtatcggcttgattgcgaagagcaaagagggcttgggccatctgatggatatttttacctgggggatattttctttttacgtgcagagttaggctctgggcgccccagaaaagcacttgtaatctctactccagcctgtgatttggttaggcctgataagctcagagaaagaacgatttttctatgtgagggaagggttagtgatgttaccctttcgactattccaagcgggcagggtggaataccaacaactattattgaatgggcctctaaacctgggaagcagctctcaattgagtggggtaagaaaaaactccatacatggcatgccgaggacatggactcttttaaggaacaaggctgtcagtgggtccgtgtggggaggcttaggccaatttatgcaattcagttgcagcatgcaattaccgctgatttgagtcgaattggagtgcagcgacctccaaatatgttaaagccatgcggcataagagtgtttatatctacaggtagtcgttgggagatgcttgatgatgaggagctgaaggtaccttccgcctctgctattgcagatagtgaagatggcaagcaagggctctatatcgtgtcggatacgactgttcggcgtattcgtagaaaacttttgcaatgggtggttaagaaaggtactcttccgagcgctgccattgttaaaaatattgcagaaagtcttgagtttgaagagcgactcatgtactgcaagcatatgcgagaagatgggcaggcagctgcagaagacacggttttccccatgcatgaagctgaggggttggacgagccctcgcagaaggcgatggtaattgttcgcccttcgtccagctccgtttatggctctatctgtgcaggaagagatgttgaacaggggcaggatgcatatattgtagtttcgcttttcaaatgctaa

SEQ ID NO: 330833 - DNA, 2370 bp, Pseudomonas aeruginosa
atgtcatttgaagtaactgcgcgcactattttgcaccttggcgctgatttaataacatcagacgctgttgctctgtatgagcttattaagaattctatcgatgcacgctccactagtggggttgatgttgactttgaaatatctataagagagtctgactactctgctttgctggatttggctttaaattcttcaggtataactgtcctcgagttgcaggaggcggctataaaaagggttttgccaaatgcgcctcaggagttaaaggggagatttattgaagcagtgaatcgttcgagaagtatttctgattttgtggataatgtttcagaagcctatcgttggtgtaatagggttgtaatatttgaccaagggcatggtatgtctttggatgatttgaggcgggtgtttttaactattgggaccacaagcagggcaaaagatgtaagtgcatctctgaaggagggcaatgggcgctccccatatttgggggagaaaggcgttgggcgactttctgcaatgcgtcttggtcgttatctttctgtagagactgcaactgcgaatgatgtgaatttcagtgtcttgaatatagattggcgggcatttgaggaagcctatgataagccaattagtagcgtgaaaatcactccggaaattggaggtaggaaagagggtttttcatcctatacaaagataactatatccgacatagtctcttcgtggagctatgagcgcctgataggaatagctcgtgctcaaattgctaggatgatggatccattttcttggtcggagaaaagaagatttcaaattcgattgcgctttaatggcgtagctgtagagcaggttagagtggtggcaagaggtttgctagaccacgcgcatgctacatgcactggagaatatactcttgaggagggcgctccgaaacttaggattacacttaattctaagctctatgaagggcccgagatctctcacgattttgatcttaatgatttgctttccttgtcaggtataaggggggctggtaggccgtcctcggttttaagaagtctcggtccttttgattttgagtttttctggtttaacaggcagcggctacgagctattgaaggggttggagatagagaggcagttcgttccttagtcaaagcttggggggggatatgcctatttagagatggttatcgtgtactgccatacggggatgagggggatgattggcttggtctggatcgtgaagcgcttggggcaagtggatataagctaaatacaaagcagttgattggtcgggttaggattggtagggctaaaaatccaaagctcctggatcaaactaatcgtcaaggtttgaaggattgccctgagaaagaagcgatgattcagatccttaatgtagttgtggctcgttggtggcatgactacttgaatgattcaggtcgtgaccagaaaaagcttaaggaattgtcttttgactctgttaaagaagttgctgtcgtcgatagcttggagcaaagaacaaaaacaagcttaaaggcaattcgtaaagatttttctggcgatgcaagattgcttgaacaggttaaggatgcatttcttgaaataaaggatgcgcatgctcgggcggttcagaagataagtaacattgaggaggagaaagagcgacttactcagctggcaggtgttgggttgatgatagaggttatagcccatgagcttactagagctacggagctaacccaagccaccttaaagggaatagatcggaaaaagattgatgatgagacctctgctgcgtttcgagtcttgggggagcaaataaaggtcatccaaaagcgtttgcatacgttagagcctctatcagtgagtgcaaggcagagacgctcgatgctttgcttgaatgatattgtgaaatatgttctggacgcccacggagctcaattcttacgtcattccttagattatgaaatttctgctttggaggctgttaaagcctttgtagtggagggacatgttgtccagatacttgaaaatctaataagtaatacggtttactgggcagaagtttatcgttctgaacattctggatttgtcggtaaagtgaaggtcgagatattggactctcctccgcggattaggtactcggacaatggtcctggtattcctgcacctagagcagagtcagtctttgagccattttactcaacaaaaaattcttcgctctctcgtcgccaaggattggggctttatattgctcggcagaatgcggagctacttggtggaagtttaatgttggtcgatgagggaagcctccggtcggggcggtttaatatttttgagttggagctgaaggagtcggcagaatga

SEQ ID NO: 330834 - DNA, 3465 bp, Pseudomonas aeruginosa
atgtctaaccttttgattgatcaaattgagctggactcaaagttcctgcgttctattgctttgaacagagatctgcgttctgcagagtctcttgacagctacctaattacccccgcagttctgacagtgctgcggcagatcggtagggcattgtcttctggaagtgcacaacgagcttggaagatcctagggccttacggaagtggtaagtctgccctcgggttattgcttgctcgtctgttggatggcgatggcagttcctcaacgatctatcagcagcttaaggatgcttccagcgaagtcgctgatcttttcccacagggtcagaatcgctttgctttggccatcacggggtctcgctcgtcacttggtgatgctatggctcgggcaatgcttgaagcactggagtatcttcctaaaggccgtggtgctacggagctaaagcggcagctagacctaaaggcgcaaacttatcgagatattcctcttaatgctgccataggtagcttgcttggcgactttgttgctttgactaaggcaagtggccactgcggtgttctgctacttattgatgaactcggtaagtttattgagcatgctgcgttgaaccccgaagcaggtgatctgatgtcgctgcagcagattgctgaggctgcttcccatccaaccaatgatggactattggtctttgctatgttgcatcagcattttgacgcctatgcaaagggggttggcaggacgctatccgacgagtggcataaagtctcggcccgttttgatgacgttccgtttgatgagccggttgagcgttacgcacatttcgctgcccacgctctcggtgtcaggtcgattattacatgctcaaagccatttcagcagcaggctagagagttgtatcggctaagcacgaaatacaatttcttccgtaaaactgctgagagcgaactattcgatcaggcggaatgtctttacccattacatcctgcagcattagcctctttggcagtaatttccaagcgctttgggcaaagtgagcgatcctttcacgcgtttatgcgtggacatgaagttggggcgttgcgggattatgccaaccggacaaacgccagtcctcagggctggtatcgcttaccagagctctatgactatctttcagtaggagttggcctgcgttttcgtgatttggaggccgagcgacgttgggacttcgcgcgttctgtgatagatcgtggtactgctgaactaagtgagctacaggtccaactgcttaagtctattgctgtgattgagctggttggtcagtctcttcacgtgctggcttcgcctgaggtgttaaactttgtactgctgaagagtgagagtgatcttcagatagtcactgcagcattggctgatcttgagcacaagaccattttgctaaatagacaggcaactggagactatgcattcaccgttagccaaacggtaaacattgaggcgctttaccgagaaactctgaagcgtactgaggatgagctgatgtttaagggcattgctcagtcgctgtcagagacaagtgtcattgctagtcggcactatcaacagaccggaactctgcgctctgtaagagtgatagcaggaactccagaagaaattaaaaaatcaattgatgattaccgtcagcatgatggttgtatcggattgatgtttgtagatgcgtcaataccagagcaaattgcggctgcgcgaggtgttgccgctggcgtaaaggatgtagtggcccttaccgccatcgtacagattggggctaatgagcgcagagctctcattgactactcccgctgggccttggttaatgaccaggtcaagagccgtttcctagatccttggactgaacgccatgtagaaacgcagttggggcgtgcgcgggagcaggtggcacggcttgtactggcgttgctcaatcatcaggtacagggttcttcgagtttcacctattggtaccgtgggaaagcagtgcaaggaagcgaatcgatgaacttgagccaggctgcctcttggctctttaatcgcgttttcgaatctgctccgatcgtccacaacgagctgattaacaaggaaaaaccttcgtcggctatcacattagctcgccagcgcctgttcgagttgctagagaaaaagggtggggaagagcttctcggtatcacggactacccgccagagcgcctgttgtacgtctctctattgcagtccacaaaactgcatcgaaaaaagggagagcactgggcgctcgttgcgccggataaggagtcccctgcgggaattaagaaggtttggcaagagctcgatgctttgttgatgactgatcagcaagttacttttgcacagatcactgaaaagttagctcgaccgccgcttggtgtacgcaatgggcctgcatctatctggtgtgtcacctatctactactgaacaaagagacgtgcgctattttcgagcgtggaagcttggttctcgagctaacgcccgagcatttgcagcgcatgttccgcagcccccagacctttgcattccggcgttttgacatcgcagctgagcgcaaggcgctgattcaggattatgctgcggcccttggtagcgtaggaattcaggtcggcctggatgcttcatacctggatgctgcacgcgagctaatccgttggtattcgcgcctaccccagtattcgcaagagaccatgcggctcgccagccatacgaaagcactgcgggatgtcattaagcgtgctactgatccggtcgcactattagcattggatattccgcgagtactgacaggggtaaaagggcgaaagggtgtaggttttgttgcgatgctgactgaatcgctgaccgagttgggaaccgccttcaggcgcctgcaagatgaggtcagtctatcgatggcccaggcattttctcttactggcaccttaaaggctctgagagctcagctgcaggaggagtgtgtagatgcagctggggctttggctgaggctgacttgaagtccttcatcatgcgctgtgctgatatcacgctgactgatgataagtggctagactccattgcgagtgtagtggttcagcgaccgttggatatctggaccgatgcacaagctcctctcttcgctaacaaggtttatgacctctgtggtcgctataagcgatggcttcgcgttgcgatgtctagaggtgaattcgagcgtcaagctcagcgctttgtcagtgtgacgctcacccttccaagcggagaggaggctgcgatgctgttggcctccgatcaggagatcaaacaagtcgcggacggattgctgaagaatcttaccaagcaggttggtggtgatctgaagatggcagcctctgccttggcccaagcactgctgcaactgcagcaaggctcaaatgctgatgaaggaaaagagttgaccaatgagcaacgaaccgcgggttag

SEQ ID NO: 330835 - DNA, 909 bp, Pseudomonas aeruginosa
atgtcagaatcgcagcgccgagagccgagattctctgggcatgagtctttcgtatgtcgctatggatggctacccaagctgcatagcgccattgcattgaacccgctgctgctcaaggacgaagctcaggcgactatcaccttgggcattggccgtaacatggtgaaatcggttcaattctgggctgaggccttcggggtggtcgagtctagcgataaggggggactgcagcccggtctgttgggacgccttctgcttgctgacggggggtgggatctttacctcgagcagccggagtcgctttggctactgcattggtggatctcaacacacgcggatattgctgcctggcagctcgtctttggcagcgcagagctttccagatttgatcgtaagaagcttgtggctgccttacgcgagctcgctgatagcattggtaagaagcaattagccgcttcgactttggaacaacacgccagtcttttccttcattcctatacgcgtgaagagtctgcttcggatgatacatcatggtgtccactgcaggaccttggcctatttgaggaagccactgctgacgatggaaaaactgtttatctagtgggtaggagcgtgcccctagggcttacgccgcgagttgtcctcttttcaattgtggattttctggcgcggcggggctcgacgtcttgtagcttgggtgatttggctcatggagccttcagtccaggcgttgttttccgtctcgatgaattccaactcagaggcttgttggaatcggttgagcacgaatttggtggggttgttcgctttgtggacactgctgatacccaacgcatcactatgaaccctgcactgctgcctgactggctcgaattcttgtgggcagcagaggaagagtcgaatgtctaa

SEQ ID NO: 330836 - DNA, 621 bp, Pseudomonas aeruginosa
atgagcaatttaccccctccctcctggacagcctatgaccaagaaagccaaaaatatatagagagctatagcaaactatactttgcaaatatacacagacaatttataagatttttaccgatcgagaatggtgcaagaatacttgatgtcggctgcggatctggccgagacgcactttctctcgcgaggcgcggctataatgttacagctgtagaccccagcgtcgagatgcttaattatgcaagatctcgcaacaaccatccccaaatagactggataaatgacagccttccgaccttagcaaaactgaaatatgagaaatatagatttattcttatgagtgcagtctggatgcatatacccccttcccaaagaagcagttcattagaaagactatcttcactactagaaagtgaaggacgcatagcgattacgcttcgaatcgcccctccggatccattaagaatcatgtatcaggtttcgaaaatcgagctcttaagcttagccaaaaaatattctctttcaccgatttacataagccgccccaacaaagactccctaaaaaggaatactgtaaaatgggaaaaggttgtgctgcaaaaatcaggtagcccgatttaa

SEQ ID NO: 330837 - DNA, 402 bp, Pseudomonas aeruginosa
atgggctggctgttctcatcccgcacccggtcagagctgatccaagatctgatccgccctgaagacacggcacgggccagtgttcgtgtgcttgtgcataccttgcgtggaaatgtgctgtggtcggtcatcgaagtgacggcgaaagctaccggtgtccacccagacctcgtgcctggcgagtccatgcgctacatccgctgcgacctgctgcaacgcagtggtggtgagtgggggtacaaagccatggatgagtccatggcgccgtactactacagttgcccgctgcgctatctcgacatggccaaggagctctcgcccggctggcgcgagaaggttcgtgcctatcacacacagcgacgtcagtcggcgaccgccatagccggtgaggcagcccggtaa

SEQ ID NO: 330838 - DNA, 264 bp, Pseudomonas aeruginosa
atgaagagcaagttctatctggtgctgggcctgttggtcctggcgggctgttcggatgacaagtccaagctacgcggacagtttctctcaggctgcgtgcaaggtggctctcccaagccagtttgcacatgcgtctacgacaagctggaaaagacctactcgaccgagcagttgaagcagattcaggcagggcgaagcccgctggtatcgaacttcatgcaggacagcatcacgtatgcaaaggcctgtatagcggagcagtga

SEQ ID NO: 330839 - DNA, 855 bp, Pseudomonas aeruginosa
atgagcaaccacctttccggcccacacatgtgggccggttttcttcgagtcctgatggcgctgctggtcggctcgctcctcgccggctgccagtcgccacgcgaagcgctgcagcagctggcggatgcgcacgggcgtcgactggagatactgtcggggcagccgttcccgttggtcatgctggcgccgcaggacaccacgaaagccacccgcttgcgcgtctacctggaaggcgatggccatgcctgggctaccgccacgcaacccagcctggatccgactccgcacaatctattggtggcgcggctggccgtggacgatccgatgccgaatgcctacctagcgcggccgtgccagttcgtgatggtaccgagttgcgagcctgcgctctggactaatcggcgcttttcccaggaggtggtcaccagcctcagccaggcgctggatcagttgaagcagcgttatggcaatcgggaattcgagctagtggggtattccggcggggcagcactggcgctgctgctggcagcccaacggaaggacgtggcgcaggtgcaaaccctggcgggcaacctcagcccacggctttgggcgcagatgaaaggactgtcgcccctcgacggttcgctggacccgttaggctatcgggaacggctggcggcaataccacaacgacatttggtgggagacgcagatgacgtggtccctgcatcgctaaccaaggcctacctggaacagctaagcccaaacgtctgcagccaggttgcactctcgcctgcaacagatcatcaacaaggctgggagaccgcctggaaaacctggcgaggtcagcagctaaactgcaagagcaattga

SEQ ID NO: 330840 - DNA, 921 bp, Pseudomonas aeruginosa
atgtcgatcaatcctgcgctgcttcccggcctggcctggttcgtccacatcgcccgccatcgcagcttcaccaaggccgcgacggagatggaaatttcccgggcggcactctcacagcacctcaaggggctggagcagcagctcaacgtccggctgctgcaccgtacgacgcgggatatgtcgttgaccgaggagggcaggcgcctgttcgaggcggtagcccccgcattgaagatgatcgacacagccgttgccgagctcagtgaagtgacgtccgcgccaacggggctgattcgagtcaactcctctcgcatcgccgcacgaacattgctggagccccacctgggggaattcctttcccgctatcccggattgcggctggaactggtgctcaacgatggcttcgccaacatcattgccgacggagccgatgtaggaattcgtctgggcgagagcctggacgagcacatggtggccgtgccgatcacgccacgaatcgagatggcgatcgtcggatcgccagcttatttcaagcgccatggtatcccgcagacaccggccgatctggtacagcacaattgcctcgcctaccgcttcaccagcagcgggacgctggatcgctgggctttcacgtcgccggaggacgaggcaatcactcaggtgttcgagccaaggggcagcgtcgtcttcaacgacgacgagagcatgttcaaggccgctgtccagggcgttgggttgatcaagtacctggacgtttgcgtccgtgagcaactggcatccggagaactggtgcgcgtgctgcagccctggtgccattccttccccggtttctacctgtatgcccccacgcgcgcccagatgccggccaaggtgcgggtgctgatcgacttcctcgtagaaaagcgtggggccttgggctga

SEQ ID NO: 330841 - DNA, 915 bp, Pseudomonas aeruginosa
atgcagcacgtccgcattcaaaccctcgatggtcatggggtcacgctcgccgctgacttccacctgcctgccggtttcgacccgaacaaacagtaccccaccatcgtcgtcgcccacccgggcggtggcgtcaaggagcaggcttccggcctgtacgcccgcaagctggccgaacagggcttcctggcaatcgccttcgatgcgtccttccagggtgaaagcaccggcttgccgcgccagctggagaatccctacatccgtactgaagacatcagcgccgtgatcgactacctgacgactcttgcgtacgtcgacgccaaccgaatcggcgcgatgggcatctgcgcaggcgccggctacaccgccaacgccgcgatcaatgaccgccgcatcaaggcagtcggtacggtcagcgccgtgaacatcggccagatgttccgcaatggctgggagaacaccgtcaaggatgccgaggccctgccgtacatcgagcacggttcccaggcccgcacgcaggatgcacaaggcaaggagttggccaccctgccactggcaccgatgcgcgaagaagatgcccccaacgaagaactgcgcgaagcctgggagtactaccacaccccgcgctgcgaacaccccaatgcacccggcttcatgaccgcccgcagcctgccgcagatcatcacctacgacgcctaccacaaggccgaagccttcctgacccaaccgttgcagatcgtcgcgggcacccaggccggcagcaaatggatgagcgatgacctgctcgcccgtgcggcctccggcgacaagcatatgcacctgatcgagggcgccaaccacatgtcgctctacgacaagcaaccctacgtcgacgaagccgtatcggtgctggccggattcttccagggccgcctgtaa

SEQ ID NO: 330842 - DNA, 930 bp, Pseudomonas aeruginosa
atgaccaccatcaagcacgtcacctaccgcaacctgggctgggactcggccgccgacctgtatctgccgccgggtttcgatgagagcaagaaataccccgcgattgtcagcacccaccccattggcagctgcaaggagcagacctccggcaacgtctacggtcagcaactggccgaacaggggttcgtcgtactcgccttcgatgccagcttccagggcgccagtggtggcgaaccgcgcttcatcgaagacccggccatccgcgtttccgacatccgcttcgctatcgacttcctggtcgcccagccctatgtagatgcgcaacgcattggcgccatcggcatctgcggtggcggtgcctataccatcaacgcagcgatcactgaccatcgcatcaaagcccttgtctcgattaccggcgtcaacttcggacgactgatccgcgaaggttttagccagttcgatccgctcggcgccctgaaagcgatggccgcccagcgcaccgccgaagcccagggcgcggcacgccatgtgatcgattacctgccggagtcggtggaggccgggaaacaggccggcatgacggacatcgacgtgctggaggccaccgactactacaaatccgcacgtgggcagcagcccaatggcgccaccagcggcctgttctccttcaacagcgcggcgatggcctgggatgcattcgcccatgccgaaacgctgctgacccaaccgctgctggtggtgatcggtgacaagcccggcgcctttggcgcctaccgcgacggctgggagatttatggtcgggcggcgtccgcagccaagcggattttcgtcgccgaaggctggtcgcactacgacctgtacgacaaaccagagccggtagccctggccatggctcaagtcgcgcccttcttcagggaacacctgtag

SEQ ID NO: 330843 - DNA, 201 bp, Pseudomonas aeruginosa
atgaaaaatgtactcatcctcggcgccactgggcagatcgcctcgtgggtcgtacgagggcttgggcaactgagcggagtgcagcagacctcactgctgcgcgaccccaggaagctttccggcacggagcccgataacgcgcgagtggttatcggcaacgtgctggatcaggaactgctgcgggaggtcatggctggctag

SEQ ID NO: 330844 - DNA, 195 bp, Pseudomonas aeruginosa
atgcgcgccagcggcgtcaaacgcctgatctttgtcctgtcgctgggcatctacgacgaaatccctggcaggtttggcgagtggaatcacgaaatcaccggcgagccgctcaagtactaccgtcgcgccgcagacgccatcgaagcctcggggctggatttcactatcctgcgcccggcctggctgaccgactag

SEQ ID NO: 330845 - DNA, 171 bp, Pseudomonas aeruginosa
gtggactacgaaatcaccggcaaggacgagttgttcaggggcacggtggtgtcgcgcaggagtgtggatgacctggtcatcgatctgatccggaaccccggcctgcatgttggcgcaaatctgggcgtgaacaaacccgggagcgatggcgacaagccttacttcatgtag

SEQ ID NO: 330846 - DNA, 342 bp, Pseudomonas aeruginosa
atggagctggaacggttattcccggttgccacgctcaagccgggtgcacggcacatctactccaagcgccacttcttcatcgatgaggacagttggactatcgccgaagtcgatcaatacgacagccgtggagaactctggcgagtaggcgaagagcacgcctacttccgctacgacgtgcaggtaccgctgacggccatggaagtcttctacgatctgcaaaacggccgctacatcgcctccagcatgaccaacgaacagcgcaatgcgtatgacttcacctaccgcgcatcgatctcggactacaccccaggtgcgttacgcagcgagggggtgcgctaa

SEQ ID NO: 330847 - DNA, 726 bp, Pseudomonas aeruginosa
atgcagctttctgtccaatcccctcgggccagcaaggaacggccctacaatctcgccgagcgcatctaccagcaactcaaggatgacatcttcgagttccgcttgctgcccggcgaacgcttcagcgagagcgacgtggccgcgcggatggaggtcagccgtactccggttcggcaagccctttaccgcctggagcgagagggttatctggaggtgcattttcgcagtggttggcaggtaaagcccttcgacttcgaacgcttcgaggagctctacgacctgcgaatcgtgcttgagctcgccgctgtcaggcgcctgtgcgacatgagtaatgaactgccgcagttgctcgatgaactgtcacgtacctggcaggtagaggaaagccagtggctgcaggacggtcgcgctgtttccgaactggacgaggcattccattgcgccctggtggctgctacgggcaaccgagagatggcgcggacgcaccgggaggtcactgagaagatccgcatcatccgccggctggacttcacccagtcgccacgtgtcgccgctacctatgaagagcatggccgcattctccgcgccattcttcaccgccgtagcgacgaggcctgtcagttgctgcgcgctcatatcgaggtgagcaaggcggaggttcgtaagatcactctgcatatgttgcacagcgcgaagcaacgagcgctgatcaagtctgttgtctga

SEQ ID NO: 330848 - DNA, 3624 bp, Pseudomonas aeruginosa
atgttcgatactgtactgatcgccaaccgtggcgagatcgccgtccgcgccattcgtacccttaagcgcctgggcgtgaagagcgtcgccgtttattccgacgccgaccgtaatgctcagcatgttcgtgacgctgatgtctccatcgctctcagcggcgacaagcccgtggacagctacctgcgtgtcgacaagatcctcgccgccgcacgggagacgggtgcccaggccatctatcccggctatggtttcctctccgaaagcgccgatttcgccgatgcctgcgaggcagccggcatcaccttcgtcggtccgactgcgttgcagatccgcgaattcggcctcaagcaccgtgctcgtgaacttgctgccgatgcccaagtgcccatggctccggggaccgggttgttgctgagcgtggagcaagcactggaggcggcagaaggtatcggctatccggtgatgctcaagaccaccgctggtggtggtggtatcggcctaacccgttgcgccgacgccgcagcgctggttactgcctacgagagcgtcaagcgcatgggcgagcagttcttcagcgatgcgggagtgttcctcgaacgcttcgtcgaccaggctcgccacatcgaggtacagatcttcggtgacgggcatggccgagtcatagccctgggcgaacgagactgctcgctgcagcgacgcaaccagaaggtcgtggaagagactcccgcccccaacctgccgcagcgcacccgggaccgtttgcatgccgccgccatccagttgggtgagtccgtgaactaccgcagcgcgggtaccgtcgagttcatctacgacgccggccgtgacgatttctactttctggaggtgaacacccgcttgcaggtggagcaccccgtcaccgagatggttaccggcctggacctgatcgagtgtatgttgcgcgtcgccgctggtgatccgctggactggccagcgctgctgcgtgcgcccaaaggcgccgccatcgaggtgcgcatctacgccgaagatccgctgaagaacttccagccgagccccggcctgctcaccgacgtgcacttcccggagggtgtgcgaatcgatggctgggtcagcaccggtagtgaggtctcggccttctacgatccgatgatcgccaagctcatcgtccacgccgaagaccgtgacctggccatcgccaggatgcacgaagcattgtcggcgacccgcctgcacggcatcgctaccaaccttgactacctgcgccaggtggtggccgagccacctttccatagcggtcaggtgtggacgcgtctgctggacactttcgactaccaaccccaggtgattgaagtgctggagcctggcacctactccagcgtgcaggatttccctggccgtctcggctactgggatatcggcgtgccgccgtccggtcccatggacgacttcgccttccgccttgccaaccgtatcgtcggaaatcacgcgagcgccgccgggctggagttcaccttgcaggggccgacgctgcgtttccacagcgactgcctgatcgccctgacgggggccgactgccccgctgaactggatggcgagtccataccctactgggcgccgatcaacatcaaggccggccaggtattgaagcttggccgtgcccagagcggttgccgcagctatcttgcggtgcgtaacgggttggacgtgccggtataccttggtagtcgctccaccttcgcgcttggccagttcggtggccatgcggggcgtaccttgcgccccgcagacatgctcgccatatcccagccggaactcgaggcctgcaccacgccagccccggtgagccaaccccaggcgctggacaacagtctgattccacggtacggccgcacctggcagatcggtgtgctctatggtccccacggtgcgccggacttcttcacccccgaggccatcgaggagttcttcaccgccgaatgggaggtgcactacaattcgaatcgcctgggcgtgcgcctcagcggccctaaaccgagctgggctcgtgcggacggtggcgaggcaggcctgcacccctctaacgtgcatgactgcgaatacgccatcggtgccatcaactttaccggcgacttcccggtgatcctgaccaaagacggcccgagcctgggcggcttcgtctgcccggtgaccatcgccaaggcggagctgtggaaagtcggccaggtcaagcccggcgacaagctgcgcttccaccccatcagcttcaagcaggcgcagagcctggagcaggcccaactgggcagtatcgagtccatggccgccatctcggctgtcaccctgcctgccccgagcctgcagccgggcgccacagtctccgccgccgtgctggccgagctgccggcgagcgtaacccgccctcacgtggtctatcgtcaggcaggtgacgcctacgtgctgatggagtacggcgacaacgtgctggatcttgccttacgactgcgtgtgcacctgttgatggaagcgctcagggtcaacccgctccccgggctggaagagctcgcgcctggcgttcgatcgctgcagttgcgctatgacagtcgcgtgttgcatcagtccgtgctcatcgagcatctgctggcgcttgaagcgcgactgcccgatgtcgaccaagtgaggatacccacacgcgtcatccatctgccgatggccttcgaagactgcgccaccctgagcgccgtgcagcgttacagcgagacagtgcgcagtgaagctccctggctgccgaacaacgtcgacttcatccagcgcgccaacgggctggccagccgcgaggacgtgcgcgatatcatcttcgatgccagctacctgatcctcggcctcggcgacgtctacctggacgccccctgcgccgtgcccctcgacccgcgccaccggctgctcagctccaagtacaacccggcacgcaccttcaccgccgaaggcaccgtcggcatcggtggcatgtacatgtgcatctacggcatggattcgcccggcggttaccaactggtgggcagaactctgccgatctggaaccgcttctccaagaatgcccagttcaaggatggccaaccctggctgctgcacttcttcgatcaggtacgattctatccggtcagcgagtccgaactggacgtcttgcgcgaagctttccgggaaggtcgagcggagatccgtatcgaggatggtgtgttcgattttgccgagcatcaacgcttcctcgccgacaatcatgacgacatcgcactcttccaggcccagcagaaactggcgttcgacgaagaggtcgcacgctggcaacaggatgaaactgagacggctgcaccggtgccgtcgagccaggagttagaggaaaacggagacgcgcatatcgtctgtgctgacatgtgcggcagtgtgtggaaggtactggttcagcccggagaagctgtgaaggccggcactccactgctggtcgtggaagcgatgaaaatggaactggctgtcaccgccccggtgagcggtaccgtgcgttccgttcgttgccagcccggaaaggcagtgctgcccggtgacacattgatgctgcttgacccggtcgcgtga

SEQ ID NO: 330849 - DNA, 1803 bp, Pseudomonas aeruginosa
atgcacagcatcaccactgcctacactctcagtgactggaagcgcgcatacgaagaactgcaccctgcggagctgctcccctccctgctccactccttgagcaatgaggatgtcgcctggctaagcctggccactaccgatcaactggacagccaactggcagaactggaggcaaggctcgacaaggccggcggaaatcgagatgcgctgcccctgtacggcgtcccctttgccatcaaggacaatatcgatgcggcaggctggaccaccacggccgcatgtcccgagttcgcgtatgtagctgaaaacgatgcgacggtagtcacccgactgcgcgaagccggcgccgtcctgatcggaaagaccaaccttgaccagttcgccactggcctggttggcacccgttcaccctacggagcggttcccaacagcttcgatccgcaatacatcagcggcggctccagttcaggctctgccagcgttgtcgcgcgtggattggtggccttctcgctgggcactgataccgcaggttctggccgtgtgccggccggtttcaacaacgtcgttgggctcaagccgaccaagggctggctgcccaacactggcttggtgcccgcttgccgtagcctggactgcatctcggtattcgccttgaccgtggctgacgcccagactgtaaccaccatcgctggcggtttcgatgctgccgatgcttacagtcgcaggaaccccaacagcgccaaggttggagtgccagctaaaccacgcatggccgttccagcctcccccgagttcttcggcgatgagcagaaccaggccgtattcgaacaggctctggacacattgcgcgagctcggcgcagaggtggtcgagatcgacttcgggcctttccgcgagctagccgagcagctctattacgggccctgggtcgccgagcgcactgtggcgctggaaggcgtcgagccctcgcatatccactccgtggtgcgtggcatcgtcgcggccggcgagcagtacagcgcctgtgacgcctacaaggccgaatacatccgcgcggagctgacgcgccggatcaacgacgccctggcaggcttcgacgcgctggtggtgccgacttcgccgaccctccgcacactggccgagatggacgtcgaacccgtgctgttcaacagtcagttcggcacctacaccaacttcaccaacctcgcggacctctctgccctggcgttgcccgcaggattccgggccgatggcctgcccgccggcatcaccctgatcgccccggcttggcacgactatgcgctggccgctttcggccagcgttggcagcaggccctggccttgccgctgggggccaccgggcgtgcattccccgccgccacgcagcgcgccaaagcccagtcgccgggctgcgtgcgggtcgccgtggtcggtgcacacctcactgggatgccgctgaacttccagttgcttacccgtgacgccgtgctagtcgagcagaccactaccgccaccagctaccgtctctacgccctccctggcaccgtgccgccaaagccaggtctggcccgggtcgctacaggtggcgccgagatcatcgtcgagctgtgggatgtgcccctggcacgtttcggcgagttcgtggccgagatcccgccaccgttgggtatcggcaacctggagcttgccgacggacgctgggtcaagggcttcgtttgtgagccatacgccctggaaggcgcccgggatatcaccgtgttcggcggctggcgtgccttcatcgctagtctggcgaaaccctaa

SEQ ID NO: 330850 - DNA, 951 bp, Pseudomonas aeruginosa
atgaccaatcaagcagccaaacacctctcccaatccgacatcgctatccagatcgaacgactcgtgaacgcagtgatccgtcacgatggccctgcattcaggatcagctacgacgcacagggggatgaggtcatcaagagaaccaggctctctcggtacttcgatcacgttcggcagatgtatcacctggtgcatgacgagacgtacgccctgagtgaacacctgatcgcgttcaaggaggcgtgctacgacatcggcattgaattcgggatgttcgggatgacgtgcatggacgagagcgagggagggctcctgtcagaggctgagacctacaactggctcgtggagaggatccgggagcacgtgcagaccaagtggttcaagcgtgggaagcatgaccgtgtttgccgggagaaacgcaatcggcaagcagtcaccgagtacgtagagcgggtgatggctagccgttcacgtactgtggtggtgagggtgaatctgtactaccgggaagcagcacgtattcgcctgaaggtggaggacgtcttcgaggacctggacaggctgatccgggctcgggaatacgatccggtcttccagcacgagacaggctacatctgcgctgtggagcaaggggaggacatgggctatcacatccatgctgccttcttcttcgatggccggaaggtgctcatggacatcgtcaaggctaaagctattggcaaactgtgggagaggatcacggatggctgggggtacttccacagctgcaaccatgacaaggcacggtacaaggagcggtgtggggtaggcatgttcaagcatcgcgacggtacaggtaagcagaacgtcatcgacgcctgccactacctgatcgaggatggccagtcattgcgtgtgaagcctgtgggagccagggcgttccgggttggtcgtatccctcgcggttactaa

SEQ ID NO: 330851 - DNA, 213 bp, Pseudomonas aeruginosa
atgtccatgaggatcatcagtttgaaagaggtcatggacctcaccagccttgctcgctcgaccatctataagtacatcgctctcggcacgttcccacttcccttatctgtgggggagcgttgcgttcgttggttggagagcgaagtacatgagtggatccttgaacggattgctgagcgtgatgagaaactccaggctgtaggtaagcattaa

SEQ ID NO: 330852 - DNA, 1242 bp, Pseudomonas aeruginosa
atgggcgaaaggctgctgactgcgccgatagctggcgttggggctgaggcgaagtatttcctcatcgcgttcatctatcgttttgatgctacccaatggaaggaaatgtccgtgaaggcattggctcgatccttggaggtgacccctggagtggcatctagggcccgagaggtattgattgaacatcaatgctttgactgccgcaaggttgctactgcaggaagacccacactcgggctgaaggtgagccaggggctggcctgcaaactcggcgacctcagcacttcgacatcccatcatgggcccgttctgcgtcaccttttcaggggtgtgatctatcgtgattatgaggccaaccggacgccggcatcatcgaatgagcttctgagaccgcaactccgcctattactcgcaacgctattcgcccatgccaatgaactgggactggtagatggcctcgggctcgctcaactccgacagttattgggggagggggaggagaaggtcgacaggtggctgaaggaactcctacagcttggcttcattcgccgaaagatagcggggctctcggactcgctctatgccgatacgaaagtgaccagcagctatatcctgaacctgaaccatccagggcttgcttcggcggactgcagcagcccagttgtagctttttatggtgaggcaatgcgctctgaggagagccgccatggttttgcggagcgatttgcgcgggtgcaaggggcgtttcagggcctaggccgcacttatgaaatgcttgtctggaggatctatcaaggcgtaagcctgcttctttcgaatcactggagcgtcttgggcgactctgtccgtctcccccaaattgatggcctagagaaaatcatgactgaaagcctccacgcgtcgggtaaagatgattcctcgcttgaggtcatggttgctgacatgtgctggtgggctttccatttggcttcgcgggttaagaatcgaatagcgggggatagagcttttgcgagcttggtagggcggagggtgcttgcgttccctgccaaaaatagagacacggatgattcgatgaccttggtctttgctcaagagccctggggagatggccctgaatgtatagtttctttaagcagcaccaaggggcacgccgagatctggacgaaagagtctggcctttctcgagagcagctttccaagcatggcttggtctcttttgagattgagagtactaccggttaa

SEQ ID NO: 330853 - DNA, 819 bp, Pseudomonas aeruginosa
atgaaaagtgaactagaatcattctcagcatgggtatcaaaaaaacgtctaacggaatccgacgtcgcctggatacaaaactacctgcatggaaaaggggaaatatctctccgtgggcctgtagatttagatcgacttcttaaagtaggagtacaactagagagaaccgactcaggaagaaattcccttagacagttaaaggctgcctataggacaagaaaaagcaggagtgcggaggaaagatcaagcacaggagacatacgccccgcagagcaaaacctctcctctcaaaacaggaactacaaggctctaacaaacctagctgacgaagtattaaaatacgaagaaacacttaaagcaaaattaaagcactcagagagtcagataaaagaattaaaagagaggatatcaaaatctaaaaaaatcacacagaaagccctcaacaaatcaaaaaaagcagcacaaacactgaataatcttcgagaaagccccctaaaaaactcagaaatagaaaagatcatacaggacaatgaagagatcaaagaattacttatagacacattaaacactctagacccactcccccctcaaaaacgcaccataagagattcagatatcaacagatataaaaaatggacagcagccaaaactacagaaactacagaaactacagaaactacagaaactacagaaactacagaaactacagaaactacagaaactacagaaactacagaaactcaaaatactcctcaaaagaaaaaactaacaacaatatttaaaataatagagaagcaaacaaagccattcacggactaa

SEQ ID NO: 330854 - DNA, 198 bp, Pseudomonas aeruginosa
atggccgtacttgtgatcctggatgcgaatccagacgaacccgaagactggcgatttctgaaagccgacgagtacgacgggacaggacactgggacgataacaggacgttccccactgctgctgccgccgatgcgtggattcaaaagcatgcacgcatcggctggtgcacgatgatcgtcggcgaagacgacgagtaa

SEQ ID NO: 330855 - DNA, 498 bp, Pseudomonas aeruginosa
atgaccacaaccatttccgattccaattcgattcacccgagtgaacttcctgaaatcggacaaccactggctaatggaacctactttgcccgctactggctgaattgcaaggaatacgcctacatcgatcttggcaagagcgcagagttcgccggcgagtggggagaatacggccaggacgtgggcgccgccgccagctaccgagacggcgcctcgaatacggtcgaaatggctgaagctggcagcccaattgccaagcaggctttggagatcggggccggcgtattcattccctctgctctggaactggctcttctgttctccgcaaaacaagcaggcgagttgtccgggttttcggatctctggtactggtcaagttcgcagtactctgccgacaacgccttcggcacgtacttcgatgacggctacacgatcagcagcggcaagcattttgacctccgtgtccgccccgtccgcaagattctcatccttcagtag

SEQ ID NO: 330856 - DNA, 177 bp, Pseudomonas aeruginosa
atgaatacctacgtaaccggaagctacatcagttcggatgacagcggcgccgaagaggttactgtgtcggaacctgtccttgtcgaagtgaccgacttcagcaagggcggcgagattgagcccggcaagtccgggcattttttcgccaaggaatcgacatgcttctcatcatcctga

SEQ ID NO: 330857 - DNA, 798 bp, Pseudomonas aeruginosa
atgaagactgacgacggtatcgtcttacctgattctcgcatcgtagtccaattcagctgtggcgcagcctccgccgtagccgcaaagctggctatagcacagtacgggatgacccacgatgtgcagatcctgaatgcatttatagccaacgagcacgaagacaacagacgatttctggttgactgcgaatcatggtttggacgtcaagtgacagtgctccgcgatgaaaaatatggagcggacgcccatgaagtgttccggcgcgaacgctttatgaagaaccggtttggagctccatgcaccaagattctaaagcgacgcttactagaaggttggaagaagccaggcgatgtcatggtgtttggctatacagccgaagaatcagatcggctggacgacttccgagagaggaatcctgatagacccgttgttgctccgctgatcgagcgaggacttgggaaagaagactgcaaagccatgatccaacgcgccggtatcgaactaccgatgatgtatcgactgggatacgagaacgcgaactgcataggttgcgtgaaaggaggagaaggatacttcagagctatcaggcaggattttccagaacaattcgaggcgctttgtgtgattcaggatgccattggcccagggtcctatcttttcagggatagagcgacaaataccaggcggtctcttcgtgatcttggagacggccctgtaagaagaaacgagaagattccggcgtgctccttcttttgcgagttggcagaagccgatctcatctacaaggagtcagcatga

SEQ ID NO: 330858 - DNA, 327 bp, Pseudomonas aeruginosa
atgattaatcaattcgcagaaacatactggatcaagctctacctgtccggacccatcgaaatagccaagaacatcattcgtcaggagtgtctgcgtgaagggctatgcataacgatcgatccgaccacgtttatctacacaggcggagaggagacagggtatacggttggtatcgtcaactacccgcgattcccaacttctccagatgatcttgaagatagagcgcgccaactcatgcatcttctgctggaaggcacatatcagcattcggctctcatgatgacacccacagccactgagtgggtaagcatcagacctcaggtctaa

SEQ ID NO: 330859 - DNA, 216 bp, Pseudomonas aeruginosa
atgctcaggaagaaaatcatcgactacatgcgcaccgtcgagccggggcgtagtacctggtggttccgccgcaacatctatgggtacgacactccagagatcctcagggaactcaaacgcatggagcgcgaggggctggtcactgccgaccgatcccagccaaacaacacgaaatggaagctgagcgccgccggaaaggaggtaggtcatgagtga

SEQ ID NO: 330860 - DNA, 147 bp, Pseudomonas aeruginosa
gtggacaacgaaaacgaaaccttggtcgcgctgctggtcatcgcgctgatcgtcttcggcatctttcggatagtcgtggacttccagaacctatacgagcagacagaacagaaaggacaggagttgagcagatggagcaagcaatga

SEQ ID NO: 330861 - DNA, 258 bp, Pseudomonas aeruginosa
atggagcaagcaatgagagaagagtttgaagcgtggtggaatttgccggcgcaatcggaacttcgcaaatcctgcgcaaggggatgggccgaggtcatctggaaagccagccgcgcggctctgagggtggagctgccggataaggcgaagttcgtggagtactacgaagacctagagggcgggacattcaactggcagcgatacatggtcgccattcaagaagccctccagcaagccggaatagaggtgaagccatga

SEQ ID NO: 330862 - DNA, 219 bp, Pseudomonas aeruginosa
atgaccctacacattcacgccccagaaggcgattacgttgctcagatcaaggggtacgggtgccggatatgggagacagtgggcgagccattcaatgaaccgaaagctgccatgtgtgcggctgtaaacgccatgactaagcggcacaagcgggcgagagtgattttctgctcgccttggtatgaaccgaacatcgttatggaggcaaagaagccatga

SEQ ID NO: 330863 - DNA, 540 bp, Pseudomonas aeruginosa
atgaccgaccacgcagagctgcggagggcggctgaggcggcaacgccggggccgtggagttgcaaccggcactgggcaatcgtcggagggccgattcttgagttcacgaacggagccgctcaacagcagatagccatggcctgcggacaaagctggatgcgtgacgatgagctgcgcaacaacgctgagttcatcgccgccgccaaccccaagaccgtcctcgccctgctggacgagatcgacgggctgaacgacgagttatccgcatgcaccgagcatccgggcggatgtgggtattggcgcgaggccgccaagcgtagagccgaagagcgcgaccggctgagggcgcagaacgatgcgctgcggggagcgctacatgccgttcaagccgaggtcgacgggaatctccgaccacttacccgcgatctcgtgaacatggtcagcggcttgaataacggcactcacccgaatgacatctacgaacactgcgacgaaatcgaaaggatcatcggagcagccctggaaggagctaagccatga

SEQ ID NO: 330864 - DNA, 372 bp, Pseudomonas aeruginosa
atgaccgatatcaacaagctgaaggaattggcggtgcgtgctcttccatttgcaccaggggaatggttcgtggagaacggaatcgaccaagtgcgcgattgcgcgaacgatttcgtttgtgagacgggcgaggatgagccaatcaaggcatccttcatcgccgccgccaatccacaagccattctcaagctgattgccgaggtggaacatctgcgcaaggatgccgcgcgataccgatggctgcgagagcgagacctcgaaacgatcagacaaggcggcgtattcgccgggatgaccccggagaacatcgtactcaaccaggaagacctggacgctgaaatcgacgcagccctagaaggagcaacgcaatga

SEQ ID NO: 330865 - DNA, 366 bp, Pseudomonas aeruginosa
atgtccgaccgccctgcccgcccctcccgtctcaacggcctgcgtcacctcgccctgctggtgcccaacctggaagaatgcgagcgcttctatgtcgacgtgctgggcatggaagtgctgaaccgcgccaacgaagacctggtgtatctcacctgcggcaacgacaacctttccctcggccgcgcccacgccgccagcaacggcctgcagaccatggatcactacggcttcgtcgtcgacagcgtggaggaactggaagcctggtaccgttacctgaaggcgctgggcgtgaccctgctcgacccggcgggcaacaaggtgcagccgctgtaccatccggcggtatccgggcagcgcctggcctga

SEQ ID NO: 330866 - DNA, 1260 bp, Pseudomonas aeruginosa
ttgtccctacccgactacctgccgcaaggcacgttcgacctgctcatcgccgacgaggcccacgagtacaagaacggtggcagtgcccaaggccaggccatgggcgtgctggcagcgaaggctcgcaagaccttgctgctgaccggcacgctgatgggcggctacggcgacgatctgttctacctgctgttccgagcccttcccgggcggatgatcgaagacggctaccgcccgaccacgagcggcagcatgacctcggccgcgatggcgttcatgcgcgatcacggtgtcttgaaggacatttattccgagagcaccggcacggcgcacaagaccgcgaaaggcacgaaagtcagtgtcagaacggtcaaggccccaggcttcggccccaagggcgtgttgcgctgcatcctgccgttcacgatcttcctgaagctcagagacatcggcggcaacgtgcttccgccgtatgacgaagagttccgtgaggtcgcaatggacacggcgcaagccgcggcctaccgcgatctggcgggtcggctgaccgcggagttgaaacaggctctggcgcgacgcgatacgaccttgctgggggtggtgctcaacgtgctgctggcctggccggattgctgcttccggtcggaaaccgtggtgcatccgcgcacgcgcaacaccttggcgttcgtcccggctcagttcaacgagttcgagatcagccccaaggagcgtgagctgatcgagatctgcaaggaagagaaggcccagggccgcaaggtcctggcctacacggtctataccggcacacgcgacacgaccagccggttgaaggtgctgctggagcaggaaggttttcgggtggcggtgctgcgcgcaagcgtggatgccagccgtcgcgaagactggattgcggagcaactggatcgtggcatcgacgtgctcatcaccaatcccgaattggtcaagacggggttggacctgttggacttcccgacgatcgtattcatgcagtcgggctacaacgtgtactcgctccagcaggcggcacgccgctcctggcgcatcgggcagaagcagccggtgcgcgtgatctacctcggctactccggttcctcgcagatgacctgcctggagctgatggccaagaagatcatggtctcgcagtccacctcgggcgacgtgcccgaatccgggctggatgtactcaaccaggacggtgattccgtcgaggtcgcactggcccggcaattggtcgccgcctga

SEQ ID NO: 330867 - DNA, 972 bp, Pseudomonas aeruginosa
atggatcagatcacgctcggccttgagccgctacccaagaagacccgcaaggagatcttcctcgccgagatgaaccaggttgtgccctgggccacgttggtgaagctgatccagccgcacgcgcggggtgcgcatcaagcgctgggtggccgtccaccatttcccattgagacgatgctgcgcattcactgcctgcagctgtggtggaacctgagcgatccggcgatggaggaagaactgcacgagcgaccgctttaccggcgcttcgtcggcctggagggcgcggcgcgtatgcccgacgagacgacgatcctgcgctttcgacatctgctggagaagcagcagctcgcaccgcaggtgctggccacgatcaacgccgggctggcccagcagggcctgatgctcaagaccggcacggtggtggatgccaccatcattgctgcgccgagttcgaccaagaacaaggatggcgagcgcgatcccgagatgcaccagaccaagaagggcaatcaatggcacttcggcatgaaggcgcatatcggcgtggacgccgactcgggtcttgtgcacagcgtggtcggcacggcggccaacgtcaacgatgtgacccaggccggcaacttgctgcacggccaagagaccaatgcctggggcgacgcgggctaccagggtgtggacaagcgagaagagttcaaggacagcaaggtgcgctgggaagtggccttgcgaccaggcaagcgccgcacccttgatcccgaacgcgagttgcatcagttgctggagaaggctgagaagctcaaggccagcatccgggcaaaggtcgagcacccgtttcgcctcgtcaagcagcagtttggctacgccaaggtccgctatcgcgggctggccaagaacaccgcgcggctgacgatgctgtttgcgctgggcaatttgtggatggcgcgccgacagcttctggggacgcagggatga

SEQ ID NO: 330868 - DNA, 2970 bp, Pseudomonas aeruginosa
gtgccgtatttccatgacaatgcaaatctgctgaacctaattcagcagcagcgagagcccaacctgggcctcagacctggtcagctcggcgctctgcatgccgtcttggcgcatttttccgtgcaggatgatccggcgttgatctgtctgcccacggggtatgggaagacgtcgttgatgatggcgttgccttacctgctacaggccgttcgtgtgctgatcgtcgagccctcgaatgcgttgaggaagcaggtatcttcccacctctctgaaatgtcaacgcttcgtcgcatcggcgcacttcctctggactgccccttgccggctgttcatttgcatgtcggacgagtcggttcagtagacgattggagatcatttgagcgctatgacgtcgtcgtctcgacgccagccagctcctctccaaatttggagccagctgtcccagcagatatgttcgacctagtgatcttcgatgaggcgcaccatgcgcctgctgactcatggatcgcatacctccaacatctgacggcagccaagttcgtatttttgaccgcaacgccgtttcggcgggataacgtggttatccctggcaagcttgtctatcgctacccagttatgcgggcaatagaagagggcgccttcgatccggtgaccttccgagcagcccctgtaggggatgagctgaacgatgaagaaatcgatcgcgcaattgcacaagctgctgttggacaattcaatgaggacagagccaacgggttcgaccaccgattgtttgttagggcctccggcatccaagcggctaagaacctagttcctctgtatcaaggcctcggcttggctgtcgaggcgattaacagtcggctaacgaaagggcgacaggaccagatcgaagcgaagcttaggtcgggggaactggatggaatcatttgtgtagacatgttcggcgagggatacgactttccgaagctcaagatcgcggcccttcacgcccctcataagtccctagtacccactatccagttcatcggacgctttgcgcgcatagatgagacgactggacgccccactctcatagcgccgatctctaggattgaagaggccacctcgtctttgctgagggaaggggtgaatcttggccagatgatcgatgatgcggcgcatgcccaaatccaggccaacctcgacgatcaggccttcatggacaggctgcctgttcgccagcagtcagagtctgattacgatgcagtaacgcctttgtcgctccaactttatgcccacgttcgggggtttcattgcgatgagactccagagttctcccgacttgattcaaaagtaggccgtaatctccgaatcgtgaagaagtgggcaacggaagccggcgacatctctctagtgctcaccgcggacgagaatccgccaaagtggatgacctcagacgcactgatggacatacggcacgacgcgtttttgctaatgtatttcccaacctctcgtatgtgtttcatcggctcgacgcgaaggacagagaaactttacctttggatcatggatgagatttgtaccggtaccacccgggcgctaagttaccaggagacaagtcgggcaagggcagggctcgatgatgttcggttctacaacttaggtctaaaaagttacgctctgaactctcgtggtgagacttatcgtacgctgacaggccctcaagctgaaagagtggtagatgttggtgacagcagggcgtattcccaaggtcacttctttggcagcggcatgagcggcaacaccagggaaaccatcggtgccagtagcagttcgcgcatttggagcaaccagacactatccatcccggacttcgtcgagtgggttgaaacgctaaacagccgtatctctggaaatgcggttatcacccagaccaacctagacattgtcagggtggcgactcggcttgaacgcttgcctgaccaagtcatcgcagccaattggccgcaggaaggtttcaaaacaaatcccaggcttcgctaccggaatggtccccaaggtcagcagcttttttcacggctggtagagtgggagctgctggggttccgaactgatcctgacgccgggtgtatgacattttcggtggtgcatctcgatggtgctgtcgatatgtgttatcgccttggagctaggcggatgatcactgccgagagtccccagatcacgctggaggttgagtccactcatgatcagtggatgccactcgctgactggctttcagagcacagtccaacattttatgcagcggacaaatcttctttcgaaagtgtgaacaaaatggcaccaccgttggttcaatcgctatcactggctccgggtgacacgcgctcaatcgattggactgggtgtgagatagggatcgagtttctgcctaatgataacgagcagcgaacccgagagcggcgcgccgcgctcaatggtttagctactgttcaagaacacttagagcagcatctccgggcattacctgatgtccgagcaattttctatgaccacagaactggcgaggcagctgactacatctgcatcacttgtaacgatcgtggtgaagtcagtgtcgatttctatcactgcaaaggtgcgggagggccagcgaatgaggggcgggtcggagatgtatacgaagtagctggccaattaattaagtgcgcctactactgcgacgtccctacattgattaaccacatgagagttcgaatgaatcctgcgaggcacacttcgccctcaacttttgtcaccgggacgctagatgaggttgaggcgctgctcaccactaccttaccgacgaagctgagcttctgcgttattggagttcagcctggtattcgccggactatggtgaatgaacggctgagtgatctcatggcgttttgtatcggttatgtgaggggcggaggtacagctaaggcctactggctcgtcagcgagtag

SEQ ID NO: 330869 - DNA, 972 bp, Pseudomonas aeruginosa
gtgagcgccgacgatcgtcattcgccggtacgcgcgcgggtgctcgacgaagccatcgcctggcaattgctgctcgactccggcgaagcccatcccgacgatcaccgcgccttccaccgctggtacgcggcgcatcccgaacacgaacgcgcctgggaacagctcggcggcctcgaccggcacctggcgagagccgccaacgggccggcacgcaacgccctgctgtccggcaacgcacgcttcaagcgccgcctgcgccggctcggcggcagcgccctggggctagtgctggcgctgggcgtcgggctcggcgtggccaaccgctacgtcccggtccgctacctgctggccgatgcctacagcgccaccggcgagcagcgcgagctgaccctcccggatgccactcatgtgcgcctgaacagccgcagcgccatcgacgtccgcttcgacggcgaacgccgccaggtcgtgctactggccggcgagatcctggtggaaaccgcccatggcgacccgcgccccttcgtggtcagcagcgccgatggcgacatgcgcgccctcggcacgcgcttcctggtgcgccgcgaggaacccggcacgcgcctcaccgtgttgcagtcggcggtggccgcgcgcgcggaaacgctcagcgaagagcgtgtgatcaaggaaggccagcaggtgctgatcctgccgcaaggcctgcaggccagcgaagcggccccggctctggccggcgcctgggcacaaggcatgctggtggtggagaacgcccggctggccgacctggtggcggaactggggcgctattcgccggcgctgctgcgggtcgacccgagcatcgccgacctgcgcgtcaccggcagtttcccgctgaaggacacccgcctcgcccttcaggctttggagccgagcctgccggtgcgcagcgtaaggcacaacgcctggtggttcgaagtggtgccacgctga

SEQ ID NO: 330870 - DNA, 441 bp, Pseudomonas aeruginosa
atgggtacttatctgttccaatatgcacaagataaggattatgtgctgggtgtttccgatgagcagtccggcgccaaagtcgtactgcggaaagcgcaaggcacgccatatcgcttcatcctttgggatgtcgatcaggacacaggggtgatcaccctgaactcaagcggcggccagttggcgattgacccgcagggtgggaaggtttcgccacagaatatcctgacgctggctgtcgtgaattcgagttcgaagagccaacgcttcgatatggtgacgaaaccgctctacatcttgagcgtccccgaaccggggctctgtatcgacaaccagaatcgtgtaactaaagacggcaacccgatctggctctacgagttcaacggttcgcaggctcagcaatggatcccgcagcgactctcgttcgcgaaggctgatttctaa

SEQ ID NO: 330871 - DNA, 450 bp, Pseudomonas aeruginosa
atgaggtgggttccatggttgatcgtcgcgctcgttgcgatggggatgatgtggcggatggaccgcctgagcctgcaagtgaccgcagagcgggaacgtgctgacgtcgcggcgcaggagcgtgaccgcaaccagcaactgattgacctgcaggccggcgtcctcgctgaacagcaacgccaactcggccgcgtcgccgagatcgaacggcaaacccgacagctcggccaagccctggaggtccagggcgcgcgccatgctgcggcgttacgggagttgaaagagaatgaccaggctgttcgcgactggctgcgtgatggcatccctgctggccttggccggatgtacgcccgccccgaaaccactgaccccagcgcctaccgcgcagcaggccaagtgcccgctgacgccgtgtcggctccccggccgtccgccgctagcgaacggtga

SEQ ID NO: 330872 - DNA, 618 bp, Pseudomonas aeruginosa
atgatgatcagcgcagatcaactcgaccgcgctaccggctgcggtgcttctgctgccggcctctgggtcgaccacatcaacggctccatggctcggtttgagatcaacacggctgagcgggtggcgatgttcctggcccaagtcgggcacgaatgccagagcctcaagcgcgtggtcgagaacctgaattactccgccgagggcctgctcgcgacctggccgaagcggttcacgccggcagaggcgaagcagtacgcccgccagcccgagcacatcgcgaaccgcgtctacgcaaaccggatgggcaacgggtcgccggatacgggcgatgggtatcgataccgtggccgcggcctgatcatgatcaccggccgcgacaactacaccgaagctgcacgtgccctggcgctgccactggtagcgcaaccggaactgctggagcaacggacctgggcagcaatcgccgcggggtggtggtggaagtcgcggggtttaaacgacctggctgaccaaggccgattcgagcggatcactctgaagatcaacggcggctacaacggtgctgaggatcgagtggtgcgtctcgaatgggcgcgcgcagcgctggcgggtgtgtga

SEQ ID NO: 330873 - DNA, 696 bp, Pseudomonas aeruginosa
atgtacgactatgcaatccgtttcgaacagaacgatagcgcttctggcgttgccgttttctgcagagacctgcctgagctgaacagcttcggcgacgaccgcgagcacgctatccgcgaagcgctggacgccatcgagacgaccctctcgctctacgttgacgcgcgtaagccgatcccggaagccactccgccagaagaaggcgaacacgtcgtccacctgccatccgtcacggtggcgaagatcgcgctgtggaacgagatgatgaagcgcggtatgcgcaagtcggacctgtgcaagctgctgggcatcgcccagacccagggtgatcgcctggtcgactttcttcacacctccaagatggaggcgctggagtcggcgcttgccgcacttgacacgaagctcaccgtccgcgcctcttacggcaacaacgtggtcaagctccggtacatggccaatacggcgcgaggccgtgtgctggtcatcccgggagacgctgacccgaaggctctcccccgtcagtacgaatggctacaggaagcaccctgcaggatcgaggaaacagtcgacgatttcgaagtcggcgccaggtacgcgatgtggaacgtggaggaagcggtgaacgcgatccagtcacgcggctacttcagcttctggctggaaacaacgtcaggcccccgaagcgccacacgctga

SEQ ID NO: 330874 - DNA, 573 bp, Pseudomonas aeruginosa
atgcgaaccgaatcgcacaccctgatttccacgctgctcggcgtggtgaaccaatggcgccgccgagaggggtggagccgcgagaccgtcgtccagcacatcgtggaggcgcacgagcgcatccagggagcgctggtcactggcatcgtcttcgacccgccaacgcgcgatacaaccgagcggatgaaggtcaacgccgaccgcgtgttccgctggctcgacgacggaaccaaggacaccaacctggtgccggcgaacttcgtacccagcatcctcgccgcgctgccgactgacctgaaggtccaggccctgggcgacatcctgacgccgctgggcgtgtcggtgcgcttgatcggcggcgatgccggccagcggccggaggtgctctgcatgctccggacactcatcaaggagaacggtgaggcgcagcaggccgtggccaacctcgtcgacggcgctgatgaccaggaactgcaggaggcccaccgggagctctccgaatccagggcggcgacagatgaggcgctgcggatgatcgaccagatgcgccggccgcgccttgttcaggggtag

SEQ ID NO: 330875 - DNA, 561 bp, Pseudomonas aeruginosa
atgctggcaagcaaggcggcgcagaagctttcagcggaagcgagggaaagaattcttaacgctgccgagagtgatgcgggcccagccgaaagcaacgtgattcacgccgacttcaaccgcaccactctggtgaaaggaaatacgatttcgatcgcccagtacgacgtgcgcgctgccatgggtggcggccaggtaccggccgagtaccgcgagttcgtcaggaatctggtggtcgacaaggtccaactggatgaccttggtctgaagtacaccgatccggccaacctcaagatcatcaccgggtggggccagagcatgctgggcaccatcgaggacaagtccccgatcctcgtcgacgtgggcatcaccgacttcgtcgaggaaggcgtctacgtcttcacctggctgcagcacctgttcgtgaagcgggtgcagatccacgatgccgagcactacctgctggtgtcggacaacaagtccttcgagccgcagaaggcccgcatggaggacgtccacttccaggccaaggttctgggagcctggaatttcagaaagctttga

SEQ ID NO: 330876 - DNA, 177 bp, Pseudomonas aeruginosa
atgagtttcaagaaaggccagtccgtgatcctgaccaacccgcggggcgaggagaagagcggtaaattcctgcgaatcgagaacctggggcaccgccgcggaggcggtgagtatttggtggtcgagatcgccggtaaggagctgaaagctcgagccagcaaggtcaaggccgcctga

SEQ ID NO: 330877 - DNA, 963 bp, Pseudomonas aeruginosa
gtggcaaaaggagctgcgcgcgagtttcgtgggtctgaaagtctttttgcggaacagatctccagagatgcgattgccccgtttttaagctcgcgtggctttgtcgtgagcgaggaccagcgcatccagaccggcaccgcagttcagcagttggtgtccgctatctctcctgatggtgaacgcctcagaatgagagttcgcttgtgctggcggcgggaggggcgaaatgccaatgagcgcctgttctccgcagcacaactccaggcccgtctgcggccaggtggctgggatgcaaccctggcatacatcgttgaccgagatcggcagcatggaatcacccataacctcatagtccagcgtgatggcagcttcatcgtctatgccgcactggtaccggtcgaagctattactcctatttggaaacgccaaagcgaggtcagcgatgagttgctccgagctggccagttgggtcggttgaaaaagaaccacgcacggaatggctcgagtccgacagtctggttgcaggatgatagacgtcctgctgctcataacgtggcagatgttctatggacgtggcctggagtgcttgacctggtagggttgccggcgctgatcgaaggtgttgatgatacttttgatgattgcccggtctccggcatctggatgtacggacgagatgaagggacacgggtctccattattcgttctgcgatacgacgagatccaaaggtccgtcgagaggtgcacgatcgggcgaatgggtgctgtgagcgacagagctgcagagccaggcgagacttctcaagctttctggatattcaccacattctgggcgtggataacagcgacaggccttggacttgcgtcgccttgtgtcccaactgtcatcgcgaagctcattacgctccaaacgcggacgagttgaaccaggaactgcttgagtacgcatcccagttcaagtga

SEQ ID NO: 330878 - DNA, 978 bp, Pseudomonas aeruginosa
atgcaactcgtattacagccatgctccagcaacgacgcttacgatcattacctcaataccatcgacaggctggtggaaaccagccggatccttccgtatctggatgaggatgaccgggcagacttcaagcgtacctttcccgaagctgtcgccgtctggggcgtcactcagggcaagaaggcggtcaacgagaagaaatggcaccagatggatgtcggcgatgtcgcgctgttctatcggaaaaaagagttcttccgccgagggacgattgcgtacaagaagcgcctgcccgaactggccagacagctttgggaaactcccccaggggagcagccttgggagttcgtctattttctcaccgacctggagcccatccagatcagtatcctcgactacaaccaggtcgcgggctacaacccggccaacatcgtgcagagtttcacggtccactatccagagttgagcgcgaggatcatcgaggagcttggactggagtccagcacgggaagcgtgctcacctcggtccgtgatgtcgaggcagcgaaggaggcgttcaagcatctcggcgatgaactcgatgtgcccgcggcggtcaagcgccggaaagagcaggcgttgttgcgaaccatcctgctcagcaataaggcttcggaatgctgtgcgttgtgtggccgggacctgccggtggatctgctggtaattgggcacattcgcaagcgtcactcgtgcccaccggggatgaagaaagacctcgccaacgtcatgccggtctgcctcctgggttgtgatcgcctattcgaaaacggctacgtattcatagacagtaccggtacgatccagcaggggccggcgctgaaaatcgttccgtcgattcagggtgttgtatccagcctcgttggcaggaagtgcctcgcctggaaagaggatgccgttccttacttcgagtggcaccgaaaccaccaccataactactcgtaa

SEQ ID NO: 330879 - DNA, 345 bp, Pseudomonas aeruginosa
gtggatttgaagctcattcaggagcgcatcaggcagttcagggacgaacgtgactggatgcagttccacaatccgaagaatctggctatatccatcagtctcgaggccagtgaactcctcgagcacttccagtggaagaccatggaagagagtgaagcctatgtcgtgcaggccaaggaagagatcgccgatgaggtcgcggatgtggcggcctacctgatcgagcttgcggacaatctgggtatcgatctccaggaggcgatcctcaacaagctggccaagaatgaggctaagtaccctgcgcacaaggccagggggaatgcgaagaaatacaccgaactgtaa

SEQ ID NO: 330880 - DNA, 1221 bp, Pseudomonas aeruginosa
atgagccgccaaagcgacatcttcgccgccggcgcccagcgcctgcagatgaccgagagcattgaactgacgatccaatccctacaggcctacggcgccgatcatgagcattgggccattgcctggtcgggcggtaaggacagtagcgccactgtcactctggtgctctatctgatcgacgccgggaaagtgaaagcgccgaaaaccatgaccgtgttctatgccgatacccgtctggagctgctgccgctggcgaactctgcgcgtcacctcatggacgagctggaagagcgtggcgtccacgtcgaagtggtcatggccccgctcgacaagcgctttatggtctacatcctcggcaggggcgtgccaccgccgaacaacaacacgcttcgctggtgcacccggcagatcaaggtcgacccgatggtcgccgccctcgagcaacgcctggccgcgctcaacggcaacgtactgatgatcactggcgtgcgccagggcgagagcgccatacgcgacaagcgcatcgagatgtcctgcggtaaggatggagccgagtgcggccagggctggtaccagaaggtgctacccgaggcaaagggaatcaagggacgcatcgccacgctcgcaccgctgctgcactggcgagtctgccatgtctgggaatggctgaagcactgggcgcccctgcccgagttcggcgactggtctaccgccatgatcgccgacgcctacggcggcgacgaggccgaggaaatcaacgcgcgcaccggttgcaccagttgcccgctgactgatgaagacaaggcgctcgacacgatcctgctggttccgtactggcagtacctggctccgctcaagcgcatcaagccgctgtggcgcgagttgcgcgagccccagcatcgcctacgcaaggccggcatcgagcggctgaaggacggcagcatcgccgcgaacccccagcgcatgggtccgatcctgctggagtcccgcttgatgggcctggagcgcgtactggccatccaggccgaatgcaacgccgcagccgaccgcctcggtcgccctcgcatcgacctgatcaacaccgaggaagaggcccgcatccgcgagctgatcgccgccggcacctggccggatggctgggacggcgacgagccaatcgccaccacccctctcgacaaagtcttcgccgacggcgcggtacagccgctgctgttcgtataa

SEQ ID NO: 330881 - DNA, 246 bp, Pseudomonas aeruginosa
atgaacacctaccgtcataccttcgtctccacgtgcccagcggacggtgagcagatcatctacaggctggagatctactcgcccacgatgatccgcgtcgagcacatccgtaccgcaaccgctctgatcaaacgcggcttcaaggaggagatcgcggatcgcctgcaggcccaactcggtggcgagcaccgcatcgtcggcgttcaccagggcgtcgagatcgaaaccgtgaggttgccggcgtga

SEQ ID NO: 330882 - DNA, 726 bp, Pseudomonas aeruginosa
atgatccactaccacggcaccccaatcggtggcactcgccaggacgccgcgcgtttcctcgctgggcggcatgcattggtcccgtttccgcgccaagacgacgtcgccatcgttgccgaggtctgccagagcttctgcttcgacaacggcgcgttctcggcctggaaaaagggcggaacgctcgacgtcgagagctatctccgatgggtcgacgactggcgtcggcacccaggtttcgactgggccctgattcctgacgtgattgacggagacgaagccgacaacgaccggctgctcgagcagtggcctgagcatttgccgggcgtcccggtctggcatctgcatgaatcgatcgagcgcctggtcaggctggccggcaactggaagacagtagccttcggcagttctggcccgtggcgctctcccggaactgccgcatggtggaagcgcatggcggctgccatggatgctatctgcaacgaccaaggacggccgatgtgccgacttcacggcctccggatgctggaccctgcgatctttacccggctgccattcgccagcgccgacagcactaacgccgcggtcaatggcggcagcatcagccggttcggcatgtatgcccctcctactgcaggccagcgggccagcgtgatcgccgaccgtatcgaagcccacaccagcgcgcctatctggcagcgcgagaaccagatcgagatggcgctatag

SEQ ID NO: 330883 - DNA, 177 bp, Pseudomonas aeruginosa
atgagcttcgaagagatcaagatctatctgatttggggcggcgtcttcctagctatggccgttcagatgatcttcgatcacaacaagttcggggctctattcagcatcgcgctggtggtggccactggaatcaagctggcgcgtgattcgtatcggaaggactacccgaagcagtaa

SEQ ID NO: 330884 - DNA, 864 bp, Pseudomonas aeruginosa
atgactaccccgcttcagatcgcgttcgaaatcggccagatctacgatcgccgcgcggacatccacggacctttcggcggtagcaaacaaagcggtatcgctccatcgctccaggcacccgcaatcttcctcttcactggcgacagcggcgagcaatacgggtacagcgatcacttcgatgagtacggcgttttccactactcaggagagggccaggtcggcgacatgcaactgaccgggggaaacaaagcagtgttgcagcacgctcagaccggccgctcacttcaccttttcaaggcgctgggcaagaaggccggcaagagcctcggacagcgctacatgggagaatttgtttgcgctgaccatcactggagcgacggcctagatcgcgaaggcaaaatgcgcaagatcgtgcggttcagtctcgtgccggtaggccgagtaatagagggggtcgtcgaggatgaagtgcgagccgccctcccgaactccatagccgcagctcgtgaactggcgctgaaagcagtggtatccggggaagatgcccgccagggtggcgcaatgcgaaacatctacttgcgcagcgctcatgtgaagaactacgtgctactccgcgcggcagggatctgcgaatcctgtgagaaaccagcccccttcctcagaaaagatgggcgagcctacttagagccgcaccacatcaaccggctgtctgatggtgggctagatcatccgctgtacgtcggggccgtctgcccagcatgccatcgcgagattcactatggcctgggcggcgcggacaaaaacgagttgcttcgccaacgcgtagtgagcatcgagaaagaaatatcgggatcgctcgcctga

SEQ ID NO: 330885 - DNA, 141 bp, Pseudomonas aeruginosa
atgctttaccattatgaattaaagggcggtcaattcgacctgatccatcatccagatcgggagggcggaatgcaaatgctgtggcgcctcgcctcggtgtcactgagaggcatggactgcagctacttgcacttgccataa

SEQ ID NO: 330886 - DNA, 807 bp, Pseudomonas aeruginosa
atgaaaaatggagttgggtctggatggcttattttcgggattattttcctaattgtttgtgtgtatgcgggatattacatctttctttatgtggggtatgaatttgcagcgagtgatggttctcttgctggagttaggtctggaacatttggagatgcatttggggcgctaaatgcattgttctcagggttggctttctcaggtgttttgataacaatcattttgcagcgaaaagatataagggaggggcagcaggagttcgctcggcagaaaactgaagatcagttctatagtcttttaaggtttcagcaggatgtggtttcaaagttcgacttgcagaaaactataacgaacgagagagggggcggtagacagctcgttacggttggaagagattgcttcaaagcttgggttaagatgcttcgagaaatgtacgtagattcagaaggggttgatacatcccaaaggatcaaggcctcctatcgtgatctctggcgtaagcatcaaggagatcttggactttactatcgaagcttatacagtgtttttcgctatgtctctgaaagcgattacgcagaaaagaagaagttggcaaatgtggctagatcgctactttctgattttgagttggtgattcttttttataattgtgttgcttcttcgggtggtgagcgattcaaggcgtatgcttgcgagtttgctctttttgataatttggatgtcgggcttctgctcaatatggacgatgtggttatgcttgacaaagaagcctttggagataaccaggaagcgttgagtgccttctaa

SEQ ID NO: 330887 - DNA, 465 bp, Pseudomonas aeruginosa
atgcaccgtgtttacctcgccggccccatgaccggcattcccgatttcaactaccccgccttccacgctgaagccgcgcgcctgcgccacctcgactaccacgtcgagaacccggctgaaaactcggcgccagcctgcggcacctgggccggctacatgcgcaaggccctggcgcagctggttacttgcgacgccatcgtgctgttgccgggctggccaagttcacgcggcgccaatatcgagcgcagcctggcctttgcgatggggatgaaggtcgtcatggccgcggacatcgccgcacctatagggcgggagtcagccgccaccctcgcctgtgcttccaccgctaactccggacttcaccaagcaaacgagctttcgcattccgacgtgggtgcaaggtcttccgggcgccactccctcgatcattcggttgaggtcggctcgttcgagcccgtcagctag

SEQ ID NO: 330888 - DNA, 219 bp, Pseudomonas aeruginosa
atggcccgcaccgccgcctgctacgccctggccggctccagcgctccgaacgatggaaccgccgccctgctggtgtcgctggcgtggccctgggatgaacagtggtggaagccgagcaccgcgcgacgcgacctgatcaaggccggtgcactgatcctggccgagatcgagcgcatcgaccgggtagcggcgagtcagggaggaccaagcgatgcgtag

SEQ ID NO: 330889 - DNA, 123 bp, Pseudomonas aeruginosa
atgcgtagagcactgactgccctcgccatcatcgccgccctcggcctggccgtggtggggctggtggagatattcccgatcctccgcacgctggcggcctggcagacggggtgcttcggatga

SEQ ID NO: 330890 - DNA, 213 bp, Pseudomonas aeruginosa
atggaaaacatcacattcttgactcacgaggaggtgtgcgaactgactggggcgcgcaccaaggccaagcagatagaggtcctgaaaaagaatggcattcgccacactgtgaaggccaacggctggccgtgtgtcatcaccgccagcctgctggcaccggccacggctgcgaaacccgagaagacgggctggactccaaggaaagcaggataa

SEQ ID NO: 330891 - DNA, 1029 bp, Pseudomonas aeruginosa
atgggaagacggccgaccaaaccggggagcattccccggctccgcgaaagacgccgcggagacaagatctattactactacgacctcggcggcaagccacgcaaagaactgtccctcggaacggactacggcctggcgatcactgaatacgcccgcctggagagggcgcgcacagccgatgcaaagctagcggagacactcacgtttcgctatgtggctcaacgctacttcatcgacgtcgtgccaacgaaaagccctacaacgcagaaggacaacgcccgcgagctcaagcaactgctggcgttcttcgatgatccacctgcagccatcggggatatcgaaccgaagcacatcaagcagtacctgatcttccggcggtcggcgccggttcgcgcaaatcgggaaatctcccttttctcggccatctggaactacgcgcgcgagatgggctacaccaaactggccaacccatgctcaggcgtgaaacggaacagagagcgcgggcgtgatgtgtatgtcgaggatgacctctatgcagtggtctatgaggcggcagatcagggactgaaggatgccatggacctttcttacctgacggcccagcgcgtggccgacaccctgaagatggatgagcgcgatatccgcgacggcactttggcaattcgccaaggcaagacgttggcgaagcgtcgtatcgagttgatcggggaactgaagctgctgatcgacaggattatggccaggaaggctggataccgcgtccgctcgacgcgcctggtcgtcatcgatgacggccagccgatgacctatcacatgctcagaggtcgtttcgacaaggcccgggaggcagcggggatcccaaaatcggctttccagttcagagatctgcgagccaagggagggaccgatactgccgaatcaagtggcgacattctgcaggctcgggaccagttgggtcacacgacggtaacgatgaccgagcactacatccgcgaccggaaaggcaagaaagtgaagccgacgaagtag

SEQ ID NO: 330892 - DNA, 921 bp, Pseudomonas aeruginosa
atgctcaatcccgacgatttccgttttccttccatcgaagcgttgcaggcgttcgaagcggctgcccggctgggtaccttcgagcgcgccgccgaactcctgtcgatcaccggcagcgccgccagcaagcgggtttccggtctcgaggggatgctcggggtgagcctgttgcagcgcgacggccgctcgctggcgctgacctcccacggccgcgagtacctcgaacagatcgcgccgatcctcgcccagctcgcggcggttccgctgcatcgtcgccaggtccagcgccagcagcggctgaccctgcgcacgccgccgaccttcgcccggcagatcctgattccgcgcctggcgtccttcgccgaggcctgtccggaaatcgagctggagattctcctgtcgagtccttcggacggccaggacctgccgctggccgatgtcgaggtgcgcggcgacagccatggcgtggcggccggcgagcggctgctggaggagcgcgtgctaccgatggccgcgccggggctgctgctcggcctgccgcggccctggacgccagccatgctcgccggcctgccgttgctgcgctcgccgctggagccctggcagccgtggttccgcgtggccgggctggactggccggagccctgcgccgggccgcgcctgctcgatttgggcatgaccctggaagccgccgccaacggccagggcgtggccctcgcgcgaccctcgctggcgcgcgcctggcttgccgaggggcggctggtggtgctgttcccgctgcgttcggcgcccacccaccattaccacctgcgcagccaccaggcctcgccggccagccagcgtttcgccgcctggctggcggcgatctgccgcgaggcggtggtccagggcagggaattccttccggcggcggacgactga

SEQ ID NO: 330893 - DNA, 1332 bp, Pseudomonas aeruginosa
atgacccaggctacagcaaccgccgtcgttcacgaccttatcggtatcggcttcggcccctcgaacatcgccctggcgatcgcccttgaggaacgcgcgaggacccagggggaactgcaagtcctgttcctcgacaaacaggccgactatcgctggcacggcaataccctggtcagccagagcgagttgcagatttccttcctcaaggacctggtatccctgcgcaatccaaccagtccctattccttcgtcaactacctgcacaaacatgggcgcctggtggacttcatcaacctgggcaccttctacccctgccgcatggagttcaacgactatctgcgctgggtcgccggccacttcgccgagcagagccgttacggcgaggaagtgctgtcggtcgagccgatgctggtcgagcgcaaggtcgaggcgctgcgggtgacttcgcgcaacgccgaaggcgaggagcttgtgcggaccactcgctcggtggtggtcagcgccggcggtacgccgcgaattcccctggcgttccgccacctgaaggacgatggcagggtcttccaccattcgcagtatctggagcgcatgctcaagcagccctgtgtcaacggccagccgatgaaagtcgcgatcatcggcggcggacagagtgccgccgaagccttcatcgatctcaacgacagctatccatcggtacaggtcgacctgatcctgcgcggttcggcgctgaagccggcggacgacagtccgttcgtcaacgaagtattcgcgcccgagttcaccgacctgatctacaaccaggaaggcgcggagcgtgagcgcctggtgcgcgagtaccacaacaccaactattcagtggtggatatcgacctgatcgagcgtatttacggcatcttctatcgccagaaggtttccggagtcccgcgccacgccttccgtagcctgcgctcggttgagaaggccacggcaggcgccgagggtatcgagctggcgctgcgtaataccgccaatggcgaactgagcgtgcagcgctacgacctggtaatcctcgccaccggttatgagcggcagttgcatcgtcaactgctggagccgatggccgactacctcggggacttcgaggtcgaccgcaactatcgtctgatcaccgaccagcgttgccaggcgtcgatctacatgcagggcttctgccaggccagccacggcctcagcgacaccctgctgtcggtgctgccggtacgtgccgaggaaatctccggctccctgtaccagcacctgaagcccggcactgcggcccgcgccctgcacgagcacgccctggccagctga

SEQ ID NO: 330894 - DNA, 996 bp, Pseudomonas aeruginosa
atgaagacacccctccccgccgacagcgacaccttggtccaggacgccgcacactggtgcatgcgcctgcatgccgaggactgtagcgaggaagagcgtgccgagttccgtcgctggctggcgagcgatccgaggcacgccgacgaatacgcagcaatggaagaaatctggcaactcagcgaattgctgccccgccgctccgacaccccggcggccgccccggcctggccgcgcccgcgtactacccgcaggcgccactggagaaaccaggcgcgagctgccgcgctcgctctgttcctgctccccgcctcggcctacctgggctggttgcagggctggattccctccagctatcaacgctacacggcgcaggacaatatccgccacgtcaccctccccgacggcagcgaggtagaactggatctcaagacccacctcagcttcgccaacttcagggacatccgccgcgtcgtactggacaacggcgcggcctatttccatgtcacccacgatacggcccaccccttcgtggtcagggccggcaagggttcgatcaccgtcaccgggacccgcttcaacgtctggaagtaccaggacaacgtcgtcgtcaccgtgaccgaaggctcggtgaaggtccgcagcgaaggctcgggcaacgacagcagcctgaccccgggcatgcaggccagctactaccccgggctgctgcaaccgctggtcgaggcggtcgatacccgtcaggcactggcctggcgcgaaggccgcctgattctcgacgacctgccgctggctcaggccctaccgctgatcaaccgctacctggagcatccgctggtcctcaccgacaagaccagcgccgaactgcgcatcggcggcatctacagcacccgcgagatacgcaacctggtggaggccctgccgaaggtcctgccggtggatctcgagcaccgcgacgacggcagcatccgcatcagcagccgttacgcccagctctga

SEQ ID NO: 330895 - DNA, 2013 bp, Pseudomonas aeruginosa
atggatacgttccaactcgactcgcgcttcaagcccgccggcgaccagccggaagccatccggcagatggtcgaggggctggaggcggggctttcgcaccagaccctgctgggggtgacgggctctggcaagactttcagcatcgccaacgtgattgcccaggtgcagcgcccgaccctggtcctggcgccgaacaagaccctggcggcccagctctacggggagttcaagacgttcttcccgcacaattccgtggagtacttcgtttcctactacgactactaccagccggaggcctacgtaccgtcttccgatacctatatcgagaaggactcctcgatcaacgaccatatcgagcagatgcgcctgtcggcgaccaaggcgctgctcgagcgtccggatgcgatcatcgtcgccaccgtgtcgtccatctacggcctcggtgatcccgcgtcctacctgaagatggtcctgcacctggaccgcggcgaccgcatcgaccagcgcgaactgctgcggcgactgaccagcctgcagtacacccgcaacgacatggatttcgcccgtgcgactttccgtgtgcgtggcgatgtgatcgacatcttcccggccgaatccgatctcgaggcgattcgtgtcgagttgttcgacgacgaggtggaaagcctctcggccttcgatccgctcaccggcgaggtgatccgcaagctgccgcgcttcaccttctaccccaagagccactacgtgaccccgcgcgagacgctgctggaggcggtcgaccagatcaaggccgaactcaaggaacgcctggactacctgcgcaacaacaacaagctggtggaagcgcagcgcctggagcagcgcacccgtttcgacctggagatgatcctcgagctgggctactgcaacggcatcgagaactactcgcgctatctttccgggcgggcccccggcgagccgccgccgacgctctatgactacctgccggccaactcgctgctggttatcgacgaatcgcacgtcagcgttccgcaggtcggcgcgatgttcaagggcgaccgctcgcgcaaggagaccctggtggaatacggtttccggctgccttcggcgctggacaaccggccgctgcgcttcgaagagtgggaggcggtgagtccgcagaccatcttcgtctccgccaccccgggcccctacgaggcggaacatgccgggcgggtcatcgagcaggtggtgcgtcccaccgggctggtcgatccggagatcgaggtacgcccggcgatgacccaggtggatgacctgctctcgcagatccgccagcgtgtggccaaggacgagcgggtgctggtgactaccctgaccaagcgcatggccgaggacctcaccgattatctcggcgatcacgatgtgcgggtgcgctacctgcactcggacatcgataccgtcgagcgagtggagatcatccgcgacctgcgcgccggtgcgttcgacgtgctggtggggatcaacctgctgcgcgaaggcctggacatgcccgaggtgtcgctggtggcgatcctcgacgcggacaaggaaggcttcctgcgctcggagcgctcgctgatccagaccatcggtcgtgccgcgcgcaacctgcacggcaaggcgatcctctacgccgacaacgtcaccggctcgatgcagcgtgcgatcgacgagaccgagcggcgtcgggccaagcagatcgccttcaacgaagcccatggcatcgtgcccaagggggtgcgcaaggacatcaaggacattctcgaaggcgccgtggtgcccggcgcgcgcggcaatcgcaagggcgtggccaaggtggcggaggagagcgggcgctatgagaacgaactgcgctcgccgagcgagatcagcaagcgcatccgccaactggaggaaaagatgtaccagttggcccgcgacctggagttcgaggcggcggcgcaactgcgcgacgagatccagacgctgcgcgagcgcctggtcaacgtctga

SEQ ID NO: 330896 - DNA, 210 bp, Pseudomonas aeruginosa
atggtaactcgccagactggtaccgttaaatggtttaacgaagtaaaaggttttggcttcatcaccccggaaagcggtgaagacgtctttgtgcacttccgccaaattgaagccagcggatacaagtcccttggtgaagggcaacgtgtaagcttcttcgttaccgcaggtgccaagggcccgcaagccgagcaagtacaagccctgtaa

SEQ ID NO: 330897 - DNA, 237 bp, Pseudomonas aeruginosa
atggcgacggtcaacccctggcgtcggttcatcgggctcttaccgggcggcgcgcgcacggtgggggaggtgatcgatgtcgacgagggcgccggcacctgccgcgtccgcctgcgaaacaacgttgtgatcgcggctcggggcgcggcggtgccggccgggcagatggtgttcatcagcgatggcctggtgaccgggccggcgccgcagctcccccagttcgatatcgaggtttga

SEQ ID NO: 330898 - DNA, 1002 bp, Pseudomonas aeruginosa
atgaccgctcgacagtacagctatcgagacgccggcgcaccgccggcgctgttcccgtcggcggtgacgccgttccagaagttcaagagctacttgcgcgcggcgctggtcgatggctacggcaacaagccaccggcagggtggaccgtggtaagcgagttcgacaccgccatcaccctggccccggcgtccaactgcgcgcaggtgacgttctacaggcacttacccggtagcggcagcgtcaacgactacatcgcagtctatgtgcatgagggcatgctggatatcagcactccgctcccaaagggcgtcaatacgcggtcacgtacctggtcggctgacaccaatcccaccagcaatgacgctcatgtcatctacctggggtacatgtactggaaccatgcgacgtactggcagatctgtgcggacgccgagacgttcatcttctgcgtcctccaatccaccggttacgaaaacacgagcgaggcgtaccagctcggcctctacgtcgggcagtacgagagcttcagcggcgcctccggcgttcaggggtttattgccgtcggcggtgcccagggttaccagaacacaacggggtacagccgaaactggtccttcgggagtggcttcagttcgctgcgtgaccagcgctcgggagagatcatccagggtggcggtcccagcgtaggagcgctgatggaccagatgcagtatcagagcacctactacgaccggacggagggagagaatccaccctattggcggatgcagcagccctatgtgacgaatggcgcgaactacgtcggccgcctgaagggtgtgtgtttcgacccgatcctgggccattaccgccacggacatctgctggagcggctggggttgtccctgggcgcaacggcggtggcggaggcagtccagatggatggcaagacctaccatgtgcatatggaccgctgggggctctggttcctgtctgtggatccggcgtggtggccagcatga

SEQ ID NO: 330899 - DNA, 813 bp, Pseudomonas aeruginosa
atgacgatcaccgtcgatgatgtaaagctgctgaaatcccagcgcctcaccgatgaggacgacggcggcggccgtgccaccgggcaagccgtggtggatcgcgagatcaacaacctgtttcccgatatctcgcgcctggaccggaccatcggccggatcaacctgcgcaaggccttcgccggcatcagctcgaacagcgccgagccgtacctgggcgctcatgccatcgtcacgcgggcgccggccgatccgcgtgtctcagtgctgctgttcaacaccggcagccagaccgatgagcgccgcgacgcgcgcaacgccatcgagtccttcgtggtgccggccgtgtctgcctcgttcgaactgctgggcaaccagttgcagggccagcgcgccatcgcttgtgtgcagcgcgaagaacagcggctgcccgagatcggcgaggtctatcagttggtgttcgagtcgcgctcgcagtatgtccgcatcaccgacgtcgaggcgcggctggaacagttcgcccacgactacggcaacggcaacttcgtgaacttcacccggcgccggctggacctgtcgatcagcgcgccactgggcgcgaccttccccggcggccaggtgacgccaggcggtaccaccagcccgaaaagccaggtgctcagcacccaggtcgccgatgccgcgcggtactacggcatcagccccctggccgaggctgtcagccgcggcgcgctgagcctgcgggtcaagtcggtctattcccagctggtgcccagcaccaccagggagaacgcgctgggcaccagctgggaatag

SEQ ID NO: 330900 - DNA, 621 bp, Pseudomonas aeruginosa
atgccattgacggcctaccagttgcgcttctgcccggcccgctacatccacgagtcgcacctgcccgcggtattgctgcggttgctgccggcgctgccggactggcggcgacagagcgttctcaacgcctggctgctggagcaactggaactggactgcgcgttccgcatgcccgcgcaactgggcgggctggccctttacccgcaggcggcgctggaacggaccctgggctggctcggcgcgctgctgcacggccaggccttgcggcaggtgctggacggtgcgcgggtacggcgcatccgcgcgcagatcggcgaacagggccagcgtttctgcctggagcagctcgacctgctcatcggtcgctggccgcccggctggcagcgggccttgccggaaaacccggaagaaggctatttccggcgctgcggcctggctttctggctggccgcctgtagcgatgccgactgcggtttctcgcggcgcctgcgcctgcgcctggaggccatgccggccccggccgactggaccttcgacgaacaacggcgatccctggcgcggaccctgtgcctgaaggtcgcccgacaagcgagcgatgaatgcttccatttgttgaactag

SEQ ID NO: 330901 - DNA, 525 bp, Pseudomonas aeruginosa
atggcaacgatcaggaaccgcggcgagtatcagtgggaagtgcagatccgccgcaagggctatccagcccagcgcaagaccttcgaaaccaaagccgatgcccaagcctgggcgcgcatgatcgaaagcgaaatggaccgtggcgtcttcgtctcccgagccgaagcggagcgcacgctattcagcgaactcctcgatcgctacatcaccgaagtcgcacccaagcacaagggcgcatactcggaaatcaaacgtctcgaagtcctcaaacggcatccgttggccggccgcattgtcgccaccctcacctcttccgacttcgctcgctaccgcgacgagcgcctgaagacacgcaagggcaacacagtcaaacgcgagctcgcgctgtttcaatgcgtgcttgaggttgctcggcgcgagtggggcatccacctggctgacaaccccgtgcggatagtcagccggcccagctacaacgacgaacgtcccgccgcctggctcccgatgaagaggcctatctgctga

SEQ ID NO: 330902 - DNA, 1320 bp, Pseudomonas aeruginosa
atggcccgccccatcacgcctctgaccgattccaagtgcgatgccgccaaacccaaggaaaagcctttcaagctggctgacggacaaggtctctatctggaagtccgcccctccggcctgaaggtgtggcgtatgaagtacagccgcccaggcggtcaggaaaacacccttacattcggtgagtacggccgtcgtggtgtttctcttgccagggcacgggaggagcgcaggaaggccagagacctcctggccctgggcatagacccagctgagcaagcgaagcttgaggaggccaaggcaaagaacgctaccaccttcgaagctgtcacccgagaatggcacaccgctcaggtgaagcgcgggaaatggtctgccggccatgccgaacgcgtgctgcgcgagatggaggcggatctattccctgccctcggcaaacgccctgtcgatcaactgaaaacccgcgacctgctggcgccgctgctcaaggtcgaagcccgtgacgccctagacatggccgccagactgaagcaacgcatgtgctccgtgatgcgtcacgcgacacaaaccggtctgatcgactacaaccccgcccaggacctcgctggcgcgatttctacccgcaaggcgacccaccgcccggcattgcccttagaacgcattggtgagcttctggagcggatagacggctacagtggtcgccccctcacaagatatgccctgcaactcaccctgcaggtgttcgtgcgatctagcgagctgcgcatggccaggtggagggaaatcgacttcaaccgcgccctatggatcatcccgccggagcgcgaggccctgcctggggtgaagcactccacccggggcagcaagatgcgcgacgagcacctagtgccactgtcgccccagtccctggccatcctgcgccagctccacgacctcaccgggtcgggcgacctggtgtttccccatgacgcctatggcagcaagcccatgagcgagaacaccgtcaacgccgccttacgacgcctcggctacgacaccaagaccgaggtgtgcggccacggcttccgaacgatggcgtgctctgccctagtcgagtccgggttgtggtcgaaggatgctgtggagcgccagatgagccacaaggaacgcaacggcgtacgcgccgcctacatccatcgagccgaacacattgaggagcgccggctaatgctcaactggtggagtaactttctggacgagaatagaaacagaacagttaccccattcgaatatgccagaccaacagggaagaacgtcgtagatattaggagagcagcagagtga

SEQ ID NO: 330903 - DNA, 816 bp, Pseudomonas aeruginosa
gtgagtaaactaagcaaatttaggagccacattagatttgatgaggccgccgcgctcttgtcgaggctgattgacgaaccagtttcaatagatcagttagtttcgctgcatgagcttggttggctgccagtttttcgccctggtctttttgagctagtcaaactaacccctgccattcctgaagatgagtatttggaacatgcaagggatggccgttattttgtgaagcccagcgatgaaggaatacaattgtgctttggattttactacccatacacagaggcatacgcgggacctaagcgactaatcgcccttcacggccaaggcgggcaaatctatgctctacgggaaccaaatacgcaggaatatctactagctacacaaagcaaagaaagcgacccagaaatagaacaactacttatagcgactaaagatatttacgacatagccgaaattgctaacagctcaaacattgaacctccaaggccttgcttatcaagaaaagccgaatgcacctacagcgatatagatatattcaacttcttacctgataccagtgtagaaaagcaagcgcacactcagcaaggcagacatatcgaggacaatcagcctcctgcctttctacttgcaatatcagcattgcttgagctttgccttgatataaactctagacgtagaacacaagagctagttatatccgaaataagggataaatatccagactggaagttaagccaaagcactttacaaaagatatttgccacagctaacagcgccgcccgggcacaaggcattccacccaaaagagccaaatga

SEQ ID NO: 330904 - DNA, 228 bp, Pseudomonas aeruginosa
atgcacccgaacaataccccagccaaggccctgatccgcaagaacgcgctctgcgcctggctcgacatcacccccagcggcctcgacaagctcaaggccaaagaccccgccttccccaagcccatcaaagacagcagcgctcgccaggcagccgcgtattacgtggtcgccgaggtagagacctggcttcaaaccaagatcgcccagcgagacggggaggcagcataa

SEQ ID NO: 330905 - DNA, 300 bp, Pseudomonas aeruginosa
atgacagataagaaaaaggccgaccaacaggccagccccaaaaatatgcgcatccatgataccagcggtgaagcccagcgtgcacgcctcttggcgcgcttgcagttggggccggtggataccctcaccgcccggcgagaactcaacattctgatgccggcggcgcggatcaaggaactaaaagacctgggccacgccatccatgcccaccgcatcaccctgacggatgagcaggggcgtacccactgcgggatcgctctgtactacctccccaccgctggacaggaggtggccgcatga

SEQ ID NO: 330906 - DNA, 351 bp, Pseudomonas aeruginosa
gtgctgctgggtttgctccggcagtaccgcggcgtgaacaacggcgatctcagcgccaccttcgccagtgcgagcgaatggggcatcggaagcaaggccaccctcgccaaggccctggaagagcttcaggagcgcaacctaatcattcgcacccgagagggcaggtttatcaagccaggtggctgctgcgcgctgtatgcgctcacctggcgccctatcgatccgtgtgacggaaagattgaggtatcgcctaccactgccccaccacgcaaattcagcctcgaaagagcaaaacacccggtacagaaactgtaccgacagggtacagaaactgtacccatggagggctga

SEQ ID NO: 330907 - DNA, 897 bp, Pseudomonas aeruginosa
atgaaagctgcaacccagaaacacccgcggtccaaccgcactgaacaactgctccaacagcgaggtgaatacctggaagagatcgagcaactggaggcacgagtcccaggcttggaaaccaaactcgctgaactgagaaagaaggtcgtgcataccacctcgcatcacatcggcaacggcagccatgaggtgatggatgatctgtccagcaccagagcgcgcatcaatgccctacgcggccacgtgcaggagatcgagcgcagcttggagcttgtcgagaaagccgagtcggcggctgccgctattgcccaggccatggagctgatcaataccgaacagcgcctgcaggcgtcgctgcaagcacgaatcgaacaggcagcaacgcgaagccagggcatcgaagaggaaattgtcacagcgcagtccgcggcagaatcggctgagcaagctgccggccatgcgctcgcgcaggcagaggacgccaaggccgagaaggctgcacgtacgcaactggagaaagctgtggagctggcgctggcgaccgaggccatcatccgcgtaaagcgccgcaccattgagaccatggacggcgaggtggccaacatgaagcagcaggccgccgactctaggcagcgcgaacaggtggccaaggctgcgctgtcggaggcgctgtggagcaagtacgccgaggagtggaacgctgcagccaagaccttggccaacatcggcgctcacctggtcgcggcggatcggatcaatggaggctgggggacgcacctgacgaagctgcacatcccgctgttcggcacgctggaccgggaaaccctcacccgcactgaagtggtggacgcctccgatgaagtttcactggatgatctggtgaagggcacggcataa

SEQ ID NO: 330908 - DNA, 1176 bp, Pseudomonas aeruginosa
gtgcagaacgacgaagcaatgaatggtgacgagccggtggttgaaagcgatgcgctcctttccggcgtcgaagacatcgaagacgatcagccctacgaagcagttggggagcgaaaagtactcatccaacagtatgattatgctgttagaactttgatggatatgattattgaaggtgatctacagcttgaccctgactaccagagaaattatcgctgggaggacaaaaaggcatcgcgcttcattgagtcaatcgcactaaatattcctgttccagttttctattttgcagaagagccagatggaagattcagcgttatcgatgggcagcagcgcctaacttctctttttcgatacattcgccctaatgatcttgatgtcttgttcgagggtaaggctgtggagccgcttgttttagaagggcttcaaattcgcagcgatctcaatggcaagtcctacaactccctatctcgcgaggaccgctcaacgatcaccaaaaggcctgttcgctgcatcgtggtactaaacgagtcagactctactttgaagtttgaagtattcgagaggttaaacacgggcagcgcaaagctaacagaccaagaggttaggaattgtatctatcgcggaggtctgaacacccttataaaagaactatccagcaatattaagttcaatgaaatgctgaacctcccaattgcatcgcaaaagaatatgaagtctgcggaattggtgcttcgctttattgcctacaaagatctcaatgatgaaaccaggtataacgacaactacaatgagtacctaaaccagttcatggaggagaatcgagagattggaccccagcgtctgggtcaaatcaaaaattgcttcgagtcaactgtagatatcctccacagtgcattggggccaggcgtggcatttagaaagccatccaacctacagaacccaaacaatggggggtttgcacagaacctcatcaatggctctatttttgagtctcaaatggtatcggtgggccggctagtcgacagtggagtttcagtgcctgacgatatccgagaccgcatactcgcggcgttcgccatcagggactatagcgactccatttaccaaggcaccgcgcaaaagcgaaaggctatcaagagaagccgcgtattgactgaacttctgactaactaa

SEQ ID NO: 330909 - DNA, 828 bp, Pseudomonas aeruginosa
atggactgctataccaatttcagagagtcgataacggaagttctgctaatcgccgcatccgctgaagactccttggcagaccggagtcctcaaggccgtctccaggggaatgcaatggcgcgcgcaggattagtgcttttatgcggctatcttgaggggtatatcaaggacatcgtagaggagttcattgaaagtttgaatgacgagaaagtaggagttaatgagcttcctccatatttgttttgcagcataattgagcctcttgctgcctctcataaaaaaagcccgggaagcacaatactagaggactttaggagcagcgtaataaacaaccaagcacaaaagcttgactccaagagactctcaaagaccggtggaaacccaacggtagacacaattgaatcaatattcttgaatattggaattccgcaaatcattgataaactttcaattagtgattacggtgtgacgtcaacctatacgcaagagaatcaagccgatcatcttcgatcggaaatagaggaagctcttaaagaaagcacgggcaccgaaagtgcggttgtgctagaaagcatattgtcggttatcaataagaaatggacgcccactaccaagcgtagaaaagttgggtacgttagcgggatagaagagttattgaagcgcagaaatcgtatcgcgcacggcgaaaacaaggaccaaatcacgcctgcagaactctttgatgcaatagcgatggtagacagcctgactaatagtataaatgtcttagttgactctctactagacggactgactaacgttaagccagcgactgtgctgactgtttga

SEQ ID NO: 330910 - DNA, 333 bp, Pseudomonas aeruginosa
atgagtagcctctacaacataatagcagttctgtgtgccatcacactggtagtcttagagctaaaaagaacaatattcataaggattttaaagaaagaagagccaagcacctgggagaatcttggcaggccatcagggtatttcttatcctatctagtaaaaatagacggattcaagcttgagaaatttatattccgaaagcaatacaataccttgaaaaataacgaaatcagaaaaatagggagacaactcctctacttgcaatcaacttgctccaccttaattattgcattcatcgtcttgatggtcttacagctcacaataaaaaactga

SEQ ID NO: 330911 - DNA, 471 bp, Pseudomonas aeruginosa
gtgcaccagtcgctccaggtcatcgagcagcaggctttgcagcccatccgactgcggcaggcgcgccagcacgctttgctggctgagcaacaggcgcagtccgctgtcgtcgatcatgtactgcaagcggtccgcgggatactgcggatccagcggcacataggcgccaccggccttgagcaccgccagcagggccaccaccatgggtacgccgcgctccagcgcgataccgaccagtacatcgctgccgacaccctcctcgcgcagacgccaggcgaggcggttggccaacgcattaagttcggcgtagctcaggcgttcctcgccgaacagcaaggccggcgcgtccggggtcagcccggcctgggcctcgaacaggcgatgcacaccctgcccggcgggatattcgctcgccggcagacggctgcgttgcagcagcgtggcgcgctcctcggcgtcgagcagcggtag

SEQ ID NO: 330912 - DNA, 876 bp, Pseudomonas aeruginosa
atggcgctgcaccagcaggtccagggcaccctgcagggcatcgcgccgcagcggtcccttcagacgcaacgccaccgggatgttgtaggccgcgctgtgcggatccaggcgccagatgaaccactggcgttcctgggcgaacgacagctgcggcgatgcgcccctggcgcatcggacgatcccgccctgggcggccggcgccaactgcgccacggcctgcgcataggcgcgcagggtgctgtgctcgaacagggtacgcagcggcacctgcaggtcgaggcggcggcgtaccctggaaaccacttgggtcaccagcagcgagtggccgcccagctcgaagaagttgtcgtcccgaccaatgtggccgagcttcaggacctcgctccagatcgccgccatggcccgttccagctcgccctcaggcgcgacatcggcgtcccggaccgcgctcgcgtccggcagcggcagcgccttgcggttgatcttgccgttcggcgtcagcggcaggttctccagcaacagcatgtgcgccggcaccatgtagtccgggagaaccgccagcaggctgttcttcaatgcgctgcgcagttcctgctggcgcgccgactcggcgccgaccagcgcggcctcggtgggcaccaggtaggccaccagggtcggcccggccacccccggctgggcgacgaccaccgcctcgcgcacgctgtcctgctccagcagacgcgtctcgatttcgccgagttcgatgcggaatccccggatcttcacctgatggtcgatccgtccaaggtattcgatgaccccatcggcgcggtagcgagccaggtcgccggtgcggtacaggcgcgaaccgtcggcggcgaacgggtcgggtag

SEQ ID NO: 330913 - DNA, 2709 bp, Pseudomonas aeruginosa
atgagtgagatcagtcgcgttgcgctgttcggcaagctgaacagcctggcctacaaggccatcgaggccgccacggtattctgcaagctgcgcggcaatccctatgtcgagctggtgcactggttccaccagatcctccagttgccggactcggacctgcaccagatcgtccgccagtccgggatcgacccggcgcgcctggccaaggacctgaccgaggccctcgaccgcctgccgcgcggctcgacctcgatcaccgacctgtcctcccatgtcgaggaagcggtggagcgcggctgggtctacggcagcctgatgttcggcgagagccaggtgcgcaccggctacctggtgatcggcatcctcaagacgccgagcctgcgccatgccctcaccgggctgtcggcggaattcgccaagctcaaggtcgaggcgctcaccgagcgcttcgacgagtacgtcggcgcctcgccggagaacggcctgtcggccagcgacggcttcaacgccggtgccgccccgggcgaggccagcggcgccctggcgccgagcgcgatgggcaagcaggaggcgctcaagcgctttaccgtggacctcaccgagcaggcccgtagcggcaagctcgaccccatcgtcgggcgtgacgaggagatccgccagttggtggacatcctcatgcgccgccggcagaacaacccgatcctcaccggcgaggccggcgtcggcaagaccgcggtggtggaaggcttcgccctgcgcatcgtcgccggcgacgtcccgccggcgctgaaggacgtcgaactgcgcgccctcgacgtcggcctgctgcaggccggggcgagcatgaagggcgagttcgagcagcgcctgcgccaggtgatcgaagacgtgcagagttccgagaagccgatcatcctgttcatcgacgaagcccacaccctggtcggcgccggtggcgcggccggcaccggcgacgccgccaacctgctcaagccggccctggcgcgcggcaccctgcgcaccgtggcagcgaccacctgggccgagtacaagaagcacatcgagaaggacccggcgctgacccggcgtttccaggtggtgcaggtggacgagccgtccgagcacaaggccatcctgatgatgcgcggcgtcgcgtcgaccatggagaagcaccaccaggtgcagatcctcgacgaggcgctggaggcggcggtccggctgtcgcaccgctacatcccggcgcgccagctgccggacaagtcggtgagcctgctggataccgcctgcgcgcgcaccgccatcagcctgcacgcggtgccggccgaggtcgacgatagccgccggcgcatcgaggcgctggaaaccgagctggcgatcatccgccgcgagagcgccatcggcgtcgccaccgccgaacgccagcgcaacgccgagaccctgctggccgaggagcgcgagcgcctggccgccctggagcagcgctgggccgaggaaaaacgcctggtcgacgaactgctggagacccgcgcccgtctgcgtgccgccgccgaagcggtggacgccggcggcgtgccgctgggcgaaggcgaggcgcgtctcgacgaggaacagcgccaggcgctgcatgcgcggctggcggagctgcaggcgcaactgagcgcgttgcagggcgaagagccgctgatcctgccgaccgtggactaccaggcggtggcctcggtggtcgccgactggaccggcatcccggtcggccgcatggcgcgcaacgagatcgagaccgtgctcaacctcgaccggcacctgaagaagcgcatcatcggccaggaccacgcgctggagatgatcgccaagcgcatccagacttcccgcgccggcctcgacaacccgagcaagccgatcggcgtgttcatgctcgccggcacctccggggtgggcaagaccgagaccgcgctggccttggccgaggccatgtacggcggcgagcagaatgtcatcaccatcaacatgagcgagttccaggaagcccacaccgtctccaccctcaagggcgccccgcccggctacatcggctacggcgagggtggcgtgctgaccgaggcggtgcgtcgcaagccctacagcgtggtgctgctggatgaagtggagaaggcccacccggatgtccacgagatcttcttccaggtcttcgacaagggcgtgatggaggacggcgaaggccgggtgatcgacttcaagaacaccctgatcctgctcaccaccaacgccggcaccgagatgatcgccagcctctgcgccgatccggaactgatgcccgagccggaagccatcgccaagtcgctgcgcgaaccgctgctgaagatcttcccgccggcgctgctcggccgcctggtgaccatcccctactacccgctcagcgacgacatgctcaaggccatttcgcgcctgcaactggggcggatcaagaagcgcgtggaggcgacccacaaggtgccgttcgagttcgacgagggcgtcgtcgacctgatcgtctcgcgctgcaccgagaccgagagcggcggccggatgatcgacgcgatcctcaccaacacgctgttgccggacatgagccgcgagttcctcacccgcatgctcgaaggcaagccgttggccggggtacgtatcagtagccgcgacaaccagttccactacgacttcgccgaggccgagtga

SEQ ID NO: 330914 - DNA, 834 bp, Pseudomonas aeruginosa
atggatgacagctacgagattggccatagactgattgtcgtggtcccggataaaacagctgaagcaatgcgcgaagtccagatggcacaagtagcgcctgaagaaaccttcgtacagaagatcgctaattcagtgttctcattttatggagagccatttgccatcactctcggcaagcaagccgtagatctcattaaaacaattatggaggctttggataaaggggctgatctcaccactctcagctattcagaatctaaaaaaatgaatcttatttttccgccaggtcatccgcgagaaaatgttgtttacgctcagcatccagcaaatcctctgatgtactacactgctagctcgtttcaccgtcaggcgttcgaacataagtttgcagaggtgataacgcttctatcgagccttggcgctaatgaaatcaaggttgagcatgtcagcggctgggatcaagaattttcagcaggcctcggcgttccaaccccaactggagattctgcatcggtcggcgtcggcaaaaagggagcagagaactccgcaattatttttgatgcaaaactgacagggcatgacgcaccgtcaattcctgagaatctgacttggtaccctcatgaagccctttggcaagctgttgccaccgctcgcgtaaacaacggattaaagaatttcaatttgtcactaacgtactcggatgattacgggttgaatgctggtttcaaagccaccataaagggcaccggattagatttgggcggacaatttgaagagcatcaatctacggtttggaaaataaccggtacttttggcccagcaaacttacaatga

SEQ ID NO: 330915 - DNA, 180 bp, Pseudomonas aeruginosa
atggttggctccctccgagagaacgagcttgttgccatgctcgtcgccaatcgtaagattagcgcctcgctctacacgatatttgcgaccttccttggtggtgagtttagtgagtattccattctggtcgaactccatcacttcgttgagttcggaggtgtagctaaactttcctggtaa

SEQ ID NO: 330916 - DNA, 1719 bp, Pseudomonas aeruginosa
atgactacgcaagaaattgcttgcgcgggtgcgccctcacacgaatcggtcaactggcacagcatcgactgggccaggtgtcaccgtgaagtgcgaaggctccaagcgcgtatcgtaaaggcgactcgggaagggaaacacggcaaggtgaaagccttgcaatggattctgacccactcgttcagcggcaaagcattggccgtcagacgagtcaccgagaaccaaggcaagaagacgccgggcgtggatggcatcacgtggtccaccccggaagccaagtctcaagccatgttgtcaatcaagcggcgcgggtatcgtccccaaccgctgaagcgtgtctatattcccaaaaccaatgggaagatgcggccgctgggtatcccgaccatgaaagacagggcgatgcaggcgctatacctgctggctctcgaacccgtggccgagaccacagcggacggacgctcgtttgggttccgacccgaaaggtctacggcggacgccatcgaacagtgcttcacgacgctgtccaagaaggtggctccgcaatggattctcgaaggcgacatcaaaggctgcttcgacaacatcagccatgactggcttatgggtcatgtaccgacggatcgcgagattctgaggaagtggctcaaggctggatacatggaagatcggcaactttttccaaccgaagccggtaccccgcaagggggcatcatctcgccaaccctggcgaatctcgtcctcgacggactggaagccaaactggatgccgcgttcggaagaaagcggtacgccaacggtgtacagacccgtttgatggtcaactatgtgcggtatgcggacgacttcattgtgacgggacgctcgaaagagctactggagcaggaggtcatgccgatcatcaaggacttcatgcaggaacgggggctcacgctctcacccgagaagaccaagatcacgcacatcgacgacggcttcgacttcctcggacaaaacgtgcgcaagtacaacggcaagctgttgatcaagccgtcgaaagcgaacgtggcgaccttcttggagaaagtgcgctcggcggtcaaaggcaacaaggcgctggatcagcctcggctgattcggatgctcaacccaatgatccgcggctgggcgaattatcaccagcacgtcgtatccaaagcgacgttcgcgcgtgtcgatcacgagatttggcgtgtgttgtggcagtgggccgttcgtcggcatccgcagaagagcagcgtctggatcaaacagcgctacttccattccgtcggcacccgtaactgggtgtttgcggcggcgacaggcgaaaggttccctgacgggaatccgatcctgacgtcactgcggaaagcaacggatacgcccattcggcgacaccggccaatcaagttggaggccaaccccttcgacccgatgtgggaaacgtactttgaggagcgtatgagcctcaagatgcagaactcgctgaggggcaggaagaagctcatcaacctctggttggatcaggatcgtcgttgtccaatctgcggcgaattgatcacgcaggagtcggggtggcatgtccatcacatcatccggcgggtcgatggcggaaaggacgggagtaccaacctcgtgatggtgcatccgaactgtcataaccagatccacgtcaatggtctcaaggtggtgaagccggctcgcgaaagcgggctttga

SEQ ID NO: 330917 - DNA, 621 bp, Pseudomonas aeruginosa
gtggtctgttcagctttcgatgtggcgcggtcttgctactacgtccaccgtcttcgacggcggcgtgtcgatgctcgccgcgtggcgctacgcagccaagtcaaccagttgttcagccagagtcggggctcggccggcagccgcagcattctgggcatgctgcgcgaagagggcgtgaccatcggccgcttccgagtgcgtcggttgatgcgtgagctaggcctggttagcaagcaaccgggctcgcacgcctacaaacaggccacggttgagcggccggatatcccgaatcggctgaaccgcgaattcgcgaccgagcatcccaatcaggtgtggtgtggcgacatcacctacgtctgggcgcaaggccgttggcactacctggccgcagtgctggatctgcatacccggcgggtgatcggttgggcgttctcggccaagccggatgccgagctggtgatcaaggccctggacatggcctacgaacagcgcggcaggccacagcaggtgctgttccattcagaccaggggcagccagtacgccagccgcctgtttcggcaacggctctggcgctatcggatgcagcagagcatgagtcgccgagggaattgctgggataa

SEQ ID NO: 330918 - DNA, 315 bp, Pseudomonas aeruginosa
atggctaagccgaatgatacgtccaaccccgagctaacagaatcgtccccccgcttcgtcccgctgctccccacttcccaggccgacatgtgtccgcgtagcgccaccctgtacgtggacacccatgcactccccacacacttgttcgacaacgcgaaagtgcgcttgagatcggcaatcaacatcctggccatgacccgtttgctcgatgagaaagaagagcccggcggcaccctggcctacatcaacggtgcgttgctgtcactgctcagcgatgccttgtccgaaatcgaggcgggccacccgagcctgtag

SEQ ID NO: 330919 - DNA, 1263 bp, Pseudomonas aeruginosa; identical to SEQ ID NO: 326666

SEQ ID NO: 330920 - DNA, 432 bp, Pseudomonas aeruginosa
atgcccgttactatcctcggcccagtcgctgggtctggggcttccttgcgcctgtattccagcaaggtgtcggccggcttcccaagtccggcgcaggatcacctggagcgggagatctcgcttgatgagattctgcagattcgagcgcctcacacgtacctggtacgcgccggcggcgacagcatgattcgcgctggcattcatgacggcgacctcatggtggtggatcgatcccgagaagctgagccaggagacatcgtgattgcagcggtgaacggcgagcctaccgtgaaacgcttggcgaaggatgggagccaggtggtgctgcgcgccgagaatcctcggtacgcgcccaggtacatcctggaaggggatgagttgctggtttggggcgtggtgcgctacagcgtgaggtgtcatgagcatggctga

SEQ ID NO: 330921 - DNA, 135 bp, Pseudomonas aeruginosa
atggctgaccgcgccatcgccctgattgactgcaacagcttctacgcgagctgcgagcgggtgtttcgaccggacctggcacggaccccaatcgttgtgctgtcgaacaacgatctgagggattgcttccgttag

SEQ ID NO: 330922 - DNA, 1158 bp, Pseudomonas aeruginosa
atgaggctggtgttcgcaacaaaagaccttgctgtagcgggtcgatcattcgaaggtttccctctgttggttggcgccgacggttggccagtggagccggcgcaatctttcctttggcacacgctagtcgagtcaggtgaggcactcagtgctctgacgtgggaggcctatggacgccgtctgttcgactacttcgccttcctcgaggccaatggtctggcctggaatgaggagagtcaggcagatggcctgagcgtcctgtcgcggtatagagactggtcgagcggtgagttggaactagatcccagcactctgaacaagcgactgaacctaattgtgaggttctaccaatgggccaagcagcgtgatctgatcgcagcgctgccctttggcgagcgaagggtcagagcgactccgcattccggcttcctcagtcacgtagctcgtcctaacgccgagagtacgaagccctcagtgatggtgcgagagcgtaagcgattgaccaaattcctgaccaaagatcaggctaaggtttgcctcgccctcgatgccgatccaagtcaccggatcttgttccatctgatggttcgcactggtcttcgctcctgcgaggcgcgcactttccctttcaagtacgtctttaatcctcggctgaagaagggcctccgccctgggcaaatgatcagcgtggctctcgagccatcggacatgcatctcaagtacggccgccctcgaacaattgacgtgccttggtcgctgatggaggaaatgtggtcgtacacgcttcatgagcgcgaagtacggaaagcggccggcaacgggcgcgccacggccttggtgctgacaagggaggggcggcagtacacgaaagactccatcgtcgacgtgatgaaggcgtatgagcgcaagtgcggattttatgttagggcccacatgcttcgtcatacctatgggacttatacccttcttgccctgaggaaaagccgagactttaaaggagagccattgctctatgtccgagacaggatgggacactccgacgttcaaacaacgatggtgtacctgcatctcattaatcagctagaggctcagtctgtccttgctcatgaagacgagatagacatgatgtttatggccgtctctactccaagcatctga

SEQ ID NO: 330923 - DNA, 1617 bp, Pseudomonas aeruginosa
ttggcccgaaagaaaaactataaagctgaaatgcaatcggtcactaaaggattcgagaccgtagagaatgagcttagaatcgatcttccgaaaaatccccggaatgtaactaagattgatcactctcagtacattgggtttggctttgacgcatgggctattcagagtattcatgtaatcagagcactggtcaatggagggaatttctccctggccactcttgtagggtactccagcaatggccttcgatatttcatggccttcctgaaaagcggaacgattgattctccgccgtcaaccccgaacagcctgaccaagcggcatcttgagcgatatgtttcgtggcttaagctcaagtatccaaacgggtcaactgcgaagaactattacacgtcgctgaagtcattgatcatcagcctaattgaatacggattcgttgaggcggataaagatgatctacttccagccgttcctttcccccataccgcgaaatcgaccaatgacgcgaagccgctcagtctctcggaaatgcaggggctcatcactgcgctaaagtcagatttagtagccattcataagggcttattctctggaaatgacgccgaagcaatgacggtcttattgctgattactgcggccagatctggaattaacactacgccgcttctggaaatgtctagagatgcactccagccgcatccattcatccccaatcttcggctcttgaacaccgtaaaaagacgcggcaagggtgctcagagcaaaaccattcgacaaactgaactgcatgacggatataacccaattcctttagatggggtggctgttgtaaataaggctttggcaatttctgagccactggttgggtttgcgcctgaaaagcttaagtcgcatgtttggctttaccgcgccggacagaatgggcatggtcatagggtagtcgcgctggcttccagtacgctatttcaatcaacaaagagtatctgtgcgcggcatgctttgaaggacgatcagggccaaccgctgatcgttaatctcagtcgtcttcgaaagactatggaaagtaggctttggaagctcagcggcggcgacctactggaggtgtccgctgtgatgggccattcccctagcgttgctgataaccactatttgaagataaatgacgagatcaaggttgagggtgccaccttcgtaggggaagcattcaccgatcagctgcgtggcatcaacgtcacaccgacacccccaggaggttgcaaagatagcctctatggaagcctggcacccaaagatggcgttacccattgttccgagttcattcattgcttgacatgtcctagttacgcaattgtagggactctcggagacttgtatcgactgttcagctatcagcagtttttgcacgctgagatggagtattttttaacagatgagtgggcggcatggcggaaacgccagggcgatttcatcaggcttattgacgagtttacgtctcgaaaattcaagattgaactgatcgaagcggctaaagccaaagcgaaagcgtcccctcatccgttctggggatgcaagattgagtttatgaggaaagttcgaggtgacgctcttgtcggctaa

SEQ ID NO: 330924 - DNA, 1854 bp, Pseudomonas aeruginosa
gtgacgctcttgtcggctaatcggaactctagggccgcccttaaggcctatgatgtgctattcgcgcaacctgtaactgcctcgggcctcagcaaggctgagcgtgatgcgatagttattagtgccattgttaatgatcgtggcgaaactcttgtattaagccgctttggcgatgctcgctgggatcttcgacctttctttgatcaatctaacgtaaacgaggggcacaagtacgtcagttgggattttaatctcccacctgagatgattgatgactgcaaagcagttgcgtatgcatggttcaagagagggcttccagggtcaaagccacctgtcgcacggggtattacaactctcgtcagtgccagtgtcattccatttattcgttggcttagcgatttagagcttgaacgattttccgatgttcggcccatacacattagtaattatattcaccattgcaagtcagagtcgttaagaccaatgcctctttattccaggctgcggataattgactttttatggatattctctgccgaaaccctttcccctcttcagtgttttccgtggggggactcgtccctgtggcgagtcagcggaattggagaagcaaggggtacttcggctgccaataagaatacgggtagaacggatataattccgccagatgatcaggcgaagatcttcaactattgcgagcagatcgttcataagacgaaagaagatctgaaagccaccggaattgacactttcactcgccgcagccccaaaatgattcgttgccgcgatgctgttttgtacattgcatccattaccagtggcatgcgtaacgaagaggtcatcgggattgaagtcggtgcgtggcgaaaagaggtagtggatggcgttacttactgctgggtaaccacgaccgagcataaaacgggaaagggacgagtcgactatcttgtccctgagcttacgctggatgcgttgaatctcttcgccatgtgctcaacccccatgagaagggagctcgaggcggagttgagtgaccttgaactgtcatgcaattcagttgactccgctgatcttttgcttcgattggagaaagccagaaaggactcgaagagactgttcctctgcttgaatgggtacggcaacaaagccgaacgtgttggacacatcgaagtgctcagcgccgcaggttccaatgaagccttcaagcgcgtcgcaaaagcggctggaagtgattggccattgcggactcaccagtgccgtcgcacctatgcccggtgcttcgttgagtctcgcatggggcgtacctcgctcgtcttcctcaagtggcagttcaaacacagcagtatgagcatgactcagctctatgcctccaaccccctacaggatctcaccctgttcgatgaaatcctccaacagatgacggaattcaagatcgatctcatcgagtcgtggttggatgatcagccacttgctggaggggcgggtgagaggatcatggagctacgtgccattccgatcaaagatcggagtgccttgctggcccagacagccccccatgcaaacattcgagcgactggtcatggctggtgcatcgcgacagaacggggctgtggtggggctggtttgtatgaggcaacccgttgtcctggctgcaaacactctgtgattgacgagacctttgccaccacgtggcaggggatctactcgcatcagctggagctgatggaaatcgacgatgccgggccggctgtaaggcaacgggcaaaacgtgatatgcaggtcgcattcgacgtaatcagcagccttggcctgtctcctttggacgctcgcgacagtgacccaacgcgaacttga

SEQ ID NO: 330925 - DNA, 147 bp, Pseudomonas aeruginosa
atgaccttatcgagcatctccgaggtcttctgtctggagcgtccggaggatcgttgcgcagttggcttattggtcaaagtcggcaccttcaagttcgcgttgggtcactgtcgcgagcgtccaaaggagacaggccaaggctgctga

SEQ ID NO: 330926 - DNA, 183 bp, Pseudomonas aeruginosa
atgcgcgacaaggctgacgcaatcctagtggcggaaaccgtcaagaagattgaacaactgggcgccacggcggcaggccgtggcgaagcgaagcgcagcccggctgtccgcctgcaaggtagatatgtgctactcgaccagatgcaacgtgggcccgccccactgatgcacaagggcaaatag

SEQ ID NO: 330927 - DNA, 411 bp, Pseudomonas aeruginosa
atgcacaacgcggtggaaagcctgaccatcggcgcctttgccaaggcagccggggttaacgtggaaaccattcggttctatcaacgcaaggggctgttacccgaaccggacaagccctacggcagcattcgccgctatggcgaggcggatgtcgcacgggtgagattcgtgaagtccgcgcaacggctgggctttagccttgatgaagtggccggactgttgcgactggacgacggcgcgcactgcgacgaagcgcgtgtgctcgccgagcagaagcttgaggatgtgcgtgagaaactcgcggatcttcagcggatcgagtcggtcttggcgcagctggttgatgactgttgcgcgagccaagggacagtgagctgtccgctgatcgtttcgctgcaagcgagcaagtga

SEQ ID NO: 330928 - DNA, 351 bp, Pseudomonas aeruginosa
atgtctgaatcgcgaaatgggcgcggtgcactcctcactggaggtctggcggcaatcctcgcgtccacgtgctgcctggggccgctggtgctgatcgccttgggcttcagcggtgcctggatcggcagcctcaccgttctggaaccttaccgcccgttcttcattggcgcggcactggttgcgctgttcttcgcttaccggcgcattttccgcccggctcaagtctgcatacccggtgaggtctgcgctgatccccaggtaagcaccatctacaagctcgttttttgggtcgtgacggccttggtgctggtcgcgctcgctttcccctacatcctccccttgttctactaa

SEQ ID NO: 330929 - DNA, 276 bp, Pseudomonas aeruginosa
atgaaaaagctgcttgccgctctcgccctcattgccgtggtttccccagtgtgggccgcctcccaaatcatcaccctgtcggtgccgggcatgacctgcgccgcttgcccaatcacggtgaagaaagcgctgaccaaggtcgagggcgtgaccaaggccgaggtgagttatgagaagcgcgaagccatcgtcaccttcgacgatgccaagaccagtgcgcaggcgctgaccaaggcgacagaggacgccggctacccgtccagcgtcaagcaatag

SEQ ID NO: 330930 - DNA, 435 bp, Pseudomonas aeruginosa
atggcaaattctttcaatctgttcacacggatcggtgacaaagccggttccgtcggcgtgctggtttccgccataggttgcgcctcgtgctttcccgcccttgccagcctgggcgccacgatcggactgggctttttgagccaatgggaaggcctgttcatcaccacgctgttgccgttgtttgccggcgtggctctgctcgtcaatgccctcggctggttcagtcaccggcagtggcgacgcgctgcgcctggcctgatcggcccggccctggtgctggtagcggtgtttttgatgctggctcacggctggcggagcggctggctgctctatatcggcctggccgtcatgtttggggtgtccatctgggacttcgtgtcgcccgcgcaccgccgttgctccccggcgtcctgtccgacgccgccaaaccagtga

SEQ ID NO: 330931 - DNA, 1695 bp, Pseudomonas aeruginosa
atgagtaacgttatgaccgaactgaaaatcattggcatgacctgcgcatcctgtgtcgtgcatgtgaaagaggccttggagaagattccgggcgtgcatcgggcggatgtttcctacgccagtgggagggccgaattgaaggtcgacgaggccgtaagccgtgaacaaatgcaggccgccgtcgaggccctggggtatcgagcggcgttcgaagacatcacgctacctacccgtcccggcctgctcgataaggcacggggctggctgagcggtggcactgacgccgggaaagagggtgacaggcttcacgtggcggttatcggcagtggtggcgccgccatggcggccgcgctcaaggcggtagaaaggggggcccgcgtcaccctgatcgagcgcggcatcatcggcggcacctgcgtcaacgtcggctgcgtgccctccaagatcatgattcgcgccgcgcacgtggcccatctgcgccgcgaaagtccgtttgatggcggactgcccgccacgccgccgcttgtcttgcgcgaacggttgctcgcccagcaacagggtcgtgtcgacgaactgcgccacgccaagtacgaaggcattctggaaagcaccccagccatcaccgtgctgcgtggctccgcccgcttccaggacagccacacgctcagtgtggaactggtcgaggggggcgagcgcatcgtgaccttcgaccgctgcctgattgccaccggcgccagtgcggccgtgccgccgattcccggactgcaagatacccccttttggaactcggaaaaggcgctggcaagcagcagtattccgcaacggctcgccgtgatcggctcatccgtggtggccttggagctggcgcaagcctttgcccggctgggtagccgcgtcaccatcctggcgcgcaactcgctgttcttccgtgaagatccggccatcggcgcagcgctgacggcggccttccgcctggagggcatcgaagtgctggaacagacgcaagccagccaggtggcccatgccaacggcgagttcgtgctgaccaccaagcacggtgaagtgcgggtcgaccaactgctcgtcgccaccggacgcacgcccaacacccacggcctgaacctggaagcggccggcgtgcagctggatgaacgcggtgccatccagatcgaccagggcatgcgcagcagcaaagcggatatttatgcggccggcgactgcaccaaccagccgcagttcgtctatgtcgcggcggcggccggcaatcgcgcggcgatcaacatgaccggcggcgaggcaatgctcaatctcgacaccatgccggccgtggtgttcaccgatccgcaggtggccaccgtcggcttcagcgaagcggaagcgcaccaagccggcctcgaaaccgacagccgcaccttgaccctggacaacgtgccgcgcgctctggcgaactttgacacacgggggttcatcaagctggtcgccgaaacgggctcgggccgactgctgggcgtgcaggcagtgaccccggaagcgggcgagctgattcagacggccgccctcgccatccgcgcccggatgacggtgcaggaactagccgaccaattgttcccctacctgaccatggtcgagggcctgaagctcgcggcgcaaaccttcagtaaggacgtgaagcaattgtcctgctgcgccgggtaa

SEQ ID NO: 330932 - DNA, 417 bp, Pseudomonas aeruginosa
atgaacattaagactaatgaactcggcaggggtgacagcctgcgccagacatggcaggtgatcagcttctgggggctgcctgccgttgtcgcgacgctaaccattcttctggcagatcgacaccccacgctattcctggccgcaagcgccgcgctggcggtgatgggtggcgcctgcctggtcaatgccgcacgctgccgccgacttcactgctacctcacggcgccgtacttcctgttgctcgcgctcggcgggctgctggcttatggcttcgacccgcatggcgagcagttctccagactgtggctattgctggcactgggggcggcacccttgctcatctggctgcccgagcgcctggccggccgaaagtaccttggcgctccagggtgcggagaaggccgggagtgtcggtga

SEQ ID NO: 330933 - DNA, 1110 bp, Pseudomonas aeruginosa
atgggagagccctacttcaagatacggaacaagcttcagcgcctgggtattcgcgcgttctccagcaactacgcgctgtacggcgacatgagccagcgggtaatgactctccttgaggagatggcgcccgccgtcgaggtgtacagcatcgacgaatgtttcgctgacctgaccggggtccctggtgacctggtgcgcgttgggcgcgagatgcgcgctcgggtactgcgctgcactggcatccccgtaggcgtgggtatcggcacttcgaagacgcttgcgaagctggccaaccacggcgcgaagaaatggcaggctcagactggtggcgtgttggatattcgagatccggcgcgccgggatcgattgctgcaggcctgcgaggttggcgatgtatggggtatcggccgacggatgaccgagcacctcagcacgatgggcatccgcacggcctgggaccttgcacaggccgacgcctggaccttgagaacgaaattcaacgtcgtcatcgagaagacggcgcgagagctgcgcggcactccctgcctggagctcgaggatgctgctccgccgaaacaggagatctgctgcagccggatgttcggcaagcggctgcatgacctcccgccgatccgcgaggcggtggccacctacgctgctcgggcctgcgagaagctgcgtgcccagggctccgtgtgcaaacgggtccaggtcagtatccgtactggcatgttcaatccagacgagcccaagttcgccaagggcgtcagtatggagctgccgtatccgaccgatgacacacggctcatcaccaaggcggcgtgcgagggactggaactcctctatcgcccaggcttcgccttcagcaaagctgaggtgctgctgcttgatctccgtcagccaggtgagttcactggtgacctattcgctgaggtacaaccggagcgcgcgaccaaggcaatggcggtaatggatgccatcaatgcacgctggggaagaggcactgttcggccaggcggtgtgcccgcggcgccagagtggggcatgcggcgcgaactgatgagccggagctataccacgcggttggacgaactatgggaggtgcgataa

SEQ ID NO: 330934 - DNA, 303 bp, Pseudomonas aeruginosa
atgtttatggaaggaagtctgctgtctgtggcattaagttttctggccttctgttttgccataagcttgttgtcaacgtggtggctaaaggttaaagagctttatgcaaggccggccgacaatttgtggttgtcggtgatcgcagtaatagtagttttcaccggcatctatattgattatggtccgaatgggaagcatgtgggagagactttagctctcatgccgggctacatgcttgatcagctagtcccaggttttacagacgagattaatagagctgctagagatactcgtggccactga

SEQ ID NO: 330935 - DNA, 255 bp, Pseudomonas aeruginosa
atgcacccactgttcaccaacctcacccaggaaaccctcgcctacctcgaggaccaactgtccaacaacgacgtcgccggcgacgacgagctcatcgacctgttcatcgaggagctgtcgctgaccttggagcaggcggaagcggctgtcgcgctacgcgatcagtacctctgccaggtcttcctgaacggccaagggccgctgcaccaagacgatgggctcagcttcgaccctcacaccaagagcgttcggtag

SEQ ID NO: 330936 - DNA, 198 bp, Pseudomonas aeruginosa
atgtgcgactcaatcgtgtatgcccctatggacgaactcgaattcgagcggctgctagggctggcaaccctattcaacgacaacgatgaatggcctatcgactttacggagctgcaggaactgagcgagctgctcggcaagctcaaaagttgcgtcgacgtagcgatagacaacgcccctgagggggccaagagctga

SEQ ID NO: 330937 - DNA, 462 bp, Pseudomonas aeruginosa
atgcctatcaaacacgccatcgtccacctgatcgagaagaagcccgacggcaccccggccgtgctccacgcgcgcgacgccgagctgggcgactcccaggccatcgagaacctgctggccgacctcaacgaaagttacaacgccaagaacaaggcctggggcttcttccagggcgagtccggggcctacccgttcagcggctggctcggtgagtacctggagggcgatcgcgacttcggcggcatggtggtgctttccggatacccctgcccactgtacgacgagctctacagcacctggcacagagtcgaccgccacgcctatgcagacggctccagagagcgaatcgagtgcctctggctaaacagcgctgcgctagaggggctggcacaactggacttcttcaaggccggcaatgcgtctccatcgccctcattccagaccatggccgctcattactga

SEQ ID NO: 330938 - DNA, 1398 bp, Pseudomonas aeruginosa
atgactcgctctgctctctcgaactctgcagatcggccgggaggactcgaagtgagtgttctggaacttacgccgccgcactccgtcgaggcggagcaaggggtactcggcggcctgatgctggacaacgcggcatgggacattgtcggcgatcagttgcagaaggaggacttcttccggcatgagcatcggctgatcttcaccgccatcagcgagctggccgcaaaagatgctccgtttgatgtcgtgactgtgtcggaagcgatcgaagatcttccagaagctggcgggctggcctacctcggccagctcgccgacaacacgccctccgtggccaatatcgaggcttacgcgcagatcgttcgcgatcgggcgcacctgcggcagttgatgtctctcgggcaccactgcaccaggaccgcctcgaaccaccaggcaaatccctctgaggttcaggaggagatcgagcagaagctgttcgccctcggccaagatcagcacaagtccgactttgtcgatatcaacaagggcctcgcgaagatcgtcgacaccatcgattaccgcttcaacaacaacgtgacggtaacgggggtcccgacaggcctgaaggatctcgacgagctctccggcggactacagaagtcggatctcatcatcgtcggtgcccgtccctcgatgggcaaaacgtcgtttgccctcaacttgatcgacgccgcgctgcagagcgaccaacagaagtctgtccaggtttacagcatggaaatgccagcagagcagctgctgttcaggcttgctgccctgctcggccacctggaccttggcaagctgatgaagggccaactgcaagaagaggattggcccaggctgaccgtcgcgatccagcgcataaacgactatggcagccgactggtcatcaacgaccagggcaacctgacgccgacagagctgcgcgccaaggttcgccgtgcagccaggaagtacggccaccccgtactgatcctggtcgactacctgcagctgatgcgctgcccaggcctggaaaaccgagccaccgagatatcggaaatctcccgctcgctgaaagcactggccaaggaaatggattgccccgtcgtggccctgtcccagctcaatcgcagcctggagaaccggccgaacaaacgaccgaacaacgcagacctgcgtgagagcggcgcgatcgagcaggacgcggacgtgatcatgttcgtgtaccgcgacgaggtctaccaccccaacaccgaggccaagggcatcgccgaaatcatcatcggcaagtaccgcaacggccctatcggcaccgtccacaccgccttcatcgccaaccagacccgcttcgccgacttggcgccggggacatggcaaggagcccatgcatga

SEQ ID NO: 330939 - DNA, 993 bp, Pseudomonas aeruginosa
atgaaaattaaaccaaccatagccgtttgggagaattgcgatcccacagtgtctgaagccattgggcagtttctggatcgctggcacccgtattccaggtactcggatcgctaccccatcatcaggctgataaaaaagctgatcgaccctgccgtggcccgatatatggccacgctgccacaacgctacttgggccacgtccctggcgcaggaacaggggtgagctttagcgaaatcactcgattgatcgggcttgacgcgatggctcgcgtgcaacgccagttgctgcgccagttcatcaagaccttggacaagcaatcagcaagggacacgcggtttgtggcgacgctggaaacgttaattgagctagtagagtcctgcgccagcaaacgaccaggaaaattgcaagttcgcaccacacgcctaaatggagaacggcgacagggtctttgccgattctgtggatcacgtaccgaactcgcattgtacgctgacggagacgacgctccgaaagctggggatcacgaggatgcgcttcggctaagcagccaatactgcctaaatcatcgacctcggttaccgaatggcgcatggaacccggcctatcggcaggcgaggtggtcagccgctcaattcgagcttgaactagccagacttacccggcaatgcgcgaagcgatccaccccccgtgcagcagcatccggtgacccgctcgttgatgagtacttttttcactacatgctgggccagaccatacagcctgccgacatagctgagctgcgtgacttggcgcgactgatggtggactccaagctgtcagacaccaaaaagagaatactgatgctccagcatttgggcctcaatcagtcggaaatcgcagaacagcttgtaggcaacggccaacggccactgacacgccaagcagtatccaaggcaattgcctctatccccaagaactttcacctgaaacagccgaaacgccctgggctttga

SEQ ID NO: 330940 - DNA, 225 bp, Pseudomonas aeruginosa
atgcaagcaacgacaaaccgaacgctcatcaataagaagaggctgctcgccatgatcccgctgtgtgagcgcacgatttacaacttggagcagcggggagaattcccgcgccggattgcgctaaccagccgaaatgtcgtgtgggacctggctgacgttgaggagtggatcgaggcccgcaagttgtcgggtatccaagctcgccgccctggattgggggcttaa

SEQ ID NO: 330941 - DNA, 753 bp, Pseudomonas aeruginosa
atgtccgttgcttgcggtgcaaccgtcgagtgcggcgtcgtagggggtgaccttgtcgggcttgctcccgcatccgctgggcgcgtggtctatctagccggagaggacccagaggtcgttttggtcggccgcattcacgccataggccagcacctcaaccaacaggcgcgcgaagctatcgcggagaacctgatcatcgagccgatcatgggcaagggcctgaacgtgatggacgagcggcacgttgcgcgtgttatcgaccactgcaccggcgcccgactgatcgtattggacacccttagccggattcataaccttgacgaaaacagcaatggggagatggcgcagcttgtcgccacgttggagcgtgtcgcggtcagcacgggggcatcagtcctgtacctgcaccatgtcagcaagggcagtgctcgcgacggtctggccgatcagcagcaggccgcgagaggagcatccgctctaatcgataatgcccgctggtgtggtttcgtagcgaagatgaccgaggacgaggccaagcgcctgactgatcgcgcctatgaccgacagcccatcagcaatgaccggcgcggctacttcgtacgcttcggcgtgtctaagcagaactacgaggctactgaacttgatcgttggtatttgaggcatgccggcggcgtgttgcggccggtagagttgatggaggcgaagaaagatagcagtggcgggggcagaggttgtgtcgcagcaacgtattag

SEQ ID NO: 330942 - DNA, 255 bp, Pseudomonas aeruginosa
atggcaatcctgacagtgcggaatgtgccggacgaggtgcatcgcgctctgcgcttacgggccgccgagcatggccgcagtacagaggcggaggtgcgcgagattctggaaagtgcagtgaagtcggaaaagcgcatccgcatgggcgacgcgttggcggagcttggccgccgcgtagggctgacaaacgacgacttcgcagtattggaccaggtgcgcgacaaggtgccggcagaaccgatgaggtttgaatga

SEQ ID NO: 330943 - DNA, 420 bp, Pseudomonas aeruginosa
atgattgtcttggatacgaatgtcgtctccgaggcgatgaagcccgaacccaacccggccgtgcgagcttggttgaatgagcaggtagtggaaaccctctacctgtccagcgtgacgctggccgagctgctgttcggcatcggcgcgcttccgaacgggaaacgtaagaaaggcctgggcgaagccctggacggcttgctcgagctgttcggcgagcgggtgctgatgttcgacaccgaagcagctcgccattatgccgagcttgcggtgaaggcccgcacagccggaaagggtttcccaacacccgacggatatattggggctattgcggcctccaagggatttatcgtagcaacacgcgacaccagcccttttgaagcggctgggcttactgttatcaatccttggaaccatcagtaa

SEQ ID NO: 330944 - DNA, 771 bp, Pseudomonas aeruginosa
atgaagcagcacgttttagcggctaaaatcgctttctccatagccctcaccgttggcgtcgccgcgatgcctgcgcacgcaggtatcccggtccttgacggcacgaacctgtcgcagaccaccgtcaccgccattcagcaggttgcgcaggttcagaagcaaatcgagcaataccggacgcagttgcagcagtacgaaaacatgctgcaaaacaccgtcgcgccggcggcctacatctgggaccaggcgcagaccaccatcaatgggctgatgcaggccgtggacactctgaactactacaagaaccaggcgggcagcatcgacgcctacctgggcaagttccaagacgtgtcctactaccgcagatctccatgcttcacagccgccggctgcacggacgccgagcgcaaggcgatggaagagaaccgccgcctggcgtccgaatcgcagaaaaaggccaacgacgcgctgctcaagggcctggagcaacaacagcggaatctggcctctgacgcgcgccagctcgaacgcctgcaatcgaaagcgggcaccgcacaagggcagatggaagcgatccagtacgccaaccagttcgccagccagcaggccaaccagctcctgcaaatccgtggcctgctgattgcgcagcagaacgccatcggtgcgcagatgcaggcgcaggctgaccgccgggcccaggaacaggccgcccgcgaaaaggcgttcgacatgggcgaaaagaccaaccgcagcaagagcaagagctactaa

SEQ ID NO: 330945 - DNA, 159 bp, Pseudomonas aeruginosa
atgcgcaagttcattctggtggcactggtgcctttgttcctggtcgcgtgcgatcaaaagcaggacgtgaacagccgcacgcccgagcagcagaaggccgccgaacaggcatacgacatggggaaatccactgaccgcagcaagagcaaggggtactga

SEQ ID NO: 330946 - DNA, 1473 bp, Pseudomonas aeruginosa
atgcgctggatactcttctacggcggcctatcggtgccgctgcttttcgcatcgaccgccgcgaacgcggcgattgagccggccgggctgctggacgaggtggcagaccgcttcctcgccgccagtagctcatgggccgggacgatcaccgacgcggcgagctggctgttctggacgctcgttgtgatttcgatggtctggaccttcggcatgatggcgctgcgcaaggccgacttaggcgagttctttgcggagttcgcccgcttcaccatcaccactggcttcttttggtggctgttgaggaacgggccgaagtttgcaatggacatcatcaactcgatgcgcacgctggccgcgcaggcatccggccaagcgcgcgagctgacgccttccaggaccgtcgatatcggttgggatatcgtcgtcaaggcggccgacaactacagcgttctaagccccatcgacaacctgtcgatcttcctcatcacggccgcgatcctggcctgcatggcggtggttggggcaaatgtgctcattaccctggtgaacgcctggatactcgcctacgccggcattttcgtcctgggcttcggcggtgcccgttggacctcggatatcgccatcaattacttccgatcggtgctcggcattggcttgaagttgctgacgatcacgctcttggtcggcatcgccgtatccatcatggacagctactacgcgaacctctcacaaggcgcgccggtgcgtgaactgctgcttgtgtttgtcgtcgccttggtactaacgctgctgatccattccgttcccaatgtcatcgccggccttgtgcctggtggcgctgctgctaccggcatcggcagctttagcaccggtgcaatcgttggtgcgggcatggcgaccgcaggcatggcggcgcaagccgtggccgctgctgcgtccgggggggcctctctggctgcgtcggccgccggtggtgcgcaggcggtcatggcggccgcgtcggcggccgcaaaggccgccgacggcggcgatattcccggtgcgatcagcggcggcggcgaagctggcggcggtgctgctagcggtggtggtggcggtggtagtggtggcgtctcgggcagtggtgaaacgccaatggcggcggccgcaggccacagcagcagcggcgcacgcggcagctctggcggcggtggcttctttggcgcggccgggaaagcgggccgagttgcgacaggcacggtcgccaacctcgccaaaggcatcggctcgatggcgtctgcgaaggccggcagcatggccgacgtggccaagggccggattgcagagacaaccggcggcaagctcgccgcgacgatcaaggcggccagcagctgggccgatggcaacaccctttccggctcgaatgacgacgcgacggcagcagccagaaatgacgaggtggccgcgtttgtgaatcgccctgaggcgacctaa

SEQ ID NO: 330947 - DNA, 243 bp, Pseudomonas aeruginosa
atggcaaccatcaatcctaatcaattttctcaggcagttcagcaagcgtcggcgcagttgaacgctatcgactggctggaccaggacgccgcacgcgagctggggccgctggccgaagcgacggccaacttgtttatggtgctgttctaccaggcggaaacgggccttgcgacgcgcgaggacttctccttggccaggacagctattcagctcgccttgcatcagcctcacggccacaactga

SEQ ID NO: 330948 - DNA, 285 bp, Pseudomonas aeruginosa
atgggagtccttggaaaaagttttgcggctgcgcgcgaagagggaccagtgggcgtcgtcggctatctggcggtgttcgttccgacctcgttgattgtcctgccggtcctgccgttcgtattggcctttatctacgtgcgtgaactgctccggcccgcgctggcacctgcactgccggttaagccaccaaagcaggtgcaacctgtcgtggagcatatagcgggcgtgatcgatctcgccgccgttcggcagcttcgaggcgagaagccgtcccacgagggctga

SEQ ID NO: 330949 - DNA, 369 bp, Pseudomonas aeruginosa
atggagacatacgaggtagacactgcccgaaaacggcaccggcacctacgggtgccagtgttcccggaagaagcacaaataattgaggagaatgcgaagcgcgcaggcatgagcgttgcccgctatctgcgtgaagtcggccagggctacaaaatcacgggcattgtggactaccagcacgtccgcgaaatggttcggatcagcggtgatcttggtcgcctgggaggcctgctgaaactctggctcgccgatgacccgcgcacggcgcggttcggcgatgcaacgatcctcgccttgctggcgaagatcgaggaaaagcaagatgagctgggcaaggtcatgatgagagtggtgcggccaaaagcctag

SEQ ID NO: 330950 - DNA, 459 bp, Pseudomonas aeruginosa
atgatcaacgagagctttgcgagtgtgtgggatgccatcgaagacaccccttccgaggcggaaaacatgaagctgcgttcggcgctgaggatggctctggaaaaacaaattcacgatcacggatggacgccggccgaagctgcgcgccgtcttggcgtgacgcaatctcgcgtgtctgacctgatgcgcgggaagatcgacgaattcggggtggatacgcttgtgaacatggccgtcgctgcaggcctgcacaacgacgatccagcatgggcgcagctcaaggctttgctggttgaacggattcatgctggcttggcgggacaggcgtcccccaaaagcgtcagcgaaattcttgaggatgagctagctcagctcgtcgccggcatcaccccggacaacctgcgccctgaaatcaacacaggccccgacgtcggccgcgagcgggataaaccgaaataa

SEQ ID NO: 330951 - DNA, 849 bp, Pseudomonas aeruginosa
atgagcaaaacgaaggcctggcgcgtcggttcgatgttggccggaatcgcacgcgaggcgggcgggctgactgatgccgaagccgagagcttcgaccaactccgcgacaagacgccaggcgagccgatgaggtttgatgaagcccccgtcctcaaggtcgcccgcgtctatttgcgcgtcagcaccgacgcgcaggacctggaacgccaggaaggcatcatcgagggcgcgcgggcggccggttactacgtcgccggcgtctaccgggagaaggcctccggcgcacgccccgatcgtcccgagctgctgcgcatggttgcggacctacagcccggcgaagtggttattgcggaaaagatcgaccgcataagccgcttgccgttggtcgaggccgagcgcctggttgcatcgatccggaaaggggccaagctggccgtacctggcgtggtagacctgtcggagctggccgccgaggcgcagggcgttgccaaggtcgtgctggaatcggttcaggacatgcttctgaagctggccctgcagatggctcgcgatgactacgaagatcgccgcgagcggcagcgccagggtatcaagctagcgaaggatgcgggcaaataccagggccggcgtgccgatccgaagcgccgcgcccaggtggtcgccttgcgccgatccggccacagcatcaccaggacagccgagctggcgggctacagcccggcccaggtcaagcggatatgggccgaggtcagcaaagacgaagcggaacgcatgggagccttccaggaggacgccctgagcgaagccgacgccctggctgccaccggccaaggaggcacacgaccatga

SEQ ID NO: 330952 - DNA, 1209 bp, Pseudomonas aeruginosa
atgagtaactccgatcttgacgacctggcggcagagctggctgagttcgcgccgccagagaagaaaaatggacgcccagccagcgaggagcgtgtcatcgctggcttcgaggaaatccaacgcttcgccgagcagcacgggcgtgcgccgcagcatggtgaagaccgcgacatattcgagcgcctatatgcagtgcggctcgaccgtctacgcgcgctcccggattgccgcgccttgcttgagccgctagaccatcagggcttgcttgctggggcgccgaccgtcgccggttcggcggaggaaactatcgacatcgatgacctggctgccgaactggcggatgttgctgacacgaatgacatcacggttctgcgccatgtccgcactagcgccgaaaagcgtgctgctgaggagattgagcatcgcgaaaaatgcgaggacttcgatcgctatgagcatctgttcaaggcgataaagcaggacctcaagagcggtgtccgcaacaccaggagctttctgagccaggcaaaggcaatggaagctatccagcaaggggcctattacatcctcaatgggcagatcgcgtatatcgccgaggttggcgaggacttcaccacgcaatacgatcgacgtgacagtcgactgcgggtgatcttcgacaacggaaccgaaagcaaaatactcttgcggtcgttccagcgtgcgctccatcgtgatgaggccgcgcgcgttatcaccgacccggatgcggggcctctattcaatgacagcttagaagaaggcgacatccagagcggcacgatctacgtcctgcgctcgctgtcggatcacccctacatcgcgcagcaccgcgacctcatccataagttaggtgtgaccggcggcagggtggaggcgcgcatcgccaacgccgaacatgactccacctacctattggcgaaggtcgaagtggtagcgacctacaagctcgcaggcatcaatcgcactcggatggaaaaactgttccacaggctgtttgcacccgcgcggttgaatatctccatcaacgaccgcttcggccgccccgtgcagcccgaggagtggtttctcgttccgctgttcgtgatcgacgaggccgttgcacgcatcaaggatggcagtatcaccggctacgtctacgaccctaaggccgcgaagctagtgaaggcggcggaggtgggcggcgtatga

SEQ ID NO: 330953 - DNA, 2595 bp, Pseudomonas aeruginosa
gtgactgtgcttgatgacatcctgaattggtcgcgggatcgtcctgcatggcagcgggacgccctgcggcggcttgtcgagaagggagagcttaccgaggacgacattgccgccttgacagaaatttgcaaggccgctcatgggttagccgaggcgcaaggcggcgtaccgctggatacagcgcacctcccaaacaggaatgcagcgcaaggcgctgtagcccttgaatccatctttcaccacgagggcgtcaacgccctcgcacaagaccagactctaaagttcggccctcgtctcaccgtcgtctatggcgacaacggggcgggcaagaccggttatacccgtattctcaagacagcttgccgggcgcgcggcagggagcagattcttggcaacgtcgtggcgggcgcggcgccaccccgtcaagtcgtcgccataaagtaccgtgttcaaggcgaaccggaggcgagggaatgggccggtcaggcagacgacaacttcattgcgcgcgtgagcgtcttcgacacgcagagcgcatcggtttatctcaaggaaaagacagatgttgccttccggcccttcggcctcgacctcttcgacaagctggttcaagcggccaaagccgttcgcacacgactcgaagcagagcagcgggcgcttggcgcaagcgccatatccggcctgctgccattggtgccggagggcaccgccgtagcgaagctcctcaacggcttgagcgttctcacaaggacggagcacgtcaagactctcgcaacactgacggacgacgaggccgccaaactcgcgttgctggagaagtcccttctcgatttgcaggcggctgaccctgcaaaattgctccagcagctcaagctgcgcgggtcgcgcgtccaagccctctcccagcacgtccagcacgtcgacgccgcgctttctaacgagtccgtgtccgccatcttcgatgcgcgggcggcgtggcgacgcaagaaggaagaggctgatcgcctgcgtgcagcgacgtttcctgccgggcttctgccgggcaccggctccgatgcttggaagggcctttggcaagcggcaagcctcttctcacaggaagcggcatatcccggtcaaccattcccggttgttggtgaggccgcgcagtgtgtcctgtgccagcagggcctagaccacgatgcaagtcataggctggggcaattcgccgccttcatcgcctccacgacggagcgcgaactgcgcgacgcgcgcgaactacatgatcggcagcgaaaggctatcgccgcgctcgtcgtgcgccccgaagctgtccaagacaccatcaaagacctcagcatagagaatgaagccctcgctggccgaatcgacgcggcgcttgccgccgctgacgcgcgccgccaagccgtgatggcggcattggagacagattccgatttgccgcaggacaatccggcagtcgtatccgtcctccctgacatcacgacactctcggcgcagcttgatgagcgcgtgaaggcattgagcggagacgctaccgccgagaagcgaaagcaactcaatgctgaggcggaagaactgcgcgcgcgagtcctactcgccaagcatgagactaccgtgttgcaggagatcgaccgtaagaagcggctcgctgcctacgagcagtccaagagcgacaccgccacgcaggtcatcacaagaaagagtagtgaagtgacgcgtgctgtcgttacgcagaagctcaagaacaccttccaggaggagttgcagggcctcgcgttccggcacatcgaagtcgagttgcaggaagccggcggtgcggagggtgttctttatcacaagctggcgctaacgcgcgcgccgggcgttgaacttccgaaggtcgttagcgaaggcgagcagcgttgcctatccattgctgcgtttttcgccgaactgagcactgctgacgacccatcgggaatcgtcttcgacgatcctgtgtcctcgctcgactaccgctggcgcgaaggcgtggccctccgtctcgtcgaagcggccaagacaaggcaagtcatcgtcttcacgcacgatgtcgtctttcttctctggctgaagcagtttgcggaggaacagcaggtcgagcaacttgaccaacatattagacagctttcggcgggcgcgggggtctgcaccgaggaactgccgtgggttgcgatgcccatcaggaagaagattggacacctcaatagcgagtatcaagccgctgccaagctgtcccgtgacgggcatcaggatgcttacgaaaaggaggccaaaaatatctatggcctcttgcgcgaagcgtgggagcgcgctcttgaagaagtgctcttgtgcaagatcgtcgagcggtatcggcccggcgtccaaacacagcagatcgcaaagcttgcggatgtcaccgaagaagactgccggcaggttgatgccgctatgaccaaatgctcccgatggctgcgcggtcacgatcaggctgctgctgctcgtgccccggtcccagggcctgacgaattgaaggccgacatcgacgcgctcgacagctgggtgaaagccatcaacaagcgccgtggttga

SEQ ID NO: 330954 - DNA, 2073 bp, Pseudomonas aeruginosa
atggagcagaccgacgaagagttcttccacgacttccgacaggaacttttggcgggcgccgaggccaatggcagcttccagctctccgaattcatggaggccatcgcgaacgaccttgtcgagacaggcttcacggaagggttcgaactctgccatttccgggcgcagcgtggtatgcgcgtggacggctactggttcaatgacgaaggagttctggacctcttcatcgcggacttcgactcccgaaacgagctagcatcgctcaccagaacggaagtggccgcggcattcaagcgtgttgccaacttcttcgaggccagcgccaacaagggcctggccggcgaactggaggtcacatcgccggagtacggccttgccaggcagattgcggatcgcaaggacgccattcggcaggtcaacctggttctcttctccgagcgcacgctcagcgagaaaatccaggcccttcccgatacggaagtggcaggtgttccggttgctcaccacatctgggacatctcacgacttcatcgtcagcgaagctcccgcagccacaaggagccactcgacctcgacttcgagcagatgttcggcaagggcatcgcctgccttcccgcacacctggggaccgatgcctatcaatcctatctcatggtcatgcctgccgaggtgctggcgaccctgtacgaaagattcggagcgcggttgcttgagcagaacgtccgtacgttcctgcaggcgcgcggcaatgtgaaccagggaataagggcgacgatcctgaacgaacctgggatgttctttgcctacaacaacgggattacggctactgcacagagtgtcgagacagggatgacggattccggtctggcgatcaccagggttgtcgatctccagatcgtcaatggtggccagaccacggcatcgctgttccacacacggaagcgggacaaggccgatctttcccagatattcgtccagttgaagctgtctgtcatcgacagccgacagagcgaaacggtcgttccaaggatatcggagtatgcgaacacccagaatcgggtgaatgccgccgacttcttctcgaaccacccgttccatgtgcggatggaagggttttcccgacggatttgggcgccggcgcagaagggcgccccgcgcgagacgaggtggttctatgagcgcgcacgcggccagtatgccgatgcgcagtcgaagctcacgcctgcggaacagcgtcgcttcaaggcggagcatcccaagccacagatgttcacgaagacggatcttgcgaagttcgagaatgtctgggatgaccaccccaggtgggtgaatcttggctcccagaagaactttgcgcgctacgccgcccgaatcggcagcgagtgggagaaatcatccgacgcgttcaacgagttctatttcaagagggctgtcgcacgtggcctgatcttccgcgccacggagcgcatcgtttctgcgcagccttggtacaacggcgggtaccgagcaaacatcgtggcctacacgctggcggtactcggtgacatcacgaagcgcaggaaggagagcatcgactttctgggcatctggaatgcacagaaggtcgatccggtgctcgaaagtgccatcgctgtcgtgtcgggggtcgtgaacgacgacatcatcagaccaccgcaaggcatttccaacatttccgagtggtgcaagaaggaggcgtgctggacgaggatacaggctcgtaccgacgccattgccaatctcctcccgcccgagttctacgatcgacttgttccgcaggatgatcaggcagcgatcgtgaagactgcgaagcagacgcagaggatcgacaacggcatcgaggcgcagcgaaaagtgctggctgttcccgctgcggaatgggctcgcatccatcagtcgctgcttgagaaggatctgctcacgccgaaggaagacggcgtgcttagggtcgccatgcagattccctccaagctcccgacagaaaagcagagtgtggtgttgctggatattctcgacaaggggcgtctcgaaggcgtggttgtgagcgaaccctga

SEQ ID NO: 330955 - DNA, 966 bp, Pseudomonas aeruginosa; identical to SEQ ID NO: 250894

SEQ ID NO: 330956 - DNA, 2661 bp, Pseudomonas aeruginosa; identical to SEQ ID NO: 250893

SEQ ID NO: 330957 - DNA, 1479 bp, Pseudomonas aeruginosa; identical to SEQ ID NO: 250892

SEQ ID NO: 330958 - DNA, 1620 bp, Pseudomonas aeruginosa; identical to SEQ ID NO: 250890

SEQ ID NO: 330959 - DNA, 1161 bp, Pseudomonas aeruginosa
gtggcagacgtgcataaggttgtcttttacccggtcggaaacggggacaccacccagattgtcctgtctggcggccgccgcgttctcttcgacttttgccaccgcgatagagccgaagataccgacaccccggaaatcgacctgaagtcccgtctcaaggacgaactgaaggcagtcgatcgcgactacttcgacgtggtggctttcactcatgcggacctggatcacatccaaggcagcaccgacttcttcgagcttcagcatgccaagaagtaccaaggcgaaggccggatcaagattcgggagctttgggttccagccgccatgctgctggaggaggccgacaaggaccatcagcaggaagagtttgtactgctccggcaagaggcgcgacaccgcctactggaaggcaaggacatccttgtgttctcgaagccgaaggcgctcgccgattggctcgaacctcgactgaaagaacggggagaagcggcttcggcgcgcgatcatctcttcatagacgccggcacaattgtccccggattctcgctggccagcgatggggttgagttcttctgccactcgcctttcatcaagcattgtgacgaaggagacatcatccgcaaccgcgcctcgctggtgttcaacgtacgtttcctggcagatggcgcgtattacgactacctggaagtgggcgatgccacctgggaggaaatggaagacatcgtccgcacgacgaggtaccacaagaacgatgatcgcctcgcctgggatctgtacaacatcccgcaccattgcagctatctggcactcaacgaggaaggccagaaaggcgacaaagagactgagccgaagccgctgatcaaggaactgttgctccaagggaagcgcgacgcctacatcgtcagttgcagcaagcccattccagacatcaaggagtcctacgagcaagtgcaaccaccgcacatccaagcccgcaacacctacgagcgctacttgaaggaagtcggcggacgcaagtttctggtgacgatggaggagccgaacgccaacaagccagaaccgatcgttttcgagattgccagcggcggcgttacctggaagcgttcagcgtccatcggcgcgccggccatcatcacctcaactccgccgcgcgcaggctga

SEQ ID NO: 330960 - DNA, 2247 bp, Pseudomonas aeruginosa; identical to SEQ ID NO: 250876

SEQ ID NO: 330961 - DNA, 825 bp, Pseudomonas aeruginosa
atgctcacacatcgctctgcctacggcgtggaagggcgcctggcgatgatcgactcgggtgacaacagcaccacaggctggaagccgagcacctacatcaagcactacctgaagcgcaacgttctggactacctgttcgtgacgaatgcggacctcgaccacatcagcgatctgaacaacctgtggaaagaaggaatcacggtatccacgttcttccgcaatcgcagcgtgtcacccgaagtcatgaggatcatcaaggaggccagcggcgaactgaccgaggacatcgaacgatacttggacattcatgctggctacgtctaccccgtggacgtccccttcgatgagagtatgggaggcatctcggtgcggacgttttggaactcgacgccacccttttacgacacgaacaacctgagcatggtggcattcttcaagtacgggccattcaagattctgtttcccggcgaccttgaggaagacggatggctggcgctgctcgaacagccggcatttcgagctgagctcatcgacacgaccgtgctcgtggcatcccaccacggccgagagaacggctactgccgggcgctattcgactactgtcacccgcgagcgatcgtgatgtccgacaaagcaatcgtccatgatacgcaggggatgactcagacctatcgccagcgcgtcatagatcactggccgaacggagttcttgtcgccacgactggaaaacagcgccgtgtgctcacgacgcgacgcgatggctggattcaattcaacgtcaatgatcgtggcgatttcaccatctatacggagtgctatggatga

SEQ ID NO: 330962 - DNA, 678 bp, Pseudomonas aeruginosa; identical to SEQ ID NO: 250874

SEQ ID NO: 330963 - DNA, 1407 bp, Pseudomonas aeruginosa; identical to SEQ ID NO: 250871

SEQ ID NO: 330964 - DNA, 366 bp, Pseudomonas aeruginosa; identical to SEQ ID NO: 250868

SEQ ID NO: 330965 - DNA, 273 bp, Pseudomonas aeruginosa
atgagcatggaaatgatagatattgcaaagaagctattagcctcatcgattgacgggaaaaccttcagcgaagaattttttaagacttggaggtccgagcgcgattcaggggtgctggcccaagatgatgcatcgcttgggagatgcttgagtttaatgtttggtctggccgacagctttaccgagggaaagaaagagcgcccaggtgaacttacagagggtgaacttaaaatagctctgagtgatttattgaaagaatacaaatacatataa

SEQ ID NO: 330966 - DNA, 339 bp, Pseudomonas aeruginosa
atggccggcggcagcctggaacaggcgcgtatcctcgaggccctggataccggcctgtacatcggcaacctgtggtacctgaactactcggacatgcccgccgcacgcctgaccggaatgacccgcttcgccaccttctgggtggagaacggccagatccgggcgccggtcagcaccatgcgcttcgacgacagcctgtacagcttcctcggcgcccatctggaagacctcagccacgagcgcgaactgcgcctgtccagcaatacctacggcgaacgccagaccgactcgatgcacctgccgggcgcgctgaccgggcgcttcaccctcacgctctga

SEQ ID NO: 330967 - DNA, 1350 bp, Pseudomonas aeruginosa
atggaaagcttgcagaagtgggtggtcgacctgaacggcgtggtctgggggccgttgatgctggtgctgattctcggcaccggcctgtacctgatgctggggttgaagttcatgcccctggtgcgcctgggagtcggctttcgcctgctctggcaggggcgtagcaaggatgatgagagcagcggcgagatcagcccgttccaggcgctgatgacctgcctggcggccaccgtcggtaccggcaacatcgccggggtggccacggcgatcttcctcggcggcccgggcgcgctgttctggatgtggtgcaccgcgctggtgggaatggccaccaagttctccgaagtggtgctggcggtgcactaccgcgagaaggatgagcgcaacgaacacgtcggcggtccgatgtatgccatcaagaacggtctgggcaagcgctgggcctggctcggcgcggccttcgcgctgttcggcgggctcgccggcttcggtatcggcaacatggtccaggtcaacagcatggccgatgccctggaggtttccttcggcgtgcccgactgggtcaccggggtcgccaccatgctcgtcaccgggctggtgatccttggtggcatccgccgtatcggcaaggtcgccgaagccctggtgcccttcatgtgcgtcggctacatcgtcgcctcggtgatcgtcctggtggtccatgccgaggcgattcccggcgcgttccaactgatcttcacccacgccttcacgccgatcgccgccaccggcggcttcgccggcgcagcggtgatggcggcaatccgtttcggtgtcgcacgcgggatcttctccaacgaggccggcctcggcaccgccggcatcgcccaggccgccggcacgacccatagcgcggtgcgttcgggcctgatcggtatgctcggcaccttcatcgataccctgatcatctgcagcctgaccggcctggcgatcatcacctcgggcgtctggaccagcggcgccagcggcgcggcgctgtcctcggcggcgttcgaggcggcgatgccgggcgtcggccactacatcctgtcgctggccctggtggtgttcgcctataccaccatcctcggctggagctactacggcgagcgctgctgggagtacctggcgggcacccgggcgatcctgccgttccggatcgtctggaccctggcgattccgttcggcgccatgacccagctggacttcgcctggctggtggcggataccctcaacgcgctgatggcgattcccaacctgatcgccttgctgctgctgagtccggtggtgttccgcctgacccgggagtatttcgccaaggccaggagttga

SEQ ID NO: 330968 - DNA, 2457 bp, Pseudomonas aeruginosa
atggccttgggattggctttgcctgccgtaactttcgcggtggaattcaacgccgagttcctgagcaacgagggcggggcgcccgttgaactgaagtatttcgagaacggcaactcggtgtcgcccggcacttacagcgtcgacattcatttgaaccagatcatgatccggcgcgaagatgtcgtgttcagtgccgatcccgaaaccggaagcgttcgtccggtcgtccgggtagggctgctcaaggagatcggggtcgatatagcccggctgacgcgagacaaactcattccggataatctggaaaacaatacgcccctgaatgtcgccgaactcatccccggtgcatccatcgagttcgacgtcaacagcctttccctgctggtcagcattccacagctgtatgtacagcggcactcgcgtggctatgtggatccctctctttgggatgacggtgtcaccgcgttgttttccaactaccaggccaacttcacgcgcaacaccaactttggccagaacagcgattatcgctacctgggcctgcgcaacggcttcaacctgtttggctggcgtctgcgcaacgactcctccctgagcggaggtaccggcatgcgcaacaagttcagtagcaaccgtacctatgtggaacgtgacattcgggccttgaaggggaccttgtccctcggcgagttgtatacctccgctcagggggatgctttcgagagcgtgcgtatgcgcggcgtgcaactgcaatccgatatcggcatgctgcccgacaacgagatcagctataccccggtggtgcgcggtatcgctgaaaccaatgcgacggtcgaggtgagccagaatggcttcgtgatctattccaccaacgtaccgcccggtgcgttcgagatcaccgacatctatcccagcggctccaatggcgacctggaggtcaagatcatcgaggcggacggacgccagcggtccttcaagcagtcctattcctacctgccggtcatgacccgcaaggggaacctgcgctatggcctggccgccggtgagtaccataatgatggccagccgtcggtcaacctgctccaggggtcggctgtgtatggcttgtccgacagggttaccggctttggcggcctgctcgctgcggagaagtacaatgccaccaacctgggcctcggcttcaacacgcccctgggcggtttttctgcggacgtgacccatagccagtcccgcacgcggcggggtgggcgcaaccagggacagagtctgcggcttctctattccaagaccatcaacgccaccgaaaccagctttaccgtggtgggctatcgctattccacggaaggctaccgtactctcagccagcatatcgacgacatgtccgaagagagctacctctatggctcaagttccagtcggcagaagagccgcatagacctgacggtgaaccagacgctgttccgacgcagttcgctctatctcacggcgggcgaaaccacatattggaatcgccccggcagcagccgtcgcgtgcagttcggcttcagcagcggcatcaagcgcgcgagctatagcctggcggtttcccgtacccaggagacgggttcgttcgggcgctccgatacccagttcacggcctccgtcagcatccccttgggcggtagcgcacgctccagtcaggtatatgccaatgccgtgagttcacagcatggtgattcgagtctgaacaccggtatctccggatacctggatgaagccaatgcgttcaactacagcgcacaggccaactacagcaaggacggcggcaactccggcagcgtcggcctgggttgggacacgtccaaggccaagttgtccgccaattacagccaggggcgcgacaacaagcagatcaacctgggagcaagcggttcggtagtggtgcattcggggggagtgaccttcggccagccggtgggggaaacgttcggcctggtggaggttccggaggtcggcggcgtcggcctcgacggctactcttcggttcgcaccgacggccgtggctatgccgtgctcccctacatgcaaccctatcgttacaactgggtgaacctggataccaatacccttggaagcgataccgagatcagcgacagcacgcaaatggccgtgccgacccggggcgccgtgatcgccaagcgtttctccgcggagtccggtcggcgggtgcagttcgacctgagcatggactctggaggaaagattcccttcggtgcacaggcatacgacaaggaagagcgggtcgtgggaatggtcgacaacctgtcccgtttgctggtgttcggtatcgaggaccaggggcgcctgtccattcgctggagcgatggctcctgttccgtcgactatcagttgccgcccaggaacaaggacctgacttacgaacgagttgcgctcagttgccgtcggtcctcgatctga

SEQ ID NO: 330969 - DNA, 516 bp, Pseudomonas aeruginosa
atggacttcgtcttcgatgcactgagcaccgggcggcggatcaaatgcctgacggtggtcgatgacttcaccaaggagtcggtcggcatcctggtggagcacggtatcagcggctttcgtgtcacacgggcgctggacgagatggcgcggtttcgcggctacccgaaagcgatccgcaccgaccaggggcccgagttcaccggcaaggcactcgatcaatgggcctatcagcgcgacatcaagctgaagctgattcagcctggtaagcccacgcagaatgccttcatcgagtcgttcaacggtaagttccgggacgaatgcctcaatgagcactggttctgttcgctggccgaagcgagaatccgcatcgcggcctggcggcgggattacaacgaacaccgaccgcacagcgcgattggcaatctcaccccggcagaatttgctgcaagttggcgaactcgccagcagcagctgaagcaggaaaaattaatatcaaccccagggcctactaactag

SEQ ID NO: 330970 - DNA, 2181 bp, Pseudomonas aeruginosa
atggattggcaaggcctgcgcttcctcggagagtctcccgtcgacggctacgtgctgcagaactgcacctattcgccgtcgctggtggcgctcgccttcctcgtcgcctgcctcgccgggtacacggcactggacatggtcgagagggtcggcaacagcctgagccacccgcgcctctggcaatggatcggggcgttctgcctgggcagcggcatctgggccacgcatttcgtcgccatgctcgcgttccacgcgccgatcgccctgcgctacgacctgccgatcaccggcctgtcgctgctgatcgccgtcgccgcctcgtacctggcgatgtacatgaccgcccgcccgcgcttcggcctgctgccctgcctgctcgccgcctgctgcatcggcctgggcatcgctgccatgcactacaccgggatggcggcgatgcgctcggtggccacccagtactaccagccatcgctgttcgccctttcggtactgatcgccatcggcgccgccttcaccgccctcgccgcggtcccctacctgcgcggccggcgcagcgcgcgctaccgctacatgaaactgatcgccagcctgctgctggccggcgccatcgccgccatgcatttcaccgggatggccgcgctggtgctcagcgtacccgccggcacgccgctggaactgcaagccagcgccgactcgctgcgcctgggctggctcaccggagtgctcgccagcgccatcgccgcctgcggcatctgggccgcatggtcggagaaacaacgggagcgccggctcagcgaaaacagccgggtcaacgccctgctcaaccagctcgaccacgcccacgcctcgctgcgccagatggctcgctacgacagcctgaccggcctgcagaaccgcacggcattcaacgaagtgttcgtccagcacctggagaattgtcgcctgagaggcaagggcctggcggtgatgttcctcgacctcgatcacttcaagcggatcaacgattccctcggccacgactctggcgaccaactgctgaagatcgtctccgaacgcatccgcagcgtgttgcgcgatagcgacgtggtggcgcgcttcgccggcgacgagttctgcgtgctcgccgacctcacccaggaccacgaggcgcacatcctctcgcaacgcctgatgcagaagatgaaggaacccatcgccctggacgggcgcaccctggtgatgaccgccagcgtcggcgtcagcctctacccgaacgacggcgagcagtgcgaggagctgctgaagaacgccggcctggccctgcaccagtccaaggcctgcgggcgcaacaacgcgcagttcttcagccggcaactgctggtgcgggcgacccaggaactgcagatggaggaggaactgcgccaggccctgcgcgacgaccaactggagctgcactaccagccgatcctcgccctcgccgacggcgaggtacaccagttggaggcattggtgcgctggcgccatccgacccagggcctgctcggtccggaccgcttcatcggcctggccgaagccaacggcatgatcgaccagctcgacgactgggtgctgcgacgcgcctgccgcgacctgcgcagcctgcacctggccggccacgaacggctgcgggtggcggtcaactgctgcgccagcaatctcggccgggccagcctggtcgacgaagtccgtcatgcgctggagcaggccgggctggcggcgtgcttcctcgaactggaggtgaccgaggacgcgctgatgtacaacatcgaccagaccatcccgctgctcgaacgcctccgcgagctgggcgtcagcctgtcgatcgacgacttcggcaccggctattcgtcgctcgcctacctgcggcgcctgccgctggacgcgctgaaggtggatcgctcgttcatcatggacatccccgcctcgcagcgggacatggaaatcgcccaggcgatcatcgcgatggcccagaagctccatctgaaagtcgtcgccgagggcgtggagaccccgcagcaactggcgttcctgcgggagaaccattgcgagctggtgcagggctacctgttcagccggccgctgccgctggcggccctggaagagttcctccgcgcctaccgcttcgacgccgcgccgccgctgcgcagcctgaaccaggcctga

SEQ ID NO: 330971 - DNA, 606 bp, Pseudomonas aeruginosa
ttgctcgctgccgcgctgaagctgccaacgtcctggcacaggacaccgctgcggccctggattttccactgtctattcggcctgctcgcagccaccggcctgcgcatctcggaggcattgaacctgcaaatcgcagatgtcgacctcggccaggcgctgttgacgattcgcggcgccaagctgggcaagactcggcttgttccgttgcacgcgagcacgaacgaggtgctggccgactacttgcgacgacgtcgggagtgttttgcatggtcgatctctccctacgtttttgtctcgcgcacgggcaatcggctcgatcaggcccaagcgcatcggaccttctacgcgctatcgcggcagatcggcctgcgcggtcagaacgccagccatgggccgcgcatccacgacctgcggcatcgtttcgcagtccgggtgctgacgcgctggtatcaggcaggcgaggatgcggcccgcctgttgccagtattgtcgacgtacattggccacgtacgagttcaggacacttactggtacttgagcgcatggccagagttgatgacgcaggccatgtcgcgcctggagcgacgctgggaggtatcaccatga

SEQ ID NO: 330972 - DNA, 999 bp, Pseudomonas aeruginosa
atgacgacccggaccagctttgcaacgcttctcgagcgattcttcacacagcgcctgatgcatcaacgtcaggccagcgcacacacgattgcctcgtaccgcgacacattcaggatgttgctgcaattcgcgcacaagcgattgaggaaggcgccgtcggcattggatttggaggacatcaatgcgccgctggtgacggcgttcctggacgacctggaggcgatccgcggagtaacggcgcgcacgcgcaaccttcggttgacggcagtgcattcgttcttccgctacgcctcctacgaagcgcccacgcacgctgcgcagatcgctcgcgtccttgccattcctgcgaagaagtttgaccgcgcattggtggccttcctgagtcgagccgaggtcgatgcgttgctggcggcgccggatcaacatacttggtctggccgccgcgatcatgcgctgatgctactggcagtgcagaccgggcttcggctgtcggagttgatcggcctgcgtcgcgacgacgtgcacctgggaatgggcgcacatgtccgcgtgctcggcaagggacgcaaggagcgatgtacgccgatgagcaaaaccacgcgggcggtgatgatggcatggctgcgtgaacctggcctgtctgcagaccagcctgtctttcccaacgcgcgtggcgacccactgagttcgcacggggtgcactacctgctggccaagcatgtagcagcggccagcctgaattgcccgtcgctcaagcataagcgggtatcgccgcacgtgctgcggcatacgacggcaatggacctgctgcaagctggcgtggagcaggcagtgatcgcgttatggctcgggcatgcatcgatagagacgacacagatctacctcgatgcggacctggaactaaaggagcgcatgctcgccatgaccacgccaccggaaggtaagcccgggcgctatcgacccgacgacacgctgctggcattcctcaaggcgttgtga

SEQ ID NO: 330973 - DNA, 396 bp, Pseudomonas aeruginosa
atgctccaccccagccaattcgaactccatagcgcctggatcgccttccaactgaacgaccagacgatctcgacccagttagacggcgacttcaacctgattgccctcatggatgcagcgagttgcttcatcctgggctcggcatcgattgccgcaagcgcaggagaaccatcccttttggatgccaagcgcctgctaaaggacgggcaggcgcgcgcaacccaatggcctcagagactcatcgttcctacaagcctcgccgccgacaacctgctgaaagaagcggaacgtcatggcatcaggattgagcatgtggcggaggctgaccttgaagcgctcatcggcgaagcaaagcaatcgttcaaggaatacatcaagggtcagcctgccgggtga

SEQ ID NO: 330974 - DNA, 318 bp, Pseudomonas aeruginosa
atgtccggcaaacccgcagcccgcgtttccgatcccaccgcttgtccgctccccgggcacggcagcaatcccatcggcgtcggttccgccgacgtgttcttcgacggcctcgcggcggcccgccagggtgacgcctcggcctggcgcgcttcgatgcctggttcgtccatgaggtcttctgagatgggcgcgaatcgggtcgattacggaaagacaacggacaccgtgggtttccgatcttcaggccagaaatgtcattgcggttttggcggcagcggtcagacgactgccatcagtgaaacgatatccagcaggtaa

SEQ ID NO: 330975 - DNA, 453 bp, Pseudomonas aeruginosa
atgtacgacgttgttatcgctcgcgaagcctgttttctagacaagtccatttcgcggggtgaggtcgtgtcagtccaccgcgacatggtcgctgccatgactgcccgggacaagttgaacaagcgtaagcgcgctattcatagcgagagcgcgttcatcgctgtacattctgaaaatgcgcttcgcaagggcgagatcgttgagcagctgatcgatgactacgaccgcgaacaacgtcgtgccttttgcaagcgactgatggctgcgattctttcgatggagctgacgggtaagcctgaccggctggccgatgatgcgggttactacctgcagcaggaagggctcaccctggaagagctgcgcgagcgctacgaacaggaagttcgcgaggagcaccaggagcaggtgctccagcagcaggaggccgcgcatttgggggtcatgccgagataa

SEQ ID NO: 330976 - DNA, 231 bp, Pseudomonas aeruginosa
atgtccagtaaccatgccaacggcggtattcgctacttcgtcaacgacacctcgcgcaaggcgctcgctgctgcagggcgaggccctgcgcgagcggccctggagaacggtttccgagaggtaacgcaggaagagcatcgccagttcaccgcagagaatgcccgcctgctgcaggcagtcctctcgaacgtaacgacgtacatttccctcaaggaaggggttgcggcatga

SEQ ID NO: 330977 - DNA, 537 bp, Pseudomonas aeruginosa
atgaaccagctatcgattcctgagcagcagcttcgtctgctgcatcacacgctgggccttcgccccgaccaacgcaagtcgcatcggaaccattatttggccggaccagggcattacgcgatgccagatctggaggcgctggtcgaagtgaagttgatggttgtcggccggacgccggcattctgcgatccgaccgacgtggtgttccacgtcagcgaggaaggcgagcgttatgccttgcagcatttgccgctgccaccgaagaagaccaagttcgcggaatacctcgactgggactcctgcgaaagtttcggcgattggttgcttggcgggatgaagccgaaagtcgaatggcgcgaaagcggggggaggtttgagtaccgcatgtaccgctgccggcatagcgaacagcactcggaagtgaagggagagtggtgccgcacccaaaaagacgcgaaagccagctacaagtccgccctgcggcagcaccgcgaaaccatgagccagatgcgctcggcaacgcagaaagccgcatga

SEQ ID NO: 330978 - DNA, 684 bp, Pseudomonas aeruginosa
atgaagacctccaatcagcccgccttcacccaccgtgatctctgcgacatcgcggtgaagtggctccaacggccaaacagcgccggtggtccggggtgccacgttgctgtcagtgagtgccgcacgggctggaccggggaaattcccgacgcgatcggctttcgcgccgcgggtttcgaagacggatccaccgtcattgaatgcaaggtcagccgctctgactttctcgcggatcgtcggaagtctcatcgggtgtcgggaggcgtcggcaactggagatacttcttggccccggccggtgtgatccaggtagacgaactccctcaaggatggggcctgctggaagtgaatcgacgtggccacgtcaaagccgtcgtcggcgtagccgcctattaccggtgcggctacgacgagctgcgagagcaatccgccgtatggcgtcacgaggctgatcgcgaccgcgagcaattcctcctggtgaaggtgctacatcgcgccggcaatcccgaaaccgccaaccggaacctgcagatcgccttcaccgagaaccagcgcctgaagcagcgcgtaaacgagctcaccgaagaaatccgctccgaccgcctacgccgcttctccaaccagcctcgaaacgaacgagcaacgcctcgatcaaccacgcgccccgctccctgcgaattgtga

SEQ ID NO: 330979 - DNA, 477 bp, Pseudomonas aeruginosa
atggcacgaggcgtcaacaaagtgattctcgtcggcaacgccggcggtgacccggaagtccgctacaccccgaacggcaacgcggtaacgaatataaccctggctaccagcgaaagctggaaggacaagcagaccggccagcagcaagaacgtaccgagtggcaccgcgtggtgttcttcggcaggatcgccgagatcgcgggtgagtacctgcggaaaggaagccagtgctacgtcgaaggcactctccgcacccgcgagtgggaaaaagacggcgtgaaacgctacaccaccgaaatcgtcgtcgaccaggtgaacggccgactccagctgctcggcggtcgtcctcaagggcaaggcgaagagcccgctcagcggccgcgaccgcagaccccaccgccttcgcaacaaggtactccgccagatttcgacgacgacattccgttcggaaaattgccttatctcgcgggggcataa

SEQ ID NO: 330980 - DNA, 192 bp, Pseudomonas aeruginosa
atgaacagcattaccgcgaaagaagcgtgggacttggagccgggtgacgtgatccgttgccaggaagacaactgtacccgtcaggtaaagagcacgttcaagacggacgaccaggtgcatgtcgattacaccgatgggtttggtgagagctactctccctccgatgaagtcggcctcgacaccttcaactga

SEQ ID NO: 330981 - DNA, 288 bp, Pseudomonas aeruginosa
atgaaccaaaacgaacaacatgcggctaagagcctacaggcgtcgaccttgaaagaaggtgagctgatggtgaagaaacaattcaccgacgccgaaatgttggactatttgcagcggcatcacaccctgcacaagaaggtcgatttcctttacgtggtcgatggctatgaggccgtagtgacatgggacgatgagcccatgtcgccagtttttaaaggctcaaccctccgcgacgctctagaagaaatgatgcagagcggcgacatcctcaccagctctggtaattag

SEQ ID NO: 330982 - DNA, 234 bp, Pseudomonas aeruginosa
atgaccaccagcttaaagccccggatccctcggaaaccgaccaagttgcagcagggcattctctacgcagctgctgacctggcccggttcattgtccaggttgaggacgttgccgcactgttgcgtcgtcagggcctggccgatgccgactgctcggacttggaagaaatggacaaagagcaattgcgcgtgctgcgcgatgattttggcctgcccctgcgcggcctcgactga

SEQ ID NO: 330983 - DNA, 228 bp, Pseudomonas aeruginosa
atggccaccgccaccccggatagcaaaattgcccacgcactgggcttgattgacagcgccgagcacccgatggaagtgcgctttgctacggcttatgcaactggttacatcgatgcgctgtacgacgcccagctggttgctgcgccggcagtgcagtgctatcgcgatgacgcacaaaagcgccgtgctcgccggctgacggagctgggtgtcggtgaccagggctga

SEQ ID NO: 330984 - DNA, 276 bp, Pseudomonas aeruginosa
atgctgacattcaagaacgctacagctagctacagccgtttgctggagcaacaaccaggcaaggccttgcgcattgatcgagacaacattgcgttcatgctccacggctctttggttggtttctgtgacgctgatggcgtgcttgatcccgagttgatctatgacttcgacaaatcggcttgggatgatcaacgcggttgctgggcgggagcaggcgaacagacccaagcagctatcgactctccagtattcatcgatgccccagcttttctttga

SEQ ID NO: 330985 - DNA, 288 bp, Pseudomonas aeruginosa
atgaagcgctttgatgatcgcgagacttgcttccacactggcaagaagatcagcccgccaatgatcgagcgccgccaatgcgcctgctgcggtctgcgtatcgtcaaagggtacatcgtcgagattggccatgtcggcgaggactgcggggagattatccagcgccgcaaccgcgacaaggactttcacggtggcaaggtcagcgagttcgttgagcgatacaagcgtgcgacgggctggatgttgaagcccgccgtggtcaagacccttgaagaacactacgcataa

SEQ ID NO: 330986 - DNA, 222 bp, Pseudomonas aeruginosa
atggcagtaacgggtgcgcagttcgacgccctggttaagctcatgcggggcgctgctgagagccctggcaaccgggctgcccgtcgcgttctggttgatggtgcctcgcaggccgaggctatgcgcgagactggggccagccgcagtaccgtacacctaacagtgaagcggtatacggaggcgtatgaacttatgcgcaaagttttttcgcaggagagctag

SEQ ID NO: 330987 - DNA, 408 bp, Pseudomonas aeruginosa
atgcttgcagctctttgcgagtcgaagatggtccgagccgccccccggttgattctatggggcggaatagcgatgttcctgttcattggtgccatagtggccgagggtaactcctacctgaacaaggtggggaaggccagggaagtggctgtcacccagtggttgcaagacaaccccgagggcgctgcggcagtggctcgctacaggagtgcttgtattgggaaaccagcagaacctagtaccgagggcatcgacctttccaagcccgctatcacatatgccgaatgtttcgagagggtcgcctctcctgaattcatggccatagttctggccgcagaaaactcgattccgccgccgattcttctctcctggatgtcccgcacgttggcctcccttgtcctgctttag

SEQ ID NO: 330988 - DNA, 384 bp, Pseudomonas aeruginosa
atgagtaaactgcgcagtttgtggagaaaagcgaagggttacctctattccggtagtgggatggcgatgctggtggtcgccgagtttgcacacggcgagggtgtcggagcgataggtcgtcgtgcagcaaccgaagccgatggcctgggtgtgggtgcccaagcattatttgcccttgctggtttggtaatggttggtttgtcgatcttcgagatcaagaagtacaacaaaaccgatggtgcgcaaggaaagctttccatggccgccatcctgcttttcggggggtccgctctgctttatatcgccagcagcatcgataccggttccgacaccatctggggtgaaggcggcggtgataagtcccgcgtgacgattcaacgctaa

SEQ ID NO: 330989 - DNA, 534 bp, Pseudomonas aeruginosa
atgattgatgcctcgacgatgcttgctagcttcgcgcagcagttccccggcttggagggtctgctgaacgcagtagtggctttgctgggcttgattttgactggtaacgctgtcttcaaggcgatccaagtcgataaaacgggcggccagggcatgacctggactaccccgatcatgtacttcttctgcggagttgctctcttcaactttgccgccagtatcgataccgctctggattcattatggggaggttcggtatcggtgaaaaatctcatgagctatcagggatcggcaaatatgccggcccaaacatcagagcttattggcgttatcgttctctgcctccggttatatggatacatcacttacgctcgggggtggatgagtatgcgtcggattggaagtggtcaaaatggcagcgacgaggtgttcaaaaagtcatttattcggctggtggcgggtgttgcgctgatcaatattgtcggcaccgtaaatatgttctccgagacctttggtttcggagaggttctatag

SEQ ID NO: 330990 - DNA, 915 bp, Pseudomonas aeruginosa
atgagcattgaccaggaagacattctcggacaagaaaacgaattcgaggaagaggacacccctgccgctgaaaaaaagaagggcaacaagaacgggcagctgctgacttatggagcatatgctgtcgcgctaatcgtagttggctttgccatgttcaagatattcggtccccgattcatgcacagcgacaaccaggggtatggggccgctccgatcaccattgatcaacccgttggccaagtagcaggacaatatggctaccaagggcagggctatcagccgcaaccacagcccaccgctccagcggcagccaatcagtaccaacaggcgccgaactatccatctgaaccgcagctgccggcaactgccgcagccccggtgccggaggtagtgctgcagcccgtgtctgcagtttcgccgaccgcccagttgcaacagcaagctgcagtggcgccgcaagcggaagccgttgcgccggttgcgacgtcgggccaagaaacagaatcgatcgctcaagtccagaagcagctggagcaacaggatattcagctgaaggcgattcaggaaacgctggacgaaataaagaagtcgctatcgacaactgttgcgaagcccgctccaaaagctatcgctgcaagtaagcccgttacttcccagtcggccacgcaaaagaaacagcaacagcaggctcagcgccaggttcagaagccgcagtccggatctggccagcaaaagaaatccccggcaagcatctcgctgaaggctgttctcgatggcagggcgtggttcgtgacgaagggtggggaaagtatcagcgtttcagtgggggacacgatcccgggcgtggggtccgtgcaacgcatcgatcctgaccagggccaggtgatcatgtccaacggctccgtctaccgctga

SEQ ID NO: 330991 - DNA, 156 bp, Pseudomonas aeruginosa
atgcaaggtccgctgccgctgttcgacgtgccgaaagacaaaaggggggtcagccgcggaatgttcgccgttgctgccagcaccagtaaccgaccgaaactcgatccggccgatctgccgtctccgccgcaaaacggcaatccgcgcccccgataa

SEQ ID NO: 330992 - DNA, 1329 bp, Pseudomonas aeruginosa
atgggcatgccggcagtaacaccaggccaaagcgccgtggcgccgagcgttcgtaagcacgccggggcgatccatatcaagaacgacatttcgtgcctgcagcggaaggcctggaatgttcttctgcacaacgcctacgatgactttcccgatgtaaacctgcagctgcacaccatctctgttcgcgaccttatggacctagcaggttttgacagcaagaatgtcaagtacctcaaggacgccctggaggacatggtcaccacgaagatcaagtgggatatcatcgaccatgagggtaaaagcgactggggcgtcaccaccgccctggccagtgcctcgatcaaggatggcatctgtagctacgcttatagccctcagcttcgcgccaagctctacaatccggagctctatgcgcggattgaccttctgatcatctcgcgtttcagttcagggcatgcccttgctctgtacgagaactgcgcccgttacagggcaatccaccagactccggtcctccccctgtctctctttcgtgagctactcggtgtgaacaacaccgcaagctacgatgaattcaagattctcaatcgagcagtcattcaacctgcggttaaagagatcaacgcgatctcggacatcagcctggaagtcgagctgcagcgcgagaagcgcaaggtcgttggtgtcaagttcctcatccaggagaacgtccagggcgcgttggctatcgactcgccctccagcttcaatcatgaattactgcgaaagctgcaggatgatttctgcttgaccgagacacaggcgaaggaagcccttgcgctacactccgaggatcgaatttccatcgtcatggaatacgtccaggagaagtacaccgagggcaagatcaaaaacggtgttaaaggcttggccccttacttcctacgtgtattgcgcgacggtgacgtgaaaatcgcaaagactgggctcgataagctcgtacaaggcaaaggggctggaagtcaacctgagaccaaaaccgcgcctgctggccagcagagtctgctgcaggatgacgaggctgtccgtcgtgagttcaacgccctgcgccgctctgaggtcgaacagctccttgccgaaatggaatccgagcttcgcaattccctcaacgagcagtttgcgtcgactctgactggacagcgactgctgcttaagaaatgggccgaatacctggccaaaggcgaaggcagcgcgatggtggtgaacaacttctacatgttcgtcgctgagaagctccttcctccttacgaacaatcgcttgagcagtacaagaagacgctgagcgcttga

SEQ ID NO: 330993 - DNA, 1125 bp, Pseudomonas aeruginosa
atggaaaacaacgagttcggcatcgaccagtacccattcaccgacttccagcaattgttctattcgagcaagtacgcggcagagtgcttccaggtaagccaggacatgcttgccctgatcgagaagcagcacaacctcaacatccgccgcattccacgcggcactgttgaagcgcgtggctatactctcgacgacatcttccgcatcgcttcgatccggcgtgagagtggcgtaatcaagccattccctcgccccattacgctctcggtatacgtgcagaaaggtggcacggcgaagacgactaccgcctgcaatctggcgatccagttcagtttgatgggactgcgcactctggtgatcgataacgatccacaggctgatgtcacgagcatgctgggttacgatcctgacctcacagcagctgagctggaggatgttggcgtaccagggaaccgagccgtagacggtcacatcgggaatctcatgcgcgtcggcagcacctacaccccgttgtccttggaagaagttatcaagaagccgtttggtgaattcggaccgcatcttattccggcagaagtcacgctcgacgagatggatatcgtgctgcggaacgcgaacggcagcgacttccgctactcgatcttcattgagcaagcgcgtaccgggaaactttcccactgcgatctttctgggtacgacgtgatcatcatggacaatgcaccgtccggcacaatgctttctcgcaactcaatggtcgctgctgatttcctggtctgccccatccggatggacaagttctctttcagagccctgtcgcgtcttgcattccggctgagcgaattcgccaaagacttccagcgatcgcctgagatcattgctatcccgactatgtacattcgcaaccgcccgcggatccaggccaacctggaacgccttacttccctcttcccgggcaaagtgacgcagagccccctttatcacaacgaggactactccaagagtcttgaggaaggcatccctgtttcgctgtggcgtcaggccagcgacaattccgtcggcgctttccgcaccgtgttctctgaagtagtgtcccgaatccgtgatgtcctggaggcttcgaaatga

SEQ ID NO: 330994 - DNA, 540 bp, Pseudomonas aeruginosa
atgatgaagcgcttctttgccgctgttgttctcgccgccgcagcagtacccgcaattgctgaaactggtccgaacgtgtttctcaatggcaaggtattcaaaggtgacgaagttgtcgcttcgttcgccatgccggttgtgctgggaagcactgttcccgtcaaagagcaggtcctgaacagctatatcgagcgggccctcgtcgacggtaagaaggtcaagctggtacctggtcaagtcgcaactggtctcgacctgcaggtgacgccgtcgtcgatcgccggtgatcgggtgatggtgatggtcaagggttcgctcgccgagctgaagggcttcgacaaagcgcctgtggcggggaccgacctgcacattgatcttcccaagctaagcaaaaatgagttttctcaatcgttcgcgatcgagaaagggaaacccctggagtacgccttcggcgggaattgcactgcagctttcctggtcgatgacacgcctgctgattgcacccacaaactgattctggaagcttcggtctataactga

SEQ ID NO: 330995 - DNA, 366 bp, Pseudomonas aeruginosa
ttgcctttggaacgggggaaagagatcagttatctcgcggttcgatctttcactgatgcagatgggcaagtcactttgacgccggccaaattcaaagagggcatgacccttgagctgacacccagtgttgagcaagacggcaatggtgtgatcgcactgacaggctctgaggtcaaattcttgggcttccagaatgtcgcggatatgcctggagcacagaagcccttgtacgtgacctccaagttcacgggagagggtgaggtgaaggatggtaaggctgatgtgccctttggcaattgtgccctacgtgacggcaagcctgtgcaatgcgagtacacgctctctgtcaccctcaagaaagcctaa

SEQ ID NO: 330996 - DNA, 432 bp, Pseudomonas aeruginosa
atgtccgtataccaacgcttttacgtcaagacgaaggcgccgcgacaggtagagcagctgatcgtagagacgctaggtggcgacggttggcttgagccaaacgacaagggcgagttacttcaccctgttagtcttctcatggaggggcaacacagcatccgtccagctcgggacgtattcggcaatctggtggatttgggtgccagtgaaagcacttcgatcaaatggtattacctaccctcgatcctcgaccttggcagtgtcgaagctgctcaaattgctctcgcgctttacaaatctccacttgtagagatggttgcagaggataacgaggttagcgggaatgaggacgatgctgtcgccacagtgatcggctctgaccactacctactacttgccccggccaaccgcggccagcaaccgactagttaa

SEQ ID NO: 330997 - DNA, 723 bp, Pseudomonas aeruginosa
atgatccacgacgagcgcaccgaccagaccttcgactaccgccgtcgcggcggtgtcgtcggtgtggcgatgctgctgccggaaggggtggcagcgatggagtcggccgagctgtggaacctggccgaaggtgccgagaagcggaagaacgcgaccgtggcccgtgagctgctggtggccctgccgcacgagctggacacggcccagcggcaagcactggccgaggccatcgccggcgacctggtgaagcgttaccaggtcggcgcccaggtggcggtgcacctgcccgacgccgagggcgacaaccgcaaccaccacgcacacatcctgttcaccacgcgccgccttagctcggacgggctgggcgagaagacccgcgagctggacgacctcaagcgcggcccggaggaagtgcagtggatccgcgccatggtcgagggccgcaccaatgccgccctggaggcggccggccacgccgagcgcgtggatcggcgcagcctggccgacaagcacgccgccgccctggaggcgggcgaccaggtgaaggcgatggagaccgaccgggcgccgaccatccatgacggcccggcgatcacggaggcccgccgcgaggccgagcgccggggcaagccggcgcccgacctggacaagctggcccggagtgatcagcgggagctagcccaggtcagcgccaagatctacgggtgggaggctgccacgtga

SEQ ID NO: 330998 - DNA, 774 bp, Pseudomonas aeruginosa
atgaagaaagtgatgattgagcgcctcgcgaacctgattcgccgcgcccccaaaaacgtttcggttaaacgtaagcgtaagcggctgtcgtttgaaattaagacgccggcgtatcagttgcataccctgagcctctctgactatggggacggctcactcagcttcattctagaaaaagaggccgacggtaatctgtttgtggtggccaagtccccccagacatacggtcctgataaaggcgacatgacctcgctgtttcgagcgcaagttgcgagtgaggccgagggtgcctatatgatcactcaagtgaacagtctcctgaccaagaagatctcgatgctgaagttggtgggcggtgcactgctcgcctggttgggctacctattcgtcagcgcctactgggaaattacttccgggcaaaacagtgcagtaagtccgacggctctgtcgtcccttcaggcccccatgccggcactgccccagcctctggaaccgcatccctctgttcagcgtgagactccattctcgatccccgaagcctccaatgcacagcctctcccagtgctttcagacgcgagccctgaagacattgccaagcagatctacaacgctgccgaagctgctcggaagcaagggatgcgcgacaacgccccggcaatgtcgagtgatgtcgctactggtctggaagccttcggactggctccaagcatcgatgctgggcagtcggtagggcccggctgcgatcccaagctcgctttccaagtcgctgaataa

SEQ ID NO: 330999 - DNA, 6081 bp, Pseudomonas aeruginosa
atgccaacctggatcgacctttctgaacatgatgtagagctaaacgtccaacaagatccagaaggcaagtcgcttgtcctgcggtcactacctgggggagtgatcccccagtcggtaacggagctgggcttcgagaaagttggagccctctaccgacgcaccaacctccgcttcaccttccccgaaatcatccgccacttccccaaggccaggtcgcgccagatggaaatgtcggagatattctacgttcccaccccgagcaatcttgaagctgtttcagccgccgcgggacaaaacgccggcgtcgaaaaggccccctggcagatgagttcggcagagtggatttccgctcgacgcgagctcgccacgccgatgaaggtttccgcgagttccgaatctgttcggattggcaggctttccgagctttcctacggtgttgcggcatggcggcatcagcgtgcgctcgccggcgaccgagaggccatcgcggcgctggaagaggccgtaacgcattacgacgtggtgatgaaagctctctcggagggcaagcaggtccctttcgatgtggttgccgagtacccctcccttctggatccggagccagatcagtcacgcacaatcgctgcagctgcgcctgaacagtcacctgtcgcagctttcatgcttccgtcaatcaaatcggcacgtaagcgcactggccctgcgcgagtcgtcaaggctcatgaggtggccaagtttggccgtcgcggcatggtgtctgagtaccttgtggtcttccaggacggtcgcttcccctgcagcgttgaggcgctcgaccgaaagcaggcgatcgacttcgcccaagctgagcgtcgtcgtctcgataccacagagcagccggtagatgcctctcctgcagcacctcatcctcaagaccagatccaggcaacatcgatcgatgacgcttgggagcccgagcgcgttggcgctgctgcggacagcagctcgatcgagcccgcagaggcatggctggtatcccaacatcaattcaagacggtcgcggtggccaagaggacctcggacggaacagtggaggtccatttccgtaaccagtcattcgcgacagaccagactagccccgccaaagcgctgaccgcagctcacaagcaggctgttcgcgaggcattcgtcgacggcaagcaaataccctttcacgtcttggtcgactatcccgatgtcgcctacggcccaggcgaacgggcagcccggtccgtctctaagctgctatctgaggctggcctggcagagcggctgatgacgggattcaacagctacgtccgactcgtcaatccgccctacacggatctcattatcgagcggctgccggcggaatcgtcgccacgtctctgcctcactcactacctggagtcgaacggggatcgtttcatcgatagcgaaatgattttcgagatacgccccgccggtcaccttgtcctgtgcgagaccgcagtgcagaacccgatccgcggcggagaactgcggggccttgaccgcagcttcgcgaacatcttcgcccagaacctccttcagcaggggttctccagttcccgactggaatggtcggatgatgccgatgaaagcctagaagacggccccgagaatcgccttcacgaggggatggccatcgttgaaaaactcgccgccgaattcaacgcggaagtctcaccttgggaggagtctggcccgtccaccattggcaaatggcgctacaccacactggtccgcgaagaagtgtctgtccgtatcgctgtgtcccaagggggggtggtgcaggtcaacggcgatcccttcaccaaaggtgaaagagttctccacgtagcggcggaggccgtcagggagtccctggttgactccttcaatcttaaaagcacaggcgcaatctcctcgcccgtccagctgtccccttatgaactaggtcgacgggctgcagaacagggcatgaagtgcgttccagcctgggataaggatctgatggcaacgctggggggcaacgtaggcgatggcgtacctgcgatgcgcgaatggatgaagggctggcacgagatcaatgcgcagcgtgaggtactgcctcggcctgaaacgaccgccgatgcagagccagctgatatcaccagatcacgcattttgctgcgcttgccatccaccgcccccaccaggctccctctgtacgggatcaacacgaggtacgaagctacgcgctattcgctccccggcgatttttacgctgagacatccttcaacggctaccggttcttcgccccggccgagcactatcgctcggccgatttcagcagagccgagcgcgacttgtatgccgctcataagcgtggcgaccacaatgcagtcaaatccgcccggcaactcatggcctcggaaatgacggagatggtcgccgccgcacgggctacattgccacaagatgagctcactgcgagcacaattcaggcgggcgatcgagtccgcttcactccggccgatgcggcaaagcagccggtcacaggggtggtgagcaaggttctggaaaactcggcgggtgacaaaggcttcgagctaattcgggatgcggccgaagcgatggtggaagtcgagacgtgctgggtagctgacggatccctgcagttcctgccgcccgcggatcctgtagaagcatttcaagctgctctggcggtggcgaggaaggaggtcgaccccaagcgccgggttcaggcactcattcgtgttctttgcgctgacagaggagttgtgtcccaaggagactgggttgcccagctcgccttgagcgccgacctgccgacggaccaggcccagctggtgacgctcatggagaaacatctaccctctcccgcctcattcaacatagccgtaggtctggaacaatttcaggatatacccagcgagcccaaacggctggcggatgcggtgaggcgactgggtgataacctccgggggttcaaagccagccatctgcgaaaaactgcagcgcggatcgaggacttgcgcaccatcgcccctgagaacgcgctggccatcgagatgctagaaagtgctgcaaccaccgtccaccaagcggaaagcatactggtggacctggagaccaggatcgcggcagccaaggccgaagaggaggagcgcaactgggaacggttcgagccattcggggcccaagccgtgacgaaacctctagcgtcggaaatcggtttcaccaaagcatggatagacaaggataacggctggttccaagtccggaacggagcttctgtcgcttggaccaacggccacgtattcgatttggaagaaccgaactaccgcggcttcgagaagaacgagagccgtcgcttccagaatacgcctctggcgaaacggccggacatcagccgttttctggagcatgagaccgctgacgcgatgaaaccggtcttcgtgtaccgaaggatgcacgacgacaaagatgccgtgatcctagcgaggtcctcgggccgcctcgtttcactcgacaagcgctatcacgactacattgcggtgaagtacccaggggccgtgttcttcgtagccaatgactgggaaatcgatgctccgaaccacggctctcttgtgcatgcgaaattggatggccaaatcgtcgccggcgtgatgccgctacgaggattggatccggcctacacggtcgacctcattcaagccaagattctcgctgtcacccagaaaggggcagtgggcgaacaggactcctccgaggtcgagaacctggtatatgaagctgaccagcgggtaaagggccgggcgatggccaccgcaatgatccaggttgctttggacgagggccgttggtacagcgcgatcacaactcatcaccaccagggtaaccatagcggccgatcggagccgatgacttgccgaggggacgggtttacctctcgattcgacgccgtattctatgccggcaaccggatcgtcctggaacagcgtcggatagctcgatcacaggacagcgtcacaacgcccagacagaaggccgaagcgctgaaaatggcagattgggcgctgcagcaaatcctcggcgaggtcgctgtctcgtggaatgaccgcactccaggacagggatggtacgaggctcgccgtgaaggtcctgagtacgccgagctgcgcggttctggcctatcggaagcagacgcactggatgaccttcgagagcgaatcgaggcctcgctcagccaagcagatcattactggaagtccattggcagcaacgacgccggcgaatctcttgaagagaacaccctgggtattcgcagcatcgtcaaggacggtgtgcggatcaccgaacctgccgccgcgttaccgcacggaggccccggcgttctgcaagatcgtcccaagaatttcctgacgaaggatgaagcggctccatcggcgctggccacgtcgccagagagcagggtggacccgggagcgacgcataagatcggtgacctactcgacaatgcaacggtccacgtgctggtccgtggaacagctgtctccctcattcaccgcaagctgtcgaagtatgacccccgccgccaagatggcggcacggattgcttctgggcaagagcattcatcggcggggaatggcgcccgctcgggcagccctggcccaaaaaaccgagtcagtcttcgcttgagaccgccttggctgtagcggcatccgccccagcattcgacagcgacgccttcttcgtccaactgaatgaggagatccgccaggcgaacctcggcgccgacagcacagccgagatccagcctcttgaccagagcaagttccgggcacagcgcctggacgatcactcctacgagttgcgcttcaaggaccgcgcatcgccgttcttcatcctggtggaataccagtcgcctggcacctacttgccgaataccgaaggaggtgtgaccggccccaaaactagcctttcatccgcctgcgcatgggcagttcgcgaactggaccgcctgcaagcccactacgagcgtagactgcaggaacagaacaaggacaaccctcgattcgatatcgacgcaactagcttcatggagctcttcccggccgacagcgatgaccaccagctgctcgaccacgtcctgcagatgcaccaacagaaaggcatgcagcgccgcatcggccaaggccagcaccaggatgcagatctgccagcggagcttcagctgatccgtaccaccgagcagtcggttatggttaggctggacgatcccgactgccctctttcgatcgagctccgctgtgctgtcgaagcatccggacgtcggccgtgggacgcactgcaggccatccagcaggctgtcgcagcactacagacagaaacagcctgggcgaggttgaagaatgagcgaggcgacgccggcatcgagatggatcgtgtcgctcaaggctatgccgagttcatgagggcgcaggatccggatcgccacagcgggatccccggccggatgcaccgcgagtttgccttggcgttgatcgacaaggacatcgatcatttgttgggctggctggctcggccgcgggggcaaaacgatctatccaaacgctacttcacacaggtaacaggcatcaaactagccaagactgccaaggagatcaccatagcgatctatggatgggcaggctactcgcccgagcaggcctgccagatagaagcggaaaaacaacgtcgtcgcgacgcagccgctcagcaacgcgctgctgagagccacctgcagcacgtgctggctcagcttgatcgcacgcactaccgtcacaacggaaccgtggtaaccgctcgccagttcgtcgacgacatcgttgccgacggcttcgactcattggaggcgaagcgagtaggcgccgtcgatcgctatcggttggtcaatcgtgccgaggaccggctgtacgagatatccggccacctggtcgactatgcacgacatgtgcttgctgaacgtgggaagcgattgaatcttgaggcggctgaagagccagctgcagaaccttcccgcccgcgcctgggttga

SEQ ID NO: 331000 - DNA, 1494 bp, Pseudomonas aeruginosa
atgggcgaagcggcgggtggcggagaagatcggccccggggcgaggctgatgccctgggccagggccagttggaacaggcgcagcgagtcgaccgcctcgggcaactccagccagaggaagtagccgccgctgggacggctgacccgggtctgctcggggaagtaacgcgccaccgccgcgagcatggcgttctgctgggtctccagggcgtagcgcagcttgcgcaggtggcggtcgtagccgccgtgctggagatagtcggcgatggccgcctgggccgggatcgacgccgacaggctggtcatcagcttcagtcgctcgatctgctcggcgtagcgtccgccggccacccagccgacccggtagcccggcgccaggctcttggagaaggaactgcagtgcatcaccaggccttcctggtcgtaggccttgaccggtttcggcgcctgctggccgaagtacagctcggtgtagacgtcatcctcgatcatcggcacctggtggcgcgccagcagctcggcgagggcgcgtttcttctcgtcgtccatgctcgcgcccatcgggttctggaagttgctcatgaaccagcaggccttgatcggcaggcgctccaggctgtcggcgagcacttccaggtcgatgccttcacgcggatgcacggggatttccaccgccttcagcttcaaccgttccagcacctgcagggtggcgtagaacgccggcgcctcgatggccaccaggtcgccgggacgggtgaccacctgcaggcagaggttgagtgcctccagcgcgccgttgctgatgaccagttcttccaccggcagcagcaggccgccgaccatgtagcgcagggcgatctgccggcgcaggccatggttgcccggcgtcatgtcggcgaccaccgactgcgggtccatgtcgcgcacggcgtgggccatcgagcgcgccaggcgcggcaggggaaacagttgcgggctggggaacgccgagccgaagggcacggtgtccgggtccttgatcgaactgagtacggagaacaccagctcgctgacgtcgacctcggtggcgtcggcctggcgcgggctgatctccggttccggcagcggccgctgcacgtgctggcagacgaagtagccggagcgtgcgcgggccatgatcagcccacggctttccagcaggtagtaggcctggaacacggtggaagcgctgaccccgtaggtacggctggcgtgccgtaccgagggcaccttctgcccgggggcgaggacgccggtgcggatcagctcggcaatctcgtcggcgaatttctcgtagcgcttcatcttgtcctggccgctgtcctggctggccgtgggcacggccgctggcgcccactctatgcgcgccgggaccgtgttgtcatgcctcatcgcggcctcctcagcgcgccggcgaaacgaaggtgctggtgctgccgaccgccaggctcgggtcgtcgatgccgcgcaggctga

SEQ ID NO: 331001 - DNA, 753 bp, Pseudomonas aeruginosa
atggctagagaaatagaatcattctcagtatgggcacccaaaaaccttcatgcggaatccgatatcgcctgggtacaaaactacctgcatgaaaaaggagaaatatctctccatgggcctgtagatttagatcgacttattagagcgggagtacaactcgagaaaagcgactcaggaagaaatgcccttagacagttaaaggctgcctataggacaaggaaaagcaggagtgcggaggaaagatcaagcgctggagacataaaacctgcagagcaaaaccttccctctcaaaataagaatcacaaagtcctaataaaattagccaatgaaatactaaagtccgaagaatcacttaaacaaaaatcaaagaccctagaaagccagaaaaaagaattaaaagagagagtatcaaaatctcaaaaaatcacacaaaaagccctcaataaaatagagaaaatagaacgaacgcttaacacccttcgaggaaaagaaccccacaaatcagaaatagaaaaagtcatactgaacaatgaagaaataaaagaattactcgtagacatactaaatgctctagatccacgccctatcaaaagtcgccctttaagaaaatcagacataacgagacatgcaaacagacaaaaactaaaaaccaaaattccagaaaccccagaaactaaaaataaaaactccaaaagcatcccaataacagtgcttgaactaatagacaaaataaataagcaaatcgcagagtaa

SEQ ID NO: 331002 - DNA, 951 bp, Pseudomonas aeruginosa
atgaccaatcaaacagccaaacatctctcccaatccgacatcgctatccagatcgaacgactcgtgaacgcagtgatccgtcacgactgtcctgcattcaggatcagctacgacgcacaaggggatgaggtcatcgagaggaccaggctctctcggtacttcgatcacattcgacagatgtaccacctggtgcatgacgagacgtacgccttgagtgagcacctgctcgcattcaaggaggcttgctacgacattggcatcgagttcgggatgttcgggatgacgtgcatggacgagagcgagggagggctcctatcagaggcccagacctacaactggcttgtggagaggatccgggagcacgtacagaccaagtggttcaagcgtgggaggaatgaccgtgcttatcgggagaaggggaatcggcagacggtgactgaatacgtggagcgggtgctggatagccgttcacgcactgtggtggtgagggtgaatctgtactaccgggagtctgtacgcagtcgcctgaaggtagaagacgtcttcgaggatctggataggctgatccgggcgagggagcacgatccgatcttccaacatgagacaggctacatctgcgcagtggagcagggggaggacatgggttaccacatccatgcggcgttcttcttcgatggccgggaggtgttcaaggacatcttcaaggctgaagccattggtgcgctctgggagcggatcaccgaaggctgggggtacttccacagctgcaaccacgagaaagaaaagtatgaggatgatcgtggggtagggatgttcagccgtaaggacgcagttggtaggcgcaatgtgatcaaggcttgcctctacctgatagaggatggccaatcgttgcgggtgaagccagtgggggcaagggcgttccgggttggtcgcatccttcgcggttactaa

SEQ ID NO: 331003 - DNA, 282 bp, Pseudomonas aeruginosa
atggcgtccgaaaaaaatggctacgagtggaagcttcaatccaaggacatccgcatcagtacctgcgcccatttgcagaatatgagcctattttcgacacgctggggcagcgaaacgctctacgtaagccagacaggggaatcctttgcggagctggtgctcgaagaaggcacctggaaacacatcgccgctaacgagcaaggcaccctgagcgtctactcgccgaacaagcatgaaaccttcctgcgaagtggcaactacatctgccagccgaaagcgtaa

SEQ ID NO: 331004 - DNA, 252 bp, Pseudomonas aeruginosa
gtgccagtgctcacggtcgaggctccgatagagccggtcgtcgttgtcaactatcagccaggtggtgccatcggtcttgatgtgctgaatcttctcgggatcacagggcgggtgctctacctggcgccactcaatactgaacagatgatcatggccgtccttttcgataacgaccgactgtttggccaatttttcctgctgttgctggtcgagccgttcggcgtgctgtttttctttgcgttcaaccactga

SEQ ID NO: 331005 - DNA, 240 bp, Pseudomonas aeruginosa
atgatcgactggagcaaggtaaagaccgccgaacagcaggcgcaagagcgctggcaggctgagtacgatgccgcggccgtggctcgggcaaatgcctaccgcttggagagtgacccgctcaagaccgaggctgaattcgatgcgatcaaggccggcaccgagccggactactctgcctgggtcgccaaggtcgaggagatcaaggcccgcttcccgttgcctggtccactacccgaatag

SEQ ID NO: 331006 - DNA, 303 bp, Pseudomonas aeruginosa
atgatcatcaagttgtcaccgtttgctccgctgccgcgacgcgacgagcgcctgtcactgagcagggctggcgatgtactcaccgtgaacggccaggcgttcgacttcgctccgctcccggagggcggcgagttgccggccgaggctatcaggtcggagtggttcgctggtcccgtactgcgacgtgccggccggttggagctgatcctgcggttcccgcttgccgtcgatgccagtgccgccgcttgcttccctgaaccgttgctgatcgaggccgatggcccggtggagttgccgcgatga

SEQ ID NO: 331007 - DNA, 303 bp, Pseudomonas aeruginosa
atgtccgagatgaccgcaagcaaggttgtgaaagttggcgaggtggaagtgatcgtccgcgaactgagtgtttcggatgttcggaagctaatgcaggaggtcagtgatcaagacctcgtcagcaatgtcctcttcgaagatatcaggctgtccgatctttgcctgatgacatcggttacggagagccaaattaacgatctccggccgagccaactcgccaagttgctggatgcatgcaaagaggtgaacccgcattttttcggaatgctgggccgtctcacgaaactccgcgacaagccttga

SEQ ID NO: 331008 - DNA, 237 bp, Pseudomonas aeruginosa; identical to SEQ ID NO: 327146

SEQ ID NO: 331009 - DNA, 906 bp, Pseudomonas aeruginosa
atgaacaggaatgagattctccatggaaaggcggagctcaatttcctagaaaaattgagcaagcgtccaggtataagcaaaatctctgcacgctccctagagtcgcggatgaagcgaactcaagaccgaatttctgccacatcggagaatacccccaggcctgccaaggtaatcctaacttataggggaaagcctgtttggggcaccttgggcgtgcaagcagacttcggaatgactgcgacagcagcctttaacgaggcagtagcgactgttgctgcctctctgacaggcaccttgaataatatgggacctattcccaataggtcgagtaatcagcttctcattactggaacagcgataggctctttcgggttcgagctgcaagaagccccgagcgaatcacttcagcttcaaatcgaagggatgtcgcccgtagcagaagcgctagagctcattgccgaactgctcgaagcatccaccaagagcgatgaggagctatctgagcctgtgtcaaagctgcaagatagagccttggtggcggtatctgaattcctagacaagctaacctcaaacgacgctgcttgctctattactacgagatacagatcatttagattttcagatagcaatcaggttctaatcagcaagtcgagattaagcaaagataatataaaggaacttgactattccctaaccgggatattcctcggagttttccccgataagcgcaccttcgagtttaaaacatcggacgataaggtcattcatggaacaatttcgcgtgaaatcgaaaatccagcggccattaaccggaacctcgaaaaaaatgtcgtgatcaaagttcacacgcgacaggttggtagcggcaagcctagataccaattaagggaaatgccgttgttctaa

SEQ ID NO: 331010 - DNA, 369 bp, Pseudomonas aeruginosa
atggacagccacaaaccgacacaccccccggagcagttgctcgatgacctggagtcgatccacgacctgctctacgaacggaacgagccgcccttgctgaccgaatccttcgagccggacaacattcccctgctctccgacgtcgtctcccccggtaccgccccgcgcgcgccagagccgcagaccgcggcagccaccacggcagggctggcgcccgccgaacaggagcgcctggacgacgagttgcgagcgtccgccgaactgatcctgcaggaagtcatcgacgacttcgccccgcagatcgaagccgaactgcgccgccgcctgcaagcccgcctgggtcgcctgctcggccaacgcaacagctga

SEQ ID NO: 331011 - DNA, 813 bp, Pseudomonas aeruginosa; identical to SEQ ID NO: 319697

SEQ ID NO: 331012 - DNA, 924 bp, Pseudomonas aeruginosa
atgcaacgactgaacgtggaattccgctccgagggtgtcgccctgcgcggctggctgtatttgccggaagcgcgtgccgagcggccggcgatcgtcatgacgcacggtttttccggggtgaaggagcagtacctgggccgttacgccgaggtattcgccgccgccggcttcgtcgtgctcctctacgatcatccgaacttcggcgacagcgacggcgagccgcgccaggaactcgatccggtgatgcagcgtcgcggctatcgcgacgcgatcacctggttgggcgcccaggcccgggtcgacgccagccgcatcggcatctggggaaccagctacagcggcggacatgtgctggaagtggccgcactggatcggcgggtgaaatgcgtggtggcgcaggtgccgaccgtcagcggccatgcctcggcgttgcgccggacccgcgccgagcagttgccggcattgctggcaagcttcgacgcggaccgccagcggcgcttcgagggcttgccgccggcgctgttgccggcggtcgccgcgagtcccgacgagccttgcgcgatggccggcgcggacgcccaccggttcttcaccgacagcgcggcgctggcaccgaactggtgcaaccgggtgaccctgcgtagcgccgagctggcgcgagagaacgagccgggcattcacattgggcggatcagccccacgccgctgctgatgatcgtcgccgaccgggacctgcttacgcccacggacctttgcctggaggcctaccagcgggcgttgccgcccaagcggctgctgatgctcgccggcggccatttcacgccgtacatcgagcatttcgacgccaccagccaggctgcggcagactggttcgtccgtcatctcggagagggcggcgagcagccagcgacagtcgtcgaataa

SEQ ID NO: 331013 - DNA, 1119 bp, Pseudomonas aeruginosa
ttgatcgttttccgttatttgtcccgtgaagtgctggtcaccatgagcgccgtcagcgccgtgctgctggtgatcatcatgagtggccgtttcatcaagtacctggcgcaagcggcgcaggggttgctcgaccccggttcgctgttcctgatcatggcgttccggattcccggcttcctgcagctgatcctgccgcttggcctgttcctcggcatcctgctggcctacgggcgactctatctggaaagcgagatgaccgtgctctcggcgaccggcatgagccagaagcgcctgctcggctataccatggccccggcgctgctggtggcgatcctggtggcctggctgagcctgttcctggcgccccagggcatcaaccagttcgccctgctgttgaacaagcaggataccctgaccgagttcgacaccctggtcccgggccgtttccaggcaatgcgcgacggtacccgggtgacctacaccgaggaactgtcgaaggatcgcggcgaactggccggcatcttcatctcgcagaaggacctcaacagcagcaaccaggaacgcggcatctccatcctggtggcggagaagggcacccagaacatccaggcggatggcagccgttacctgatcctgcacaacggctaccgctacgacggcaatcccgggcaggccaactaccgggcgatccagtacgacacctatggcgtgatgctgcccaagcccgaggccagcagcgaggtgagcgagcgtgacgcggtgcccaccgccgacctgttcggcagcgacaacccacgctaccaggccgaattgcagtggcgcctgtcgacaccgctgctggtgttcgtggtgaccctgctggcggtgccgctgtcgcgggtcaacccacgccaggggcgcttcctcaagctgctgccggcgatcctcctttatatgggctacctggccctgctgatcgctgtccgtggccagctggacaaaggcaagatccccatggccatcggcctgtggtgggtccacggactattcctggcgatcggtcttcttctgttctattgggaacccttgcgcctgaagctggcgtcctcccgtgccggtcgcgaggtggcgcatggttaa

SEQ ID NO: 331014 - DNA, 1068 bp, Pseudomonas aeruginosa
atggttaagctcgatcgttacatcggtgtcaccgtcttcgtcgcgatcctcgcggtgctcggggtgatcctcggcctggcgctgctgttcgccttcatcgacgaactcaacgacatcagcgccagctacggcatcggcgacgccctgcgcttcatcttcctcaccgcgccacggcgcgcctacgacatgctgccgatggcggcgctgatcggctgcctggtcggcctcggcaccctggccagcaacagcgaactgaccatcatgcgcgcggccggggtatccctgtcgcggatcgtctgggcggtgatgaaaccgatgctggtgctgatgctggccggcatcctggttggcgagtacgtcgcgccctggaccgagaacatcgcccagagcggccgcgccctggcccagggcggcggcgattcgcaaagctccaagcgcggtctgtggcatcgccaggggcgcgagtacatccacatcaacgcggtgcagcccaatggcgtgctgtacggcgtgacccgctaccgcttcgacgagcagcgtggcctggaatcggccagtttcgccaagcgcgcgcgcttcgagaccgatcactggcaactggaagaggtcaccaccaccttgctgcatccgagggaaaagcgttccgaggtggtcaagctaccgaccgaacgctgggatgcccagctcagcccgcaactgctgaacactgtggtgatggagcccgaggcgctgtctatcagcggtctctggcagtacatccactatctcgccgaccagggcctgaacaacaaccgctactggctggcgttctggaccaaggtcctgcaaccgctggtgaccgccgcgctggtgctgatggcgatttccttcatcttcggtccgttgcgctcggtgaccctgggccagcggatcttcaccggcgtgctggtgggcttcgtcttccgcatcgcccaggacctgctcggaccctccagcctggtgttcgacttcccgccgctgctggcggtggtgatccccgcctcgatctgcgcactggcgggtgtctggctgctacgccgggcgggctga

SEQ ID NO: 331015 - DNA, 498 bp, Pseudomonas aeruginosa
atgccgaaacacatgctttctccccagggcgactatgcccctgccggtctgatccgccgcctggcggcgatgttctatgacttcctgctctgcgtggcgctgatgatggtggtcaccctggtctaccagcaaggcatccttcgactgatctacggcagcgaccatctgcgcgaactggccgaccgcggcgcgctgatcggcgacccgctgctctcgaccttgctggtgttcgccctgttcggcttcttcgccaaattctggacccacaacggccagaccctgggcatgcaggtctggggactgcgcgtgcagaaccgcgacggcagcgccatcagcctgctccaggcgctgctgcgcttcatgatcgccatcgcctcctggctgtgcctcggcctcggcttcctctggatgctctgggacaaggacaagcgtacgtggcacgaccgctattcggagagccaggtggtcaggctgccgaagaacactcacaagaagtga

SEQ ID NO: 331016 - DNA, 1581 bp, Pseudomonas aeruginosa
atgccgattccggtgaagcgagccaggagaaaggcgctccggctgtcgttgtccgtgctggtcggggtgatgccgatcgtcctggggctgctcatcctctactggcaggccgagcgaagcctccaggagacgtccgagcaggcagccgggaatgcggtgcggcagttcgaacggatgctcgacaacgctgcgttggcggcgcgcaaggtcatgccggtggcggggcgtccttgtcccgaggccgagctggcgctgcgcgagcaagtggcgatcatgccgttcgtgcgctcggtcaatttgacgcgcgacaatacgatctattgcacgtcgttgttcggcggcttcgacgagccggtgcggatcgagaactatgtcgacggacgcctcctgctgatgcccggcaaccaggtcacgccggacgccgcgctgctggtcctgcgggacttcgacggcaagcgcggggtattggcggcgatcgacgggcgctacttgagctacgtgctggacctcgtcgaccgacgtagccgccaggtgctggtggtcggtcccaattggctggatgccgagggccgcacccaccgcgacgcgccgcctacctatgaggtcgccgccgtatcgctcgcttcgcagcgttatccgttgcgtgtgctgtcgggcttccccgagggtgaggagtggcgatcgattcgctcgcagaacccggcgatgttcggcctgctactgttcttcggactgctggccggcactctgtgctactggctatccaggcgggtcgcctcgcccagcagcgaactgcgccgggccctggaggccaacgagttcattccctactaccagccgctgagtcccggccagggcggacgctggataggcgtcgaggtgctcatgcgctggcgtcatccgcgcgagggactgatccggcccgacctgttcatacctttcgccgagcgctcgggactgatcgtaccgatgacgcgcgcgctgatgcgccaggtcgcggaagacctgggcgggcatgccgggaagctggagccaggcttccacatcggtttcaacatcagtgccacccattgccacgaactggccttggtggacgactgtcgcgagctgttggcggcgtttccgcccgggcacatcaccctggtcctggaactgaccgagcgcgagctgatcgagtcgagcgaagtcaccgaccgtctgttcgacgaattgcatgccctgggagtgaagatcgccatcgacgatttcggcactggacattccagcctggcctacctgcgcaagttccaggtggactgcctgaagatcgaccagagcttcgtcgcccgcatcggcatcgataccctttccgggcatattctcgacagcatcgtcgagctgtccgccaagctcgacctggatatcgtcgccgaaggcgtggagacccccgagcagcgtgactacctggccgcccgcggggtggattacctgcagggctacctgatcggccggccgatgccgctggagagtctgctttccagcctgactgtgcaggaagggcagggggcttccgtcgtcgcacttccggcggaccgaggctag

SEQ ID NO: 331017 - DNA, 957 bp, Pseudomonas aeruginosa
gtggcaaagaaaggcgttcgagactccggcaccttctccaccaaggccgaggcggtggcctgggcgactcagcgggaggccgagattctggcgggagttgggagccccaaaggggcatcgaacttcactctgaaagaggcgttggagaaatacaaggacgaagtctcacccactaaggccggcaaacgctgggaagagatccgactcgacaagctggtcaatgacttggaattcgtcggcgagcgcatctgtgatatcggcgccgatcagatcgcagcatggcgcgatcaccgattgaagtcggtggccacgtcgtctgtgcgtcgcgaaatgacgttgctgtcgagcgtgttcgagcaggcgcgccgggagtggagatggtgcccgaccaaccctgttcgcgaggtgcggcgcccgaagagccggccgccgcgggacaggcgcatttcggctgccgaggaaaccctgatccttgaggggcttgggtatcaggagggggtagcgccgaccggcaagatgcaggagcttgcctacgctttcctgatcgctctggagacagcgatgcggcagggcgagatcctcggcctcgttgctgctcgggtccacttgagtgcccgctacgtcgaactggacaagacgaagaacggcgatgcccgtaaggtgccgctcagttcccgtgcggtgaccttgttccaagttctggtagatgctgccgggaagcgccagaacctgtttacgctgacgtccggctcggccgataccctctttcgaaaggtgcgggacagacagaaaatcgacgggctgaacttccacgacacccgtcacgaagccaccaccaggctcgccaggaagctcgatgtgctcgacctggccaggatgacgggacaccgcgacccccggtcgctcatggtctactacaatgcgactgcaacagaggtggcgagccgcttgggctga

SEQ ID NO: 331018 - DNA, 312 bp, Pseudomonas aeruginosa
atgcgtatactcgttattgcagcgctgttgatcaccctggctggctgcgccagcaacggaacgccgattgaacaggatgacgtccgccagatcgttcaaggtcaaaccacctacgaccagatgctggagcggttcggaaacccgctttcccagtctttcgactcccaaggaaatctccaagcgatttggttctacgtctatgtcgggccttttggcactggcatggagcagcagaacctcacggtccttttcgacaaggaaaacagggtcaagcgatacgtgatgaccaacggccgacccgggaagcgctga

SEQ ID NO: 331019 - DNA, 432 bp, Pseudomonas aeruginosa
atgctgtccgatggcgtgttagacgctgatgagtctgccgaactgcttgagattcttagagggtttggtggcctctctgcttccaagccgaaaccaagcgacaatgcctttacttcatcgaatgctcttccgctcaacaatccagctcccaagcttgagtggtcgggtcatctctacgttttcactggagtcatggtctacggccccaggaagcattgcgaagagatcgtcgtcaaccgcggtgggggaatagctccgggcatcagcaaaaaggtgcattacctggtcgtcggcgagataggcaacgagcagtggcttcacagcacctacggaaccaagatcaagcgagctgtcgagttgcgcgaggaaggccatcccatagcgatcatcagcgagaagcactggcaagcctcgatgttcaacctggtctag

SEQ ID NO: 331020 - DNA, 906 bp, Pseudomonas aeruginosa; identical to SEQ ID NO: 331009

SEQ ID NO: 331021 - DNA, 303 bp, Pseudomonas aeruginosa; identical to SEQ ID NO: 326359

SEQ ID NO: 331022 - DNA, 342 bp, Pseudomonas aeruginosa; identical to SEQ ID NO: 326360

SEQ ID NO: 331023 - DNA, 690 bp, Pseudomonas aeruginosa
atgctgatgacctacgagaacctgaagcgtctgctcaacatctgggacaagccagacctctccgcgctcacccgcctcctggtcgcgcgtcgcatggccaggcagtaccagttcggctgggaggccgacaggacctgcgctgatcgaaagatcaaggaggcaaggaagggccttccattcaccagggcccagttggaacaggcgaaggagtttcggaaaacatccagcagctaccacgagaaagcccacgccgcccttggcgcctggctcctgcaggccgagaggtggatcgagggagagattggagtcgatcgcatctgcgatgccctcggcgtcaatccggtccaccgcgccgccatccaaggcgccaagcctgggcagatgctcaatcacatcgccttcgtcgaaggccttgaggacagctcgaatgctttcagcggaaggcgagaggcggacctgaaggacggcccactgttcaactgcatcatagccgagatgctgcgattcgcagaggagaaccccgaggctctacccgatccgttcgcacccggcgggccactttacggtgtaccacagaccgtgatccgcaacgacggaacgatcgagacgaggcgggccgcgctgacgctgcactgccgagacggatcgatgcgcgtgatcgaacggaaaccggaggtagggcgtgagtag

SEQ ID NO: 331024 - DNA, 183 bp, Pseudomonas aeruginosa; identical to SEQ ID NO: 326362

SEQ ID NO: 331025 - DNA, 663 bp, Pseudomonas aeruginosa
atgacccatgccctgtttaaacagatcgacctgaccgccaagctcggccaggacggtagctcgctccaggccatgaacgcgctacgcgtcatccgggaaacggtagcgaagcacctggccggcaccgagggtgcaggagagattccgctcgagcgagccctcctggcgctccgcaccatcgccgagttcccctgctccgagcaggacgacctcccggcggcgaacatgcgacagatcgcgctggcggcgttgagtggcgctggagccggttcggagccgggcaaccctggccgcgaacctgtttctggaccgggtaatgccggcgagcgaccccaccccgcgccgggattggtcggcgatcacaccgaacttcgccgaattgctatcgcgctcaagaacccgcagctcagcggggaggaggcctcgaacctgatggtgcgttacgaggccttgaccatgcctgaccacatcattgcgctgatcgacggacaggccaaggaggattcggccctccgcgagcttgaggaaagcctgctgatcctggagcactggatcgagcaagtcgggatgacggatggctacgtgggagtggttgagatcgaggccgtagaggcggtgatcaacgcgctgaggcgccagcaggcgggcgggaacggggcatga

SEQ ID NO: 331026 - DNA, 336 bp, Pseudomonas aeruginosa; identical to SEQ ID NO: 327147

SEQ ID NO: 331027 - DNA, 837 bp, Pseudomonas aeruginosa
atgaagcggattcccgctgctgcaatgctgtgcctgctcgccgtcctggcgggctgttcgaaggtgcctgccggcaacgtcggcgtgatcgtcaatctctacggctccgagaagggtgtggagacgcgtgaggtcggaactgggcgctactgggtaggcgtgaacgaggagctctacctgttccccaccttcacgcagaccgagacctggggcggcgaggaagcgatcagcttccagaccgttgagggcatgaaggtcggcggcgccgtcggcatcacctactcggtatctcccgataaggtgacgacgctgttccagaagtaccgggcgggtatcgaggaaatcacgaacaagttcctgcggaacatggtgcgcgatgccttcaacgatgttgcctcgaagcttccagtcgagagcgtctatggcgccggcaaggcggacctgctgctggccgttgagaagcgcgtgcgcgaccaggtggcacccatcggcatcaacgtcgagcgcatctattacgcatccgacctggtcctcccgccgcaggtcacgcagagcctcaacgcgaagatccaggccacccagatggccgagcagcgccgtaacgaggtcgcccaagccaaggccgaagccgacaaggagcgcgcccgagcccaaggcgaggcggacgcgaagctgaccctggccaccgccgatgcgaaggcgatcgagatccgcgcccaggcgctgcgctcgaacccagacgtcgtgaccctcaacgccgtcgagaagtgggacggaaagctacccacctacatggccagcggctccccacttcccttcatcggcatcagcaagtag

SEQ ID NO: 331028 - DNA, 255 bp, Pseudomonas aeruginosa
atggacaagaaacctctcatcaagcccgggaagctcttcctgatctgtatcgcgctgctggcctatgccggactgtcagtcgccctggtgggcggtattgggccggccctggtcagcagtcgcgacgacgttctggttttcgcgggattcgccatccccggcgtctggttgatcgcctcggtctgcctcggcatccacctcgccaacacccgccgcgaacaagcggccaccaccagcaaggagaaagaccaatga

SEQ ID NO: 331029 - DNA, 234 bp, Pseudomonas aeruginosa
atggcctgggacagaaacgacccgctcaacatcctggcgctacagctcgacggtgaactgcgcgccgcagccgacttctgccatggctacaacgggccggcacagcgcgctttcgcccggcacatccagggcctgggcaagacgctcgacgagcttaccgtggcagacctgaaggcagcggccgcatctgcggacgcagaactgaacgacctgcaacagagagggctgatctga

SEQ ID NO: 331030 - DNA, 384 bp, Pseudomonas aeruginosa
atgcatccacaaaccatcaccgcacacggtttcaccggcttcctcggcaaaggcctgtccctgcgtgagcttcagtgcgtcctgggcatcgctgcgggtcgtacctcgaaggagttggcccgcgacctgggcatgcagccgggcacggtgggtaagcgcgtcttggcggcgaccaccaagctcggggtaacccgacgtgccgccctggtagctgaagccatgcgccgcgggcttatctcgcccgccgtgatcgcccttgccttcctcgtcgccggtcagccactgctcaacgatgaccacatgatgcgcagccgccgtggcggcgaaaggaagatcgaaactcgcctgactgctcgccgcgatggcgtggcctgggtggcgtga

SEQ ID NO: 331031 - DNA, 312 bp, Pseudomonas aeruginosa
atgcaactcaaaaatatcaaaacgtcaagccaggcgcaacagccagtgaccactgaggaggtcggctttctcctgactcccagcgggctctgtgcgctccaggtctgcgagggggttcccatcgtagaggtgatgcagcgatacgaggagtcgctcaacgctctctgcgttttgctcaggcgcatggccagggacgtcgatcaccctatgaacgactcagaggcggaagctatcgcgctgctcaccgaggtggtggcggcgatgcacagtagctgcgtgcggggcttggatgcagcgggaggtgcggcatga

SEQ ID NO: 331032 - DNA, 288 bp, Pseudomonas aeruginosa; identical to SEQ ID NO: 326370

SEQ ID NO: 331033 - DNA, 309 bp, Pseudomonas aeruginosa
atgaacctctcgacgctgctcagcagtctgtgctcccgggtcccgggcgaagacctgaccgataaacagattctctccatcaagtcagacctggggtcggctcggcaagcggctcagaacatggcgcttggtgtcgccgcggtcgggaatctgctggcgaacgttggcgctgaaggcgaagtcggccaggaaacctcagagcgtctcggctggtttctggaggagatcgggggggctatcttcatgttggttgagctcgagcaggtctgcacggatcgcatcaaccgacagaaggaggctcagcaatga

SEQ ID NO: 331034 - DNA, 279 bp, Pseudomonas aeruginosa
atgagggccactctgggtatcagcttccgggcgactgcgcccgttgatctttcgaagggagatcagaaagcgaatgtcctgtgcgtgatggatgacatcgatgccgacctcgcattggacagcgcagtcgacctgcttgacgcgattcaaggcgggctcctcgacatcctcgacgagccgagtgttagtcgtcgcgtagtcctacttcttcatgcggccgagacagccactgccctggtccgtgctgccctggagggtggggaggtggccaatgactag

SEQ ID NO: 331035 - DNA, 234 bp, Pseudomonas aeruginosa
atgactagacgcattggagcgaaagcactcggtgaccagctctacagctatatcggcgccatccaggacttggctaccgcagtccgcgaagacttggctttcgaaggttgcgagccgggcccacgcctgaccggcgaccaggtggatgcgatccatctgtcgattatcactatcgccaggttggctggcgaagacttgatccaactgctgaccgagctggaggtgccggcatga

SEQ ID NO: 331036 - DNA, 771 bp, Pseudomonas aeruginosa
atgactgatctggcccccttcggcggccaggccgccaccatgaccagccgcgagatcgcggatcttgtcgaggctcgccacaacgacgttgtcacgaccatcgaacgtctcttcgacaaggggcttttacgatcaagtcgtaaaactcgccgggagtccaccggtggccgtccgatcgctgtgtatgacctgatcgagagggatactcacctggtcgttgctggttacagcgatgagcatcgtgcccgagtgatcgaccgctggcagcagcttgaggctgagcgtaccggtcgcgattaccagatcccacgtacccgagccgaggccctgcggctggccgctgacctggaggaacagaacgccgtcctgcaactggagaatcagcaccaggccgagaccatctccagccttgaatcgctgttcatggtaggcgagacgcctactcagttctgcaagcgcctgaacggggtgaactgcgccaaggtaaacagcaccctgtgccaactcggctggctcttcaatgagcagcgcgaagaggagggcgcaccgcggtatcgcgtcgccagccgtgtccgcgacaagtacctcaccgagcgcccgcgcaagatcgcccccgagggcggtgactccttcatcaagtacgacctgcagttgctgctggccggcgcccagcgcctgcaccaactctacatgcagcaaaagctggtcatgaaagccacctgggacggccggttcacgcaggccaagtacaccggggagaccatccaatga

SEQ ID NO: 331037 - DNA, 231 bp, Pseudomonas aeruginosa
atgaccacacaaccgaaaccgggccggatcaccaccagccccagcggccgcccggtgatcgccgggccctggccgtcctaccgtcaattccgcgacctgcccgagcgtgagcgttgggtgctctacggccacgccaaggcatgccgcggtgcgcttgaagaccaaggattcctcatggccgagggataccacgacttcgtgaagcgcgttaccgaggagttagacatatga

SEQ ID NO: 331038 - DNA, 840 bp, Pseudomonas aeruginosa
atgagcgttcaggccatgacctgggcactggagcagcaggtcgttaccgatgccgccatgaggcatgtgctgttgtgcctggcgaactatgccaacgaggtgggaaagggggcgttcccttctatcgccacgctgagcagtgatacagggctatccgagcggactgtccagtacaagctccggtccctcgaggaggctggtgttattcgccgtggaaaccaggcaatcgctgccgcctacatctcgcaccgggatcgcctgccgatggtgtacgacctctcgatggaacggggtgcaacggttgcaccgggtgcaaatgacgacgtaacggggtgcaaaccacgacgtaacggggtgcaactgacgacacaacggggtgcaacggttgcacccgatccgtcacttaaccaccaaagaaccaccaaagaacctaaagagcatgtccaaaccggcgaaaccggttcggacgacgtgggtgatcggaagggaaaaaccgagtctgggaaacggccggccaagcccaatcctctggatggtttcgaggagttttaccaggcctacccaaagcacaaggatcgagcgaaggcggagaaggcttggcggaagatcgaccctgctctgcaccctgtgatcatggcggcgcttccgaagcactgccgacagcgtgattggctgaaggacaacggccagttcgttccgctgccggccagttggctcaacgggcgacgatgggaagacgagatagcccctgatgctggcccggcatcgagcttcaccaacctccccaaacacacccccgacatgtaccaggaccgcgacgatggcagagcaaatttttaa

SEQ ID NO: 331039 - DNA, 816 bp, Pseudomonas aeruginosa
atggcagagcaaatttttaacttctggcgtaaacccaaccgcaagagcgaagaaagcccttctcttcgctgcccggttcacggtgactaccactcgatccaggtggagcagtttgatggtagctacttgacctggtcttgctctcggtgtgtttgggatggggtgaatcgcgagccggggagcgaggagttttcggtggccctggcggagaaaacccaacgcaagatcaacgagttgctggttggttctggcatccccgctcgctaccgggccagcactttcgagacttaccgcaccgacggcaaggcggagaaggcggcggtgctggaagcatgccgggagtatgccgagcgattcgtggagaacttccaggacggccgctgcctcttgctcctgggcaaccttgggacgggcaagacccatctcgcgtgctcaatcgtccagtacgtcgtacggaaccttcaggcccaagcagtgatcacctcggcgtcggagataatccgtgtggctaagggggcgatgaaccgggcggcgaagtacaccgaacgggacgctctcgaagaactggcgggctttgatctgttggtgatcgatgagctcggcgcgcagggcggtaccgagtacgaattggggctgctccatgaggtgattgaccgccggtatcgggagatgcggcctacggtggtggtttcgaacatgagcgcgcaggaggtcgccaagtacatcggtgatcgtgcggtggatcgtctccgcgagaacggcggcaaggctgttggcttcacctggggctccgctcgccgggaggttctggagtga

SEQ ID NO: 331040 - DNA, 1398 bp, Pseudomonas aeruginosa
gtgagccgagagctgtacagcgaagaggctgagttcggcgtgctcggcgctatcttgcagtccgcgctccagcagaatcaggcgctggttgacgaggccttgtccagcgtgaccgccgccgatttctacttcgaggataacgccgcgctgttccaggcgatcaaggattgctacgaggaagggattcccgtcgatccggtgaccgtgggagtggtccgtgatgtgctgcccagcggcgcgaagctcattccctatgccgggaacattgcccgcaatgtgccttcggtggcgaactggaggacatacgtccggcacgtccgggagcggtccatcctacgctgcttgatcgacacggccgagtcggtgaaggcttccgccacggatgaccggccgttgcctgagatcatcgccagagcgcagcaggcgatggcggatctgcgcgacctcgatgacgaggcgccgaagtacaagcggctcgacgaggtgatgctcaaggctgtcgacgttatcgacgacaagttcaacagccgcgcgcctcagtggcccggcactggcctggccgatctcgacaagctggttcgcggcatccgccctcggaagctcaccgttatcgccggccttcccggcagtggcaagaccacacttgccctgcagatcgctcagtacaacgcctgcgaggcaggggagccctggctggtgttctccctggaaatgcctgaggaggagttgggcgtgcgttccatcgcctcgctggggggagtggacctgaagcgcttggacgatccgcagcaactgggtgacgacgactggccgcgcatcacatctgcggtggccaaggccaagggggcgcccttgttcatctgcgacgatcccaacgtgaccgccagccagatccgcagcaccgcgcggcgtgtcaagcgtgagcacggcttggccggcatcgtcgtcgactacctgggcctgattccaccggaggcgaaagggcgtacgcgcagcgaggaggtgggtaagaccaacaaggcgctgttgcgcctggccaaggaactctgtgtgccggtcattgaactggcgcagctcaaccgcgactcgaccaagcggcccgggaagcgcccgcagtcgagcgacctgcgcgactcgggggagatcgaggccgacgccagttgcatcctgatggtccaccgggacatggacagcgaggccggccagaacggaatcacggagatcctaatgaccaagtgccgacacgcgccaccgggcatgtgtctgctccagcagcagggaatgtatggacgattcgtcaacttcgcgggcttgcgtgaaatgagccaagaggaggttgaaatggggcgtacctacttcgccaacaagcacggcaagaaaaaggggaaggcggcatga

SEQ ID NO: 331041 - DNA, 279 bp, Pseudomonas aeruginosa
atgagcaacgtacaaccgatggcaccccgcaaggtcatgacgaggctggagcgggagtttctcaaggtggccggccaggagctggcgcaggtcaaggtgggtggtgctgcggcactgtccgccctcttgcagatggtcgccaactggcacggcgaccgcggcacgctgggcttccacgattacggtcggctctggctgcaggacggcaacgcaaagggcgcggcggtggaaacgctgctgcgcgatctgtttggcctgaacggtccgggggcggcatga

SEQ ID NO: 331042 - DNA, 390 bp, Pseudomonas aeruginosa
atgagcagaactcgaacctacgtggacaagctgctgggcgataccgagtatctcctcgaacagtgggggtggtggcgcatggatgggatgggggttcccgggtatgtgtcgccggccgccgctatcatgagccaagccatgccaatgtcgagccccaaggcctaccacgtcactgacgatatggccttggccgtcgaccgggtcattgctcgactcattgacagggcgccgcaggctggtgatttcgtgtggctctactacggcgcgaagtggccggccctgcgcatcgcgcgtgaacaccagatcggcgaggcgaaggtcagggagactctgaagttggcggtgggctgggtcgatagcgccctggagcggttccgcgagagcgcttga

SEQ ID NO: 331043 - DNA, 222 bp, Pseudomonas aeruginosa
atgagaagtccagatatcaaggtcgtgaagctcgagggggacgcagtcccctggtctatacgcgatgccggccatgaggcctgtttcgtggttatgcatggcctgacgctgaggagcgatttcttgtattccgaggaagaggctgaggcggtggcagacgcggtgcacctagagatcatcgaagagatgagatcgatgctggagtctgtccgaggacgatag

SEQ ID NO: 331044 - DNA, 333 bp, Pseudomonas aeruginosa
atgaagatgcctgacaaacccgacacttgggcggctgtgctcgcctggctgagccagcatgcgccgatcatctacgcctccctgctgtcgtgggccatggccatggccaggatcatctacggcggcggcacgcgccggcaggcgctcttggagggcgcgctgtgcggggggctggcgctgacgatcatcagcggcttcgagttctttggcgtgccgcagagcatggccaccttcattggtggctggatcggcttcttgggcgtcgagaagatccgtgacctggccgaccgttacgctgggatcaagctgccgcgtcgagggtctggcgaatga

SEQ ID NO: 331045 - DNA, 618 bp, Pseudomonas aeruginosa
atgaagatcactgccgatcaactcgaccgcgctaccggctgcggtgccgctactgcctcgacttgggtcgagcacatcaacggcgccatggctcggttcgagatcaacacggctgagcgcgtggcgatgttcctggcccaagttgggcacgaaagccagagcctcaagcgtctgatcgagaacctgaactactccgccgaggggctgctcaagacctggccgaagcggttcacgccggtagaggctcgccagtatgcccgccagcccgagcgcatcgcgaaccgcgtgtacgcaaaccggatgggcaacgggtcgccggatacgggcgatgggtatcgataccgggggcgcggcctgatcatgattacgggccacgacaactacgccgaagctgcccgcgccctggcgctgccgctggtggcgcagcctgaactgctggagcaacggacctgggcagcaattgccgcgggttggttctggcagtcgcggggtttaaatgacctggctgaccaaggccgattcgagcggatcactctgaagatcaacagcggctgcaacggtgctgaggatcgagtggcgcgtctcgaatgggcgcgtgctgcgctcaagggggaatga

SEQ ID NO: 331046 - DNA, 240 bp, Pseudomonas aeruginosa
atgctcgggttcacgacgaaagccgaagctcgacagatcggcgtctcgcaccatgggagctattacggcattccgatgtggctgggggatgtcgatagcgattgcccgctggcgttcgccaagtgggcgccgcttgaacttgtcgtctccctgttctcggtcatggagggcatcgtcaactcgatgctcgatcaagagccgacgttcatgttcaaggttggtcggaggatcgaccagtga

SEQ ID NO: 331047 - DNA, 198 bp, Pseudomonas aeruginosa
atgaagaaaaccaattgcgccgcgatgctatcggcactggtgctcgcgtcgtgtacgtcaaagcccgctgccccgcaggcggagtgcaccaggctcccggagccaccggcagcgctgatgcaggaagagccgtccttgctgccgctgatggacaagttgtttctgatctccgagccggagtcgagcgacgcgaactga

SEQ ID NO: 331048 - DNA, 744 bp, Pseudomonas aeruginosa
atgatcagcatcaagccggaagggttccagcagcagctcgccgacctgactgagcttgagcagcggcagattccttacgcgacagccactgcgcttacgcggaccgcgcaaggcctgatggatcgattgcgggccgagatgcgtgtcgtgttcgaccgcccgaccccgtacaccctgaacagcctgcgcatggtgccagccaggaaagaccggctcgaagcgcgggtttggttcaaggacgaagcggacggggcgcagcctgcatcggtgtggattgcccccgaggtctacggtgggccgcgtcggaacaagccggccgagcttcagctcagggccaaggggatcctgcccgaaggtaagtacgtggtgcctggcgccggtgctgatcttgatcgctacgggaacatcaggcggggtcaagtgaccagagcgctgagcggcatccgcggattcactcaggccgggtacaacgcgaacgcgaccgatagcagacggagcagggcgaagggtaatgctcgccgctacttcgtcatgacccgcaagggccagcccattggcattgctgagcgcacaggccgaggccgggatgccgtctcgatcatcatggccttcgtgtcacgcccttcgtatcgccgccggctgagcttcttcgagatcgcgcagcagtacgccgacgagaacctgccgcgtgagttcgaggtggcgatgcgcggcgtggctgctcggttcgccgcgaggcgctga

SEQ ID NO: 331049 - DNA, 546 bp, Pseudomonas aeruginosa
atgagcaaaaacgaaacaaccaaacagcgcggatggttgaacaagtccgagatggccgcgagcctcgggatttctccgcaagcctttgataaatggggcgttcaaccaatcgagcgaataggtcgagaggccttctacacggtggcggatgtggtcgaaaaccgcatccagcacgccgctcggaaacaacaacctgagggggagctaccggaaggtctcgatccctacgctgaagccaagctgacacaggagcgactccggctcaccaaggcccaggcctacgcccaagagcagaagaaccagatccaggacaagctcctggtcccggtcccgttcgccactttcgccttggcgaagatcgccgccaagattggctcggcgctggagaccgtctgcaaaacggtcagtcgccgccacccggatgctgatcccttggtgatggagtccttcgagcgggagatcgccttggcgcgaaacctttccgctgagttcagcgacgacatcccgggaatccttgatgagtaccttgcaaccctggatcagtga

SEQ ID NO: 331050 - DNA, 1965 bp, Pseudomonas aeruginosa
atgagtaccttgcaaccctggatcagtgatctgcgcactgcggtcaagctgggtttgcagggaatgttcaaagagccgccgatgacggcggtggagtgggccgacaagcatttctacatgtcggccgagtcctcttacaacgagggccgctggaagactgcacccttccagatcgcgatcctgaacgcgatgggcaacgacctgattcgagtggtcaacttcgtgaagtcggcccggatcggttatacgaagctgttgctggccaacatcggctacaagatccagcacaagcgccgcaacgtgatgatgtggagtccgaccgacccggacgccgaggacatcagcaagagccacgtcaatggcctgatccgcgacgtgccggtcatgctggaactggcgccctggttcggtcggaagcacagcgacaacaccttggacaacaaggtgttcgcgaaccgccgcaacctctggatccgcggtggcaaggcctcccggaactaccgggagaagtcgcccgacgaggtgatctacgacgaactgtcgaagttcgacgccgacgtcgagggcgaaggttcgccgacattcctaggtgacaagcgcctggacggtgcggtctacccgaagtctatccgggggtctacgcctggggtcgctggcagttgccagatcactaaggcggcggaagagtctccgcaccggctgcgcctgcatattgcttgccctcactgtcagcgggagcagcacctgaagtttggcggaaaggattgtgagttcggcctgaagtgggaaaagaacgagctgggtgaggccgagcgcgcctggtacgtctgcgagcactgtgcagcctgttttgaacaccgcgacatggtggtggcccaggctaaaggccgctggatctgcgacgagaccggcatctggacgcgcgacagcatcgactggttcggcccagacaacgagccgatccgcacgccgcgctcggtcagcttctactgctgggcgatctacagcacctggacgacctgggtgtcgttggttgacgagtggctcaaggtcaagggcgaccgcgagaagctgattaccttcatcaacaccacgcgcggcgaggtgtgggaagaggagcagggcgaccgcgtggagtggcagacgctctatgcccgccgcgagaactacccgaaggtgccgccgcaagcgcttgtcctgatgggtggaatcgacacccaggatgaccgctacgagggccgcgtttgggctttcggtcttggcgaggaggcatggcttgttcaccgtttcattctgaccggcgatccggccagtgaggaattacggcgtaaggtcggcttggagatccaccggcagttcactcgggctgacggcgttccaatgcgtgtcgagcgttggtgctgggatgccggcggccactatgccgatgaggtagaggccgagagcgtcaagcatggcgtgcactgggtggttccgaccttcggagccagtacatacggcaagccaatcgccaacttcccgaagcgacgcaagcgcaaggtctacaagaccgaactgggcaccgacaacgcgaaggagctgatctacagccgtctgcgtattgatgtacccattccgtggcaaccgacccctggctgtgtgcacttcccgatcgacagcgacatctgtgacgaggacgaactgaagcagatcactgccgagaagaagaagccggtgatggcgaagggtgtccgcgtcctgcgctgggattccggcgggcgccgaaacgaggcgctggattgcttcgtgtacgcccttgccgcgctgcgcatcagccagcagcgcttcggcctcgatctcgaccaacttgagcgagcgcgcgttgatcccgtgccggagcaggtcgcccaacagcaaccctcgaacgaaaaccatgccagcacctctcagggctggctcaacactggaagcggaccatggctctga

SEQ ID NO: 331051 - DNA, 216 bp, Pseudomonas aeruginosa
atggctctgacagcgcagcagatgctcgacaaatacctggaggccgaggccgccgtgctggaagggcggacggtgatcttcaacggacgcacccacaccatggaggatatcgagaagatccgcgccggacgccgggagtgggagcgccgcgcggcggcagatcgggaccgcgccgccggtcgccgtccaggcccggcgctggcggagttctgctga

SEQ ID NO: 331052 - DNA, 1647 bp, Pseudomonas aeruginosa
atgaacctgatcgatcgtctactgaaaccctgggcccccgacctggtggctcggcgcctggccgcccgcgaggcaatccaggcgtatgaggctgccaggccagggcgaacccacaaggccaagcgtcaaccgctgggcgccgacacctcgctacagaagtctgcggtctccatgcgagagcagtgccggaaactggacgaagatcacgatctggttaccggcttgctcgatcgcctagaggagagggtggtgggcggtagtggcatcggcgtggaaccgctgccgctgcgcctggatggctcggtgcatgccgagttggccatggaaatccgcagtgcgtgggccgagtggtcactctcgccggagacctctggtgagctgacgcggccccaggtagagcggctgatgtgccgcacttggttgcgcgatggcgagggcttggcgcagaagttgatgggccgagtcccgaactacacgttcgccacgtcggtgccttttgccctggagctgctggagcccgactacttgcccttcagctacaacaacctgtcgaaaggcattgtccagggtatcgagcgtgacacctggcgccggaaaagggcctatcacctgctcaaggatcaccccggcaacctgcagacgctgggcggcagcctggcggtgaagcgcgtcgaagcggaacggatcatccacatcgcctaccgcaagcggatcggccagaaccgaggcgtgccgatgttgcacgcagtgctgatccgccttgccgacttgaaggactacgaggagagcgagcgggtggcggcgcgcatcagtgctgccctggcgatgtatatcaagaagggcaaccccgacagctacacggtggagcccgggaaggaccggaagaaccgaacgatccccatcgcccccggcatggtcttcgacgacctcgagccaggtgaagacgtcgggatgatcgagagcaaccggccgaaccccttccttgaaggtttccgcaacggccaactgcggatgatcggcgctggcactcgcagcacctactcctcggtgtccagggcctacgacggcacctactcggcacagcgccaggaactggtcgagggctggctgggctacgacctgttgcagcacgagttcatcgactactggtgccggcctgtctatcggtcctggctgcagatgtacctgttggctcggaaggagcgcctgcccgccgacgttgatcaccgcactctctacgcggcggtctaccaggggccggtcatgccatggattaacccgatgcatgaggccaacgcatgggagttgctggtcaaggccggcttcgccgatgaggcggaagttgcccgcgctcgtggtcgagatccgcgcgagctgaagaagtcgcgtgagacggagatcaaggcgaaccgggcagccggcctggtcttcagttcggatgcctaccaccaactggtcaagtccgggatggacccggttgaggcggtgcagaaggtgtacctgggcgtcgggaagatgcttaccgccgacgaggctcgcgggctcgtcaacagatacggcgccggcctacccgtgcctgggccggatttccccaacgagagcaacaatggaggcgccgatgggcagccatcaaaccctgatccataa

SEQ ID NO: 331053 - DNA, 2082 bp, Pseudomonas aeruginosa
atgggcagccatcaaaccctgatccataaaatcctgatgctgccgatggcggcggcgttgactgaggccaacgccccgcatgagtcctggtacagcattaaggctgccggtcgcggcgtcgccgaggtgctgttgtacgacgagatcggcgtctggggcatcaccgcgctgcagttcgctcgagacctcaaggcaatgggcgacctgaacaagatcaacctgcacatccactccccgggcggcgatgtcttcgaggggacggcgatctataacctgctgcgcaaccacccggccagcgtcgacgtgtacatcgatggcttggcggcctcgatggcctcggtcatcgccatggccggcgacaccatctacatgcccgagaacgccatgatgatggtgcataagccctggggcatccagggcggcgatgcggacgacatgcgccgctatgccgaactgctcgacaaggtcgaggacaccctggtcatggcctacgccaacaagaccgggaagtcctccgacgacatcaaggcgctcctcaaggaggagacctggatgaatggccgagaggccgtcgctgccggtttcgccgaccagctcactgagccgctgcaagcggccgctcacctttcctccaaacgcatgcaggagttcgcccacatgcccgaagctctgaaaactctactggccccgcgcgcccagacccccgccgcgccgaccaacactcccgcgccgactccggcaccggccgcgccggcggctcccgtggccgccgccccaaccgaggccgatattcgcgcccggatcctcgccgaggaatctggtcgccgcagcgcaatcactgctgccttcggcgcgtttgccagcggccacgccgaactgctcgccacctgcctgaacgacatgaccatcaccgtcgaccaggcacgcgagaagctgctggctgccattggcgccgataccaagccggccgccacccctggcgctggcgcccacatccatgccggcaacggcaacctggtgggcgactcggtgcgcgcgagcgtgctggcccgcatcggtcgcggcgagcgccaggccgataacgcctacaacggcatgacgctccgcgaactggcccgtgcctcgctggtcgatcgcgggatcggcgtggcctcgctcaacgccccgcaaatggtcggcttggccttcacccacacttccagcgacttcggcctgatccttctggacgtcgccaacaagtcggtgctggcgggctgggaagaggccgaagaaaccttcccgctgtggaccaagcccggcattctcactgacttcaagccggcgcgccgcgtcgggctgggcgagttttcctcgctgcgtcaggtgcgtgagggcgccgagtacaagtacgtcacccttggcgagcgcggcgagcagatcatcctggctacctacggagagctgttcagcatcacccgtcaggcgatcatcaacgacgacctgcagatgctctcggatatcccgttcaagctgggccaggcggccaaggccaccatcggcgacctggtctatgcggttctgaccggtaacccggcgatgagcgatggcaaggccctgttccatgccgaccacagcaacctgctcactggcgcggcttcggcgctttccatcgacagcctgagcaaggccaagacccagatggccacccagaaagcccaggtagagaagggcaaggggcgcaccctgaacatccgtccgggcttcgttctgactccggtggcactcgaggacaaggccaaccagatcatcaactccgagtccgtgccgggcgccgacgtcaatagcggcatcgttaacccgattcgcgcattcgcgcaggtgatcggcgagccgcgcctggacgatgcctcggcgaccgcctggtacatggctgccaagaaaggctctgacaccatcgaagtggcctacctggacggcgtcgataccccgtacctggagcaacaggaaggcttcactgtcgacggcgtggccagcaaggtgcgcatcgacgctggcgtggcgccgctggacttccgcgggctgcagaaatccaacggtgcctga

SEQ ID NO: 331054 - DNA, 318 bp, Pseudomonas aeruginosa
atggcgaagaactatgtggaggacggcaacgtcctgactctcattgcgcccgctggcggcgttcagtccggcgtacctgcggtgatcggagacctggtggtggtgccgctggtagatgccgccgcgggcgagccgttcgccggaaaaactggcggcgtctggagcctgcctgctgccgctggcctgacccagggtgccaagtgcagcgtgctcgatggggagctggtagctgctgccactgccgactcggtggcgttcggcaagatcaccgagcccaccgttgacggcttcgcgtcggcgatgctgatccaacaatga

SEQ ID NO: 331055 - DNA, 330 bp, Pseudomonas aeruginosa
atgagcgcgccgggccgttttggccggctgatccaacggctccacgagcgtgggcaagagcggttatctgatgccgtgggcgagttccgcggcatcggtcgccccccgatcaaggggatacctctgcaggtcgatcgaaacctcagttacgacgggcctgatggggttttcatcacggacaaggttgggatcagttggctggcgaaggatgttcccacggcatcgcgtggcgacctcttcgttatcgggtcgtcgcgctatctcgtcgaaaagctcattgcgaacgacggttggttgctgacggcagcaacgatcgaggaggaagcatga

SEQ ID NO: 331056 - DNA, 471 bp, Pseudomonas aeruginosa
atgaagccgaacgtgctcacgatcggccgcttggccttgctggcgcgcttgcaaaccatcacgccaaaccagggataccggacggacgcgggcactcgcgtgctctctgggtggtttaacgagctggtcaaggagcggcatgagggctttccgctgatcgtcgttcagccgggcaaggagcagccgccggagcatctcgacgctggcgttcgctttcatcgcggcttcgacgtggtaggcgcggtgcgcggcgggtatgaccactatgcggaggctctggaggacctgcagctagatcttctggcgtgcctgatgcctgcccccaaggggcatttcctgcgttggctgccccgagagcgcggcattaccgggctgacgttgggggcgcctgagccgtacccgccgggtgatggagtggccgctgctgtgattcgaatccctgtctatctgaaaaccatcatcgaggcgtaa

SEQ ID NO: 331057 - DNA, 195 bp, Pseudomonas aeruginosa
atgaagagcgatccccaggtgccggccgcggtcgacgccgcgccgccggctgcgctgaacaaggccgtcgaggtcaccctggccaaggtgcattggcaccagggcaaggagaaggcggccggcgacaagatcaacgtcagccctgaccaggttgaattcctgcgccgcgaaggcgtgatcaagaaggaggcctga

SEQ ID NO: 331058 - DNA, 753 bp, Pseudomonas aeruginosa
atggctatcgagaaagagacgtatgtgatcggcggacccttcaagatccgcgagtccggcgctaccacccccttccagttcgctggcctggtgtccactatccagcagaccatcgagaccaacgagatcactttgccggataccaccaccccgcagggcggtgagtacgatgccgtttcgcgcatcacttcggtcggtttgtcgatcaacttccgcgagctcaagaccagcatcctggctgccttggtgtggggggacgccaccaatgttccttctgccacccacaccgacgaagcgcacaccgccgttccaggaggcacgatcgcgctcgacttcatgccgctggagatcaccagcgtgaagagtgatgacggcaccacgacctacgaagagttcgacgactggaacatgaccggcgccggtatcgaaatcgttgaagggggtgcgatctctgcggccacgccgatcaaggtgacttacaagtccgccaccgttgatgtgatcgaagcgctgaccaacagcggcaagacgttcgaatgcctcttcgagggtgagaacgcagccggtacccagcgccgtatccaggcgcgctatttccggtgccgcctgaacccgtcgagccaacaggactggctcaataccgaagacttcctcgctgccgaggccactgctaaggtgctgatggacccgactaaggtcggcgctggaaagtcgaagtatttcaacatcaagaaggaactggcgacggtgtga

SEQ ID NO: 331059 - DNA, 303 bp, Pseudomonas aeruginosa; identical to SEQ ID NO: 331007

SEQ ID NO: 331060 - DNA, 2484 bp, Pseudomonas aeruginosa
atggctgacgtaaagatccggctgactgctgacctcgatgatgcgctgcgcgaggtgtcaggtttccgcaaggaatatgccgaactggtcaggcaagtcgcgcaacctctcaagcgtttaaacgatttcactgctctcgaaagcacccttgaggacacgcaacgccaggcgcgctcggcgcgcgagcagatccgcacgctcggcaacgaactggcatcgacgatcaggccgagccgcgaattgcagcaggcttaccgggactccatttcggacttgcgaagcctggagcgggcagagacggtccagatagctcggctttccgcgatgcgccgggagttgaagcaggccgggctggatacgaggagcctgacatccgaacggcagcggctccagcgggagctggatcgaaacctccaggctggccggaatgatgcggccaccaccagcctccggcaacagaccgcagcgatcaagcagagcgcgatcgagcagcgccgctacaacttggagcaagcgcgtagcaccctgggagtagccagggtgcgcgaactgcaggctgccatcgggcagttgaaccagcaatatcgcttgcttcggtccagcggaacgctatccacaagggagcttgccgttgcgcagcgggcgctcaagaagcagatcgcggagaccaagagcgaactcaactcgcttggtgccggctcgcggctgtcgagcatcggctctctccgcgggagcggcccggcactggcggttgcaggtctcgccgccgcggtaggcgctgcaacggcgaagcttgcgaacggggccgacactgttggccggcttgattccaggcttcgcctggcaacccgctcgcaggaagagttcaacaccgcgcagatcgaactcgaccgtatcgctgatgatgtccagggcgatgtcggcgacctcatcggcctttattcgcggttgcagcgcccgcttcgggatgcgggcatggatcagcgagccgccctcgaaaccgtagaggcggtgtcgctcggcctgaaaatcggtggggcatctgccgaggagtcggcctcggtcattacccagttctcccaggccatcgccagtggtgttctgcggggcgaagagttcaataccgttctggagtcctcggatcgcattgctggcgccctggcggactccttcggggggactgtcggccggcttcgcgagatggctgccgccggtgagctcacctcggagcagatcgttatcgcgctgcggaaggaactgccgaagctccgcgaggagatggcgtcatttgccccggagattggtgcggggctgaaccggatcttttccgaaacccagaaatactggggacgtcgcgcgaaggaaacaggcgtcgtcgactgggttgcgaaccagttgaacgatgttgccaagaacatcaacacggcgaatacgctggtgaaaaagggggagggcagcctcacagccaccctcgccgccgagaaggcgcgccaagagcagatcgtgaagcgacagaacgatgctctgaagcgggctcgggatcagaatgtcgccgacctccaatctgaggttgtgcggaccaaggccctccttgagcagtccaccaagaacctcaacgacgcgctttcgcgccaggcagatgtccgcaaggagtttgccgatctggtgaagggcatccaggcgacgcccacctccggaacgcagaccttcggtgatgccactgcggcccaggcctcggctcgcaacgccctgaccgctggcaacaaccaaaaggcgatcgaggaggcgcgccgcgcgcttcagatccttcagcaactgaaggacgctggcgcgaacagctacggcttcgaaggcgtggccaaggaggtggagcgcatcgccaacaaggccgcagaggtcgaggctggtaatgccaaggctgcggatgacgtcaaccgcctgaacctggccgacctcgaggagcgcatcgcggctgtgcaaaacgtcgaggtatcgttcggaatggacttcgaaagcgcggagaccttgaagcagcaggtcgccgacatcgccgccggactggctgagcagctcgtgatacctatcacgctggttccgcctccggagatgggcttgccgggcgtgcccagcatcacccccaagatacccgggtttgccactggtacgcagagcgctccccctggcatggcttgggttggggagcgtgggccggagttgatgatgatgcgcggaggagagcgcatcttcaacgcggtgcagtcgctgcagatgtcgcagaggtatcaacgaactctccccgagatacccgagattccgaccgcggcgcttcagcaggcgagtccgccggccgccatgcaaaacctgggttcgctgaccctcaacctgggcggagacgatgccggtttcaccgttttcgggacacacgacacgctccgagatatacgcaaggccgcctcgaagttcgggcggacacgcccaaaatga

SEQ ID NO: 331061 - DNA, 522 bp, Pseudomonas aeruginosa
atgatcattccgaacgtgatgctggggggcgtaccgatcgtgatacacggcggcgcccctcagtgtcagtaccaagctgtagatggcggcgtcgagcgattgaggctcagcggaggtgcggcagtacagatgacgcactggcgcaagacagcgatcaccatcagcggttcaggatggatcggcacggggatgcttggactcgacttcgacaacccgttggagctgcgatgcaatgcgtcgcttggcatttccggccgcactgccgtcgaccgagtattcacaatccctggagaggttcgccccgatgccagtccgtgggggctggcgctggtcggtcgtgagtgggtcagaacggacgtgtcgtccgtcggccaggtggtaactgtgtcggagatcccaggcgcgcaactctaccgcgtcgagtggtggccgctgttccacgtcttcgcatccatccctcctgaagcgcttgattcttcgaacaacagccggacctggcaaattgtcgctgaggaaatctga

SEQ ID NO: 331062 - DNA, 1698 bp, Pseudomonas aeruginosa
atgcttaacggtggaccgctcaatagcgctgagctgaactcggccgctcactccgctgtgcctggtcctgagccgatcatccctggctacgctttcacatggcgcccaatcgtgcgcgttggcgatgacgacgttacgccgctcctgaccggggagatcgaggtcgatcgtgaagagggggcggctggcgtcgcgtccttttcgatctatctcggcgacggacctgttgtccctacggactggatcggtcgaaccgtaaccatcgactacgcaacggagaccgcgggtgaactgagtcaggggcgacggtttacggggagagttacacagccagcctggaatcctgttcggcgcgtcttggacgtcagttgcacggaccagttgcagcagcgtgtagaggccatggagattgcggccgtcgacgccctggtcggcggcgcctggtccgcagatgtgttcgagccggtcgatggacgctcgcggtgggactacgcccaggagcgtttgaccagcgtcaccgggagcttggactgctcgccatatggtgctctccgcgtcacatcatggcttgctgtggcgcctgccttcgagttcggcccaggctctacggtgtacggaacgcttgcagtcgagctggccgacctgagttcgcagacgaacagggtcgagatcgagtgcgactaccgattcagccggctctggcagttgaacgcctcgtatggttggcagcacccgggaactggcaatgccgttggtgaggcggggttctgcaactggcgtcatgacgacaccgaactgccagatgtcgagatgattacaactgccacggaaagcaaaggacaaactctgttctatgcaacgtggtacccgctgccaccgacaggcgtgtactgcaacccgccggcggcatgggtcaacaacttcaccgaattgctgctcggcggaaattggattgctggccggcgctgggtgcagtccgtcacagagagctaccggttggtcatggaagttcagccgagcgtggcggcgaccggcccgattgtcggtcggcagcgcgcctcgttcgagatcgagtcggacagggccgagcgctgggaaagcgaccccatcacgggcggcaacacaggccatagcgatgaaaaggacgacagccggcgattggctgcgctgaactgcctgctcgctcagggagcaacgacgctcatctccgcacaccgcgggacgactgtgacgtgggacgtgcccaccagcatggttctaccgatcgacctggtgcatacgatccgactagatgatcagggcgcgcgcgcggtgggcaagtgtcgacgcattgtcgaccggctcgatcttgcatccggaagcgccctgaccacgatctctatcgcggtgatgcgaggcggcggtggcgcagcagacccccttgttccgccggctggctcggcggatcccgtcagtccgccgtcgggtggcggccaactctcgacgcagctcggaggacgaaacggcggtcccgcgtatgacgatgaggcggatggtttctcaggtaactggagcaatcgcgatcccggcgctgaactgttcccgaggcgctttattgtgacatcgccagagataccggcgaactaccgagacgagcatgcgccggagatcgcagccacttaccgggtagctgtacctgatgacgtactggagatgtag

SEQ ID NO: 331063 - DNA, 411 bp, Pseudomonas aeruginosa; identical to SEQ ID NO: 327122

SEQ ID NO: 331064 - DNA, 546 bp, Pseudomonas aeruginosa; identical to SEQ ID NO: 327121

SEQ ID NO: 331065 - DNA, 405 bp, Pseudomonas aeruginosa; identical to SEQ ID NO: 327120

SEQ ID NO: 331066 - DNA, 1659 bp, Pseudomonas aeruginosa
atgaatcaacttatgccctgggacggcgaggtcgttcgcatgggctggccgtggcacggaaagattcgccagcagaacaaggatctggccggctacgtcaccctgccgaacggggcgacgcgcccagcgatcgcgtactacggcaaatggccgatgaatcacacgcatctgttcgacatgggcctaccggaccaggacgacccgcaggtcgaggagcagggcgggaagtggtgggggcgaacgatccttcgaggcggaggcaactacgactatcagttgtactacggcggcgcgacgacctcggccgaggggcagccctatacaggcgacgccccattcagggggctccctctctggtggtctagcgacgaggagccgcgtcgcccgctgtatgtggatatctacctcaatgtggagcagggcagctactacctcgatttttggacaaagggcggaacgattcacgctcttcggaagaagataacgcttgaggatgttgggcagggcgcaggacagccggagtgtgcggtaaaagatctgctcgggagcaacttcgactactggttttttggtgaaaccgtcaagctggactatctgaagctgctgggggtctaccgaaatcggttgctgctgggggtggtggtgacacagggtgaagggatgcggcagattgacccaccgcccggaacgtcggtggtcagcggttcgtccccgtctggagcccctcaggggttgtatggtctcgtcgaggtgaccattgccccggatatccgagatccagaggcggatcacagtcagacggtcacaatagacgtgatcgagaatcgccaggccgcgctcggtaatccggttcatcaggtgaccgacgagagcagtcagccgggcgatcccatcgaaaccacgctctatcgagaggaatggaaccagacctccgggttgctgaccgcctggtatgacgcccagggaaacatccagaccgcgcgctacaaccgacgccactatgcacttaaggagtaccgcaacgagcccggcgtgacgacaagaacagcgacggagcgaagcagcgaggttgcgctgttgagcggctccggatcagttgtcgacagcacagtgctgacagagcagttcgaggcgatctacatcccagggacaggactgcagatcactcggacggtgaagtgtacgggggagccggatgacgtcacgacctataccgacccagaccatacgggtgggccggtggtcaccccgccgacgacgacattccccccaggcatgcatatcgtcaacaccgttgtgacctaccagtggcttgtgaacgacgagaacatgctggccaaccaggaccagcatcaggtgtggctcgccgcgttgagcaacaacagcgcagccatctgccacatccgcgatccgttcgactatcccgaggggcagaccacaacaaccgtcagcgttcgccagggcccggccgtgcgcctcggcggcgtgacctctggaacggttaccgacaccctgaccaagagtaagcccgcgcatgagtaccggcgcggatttttctgggagccagccgaccgctgggtgcgagccagttgcaaccccgtcaccggagagctctctcgcggctcggagtgcatccagtacctgaccagttgggtttag

SEQ ID NO: 331067 - DNA, 588 bp, Pseudomonas aeruginosa
atgacgccggcctgtgtacccctgcgaattgaaaaaggggcgacgttccgcgacacgatgcggatcatgcaaccgagcctggtctaccggccgatcacccagatcgcgtcgaccgctcccgtccggctgaccatccccggccacgggttgcccgacacctggttagcctggatcgatggcgtccagggcatgcccgaactgaaccgcgctcggcttcggcaactgcctcaccgggtcgcgtccatcgacgacgacacgatcgagatcaacttgctgtcagccgttgggctggcgcctgttggcgggcaactgatctaccagccaccggttgacctcactggcgccgaggtgcggatgcagatccgcgccgagccaggcgggacggtgctgctgacgctgtcgctcggctctggcctggagttcgctggcgccggaacgatctcgcgcgagatatcggcatcggctaccgcggcgctggaatggtcggcggcggtctacgacgtggacgtgacatacccggatggcacggtccaccgctactacagcgggccgatcagtgtgagccgcgggggagggtgcgatggatga

SEQ ID NO: 331068 - DNA, 192 bp, Pseudomonas aeruginosa; identical to SEQ ID NO: 326407

SEQ ID NO: 331069 - DNA, 561 bp, Pseudomonas aeruginosa
atggcccagattcgatttttcaaagtggcgaccctgccgggtacgctggagccggacagcttctacttcgtggagaacagcaacttcgccgaatcgtatttgacgaactcggcgggtgtggcgcgctcgatcggcaacagcgcgatgatcaatgcgctgatcaacgaggcgttggccagcctgcccggcaccggcgcgccgatcctgttcgttgtggatatcgccgcgcgcgacgccctggagcctgagggcgcaatcttcgtcctggttcaggatgcgagcgcggaccctacagtcgaatccggagctgcgctgtacgcatggaaccctgcgaccagcgcctggctgaaggtggccgagtatgagtcgatggacgtcgagctcaactgggacgcgatcaacgggcgcccgacgtcgacgccggcgcagatcgacactgccgtttcccaggcgcacacgcacgcgaacaagtcgacgctggacaagtttggtgaggagtcgggcctggtgcgcttcaacggccagccgatcccggccgagtggaatgggacggcctggtaa

SEQ ID NO: 331070 - DNA, 723 bp, Pseudomonas aeruginosa
atggaaagtaattcgaaaagcgatacagctaaggatttagtggaagagtttcatgaggcttgcggggagtatttattctgcttgatgtttgcctctaagggaatagaaattaatggtgacctcatagctaaggaaaaggcgaagccgggtcaaaaaatttggatagcatctgatacggaatccgccccaaaatatcatgcaagaatggatatttcgatgtttatcgaaaaatcaaagaagaatggtttctttgttagcgaagtttgcaaatcgttattatgtaccatttattcgctgtgggacgaaacgtataggcataaaatagccaaagcagctggggttgaagctagcactctgactgttccgttgatgggggatctacgtaaaatcaggcactgtattctccataataagtccacaatacccgagactggatatcagtttgaggtgcttgcttggaagttggcgcctggcgccctcacgattacagcggaaatgttccgcgaattcattgatgcggtcagaacaaaaatggccattcaatcagtttctctatctccagagatgctgaaaatttatcagaccatgacaaagaaggagaaggatggttttgatagctggtataaaaaacctgggaacaaaaaaaatgacgtcccgtggccagggatggatgaagtgctaaaaagacttaatggaaataagaacaatgaggagaaatcgtag

SEQ ID NO: 331071 - DNA, 1221 bp, Pseudomonas aeruginosa
atgagtgctgctcctcgagaaatgttggcaggcgcggaattgggggcagggcgtctgcccgacctggccgatctgaacgaagctcgagctagcgactcagcgcatgtggtttggttgatctcggtgtttctggcgctcttcttcggctgggcttggttcttcgagatcgacgaagtttccagtggtgcaggaaaggtgatcccaagttcgcgtgagcaagtgatccagtcactcgaaggtggcatcttgtcgaagctcaacgtgcgtgaggggcagattgtcgaaaagggacaggtactggcccagcttgatctgacgcgcagtgaatccagcgtggaggagtctgccgcacgttaccgtgcggcgctggccgctagcgcgcggctgcaagctgaggtcaacggaaagcctgccatcgattttccggtggagttagacaactggccccagctcaaggcatccgaaacggctctgttccagtcgcataacgcgagtctcaatgaaacggtgaatggactcacgcaggcgttgggcctgattcgccgcgaactggatatcacacagtcgctcatgagcagcggagctgcgagtagtgttgagttgattcgcctgcagcgccaagaggctgagctcaaattgaagattggcgaggctcgtgcgagctacatggttaagagccgagaagagctggcgaaggctgatgccgatgtgagttctctgcagtccgtggtacgcggacgtgaggacacgcttgttcgggcgacgcttacagcgccggtccgtggcatcgttaagcacctggatgtcacgaccattggtggcgtagtaccgcccaatggatcggtcatgacattggtgcccttagacgatcagctgctggtcgaaacccgaatatcgccacgtgatatcgccttcattcacccgaaccaagctgcgctggtgaaagtgacagcatacgactactccatctacggggggctggacggggtggtcgagactattgctccagacacacagcacgatgaagtcaagcctgagatcgtttactacacggtcttggtccgcactaaatcagatgtactgattgataaggccggtcgtagcttaccgattactccggggatggtgaccagcaccgatatccgtactggcaggcgaacattgtgggattacttgaccaagcctttgagcaaggcgcgggaagctctacgcgagcgatga

SEQ ID NO: 331072 - DNA, 2214 bp, Pseudomonas aeruginosa
atgagtcgaggatctttgttcgtgaaagacgccccccataagagccttccgcacgaaggttggtttgacgcgatcctcgctgtggcttcgcactatcagctcaacacgtcgcccgaacatatcagggtgacttctcaatggaacactcaggactcaagcgaaaaacaggttcggcaaatggcacgtcaagcaggcctgtcgttgcaatgggttaagcctcgactagcggatttgaccccctggcgcttgccgctggtggtgcaattgcagagtgaccaggtcgcggtaatcactgcaatgaacacttccgggttgtccttgctcttgagtggcgatggcggcagcgaagtcacccgcagcatcgctgagttacagccgcatgtgcaggccatggcggttctgagacccttgcagggcgtacaggatttgcgagtggacgcctatatccgacctgtcgaggaacactggcttcggaatcttgtgttggtggactggcgtccctatgtgcacatcatgctcgcttcgctggtagtcaacctgatggccttgggtggagtgatcttctccatgcaggtatacgaccgggtggtgcctgcgcagtcgctgccgacgctctacgtactgtccggtggggtgcttctgtcgattattttcgcctgggtaatgcgcaatgcccgcatgcgcatcactgatgtgctgggtaagcgtgctgacctgcgaatctccgaccgtgtgtttggtcacgcgttacgtgtacgtaacagtgctaggccccgttcgaccgggagcttcatctcgcagatccgcgagttggaggcggtgcgcgacatgctgacctccacgaccattgcggcggcggcggactttcccttcttcctgctgttctgcgcagtcttctggtgtcttgccggttggctagtttgggtgcctcttggcgcctttgtagcactaatgttgcccagtctgctggctcagggtcgactgcgtgaactggcacaaatgggaatgcgtgaggcgtcgctgcgcaatgccatgttggtcgaggctgttcagggcatcgaagacatcaaggtgcttcaagccgagcctcgcttccagaaccaatggaaccactacaacgcagtaaacgctgactccgggttacaactgcgcgggctgctcaacacactcaacaactggatgcagaccgtacagggcgctgcctatgcactagtgattttttgcggtgtgccatgggtgatgtccagtgaaatcagtacaggcgtcctcgtggctgccagcattctcgttagccgcatgctggcaccgttgtcgagtgtcactacggtactcaatcgttggcagcaggccaaaattgccagccaatcgctggaccaactgatgaagctgccggtagaccaggccgctggtagcgtgcaccgggcagtgctggcgggacacttcgagctgcgcgatgcggtattcagctatgacggacaagctcctgcactgggagtgaagaccttgaagatcgcagcaggcgagcgcatcgcgatactcggtcgcaatggtgcgggtaagtccacacttttgcaggcgctctccgggctgctggaacctcgttccggttcggtgctattggacggtatggaggttggacacatagaccctgcagatgtgcgccgtgacgtgggtttactgagccagaacgcacggcttttccacgggactctgcgggaaaacctaaccctgggcacacctcaagctacggatgaggagctgcttgtcgcgctgcaagcggctggtgcttggagctatgtgagccggcttcccttaggcctggaccatctggtgcaagagggtggggcgggactatccggcggacaacgccaagggattgtgttggctcgcatgctgctgcgttcgccacaggtgttgctgatggacgagcctacaaacgcattagacgacgttgcggagcgcgaggtgatcgccaaccttcgacagctctcgactgaacgtacattggttgtcgccacgcaccgtacggcggtactggatgtggttgatcgggtgatcgtaatcgatcatggcgcgatattgcttgatggccccaagggcgaagtgctggggcttctcagaggtaaggttcagccttccgcggaggattctgtccgtgtggtagtgccgcagaaactcttccaaaactcgaccgatcaaggggcgtcagcatga

SEQ ID NO: 331073 - DNA, 516 bp, Pseudomonas aeruginosa
atgcccacgctttcgctcgacggcacagtcgggcatgcgttgaacgatagctcgcggctctatggcgagcatgaaaacacgtcatcgataggcctgaacttctcggtgctgctgtacgacggtggggggatggtcgcccgtgagcgggccgcaaggtaccaactgaacgcgaccaaggatgcagccgatcaagctcgcctggaaatgcgccagggcttcgccgatgccttggctcaggcggacggctgggccaagcgtgcaccggtgttgcaggagcgggttcgaagtattcacaccacgcgtgacctgtatcgacagcaatacctgcaaatggggacgcgctccttgctcgacttgcttaacgccgagcaggaataccacaacgcgcgaatcgagcaggctcaggggctccatcaacagtaccggctggcggtgatgtgtctgtactacgacgaccgtctgcgtagcgcattccgactggaagccgcggctgggatgagcgctggagaaccctaa

SEQ ID NO: 331074 - DNA, 9567 bp, Pseudomonas aeruginosa
atggaagcaaaagtcattagcaagaagagtggcgaccgtcgttcagaggacactcgaagcctcaagttggattcgccgtcaattgttgtccttcagatggctccggagcgtgtcgcccactacgagcgccatggtgacgacctggtcctgattcttaaagatggccaggaattcatcattcgtgacttctttgttcaatatccggctgatgaatctctgaaatcaggtagtgatggtgtggtcggtagtactccatcggatgaaaacggccgcagcgatctcgtatttgaagacgatgagggggtcgtctggtggggacagtaccctgcgcagtggtcggagtttcatttcaccgagattgaatgggacagcggcgctttcgtctggtggccttggctattgggagcgttaggagcagtcggtgctggggcagcactggggcatcacggaggcggcgggggaggtgatagcagccatccgccagtggccaatagcgattttgctacgactgctgaagataagcctatcagcggtaacgtcctaaccaacgatagcgatccagatggcgatacgctgagcgtgacttcattcgcagtgaacggcgtgcaccacgatgccggcgatagcgtatccatcgtaggtgtcggcgaactgacgctcaacgccgatggtagttacagctttacgccggtaccgaactggaatggcattgtgccaaccgtgacttacacgatcactgatggcaggggtggcacctcttcggcagagctcatcattacggtcactccggtcaacgatcagccagaggcccagagcgcaattgcggatcaagtcagtcacgatgctgacaatcacgtaagtctgaacgtatcgagcaatttccatgatccagacggcgacaagctgacctatagcgccagcgacctgcccagcggtttgaggatcgacccgaacaccggaattatcagcggtacgatcgaccactcggccagccaagggggaagagggggcgtatacagcgtgatcgtaacggctactgatggggatggagcctcggtggacctgacgttcacctggacggtcatcaacccaccgccagtggccaatagtgatacctccacgacggccgaagacacgccagtcagcggcaatgtcctgaccaacgataacgatccggatggtgatgcgctgagcgttacctcgttcgaagtgaacggcgcgcgatacaacgcaggcgatagcgtgatcattgccggtatgggcgatctgacactccatgctgacggcagctacaccttcacacccgtgcaggactggaatggcaccgttccgacggtgacttacaccattaccgacggggagggcggcactgcctcagccacgctggatatcactgtcacgcctgttaacgatcctccaactctcctgggcatcatctccgaccagagcaacgctgatgccgatagcatctcgagcttggatgtctcgggtaatttccatgacctggatggtgacacgctgatttatagcgccactggcctacctagcgggctgagcattaacccgaacactggtctcatcagtggcacgatcgaccactctgcaagccaaggtggtccgcatgcgaatggtatttacagtgtaattgtcactgctaccgatagcgccggagcttcggtagatcagatttttacttgggctgtgagcaacccaccgccggtggccaatagtgatgtggccacgacagatgaagacacgccagtcagcggcaatgtcctggccaacgataacgatccggatggtgatgcgctgagcgttacctcgttcgaagtgaacggcgcgcgatacaacgcaggcgatagcgtgatcattgccggtgtgggcgatctgacactccatgctgacggcagctacaccttcacacccgtgcaggactggaacggcaccgttccgacggtgacttacaccatcagtgacggcgagggtggcactgcctcggccacgctggatatcaccgtcacgcctgtaaacgatccaccaactctcctgggcatcatctccgaccagagcaaccttgatgcagaaagcattactggtctcgatgtgtcgggtaatttcatcgatgtggaaggcgatacgctgacatatagcgccaccggcctgccgagtggactcagcatcgatccgaataccggcatcatcagcggcacgatcgatcattcagctagccagactggcgctggtggtgtgcacagcgtgactgtcaccgccactgatagtcatggtgcctcatctggtcagaccttcacttggacggtgaacaatccaccgccggtggccaatagtgatgtggccacgacagatgaagacacgccagtcagcggcaatgtcttggccaacgatcgcgacccggatggtgatgcgctgcacgtggtttcgttcgaagtgaacggtgcccattacgacgcaggcgataacgcgatcattgccggtgtgggcgatctgacactccatgctgacggcagctataccttcacgcccgctcaggactggaacggcaccgttccgacggtgacttacaccatcagtgacggggaaggcggcactgcctcagccaccctgaccattaccgtcacgccagtaaacgacgcgccgacctttgatgcagatagcgacatcagtggcagtgtgattgaggctggcaatcttcctgacggcagcgtaatcgttggtacgccgagcgttggaggacagctcaacgcgagcgatgtggacattggcgatacgcaaagctggagtcttactggtagccccaacagcacttacggctccttcagtgttgatgcctcgggccactggacctacaccctagataacagtctggcagcaacacaggccttgaaccaaggcgacatcgtcgagttaacgtatgtggttcgtgtgacagacggtgccggtagcttcgccgagcaagtcgtgaccatcaccgtctacggtactaacgatgctccggtggccaatgctgatttcggcacggtcatagaggcgggggtgttgaatggtggcaaccaagctacgccgggtagtgccattgctgcgggcaatgttcttaccaatgacacggatgtggacgcaggtgaaacggccacactgtcagttcagggaattagctttagtggtaccagtggggtagtcggaacggtgcttgcgggcacttatggctccttggtgcttaatgccgacggcacctacatctacaccctggacaacagcttggcagcgacccaggagctgaaacagggcgaacaggtcacggaggtctttggctataccgttacagatgtcaacggcgcagtcagcagcagcaccctgtccatcactgtcaacggcacaaatgaccggccgattatcacctctgacgcgctggccgctagcggcgatgtgacagaggccggaagtggtgtgttgggtacgcctacggctagcggcaccttgactgctttcgacgtagaccacgatgccacgcagacctggagcctggtcggcggtagcacggcgaccacgatcactggaatctacggcagtctgtcgttgaacgcagcaacaggtcagtggacctacacgctggacgacagttctcccgtaacccaagcattgaatactggcgataccgtttacgagcacttcatcgttcgagtgactgatgagcacggtgcgtacagcgagcaacccgtcaccatcaccattcatggcagcaacgacaatctagctggtttgggtgatgcgaccatcgtactggatgaagacggtagcgctatcggtaccgtacaggactttgttcgcgatccggacgacgtcatcagggtaactggctttacagtcgatgcagatggcgacggcttccctgaaagctattcccccggagcttctgttgttctcagggacatcgatggtcatgaccttggtacattcagtcttgcggctgatggcagctacaacttcacgccggcacccaactatgctggtgacgtaccggttgtgacctacacgatggccgaggccaaaggcagtgatggctggggcagcactgtaacccaagcaattaggttcgatgtcactccggtgtcggacgcaccgaccctcggtgccgccactacgctgcacactgacgaagacaaccctgtcctgttggggttaacgacgcctgttattactgacgtcgggacaggcaccggaaatgacgactatcccgagcgtcttggtgagatcacgcttacgctgggtggttccggcgccagcggtgtgacccttgtcaccggcgctatgacactcactcccgttggcggcaaaattaccgttgtcctaaccgacgtggaccacatcggcagcgttccggctgaggaccacgcgaacggaatctattacctgacgcagtcccaataccaggcactgcaggcgaatccgctctccgaaagtggtaagaactttactatcaccgtcagcgccaccagctacgaggtgaaatcagacggtacggtcagaacgggtgttagcggagccaccagcacacaagttttaagtatcgatgtgcaggcggttaccgatggtgcgacgctcgccagcagcacttcgagtttgaccttcgccgaagatactcgccttgacctgagctcttacctttcggccacactgaacaacaccgatggcaacctcggtacggataccgatggaagcgagacctactggtacacagttggcggtctgccggtggggtcgatcgtcacaatcgacggcgttgtaagcaccatcagtgcgagtgcgccgacagcgagctcggccgtgagcacatcggccacgccaccagccattaccatccaaccgccgactaattacagcggcgacattactggtgtcactgtcacgctgcacgctaaagataccgacagcgattcgagcggtgctattgctatcgtcgacagtgcggtcacgttcgacctacacgtcacccctgtcgcgggcgatgtgagcgtgcagaatgtcagtaccctggaagacactgcggtagctttcttgtcgggggtcaaagacacagacaccggcaccgcccacgggagcgaggtgatcgactcggtggcatttagtctgccgactggttgggtgctcactccgccggtggcgtcgtcggggtggagctatgtaatcagcggtagcgacgtgactatcagtttcgatgcaagcctctccgaggcccagcgtgaggcaatcctcagcgccttcatgatcaagcctccggcgcacagtagtgcggatgcaaccatcacgttgtcgatcacgagtactgatagcaatacggtaaacagtgcgttagttagcgatactcgtacgattgagcgcaaccttaagatcacagtcacagccgttgccgagcgcacggatacggacagcgatggcgatggcgcgtttgatgtgacgttgacgcctggtcatgcctatatctccagccatggctacgaagatgcctggtttgcattgggaaccgacggcagctttaaacttgcggatggttggtcagatagtgacggcgatgaaacgctatatgccgtactcacaccaacgctgcagtccactgatcctggcgataccgtcattggaacccagttccgctattcgactgacggtgggacgtcttgggttacgcaggcctacatcggtgatccaatctgggtacctgccgcatatctggggtcgttggaggtgaagctgccggccgatgtctcaggcacgttgactatcggcgttcaggctggcaccagcgatactgatccagacactggtgtgacggtgactgatacttccggttcggccacgttatctctgatcgagttctggccggtcgcagatgcggtaacgatggcgcttaatgcccgtgctgcaggtctggaggacactcctattccgctggggatcaaaaccaccagttcggatgcgtctgagaccttcaacgtgaccctttcgggtgtaccctccggcgcgactatcacttacaacggtgtggtacttaccgtcatcaatggctcggtgacgatcgacaacttcagtaactccgcgccgctgtcgatcactcctccgcccaacagcaacgatgatttcacgctcactgtttctgcctactcggtggactctgctcctggcattggtgtcaccgatacgtcggctgtggcaacgcgaaccatcctggtgtctgtcaccggtgttgccgatattcctgtggtgacagccgcgggcagctatagcgtcactgaggcggtgctggactcgaatggcggaaaggtggcgttgtccagtctactggccagcgtcacttcagccgacactgacggttcggagtcaattaccgtgcgcatcaccgggctggcagaggggttctcgatcagtggggcaacgtcagtggtgtctggcgtcggcaccgaacgcgtctggattgtttcggcgaacgacttgagcaacgtctatgtcgtcgtcccggagaaccacagtggaacggttaaacttcaagtagcaggtgtctcaaccgagaatgacggtgactcgttgaccggccccctgacggaagtaagtttcaccatcacgccatcgcctgaatcgactgtcacgaatagcgccacgctgactgaggatgtgatctcaccattgggattgagcatcatccatcacaatggcgacacgaatgaaaccctgggcaaagtctacattgccgtaggctacgaaacccaaacctatacgctgtatctgagcggcgtggaactgtccgccgcagggttggcgactacgactatcgacggggtggactactacgtggtcccggccgatcaagtagctgagctaggagccaagggcgcgtccaatctcgacggtaacctgggagcgctggacctcctctacgaagtcacggacccctcaagcgacggcacgctacctgcagttacagtcattgagaagggcgccctcacactgacggccactccggtaacggatgttccgaccgcttcgattaccgatatcaccatgacgtcggccactggttcggtggcagacgtcattgcaaatgacaaggcagctcccgatacggccactgtgacccacagcggtacagtcacggttaatttgcacgttgattcagctgacaccgatggaagcgaacatctgatccgcgtgctcattgatggtgtgcccgacggcgtcactgtcataggtgcggcgcagaccggtgctggctcctggcttttggtgtatgccggcgccaacgcaaagtccatcggtacgggaggaatcaatgtcccggttgagtttgtggtcggtagaggggcgagcaacggaacctccagcatcaccatgactgtgcaaacacaggacgaaggacagtcgacgacatcgcccgccagcatcgaagctgactcggtcggctggaacctggtgctctccctcgacgatggccaggcctttgctccgccggtcattgaccaatggagctacaacggtgtgccgggtacggaggacacggcctttacgctgggcaatgtgattgatgcggtggttcataccggagacaacacgcttgcctacacgtacacggtcaccgtcactgacgtaccagcgggctccactgtcacaggaatgatcctgaccaccatcaatggacaggccgtctacaccgcaaccgtgctggtgccggtgaacggagacagtcaggcggctctggagggactacttgacggtataaccatcaccccaccagccaatggaaacgacaataacgccaacttcgattttgatgccacgcttacagccgcggccgtgggtggcaccagtacgaaggccgacaccaacgcggacatgcccatcatcccggtgaccgacgacgccaccattacggtgacgacgagcaatgtggatgagggaacgaacagtgttgttgcgaccattgatgcgcgtgatacggtcgatgggagctacggtcagatcgttgatggaaagctgtatgtccagatttcgaccacccacaacgatggcggtactctaaccgacagcaatggcaatacgctctcgcttgtccaggtcgcaggcgtcagtgggctaccagatggtgcctactacgtcctggatgttggcgtctcgggcggcaccgtcgaactcacctatacaacggcagatggcactgtactgcagccaggcgacgtcaccttcactgcctgggcacgctcacaggaagtcggtgctgccaatgaggcactgggtacttcgacggcatcggctcagatagtaatcgtcaataatggggtgactgttcagagccaggcggtgacgggcaaggaggcggcttcatcggacaagagcaacgccatcgagctgactggcttgggggttacgctgaacgacaatgacggctccgagtcgattcactcgatcttgctcgcaggtgtgccagtaggcttcctaatctacgtcggcaccgatgccggtaacgccacgctggctcagcagtcttccaacgccggtggtgacggcatcactaatacttgggtcctgtccaccgatggcgttctgccggcctatgtagcgattcttcctgcaaggcactggagcggtgagctgtccgacttgagtcttgtcgtggagtcgggcgagaacagcctgtccaccgttcgcgtagacagcgttgtacttggggcggtgacagtggtggccgtacctgatggtttgagcattgaaccgacggtctcctttggtactgaaggccagcttatcgagatgaacctgaacgcctccatgcttgatccggtggcatcgatggtgcaaggcgacgacagtagcgaaaccaccaccctgcaaatcactggcatgggggagcacgcagcgttctatgttggcgacaacttgctcaccagctcagtcagttatgacgacactaatgacacctacacccttacgggattgacgcaggctgatctggatgcgctgggctttgtgcaagctgccgcagcggtaagcgaccaggatgctggcaccagcggcactcaagtttcagttacggcatggacggttgaaagcgctaacggcaacgtttccagcagcgcttccggcagcctaacgttgtcgctcgctgcggtgccggcgacaactggcgatgaccacttcatctggaacggcatggcgatcaacggcagggccggcaacgataccgtggcgctgcggtatggcgaggatgtgagccacgatcaactggctagtttgttgaagaatgtggaggttatcgatctttcggttcagggcgccaacggcatcaccggcggtttgtcgattgccgatgtgatcgcggtcaccggttccagcagcggcacactgacgatcaagggtgatagccaagaccatgtggagctatcaagccaggcgcagtggcagacagatggtgcggttagcaacggctacgtcacttatacgagtgggtccggcgcgacgttgcagatcgacgagaacatctacaacaaccatcacgtcacctacgcctga

SEQ ID NO: 331075 - DNA, 780 bp, Pseudomonas aeruginosa
gtggacttggaaagggtgagttcatccagtgcagcagttgccgagagtgcgccgcttcagcggttgaggggtgcggtagttgcggtggttgctggtgacgatgagtcgcgtgagtttgtcattgatgagttgcagcgtgcaggaatatggggcattggtctagatagtgctcaggcactctatcgatacctattagaaagtccgtgcgatattgttttgttggacatcaatctgctgggtgaggatggatactctgtagcgaattttctgtgcggaatttctcctcgtgtcggagtgattatgttcggtgggcgtcactcgattgctgatatggcgcgaagcctgatagagggggcggatctgtatttgcacgcgccggtggatattccattgcttctagcggctttgggcagtttattgcgtagattgcacgctcaggctcctgtggaaaaagttgtgcagccgactcgcagcataaatgtacaggactgggtattaagcagcgatggttggaccttgtcgtccccagggcagcggtctttgccactcaccaatgcagagcgcgattttctaagcattctatttgcgcgaagagggaatgtcgtgagtcgagaggcgttgatagatgtgatagcccacacgccccacgatttcgatccacacagattggatgttttggtacaccggttacgcgcgcgcttggctgctattactgacgaaaagttaccgcttcgtgctgttcgcgggaaagggtacttgtttaagtgtggtccgatttaa

SEQ ID NO: 331076 - DNA, 846 bp, Pseudomonas aeruginosa
gtggagtacccggttcgacgtctctgccagaccctcaaggtgcatcccagcggttactacgcctggctggccgagccgaaatccgtacgcgctaaggaagatcagcgcctgctcggattgatcaaacatgcctggctggaaagcggtggggtctacggctatcgcaagatccgcgacgacctgcgtgagctgggagagtcctgtggccggcatcgcgtagcccgcctgatgcggggggaagggttgcgctcgcagaccggctatcgtcgtcggcccggctactacggcggcaagcccacggtggcttcgcccaaccgtctggagcggcaattcaccgtcagcgagccgaacaaggtctgggtcactgacatcacttacatccgcacttatgaaggctggttgtacttggcggtggtgctggatctgttttcgcgccagatgatcggctggtcgatgaaacctcggatgtgcagcgacttagctatcgatgccttattgatggcggtttggcgacgcaagcccaagcaggaagtgatgatccactccgaccagggcagccagttcagcaactcggactggcagagtttcctcaaggccaacaacctgatcagcagcatgagccgacgcggtaactgtcacgataacgccgtggcagaaagctttttccagttgctgaagcgcgaacgcatccgacggaaaacctatgccactcgcgaagaagctcgcagtgatgtgttcgattacatcgagatgttttataacctcaaacgccggcacagcagcgctatgcagctatcgccagtggagtttgagaaacgctatttccagagcttggaaagtgtctag

SEQ ID NO: 331077 - DNA, 2151 bp, Pseudomonas aeruginosa
gtgagcgataaagggaatcggtgcctgcagcattaccttcgagttttcagatgcagccagtcagcgggtggcagtggtcgcgccctcgatgaatgcttgcagcacttcctggatcagcgccctgccggcaagcatctgactgcgcttgatcgtgcggagggattgtcttcagcacttttctggtgggatccgcagaccgtccaggactccgagttggcgagcttggcactgagtcgagtgctgcatttggacgccgcgatcagtctcgatctagtcatgcatctggcgatcagaaatcctgagacgctcaggtgggccatacgctactcgaagctttttgaacgtgttgattcgcccctctggattggccttcgagcagcgctagatgatgaggagtggctaaccttcttcggtgtctgcgaccgcttgcttgagcagctagaccccttcgatgaactcattctccaagccgaaagccagttggagcatctgtcgctattcgagctgctttcgtacctgagtgtcctcgcttatcagtccctcactgaagatgctgcagatgatccttcaggcaggcagtgggaggtctacaaccgcatcattctccagaaactacaaacctgtcaggaggaggattttcgactgagcgagctgcggttagggcaatccttgaagcagcacctagctccgattctcttcatggagccagggacactggcctctgcagagtgccgcgccaatcttgaggcgctagctgtgctgattacagcaatgcaggagcgaattgactacgaaggctcgatcaactggttctgcttcgaccctgattgtcggtatcagctagagccaggtgagcctgtcctctacaacagttcggaggagggggcagagcgctggcgtcgtaccgggcggaaacacgatctgctctggcactactggatgaatcgtgcagtgggggagttcatcgactccggtctggcagatgaaatgatgggctctcctgagaatcacgagcttaaccagctggcctacatcaagatgcttcgcagcaagctgcagctgcagcagatctacggtgtcgcagaggagctctcactcggtgatggttcaagggtgatgcttcagcacgtattgctggcgagcgagttgacctcggtgttcttccagaaagagttcatccagccatttcaagatcttttccgtgatgctggtgtggttactctcgcgctcggtcagttggccatgaggggcatgcagataggcgaaaatcgattccctatgacatggtccgagggagacgaaaagctccggagaataaagggatggacggtctgcaaggagcatcccaagggcagcatcgactcggctaagttgatcctgcagttctggagcagtgacctcaaatcgttatctgagcagttgaaatcgcagccccgaatgcccgtaccaaaactttatgagcgtccgttctacaaaattgggcgctacagctttcagttcccatgggttgttgggcagcaaaataacctgacggcagcgcttaataatttgcggagactggatgcccgtcgagctggcgtactcgcagagacccaacgagtagagctaatgttggcggagcgtttgagagaccgtggcttctctgttgaggtcggctttcggccgccggcgacagaggacgacgatcctggagaggtggatttgatctgccaactgggcggggtgctgttgttgctggaggtcaagtccgggtacatccgctccacaacccatgaggtctggctccaccagaccagcacactgcgaaaggctgcatggcagctacgccgtaagcgagttgccgttgccgactcgctgagaaaagatcaaagcctgcgcgccaggttgggttaccgcgggctgcatccagaagcggagatgcatgcgtggatcgtcgatacatccattgagctggatgggcagtcagttgatggattcagggtcgtgtctcgtgaggtgcttgaagtcattctgcgggacgaaaagcatctccttcagccggtgggacagattagtgaggacgaccaaggcttgatgttctccgaaggattctccgctgtgcgattcgtcgaacttgttgagtcgggagagctttggcgagagctgtgttag

SEQ ID NO: 331078 - DNA, 204 bp, Pseudomonas aeruginosa
atggaccgatgcccctactgcaaacacgatctcggcgacgtcgaaccgctggtgctgcagttgaagcgcaacaagataggtggagagttcctgtttagttcaccgtgctgcaatagaccgctacgggcattcagcaatattggggactattaccttgagccaaccgatggttccagcaaaccagttatgatcggcatcgattaa

SEQ ID NO: 331079 - DNA, 1770 bp, Pseudomonas aeruginosa
atgagtgcccctatgcctgcttacgcgcttgccgcggaggacctgcgcggcaacgaagaccagtggcgtgcctacgagtcggctggcaattgcgtgattctagccggtccaggcagtgggaaaacgaagaccatcacgatcaagattgccaggttgttagccgaggctgtgcgcagcccgcaacgcattgcctgcatcacatacagcaacgcttgtgtcggtgaactcagagcaaggctcaataagctgggtgtggatgatggcaatcgaattgttatctctacggttcattccttttgtttgaccgagctggtcctgccgtatgctcctatggccaatctagcggtgccaactccactggcagtggctacaccagatgagtccaacaagctgttccgcgcagcctacgaatcgattcatggcgggaggatgagtcgctcgttcaagacttcctgcgaaaaattgagacgtactattccagatcggcgaagcgatgaatggagaggttggaatcctcgggagactagtgttgtcgaggcgtatgaggccttgctgctagcaaggggggtgatcgattttgatggtttagtgcttgccgggctggagcttgtcgagaaacatgagtgggcacgtcgcgccctcaaggcaaaataccccatcgtggtggttgatgaataccaagatctcgggttgcctttgcaccgcattgtggtggctctgctcgacgcgggggtgcgagtggtcgctgtgggggatcctgaccagtcaatttatggcttcactggagcaagacctgaccttctgagatcgctctcgcaggatccaagaattgagccgatcacgctccagctgaattaccgttgtgccaatcagatcatcgcagcatcgaggacgcttttgcctgatcccgcagagttccgttctcatgatggtagagccggtgagattagtattcacgaacgtcagacctcattgcgagggcaggcacgttatgcccttgaaactttgattcccatgcttctgcaagcgaatccaagctgggtcccaggtgacattgctgttctctatcgctcgcttaaagagggcaccgtgattgccgaggtagcggatagcctagggatgcgctacttccgattggacaacggttctcctatcaagcgctcgagactaactgaatggctaactgattctgcgaagtggtgcgccggagggtgggcgacaggggaggtgcagctatctcagctcctgagatcttggcaacggctaaatcgctctcgcacaagtgaggctagtaaacttgagtcccgcaaacggttaatctcgtctctattctccctgcgtgacggcaatcttgctcttaggcattggttgaaggcattgcgtagctctgtgctgaccacattgctcgctgaagagcctggccttgccgatgaggtggacacgctcgatgccttaatgagtgcggcggcgaaaggggaggttctgggaggttttaccgttcagatctttggtaaccatggaaagagcccagaccagatcaacctgatgacacttcacagctcaaaaggactagagtttcaggctgttatcatgccggggctcgaggacggcatattcccaaatgactacgaaaaaaattctgcagaacaatatcaggaggccgctcgactgttttacgtcggcgttacacgcgctaaggcgcaagtccatttgatgtttaactcggacgagtctccgttcattacgggcattcgcgaggtggcgcactga

SEQ ID NO: 331080 - DNA, 1842 bp, Pseudomonas aeruginosa
atgctattgagtcgagtaacgatcagtaactttaggaacttcaaagagttagatgtggctcttggtcggcacgcagttgtcctgggtgaaaacaaggttggtaagactaaccttctcttcgccttgcgattgatcttggaccctgcgcttcccgactctgcacgaagacttcgcttggatgacttttgggatggtcttcctcgacctctggctgcgacggacgcgatcgaaatttcggcggaattcagtgatttcgaagacagcgaagcactcttggcagtacttgcggatcacctgattcaacccttgccgatggtggctaaggtcacgtttcgctttcagcctatagcagggctcggccgggctccccgtagcgaggcagactacgagttcgtgctttttggtggggatcgtcccgagaacactgtcggttatgaactgagacgttggatgccgatggacctgtttccggctcttcgtgatgcagagtcggatcttgctaggtggacacgttcccccttgcgaccattgctcgacagagcagcacaaacgatcgatgaggacaatctgaaggctattgctggcgaagttcatctaacgacttcgaagattgctgcgttgccagaactggccgcagtggtggagcaggtcaacggccagttggctgggatgatgggggacgggcatgcgattcagaccgctctaggcttcgccccaacagatccagaacgattgctgcgtgccctgcagatgatgattgatggtggtaagcggggcgttgcagaggctagcttgggttctgcaaacgttctgtatctcgcattgaagcacctagagcaccagtgtttggtcgacgagggggagcgacagcatacgttcctggcaattgaggagcccgaggcgcacctgcatccccatctacagcgtctgatttacagaagttatttgaaggcacgcgatgaaggagagtccgatgatgagccccgaagcattctgttgactacccactctccaaacgtagctagcgtcgctccgctctcgaatattgtggttctgaggcgcgttgccagtgaggggcacaccattgcgcgatctctttgcggagttgatctcgcggacgaggatcgtgatgatcttgaacgctacatggacgtgacccgcggtgagcttttctttgctaaaggcgtaatcctcgttgagggggacgcagaaaaattcctccttccaacgctagccaggctgcatgatgaggcgttcgactttgacgcgctaggcatcacagtctgctccattgcgggtaccaacttcgccccatatctgaagttgcttggtcctcaaggcctcaaccttccggtcgcggtgattaccgatttcgatccgaagggggctgcggtcagccaggaggacgaagatccggacggggtaggcgccctggatagctacggcgagaatcgcgtagtgaatcacatcatgcctgagctgctgcctgagaagctttgggggaaactctcgttccaagaggtgatgaagctcgccccgcagcacggcgttttcctcaacgactatacgtttgaagtcgatctatttaagtccggctccaagagatactttcagcaagccgcgaagtcgttgtcgtccaacaaggccatgcacaagcgcttcgacaggctggctacggatcctgcgtcgttggatcccaaacaattcctcaaagatatcgattccatcggaaaggggcggtttgcccagcgtttagcttctgtcctgatcgaggaagacgctgatgtttgtccggaatacattcgcagcgccttggagtacttgagggagcagttgggatga

SEQ ID NO: 331081 - DNA, 276 bp, Pseudomonas aeruginosa
atgttaacgaccaatgagttgctgtatttggtggagctaaaggaccagcgggcccactggaagccacatgccgtcatgcaactgctgtcgacgattcaattcctctaccagtaccaccctacagagttaaatagtttccgcgtcaagaaggcattcgcctgcaacaagcgtcgtccggcgtttgcggtcgtgcagcaagaggtgaagcgccgtttttgggtctacggattttacgtcgacatccaggctaacgtgcttgtactgcctgctgtctaa

SEQ ID NO: 331082 - DNA, 1239 bp, Pseudomonas aeruginosa
atgattcggcttcgcgtcaagaacttcggtccaataggcccaggtctggaaaacgacggctggattgatttcaagcgcgttactgtcttcatcggaaatcaaggctccgggaaaagcacgctggctaagctgtactccaccttcgcttggattgagaaggcgctggttcgtggagattacgagcgaaagtggttcgagcgtaaagggcgtttgaaaaacccatttttgagctatcaccgcctggaaaattatctggaaagtagccgtggagatacgctgatcgagtatcagggcgatgcttgtacgatcagttacgccaagggccaattaagcatcactgagtcacatggtcaggactacaagctgcctcaggtgatgtacgtccctgcagagcgaaatttcatctcctatgtccggcatcccagggagctgaagctttcatcagagtcgttgaaagaattcctctctgcgttcgatcaggctaagcagggtatgaaaggaacggtcaagctgccgatcaacgacagcgagatcgaatatgacaagctaaatgacatcctgaacctgaaaggggcggggcataagctacggctgacagatgcttcgagcggcttccaatccctcgtaccggtgtatctggtgagccagtaccttgcaaggtctgtccgggaggggagcgaagagagtcagcagccgatgagcgctgatgagtcggagcgattcagagcggaagtggagagcatttttgctaatgcatctctgacgccagagcaaaagcgagtggcgatctctgttctttcttcacgcttcaataaacaggcgtttatcaacatcgttgaggagccagagcagaatctcttcccatcatctcagtgggatatgctgaaaagcctccttggcttccaaagcgagggtaagcacaaccgcctggtgctcacaacgcatagcccctatgtcgtcagttacctcagtcttgcgattcagggaaggcaccttcagcaacgtctcattgaggcgaagcgagatgacttactgccgagtctttacgagatagtgcccgagaaggcgctgttggacgctgatgacgtagcgatttatcagtgtaatgagctcgatggcagtatcagcaggttagctagtttcgagggcataccttcagacgggaatctcttgaacaactggctgcgtgaggggaacgagctattcgaccaactgctggacttggaagaggcgatatag

SEQ ID NO: 331083 - DNA, 969 bp, Pseudomonas aeruginosa
atggctcatctcgtagaaagcatggcttacgttggcgcggctccctggcatggtctgggcagtcgcctgtcgcaacgacaacctcttgaagtctggcagcgcgaagctggtatggattggcaaatccaggaaagccccgttcacttcaagtcagacgccgcgggccacctcggcagcattcactcgttccccgaacagaaggtgctgtatcgctcggacaccaaggcccctctatctgtggtctctcaacgctatcaagtcgtgcagccgcgggaggtactggagttttaccgggacctcacccaggtctccggctacgagcttgaaaccgccggcgtgctcaaaggcggccgcaagttttgggcactcgcccgcaccggccagaacacctcgctgaaggggaatgacctggtcaatgggtatctgctgttggctacgtcctgcgacgggactctggctaccactgctactccgactaccgtgcgggtcgtttgcaacaacaccctcaccatcgccgtcgacggcgccacccgggctatcaaagtcccgcacagcactcgcttcgacgctcaagccgtgaagaagcaactcggcatcgccgtctcgcaatgggacgagttcatgtaccgcatgcgcatcctggccgacatcaaggtgcatccacgcgaagcaacgagctttttcatgaacgttctatgcgacgtgagagcgaaccaggagatacccgacaagctcgttaacgagcgcgcactacgtaaggtgcacgaactgtatgagggtgccggacgcggttcgcatctggaagcagccaaggggaccgcttggggaatgctcaatgcagtcactgagtatgttgaccatgagcgtcgcgcacgcagcaacgaataccgcatggactcagcgtggtttggtcagggagcggttatcaagcagaaggcgttggatgctgccctggcgctagcagcctga

SEQ ID NO: 331084 - DNA, 363 bp, Pseudomonas aeruginosa
atgaaaaacgaagaggatttgcagcgactggcagtgttaacaggccaggccattgctaggcacagaaaacggagagggttgactcaggacgatgtcgctgagctgcttggtataggcaatgaggcggtgtctcggattgagcgcggcctgagaaagcccaacatcgagcgcctgattgagttcgccaccattttcgaatgtgatttagccgagctgttgaccgaggcgagcccccgtgcagttgagcaagctggacgtatccacgacttgttggagccattggcggcagaggatcgccagttgttgcttgagacaatcgaacggttagctaccaggctgaagcctcccaagaaaaagcgctga

SEQ ID NO: 331085 - DNA, 366 bp, Pseudomonas aeruginosa
atgcaggaatccactgcggttaaaggaatttggacatatgaaatcgaaggaaagcacgtacgacgcctcgaccaaaaacagatcgttgatctgaccagcaatgagaagcggagctacggcttgatgtccgggagagcagtgatcggaatgtgggcgagagacgaaatactggcttgcgtcagccacaggaggttaggacctcctgcgctaaagacctgcctcgatgagcaagtcggaaggtttgcatcgtatggctttggcaatgcggcaaatattcaggaacgtcacatttcgctcgccccgttcgatcttacccatatgagaacggtcaatcgaagctgcgtcagccagcgcttcctgagatag

SEQ ID NO: 331086 - DNA, 471 bp, Pseudomonas aeruginosa
atgcctaatggcgaagtacgggccgtgcctggccacaagccggtcatctgcggtgaagatggaatctgcgctcttggcaaagagttctatggcagtgcgccaaaagggaactacgtcgtcgctgccggttggtacatgggaaccgacacggccgggaacccggtttcctatgccaacggcacggggcctggtttcaatgggaaacgccagaatgccaacactttgggcaagcgagagcctggtgaaaaattccatgccgtctgccctatcaatgacagcgagtactgcactgtcgatacgctcgtggggtttgtcacggtgaagctggccaatctgcccactattggcattccggccctcaacgaagcagatgtgacagccaacggagggaactgcgactccctgcccatgtgctacgacaagaacggcattcagatcggcgtgaatgccgacatgctcccgaaaaaataa

SEQ ID NO: 331087 - DNA, 594 bp, Pseudomonas aeruginosa
atgagcaccagttttgataaccctcaatccaacggcatcgacccgaccggtaatcagtggcactacgagaagaacggagaacgcaaaggcggcttcgatcagcagcagatcatcgatctgattcgcagtggaacgctgacctacggctcgatggtctggaagaaaggcatggccgcatgggccaagatcgagcaaaccgaattgcgtcaacatctcgaggagttcggcccgccaccgctcaccgggtccggcgtgaacaacaagattgtctggctgatcgcctttgctccgatcattggctacctgctggagtccttcgttgccggcctgctcggcgcaaatgaagctcagtgggaacgtgccatgtcggagaaccgctactggtacgtcactctggctttgaacatcggtttgtcggtgctcgactccaagcgcctcaagcaagccgggcacgatgtcagtcacttcaaaggctgggtattcgtggtgccggtctatctgtatcagcgctccaagctgctgaaccaaaacctcgcctacttcatcacctggatcgtctgcttcgtcctcagcatggctgcccaccagggttaa

SEQ ID NO: 331088 - DNA, 1005 bp, Pseudomonas aeruginosa
atggctcacacctatttcacccccacagcagagcacactcgccctgctctacgcctggttagcacgaaggaattgtcacgcgaggattggcttgctgttcgtaagcgtggcattggcagctctgatgccgccgctgccgtcggccttaacccttacaagtcacaactggagttgtggctggagaaaaccggtcgcgattctgggctgcctaggagtgacgtgaacgatgaggaaagccctacctattggggcaacatcctcgagtccatcgtcgccaggcattacacccagcgcaccggcaatcgcgtgcgtcgtatcaacgccgtgctgcagcatcctgatcccaaactcgactggatgttggccaacattgatcgtgaggtcatcggtgccgaggacgtgcagatcctcgagtgcaaaaccgcgggcctcaacggtgcccgcctatggagagaaggcgtaccggtctacgtgcaattgcaggtgatgcatcagttggcggtcacgggcaagcaggctgcggatgtggctgtgctactcggggggcagcaattggagactcatcgcattgagcgcgatgacgagctcatccattggctgatcgagttggagaaagagttctggggctacgtccaacgtgatacccctccacctgctgatggatcggaatctgccgagcgcgccttgcgttgtctgtatccccaggaccaagggagaacattggatttctctgagaacgtcgctctatcggcagcgttcgatgaattgaaatctgtacgcgccactctcgaccggcagagcaagcgcgaggcggagctgaagcagcagctacagcaggccatgggcgatgccagtcgagcggtgttcgccaacggcatggtgtcctggcgcaaagccaaagacagcgtcgtattcgatgttgctcaagcccttaaagagaagccctatctcctcgcacgctaccccatcaccaaaactggcagccgccgtttcctgattctctga

SEQ ID NO: 331089 - DNA, 912 bp, Pseudomonas aeruginosa
atgctcaaaggcttggctatcaccccgccagtgctcgggcggatttccatcggtaaggtcgtcgaaaagaatggcaagcgcctgccagaaaaggacgaccaattcaccatcaccacacaggttcagctgcgagaccactggctactacaccctcttgatgaggagctacgcaaagctcagggcggcaagatccgcagcatcccaatacgtctgctgttcaatgctccggatttgaattttcgtgcggagtacagcctgttcgatcggcagacggggcgaccggtatgcgtaggaaacggcgagacctgtaagcgtcgaggcaaagacggagtcgagtctcttccctgcccttcacctgacggctgcacactcgcgaagggtggcgcctgtaagccctatggtcggctcaatgttgccatcggcgatgaagactcactgggcagctttgtgtttcgtacgacgggcttcaacagcattcgaacgctggctgcacgactgcagtatctccaggcaatctccggcaatcgtttggcctgccttccgctagagctgcgccttcgtgggaaatcgacacggcagagtcatgggctgccgattttctatgtcgacatcaccgtacgtgacggcatgtcgatggaagaagcgctgcagcatgctcgagacgtcgaggaggtaaggcaggcagcgggctttgatcagaacgccctggacgcagcagcacatctggggctcgccaatggcgcctttgaggacagcgatgaagaaggcgaagccatagcacatgagctctttccggaagcgacagccgctccagatacatcttcgactgcagacaacacgcctaccaacccagccacacgccccactctatcggcactactgcgtgaccgcgccgaagcgcgaaatcagtaa

SEQ ID NO: 331090 - DNA, 180 bp, Pseudomonas aeruginosa
atgcttagccttacacgtagcgtcggcaaaaccatccgcattggcgatgacatcgagatcgtcattcttcgagtcagaggcaaccaagtacgcgtcggcatctccgcaccgcctcacattacggtgcatcgtgatgaggtctatcaacgcattcaggcggaccagcgacacccatcctga

SEQ ID NO: 331091 - DNA, 180 bp, Pseudomonas aeruginosa
atgggcctgttgcgcttcttacgtttgctatttgtgctggtcagcatttttgccggcaccacagcagtcgtagcgctggtgattttggccgcgcgcttttggccactgatgctagtcatcgtactaacactcgccatatttcattttgcatctaggagggcgcacgacttccagcattaa

SEQ ID NO: 331092 - DNA, 732 bp, Pseudomonas aeruginosa
atgggcgggcctcatcggaaaattatgcggcaccagattcactgtggcagctgtgttttagcaggtcattgtttgccgtcttcgttatctgtaagtgaggttgatattctcgatgaaatggttaggcgtagcagaccattagggcgaggggagttcttgtttcgtcaaggcgatgaatttaggtcgatattcgttattcgcacaggcatgataaaaaagtactgtattacagacgctggtgtggaaaaagtcacaggttttcaatcgccaggtgagattctcggttgggctggagtggattgcggagagtatccaatgtccgctcaggtactcgagcctacatccgtttgcgaaataccattcgaacgcctggatgaattggctgaagcgatccctcaattgcggcgtcaattgatgcgacttatgagtcgggaaatctgggaagaccaacagatgatgctgctattttctaagaggtcttctgaggaaagaattgcaacatttttgctgagtttgtctgctagatttcgagctagagggtattacgcgcatacacttcgtttaagtatgtcccgcggagagattgggaattatttgggggtggccatggaaacggtttcccggtcttttacgaagttgcagcagttagggttgattagggtaagtggtaaggaagtgcagataattgactatttaagtttttgtgagctggccggtagtgatgagggttag

SEQ ID NO: 331093 - DNA, 1194 bp, Pseudomonas aeruginosa
atggatggacaagataggccggttataaaagcttatggcttcgttgaagccgtgacttatcccgaccctaatgagagtaatcgggggcgcgttaattttgtattggatagcctgcgagttgaggcatttcactcgggggtgagcgtcgcggatatggctgatgatcttttaatcgtgaggattctctcaaccgtcaagcgtttagaaaagctctttccagagattaagtgggaggaggggagttggatcgaattccagcttaaagacagtccaggagatcctccagcttggtacctttccgctgcgaacgactacagtgggccggttgtacgtaccaacatcatcaaggcagtccggttaggtgggcgtccattcccggagaatagccttgaacaaaatctggcccagttttgccgatcctctgatgcggcccgcgactctccgcctctgggcattcgccgccggaaaaaagcgttgagtggtccgtttgtgagggtagtagatgttgggcaggctagcttttcagcgattcatacctccaaacaaacctcatcaccaatccttgggtattttgatgtaggagagccgctttttttccaccacaagacatttccccgcgtattttatgaacggaaaattttacctgtatcgggatttgtcgttctgtctcattgggattttgatcactattcgcttgccgtcagtaagcttccgaagcttcgaaaccttgtgtggtacgcacctgaccaaccagttggcccaaatgcagcaaggctacaagctctactaggaaccaacctgactctgctttctgttccatttttttgcgttagcaaaggaatagagctctggaaagggacaggatctagcagcaaccgaaacgacagtggatacgcgatgaggataaccagggccggaggccccgttctcctctcgggtgacctgccatactctatgtttcccgcagggattgggaataggttctcagcaattgtagtaactcatcacggtggcgccttcactgggccgcctccaacccctttggccaaaggagccgtcgctgctgtttcgtatggcattccaaatcgctatcaccatccaaacgcgctggccattgggtttcaccaaagcgttggctggtcaattcagccgaccaacacttcaacaaagaagcggggagatgtttggctctga

SEQ ID NO: 331094 - DNA, 207 bp, Pseudomonas aeruginosa
atgaacaacgaagaaatgatcatccagttgcggttgtatgtggcaggtattagacatgccgattgccttgaggcaaaagctcagcgctacgggcaagcgctaggctatataaaggcgatggaggatgcggggttagtattcggtgaggaattggcggcactgcgaagtgagattgagaccaaccgcttacgatctgaactgccttaa

SEQ ID NO: 331095 - DNA, 213 bp, Pseudomonas aeruginosa
atgccagaaccacgcctccccgttgtgctttatcgcctcaacgagaacattaacgccatcggcgctgctgtcgaagagttggcaatttgggttgaactacagcacggcgataccgaaacctccgcgctagtcaaaagccagcttcaagtgctggtgcggaattcaaacgtgatcgtcgacgcactggcagagctcattactgaagaaaattag

SEQ ID NO: 331096 - DNA, 450 bp, Pseudomonas aeruginosa
atgaaggttatgcgcattggggtcgacctggccaagagcgtgttccagatccacggcgtcgactgccaggagaggcctgtctggcggcagcggttatctcgcgaacgctggcttcaagcgatcctggagaaggccgagcccgattgtgagattggcttggagagttgcggtggagcccatcattgggctcggcaacttgaggcgcgtggatttcgggtcaagttgatcgcgccccagttcgtgaagccctacgtgaagagcaacaagaacgacgccaatgacgcggaagcaatctgtgaggcaatgagccggcccagcatgcgcttcgtggcgatcaagacggttgaacagcaggacattcaggcggcacatcgcattcgagcagggttattgagcaacgcaccgccaaggccaaccaggttcgtggcctggtcgcagagtacggcctga

SEQ ID NO: 331097 - DNA, 462 bp, Pseudomonas aeruginosa
atgctggatgaacgggtcaaggagctggattgcgagatatccgggattgcggccaatgagccgagcgctcagagcttgcagcaactgcgcggcgtcggcccgatgatcgccaccgccctcgtcgcggccatcggtgacgcccgtcagtttgccaatggtcgacagtttgctgcctcgctgggattgacgccgaggcagcatagctccggtggcaaagatcgactgctgggcatcagcaaacgcggcgatgcctacctgcgaacactgatgatccatggcgctcgatccgtgctgcgcacagctccatccaaggatgaccggctgagccaatgggccgtccgcttggctgaacgatcgcacaccaacgtggccgccatcgcgctggccaacaagaccgcgcgcatggcctgggcgatgctgcgcaatggcactgcctaccagccggaacgggctgcggcctga

SEQ ID NO: 331098 - DNA, 900 bp, Pseudomonas aeruginosa
atgaaactttaccactacacaagtgtgccactcgcagaagccatctttttctccagccttcgatttggacaatatcagaccgaaaagagggggacgtttcagtgcgtgtggctcactgaaaatcctgctccagaggggcatgggcttttgacaggggagcagttgaccacggctcaagttgagggcctccgcaaccgaggagaagccgtatccaataatcatactcatgacaaaacccaggttcgcattgagctggattcaagcaacctgagcagcttttccatcgatgctaagggccggccacacgggcttatccgctacgtggagttgagtagaatggtgggggaccatgatctgtacagaaaatccatggggctttcctgctattgcgatatgaaaacggtcaccgatgagcaactgtattatctgatgagaaaccagcctacacaggaagaaagttggtggctctattttggggagatatcttctgagctcttcagcggtgtgtcgttcatgcaaagtggtatcgcgaccccctattcgttagaaagccacggacgaagcgtgatggagacctatggacttcacatggcctcagaatcagccctcgctgaccttcaccagattcttccccaccttggtcgatttgatactcctcaggcactagcgttttgtaggatgcacgacagtaagcccagcattagcttccaatggggggagtcgatctgggacatctctctcgacgggcaatacagtacgacattgagactcggggaactgccggaaaatctcagtctggtcaaagactggatgtcgagtaatgacgggcaactacaggctctctggttagctgcggtcgaatcctacaatcgcttctatcccgacaagccccgagcttga

SEQ ID NO: 331099 - DNA, 372 bp, Pseudomonas aeruginosa
atgtccgacgaccttattccctggctgcagaccctgatgcgcgccgagcgcgctggcgcgcgggtcatgctcgacagcctgcggcagaccgacgaacccgtagtgcgcctgcgcctggagcgtctgcacgaaggcgaggcagagagctgccgtcgcctgcgccgctgcctggagcgcctgggtgcgacgcccgacaacggcgttggcgatttccacgccagcgccatggccatcgaggacctggagctgcgcttcgacttcattggccgcggccagcactggatcgcccggcagataatccaacgcctaccgaagatcaaagagacctggctgcgcgaggagctggaagctgtgctgcagttacatcggtga

SEQ ID NO: 331100 - DNA, 150 bp, Pseudomonas aeruginosa
atgtggccgctctaccatgccttatccaggatcaaggccgacgagcggcgcagcggaaatgaggaggtacggcgcaagctggatgcattcgggaaattgcagcatcagtgcaattcaattcatttcaatcgactgcgcacaacggtctag

SEQ ID NO: 331101 - DNA, 1446 bp, Pseudomonas aeruginosa
atggaaagcgcgatccccctcgatcagcacgccccccgcgacgccgaatacaactacgacatcgttcgccgcttcaccctcaccaccctgggctggggcatcctcgggatgttcatgggcgtgttaatcgccgcccagctggtgtggccgcagctaagcctggagatgccctggaccagcttcgggcgcatccggccgatccataccaacctggtgatcttcgccttcggcggcagtgcgctgttcgccacctccttctacgtggtgcaacgcacctgccgggtgcggatcatctccgactccctggccaacctactgttctggggctggcaggcgagcctggtggcaatgctggtgagctacccgctgggcatcaccacgtcaaaggaatatgccgagatggagtggcccatcgccctctgggtcacggtgctctggctggtgtacgcctacctgttcttcggcaccatcgcccgccgcaaggtgcgccacatctacgtgggcaactggttctacggcgccttcatcgtggtcactgggatggtccacgtggtcaatcacctggcgattccggtgacgctgctcaagtcctatccgatctactcgggcgccaccgacgcgatgatccagtggtggtatggccacagcgtggtgggcttcatcctctcggtgggcttcctcggcatgatgtactactacgtgcccaagcaggccgagcggccgatctattcctatcgcctgtccatcgtgcatttctgggcgatcatcacgctgtacatctgggccggcccgcaccatttgcactacaccgcgctgcccgactgggcccagtccctgggcatggtgatgtccctgatcctactggcgccgagctggggcggcatgatcaacggcatgatgaccctctccggcgcctggcataagctgcgcaccgacccgatcctgcgcttcctggtggtgtcgctcgccttctacggcatgtccaccttcgaagggccgatgatggcgatcaagacagtgaactcgctgtcgcactacaccgactggaccatcggccacgtgcatgccggcgccctgggctgggtagcgatgatctccattggcgcgctctaccacatgattcccaagctctacggacgcgagcagatgcatagcgtcgggctgatcaacgcccacttctggctggctaccatcggcactgtgctatacatcgcctccatgtgggtcaacggcatcacccagggcctcatgtggcgcgccatcaatgccgacggcacgctgacctattccttcgtcgaggcgctcgcggccagccatcccggctacatcgtgcggctgatcggcggttccaccttcgccagcggcatgatgctgatggcctggaacacctgggccacggtgcgcgccggcaagccggtaacgagcctcgaagcggccagagcctga

SEQ ID NO: 331102 - DNA, 207 bp, Pseudomonas aeruginosa
atgctgctgagcctcatcggcttgatcgcctgcgccgttgcctgctggcgagcctgccgccgggacgctgacgaacaggcggcgctgctgcccttcgccgacgatcctgaagccgcgcggcgtatgagcgcggccaccgggcggcactgcgaacggatcgtccagccgctgccggaaccgccaccgccctaccgaatgcgcgcctga

SEQ ID NO: 331103 - DNA, 1134 bp, Pseudomonas aeruginosa
atgcctgttctcaccggctggcggcaccgcgccgccgcgtacctgcccgacatcccccatacccgtccacgcgaatggttgcgcgcctctaccggggccagcctgggcttcctgctcagcgccgccacctgcggcctgctgttcggctcctcggtggcgctgcacttcgccggtccctgggccgcctcggcagtgctgctgttcgcggtttcttccggcgccctagcccagccctggtcggtgatcggcagctacctgtgcgcatcgctggtggcactgctgatcggcttctggctacccgccggcatcgccagcgcggccctcgccctgggcctgagcctactgctgatgtacccgctgcgctgcctgcatccgccgggcggcgcgctggccttctgcatggtattcgccgcgcccctgcccggcgagccggcctggatggcaacgctgccggccatcagcggcggcctctgcctggtgctgctggccctgctgttcaacaacctgacgcgcataccctaccctcgccgccgcagcctcgcgccggacaaccaccagacgcaggacccgacccccggcgcgcgggtcggcatccaggccgccgacctcgaccgggcgctggacgagctggacggcttcgtcgacatcacccgtgacgatctggaacgcatcgttcgcagcaccgagcgccacgccctgcgccgcagcatgggcgacacccgcgcgcgggaggtgatgtcgcgcgacctgatctgcgcctcgccggaaacgccgctcagtcacgccctgcgcctgttggtgaagcaccacctgaaggccctgccgatcctcgacgaagatcgccggctggttggcatcgtcagcctgatcgacctgctggtgccccggagcgtctggtggaaacgcctgcttggcggcatcggcctgcgccgcggccgcctgctgggcgaggtgatgaccagcccggcgctgcacgtggacgccgatactcatgcggtggagctgatcccgctgctttccgatcacggcctgcactgcctgccggtgctggagcgcggcgagctggtgggcgtgatcacccagaccgacctgatcgctgccctcgaacgcgacctgctcagccacctgggctga

SEQ ID NO: 331104 - DNA, 861 bp, Pseudomonas aeruginosa
atggacatcgacctcacccgtaccttcctggaaatcgtccgccacggcagcttcgtcgccgctgccgagcgcatgcacatcacccagaccgccgtcaccgcacgggtgcagaagctggaggcgcatctcaactgcacgctgttcgtgcgcaaccgcgccggcgcgcgcctgaccccgcacggcgaggcgttcgtcacctacgccaaccagatcctgcagacctgggagtcggcccagcgcgatctgccgctgcccgagggcattcataacgtgttgcacatcggtggcgaggtgagcctgtgcaacccgctgatgctgcgctgggtcagccgcatccgccaggtgatcggcgaccacgcggtgcgcgccgagataggcaacggccccagcctgctgcgccagctggagctgggcgtgctggacgccgccctggtctaccagccgacctactggccgggcatgcaggtggaacagttgctggaggagaaactgatcttggtccgcgcgaagaaccccgagccctatgtctatatcgactggggcgacggtttccgccaacagcacgacagcgcgctgccggagctggccaaggcgccggtatcgttcaacctcggcccgctggcgttgcagtacatcttggagaacggcggctcgggctacttccgcacgcgggtggtgcagagctacctggaccgcaaggtgctgcgccgggtgcccaaggcgccggagttcagctacccgacttatctcgtctactcgcgcgaccgcgattcgcaagcgctgcagcaggccttcgcactgctgcgcgaagtagtggcgcaggacccggattggtcgcaacgctgggatccgatgatctga

SEQ ID NO: 331105 - DNA, 987 bp, Pseudomonas aeruginosa
atgaagtacgttgcgtttggaaatactgggttgcgggtatcccaggtatcccttggaaccggtaatttcggcacgggctgggggcatggagctgatccagaagtcagcaagagcctctttaacgcttatgcagaggcgggcggcaatttcattgatactgctgacagctatcagtttggccagtcagaagaccttgtaggcgagctgctgaaaggtcgccgcgaagactttgtgttggccacaaagtacacaaacggtgctaaccccaatgctaaccgcctagtcacgggcaatagccgtaaggccatggttgcgtcggtcgaagcaagcctcaagcgcctggggacggatcgaatcgacatgtattgggtgcatcacccggacggtgtgacgtctctggatgaaatcctgcgtggcctcgatgatctcgcccgggccggcaagattctgtacgccgggttgtcgaatttctctgcatggcagctctcgagggctgtgacgattgctgagctgacccgctccctgccgattgctgcggttcagttcgagcacagcctagtacgacgcgagcccgaggccgatattttccctgcatctcaagcctttaatctgggcatggtgacgtggtcgcctctgggcggagggttactgaccggaaaataccgtaaaggcgaagcggggcgtgcggaagcgcttggcgggaaagtgttccagcctgaaaactcgactcagagaactgacgtgctggacaccgttatcaagatcgccgaggagctgggcaccactccaggccaggttgcactcgcctgggcaggtactcacggctcagtaccaatcattgggccacggtcgctgtctcaccttgtcgataaccttgctgccctgaacttgcacatgactccggagcagattgatcgcttggatgtcgtgagcagtttgaatccagccgctccagcgagaacgccggttgtgtggggtgggaagtaa

SEQ ID NO: 331106 - DNA, 1209 bp, Pseudomonas aeruginosa
atgccgcaggtagctgctatccgaaccgatagctcgaaccctgcttcgaacatcacgacgctgcacacaggtgctgtgctccttctcgcagcactggcagctatgggggcactggcaacgaacatcatcctgcccgcattcccttcaatggcacgcgacctgggagcctcaatcagccagctgagtggaacgctgagtagctttttcctagtgttcggactgggacagttggtagtgggcccgctatcggatcgctttggccggcaacgcctggtgctgtccggcttggccattttcatgctcggaagtgtcgtgtgcgcattggcagattctctacccgcactcattgcagggcggagcattcaggcgttgggcgtgtgcgctacagcagtgttatcacgtgccattgctcgtgacttgtatgacggtgaagagctggcacgagccttatccctaaccatggtcgctatggcagctgctccaggattctccccattgatcggcggcattttgagtgacgcgatagggtggagagctttgttcatcatcatcgcgatggtggcgttggcactagcgctgatttacagaatgcgcctgggtgagacacattcaccggacaggcgctcgccgctgtcggtagaggcggtctctcgaagctatgccgcgctgatccgcgaccgcaggctgatgtccccaggcctgtctgttagcttggtgataggcgcgctctacgcattcttttccatggcacctgcgatcctactcactggcttcaagttgtcgtcgctgcagttcgggcttttcttcgcaatgacagtcgtgctcgtgttcaccgccggcctgatagcaccacgcgtggccaatcgctggaggcaaatgacagcggcacgcatcggcctggtggtcgccctggccggcagcctggttctgctgtggggcccaaccgacttcaaattcttctgtatcgcaccgagcattttcctcttgggtatgggtctatttaacccactcggcaccgctatcgcgctgcatccatacggcaagcaggccggtgctgcttcagcgttgctgagcttcatgcagatggggtgtgctgccttggccatcaccagcggcaccctgctcgccctgcccccgtatacgatgcttggggtcgtgctcgtgggcgcgatggctactgcgttcgtgtgcttcttgactgccgaataa

SEQ ID NO: 331107 - DNA, 900 bp, Pseudomonas aeruginosa
atgaatcggttccctcccttcaaagcgctcgtggcattcgacgcctccatgagacacaacagcttcagtgaggcggcacgagagcttcatgtcacccctggcgccatagggcagcagattcagaagctcgaggcatggttgggcactgcattgttcgtgcgttcagtaaggcaaatacagccaacaattgcggctatccgctattgggaagatatccaggcttcgctgatgcgaattcagagggccagtgatgagttgcgtatggatcaggcaaacgaggtgtggttgtccatgccaccaaccctagccgcaaaatggttcgcctcacgaatgggagactttctcagcttcagaccggatatctcgttgcacctgagtgcatcgacaaccttgatagactttgagcgtgatcgagttgatcttgctatccgctattttgacggcaatgaccccagcttagactcgacactgctttacgctgacgaggctcgactttactgcgcacctgcttatgctcggaagcattcactgaacaaccccgaggatctggtgcgagttacactccttcaaaccaccttactgcctcattggcctcagtggttggaaatgcacactcgattgtctaaagcccaaatttctgcaattccaagccagcacttcgatcaatccatattggctatagagactgcccgtcacggccaaggggtagttttgagtagctcaattcttacccagctagaggttcaagacggttccctcatagagccttttgagctgaccctaccagtcagtaagggttatttcctggtgcacctgcggggcacacagttgcgtccggcagcagccatcctcaaacagtggttgatcaagcgggccgaagaggagcgtctgctcgcgtga

SEQ ID NO: 331108 - DNA, 909 bp, Pseudomonas aeruginosa
atgaacaagctggtctaccccgcctttggccttttaggactgatttggggaactaattttatcttcatgaaatgggctgccgtgctgatttcacccatccaaatcgttctactccgcgttctgttcggcttcctccccatccttctcctggctatatcacgtagggccttgagctggtcagatctacggcaatcgcatcacttcatcgtcatggcacttctagctacggcgctttactacctcgccttcgccaaaggcactgcgctgttaccatcaggcatcgcaggaatgctcagtggtgccatacctctattcacatttctgacagcatttctctttttgcgccaagagcccatcactcggatgaccatcacagggctggtcattggcttcttcggtgtgatgctgatagcccggccctggaacgcctctgctgacggtatctcgctcagtggcgtgctattcatgatcggtgggtctctaagccttggctgctcgtttgtgtatgcgagaaagtttctggtagataagaatctgtcccctctcgcgctctcgacttatcaaataggttttgcgctgctgttactcctggtgactaccagcttcgatggtatggagcggatcacaagcgaacctgtcgccttgactggcctagtcttgggtctaggcgtcatgggcactggggttgcttacgttctgtactattttttagtccagcagctcggggcgctcaaggctgcaggggtgacttacgtcccaccggtagtggcgttggcaattggcaccattcttgtgaatgagcctatccacgcctcagatctgctggcactggcttgcatcatcgtcggggtctacgttctgcaaaaagggaaaacagcggcaccgccagtgcgtgaaataaagccttga

SEQ ID NO: 331109 - DNA, 621 bp, Pseudomonas aeruginosa
atgaacatcatcgctacctgcagccgtgagccctggaataaagggaaattggtcgggcagaaggccccgctccgactgagagatatctgggccatacgagtaaggcttcaaattgcagaaagaacccgggatttagcactcttcgatctagccatcgacagcaagcttcgagcctgcgacttaaccaagctccgtgtgcgcgatgtcgcccatggcgagcatgtatcatcacgagccatggtgatgcagcaaaaaacgcaccggccagtgcagttcgagatcacagagcaaacacggtctgctctcgccgcctggatacatcacgctcagctccgtgacgaggactgcctttttccgagccggctgcatacctcagaccatctatcaactcgtcaatacgctcgaatcgtcaaaggctgggtgcaagctatcggcctggatccggccatgtatggcactcacacaatgagacgtacgaaggcatcacttatctatcggaggacgaagaacctgcgggcggttcaactactgctaggccatacgaagctggagagcaccgttcgatacctcgggattgaggtcgatgatgctttggagatggcggaacagaccgaagtttga

SEQ ID NO: 331110 - DNA, 255 bp, Pseudomonas aeruginosa
atgagccaagtgactatctacaccacccagcattgcccttactgcgtgagtgccaagcgactactttcgagcaagggggtcaaccccctcgaaatcaatgttgaagagtcgccccagcatctggcggaaatgctgcagcgatcccggcgcagaaccgtcccgcagatctttgtgggtgaggtgcacgtcggcggtttcgatgatctggccagcctcgatcacaagggcgggctcgacgtattgcttcacgcctga

SEQ ID NO: 331111 - DNA, 519 bp, Pseudomonas aeruginosa
atgactcgtatcgccgctctctcgctggaccaagcccctgctgcctcgcgcgctgccctcgaaggcattcagaaaggcctcggtttcattcccaacgcattcaagactctggcccattccccggccgcacttaacggctacctgggcctcgcccaagctttgggtaaaagctcgctgagcgccgccgagcgtgaagtcgttgccctcgccacctcggaaatcaatggatgcgactactgcctggccgcacacaccttctttggcgccaaggctggcttgagcgatgaggccatcagccaagcccgtagcggcacactcagcgcggtcgcagcgctggcgcatcagatcaccgaaagccgcggtcaattgcgcgacgaacagatcgctgcagcgcgcgaggccggtcttagcgatagcaagatcgtggaggtcgtggcacaggtcacgctgttaaccctgaccaactacctgaacaacatcgccacgaccgatatcgacttccctccgtcggcccactaa

SEQ ID NO: 331112 - DNA, 825 bp, Pseudomonas aeruginosa
atggaccgactatcgacattgctcaaacacttcaacctgcacgcttccacgtttcaccagggcggcttctgcggcaccacccgcctcgatgggcagtacagcgtcggccacgcccatctgctgcgttcgggacgtctttccttcagagaccagcgcggccagctcaccgaactgacggagcccagcctgatcctagcggtgcgcccgcaggcgcatcagctgctggcgagcgaagccgatgcaacggagctggtgtgtgccaccctgcaattcgatggcggcgccaacaatccgctgaccctggcgttgccggacttcatcatcaagccgctgcgcgaattgcagggcctcgatggcaccctcgactggctgttcgaagaggccttcggcgacgggtgtgggcgggatgtcatcctcaatcgcctgttcgagctgatggtgattcagctgcttcgccacctcctcgccagccgcagcattgcctcggggatgatggccgggttggccaacgctcagctgtcccgcgcgctcgtggggatgcacaacgagccgcagcgcaattggtccgtggcggaactggcggatcgttcgggcatgtcgcgggcgagctttgccgcgcactttcgcgagaccgtgggtatcacccctgcggactacctggcgaactggcgtatcagtctgacgcagaagcgcctgcgcgaaggccgccccatcgccctgatcgccgatgaggtcggctacgaaagtccgtctgcgctggcccgtaccttccgccgcaaggtgggcgcaagcccgagggactggctgcagcagaatacgacatga

SEQ ID NO: 331113 - DNA, 879 bp, Pseudomonas aeruginosa
atggatctgttcgacagcatgcgcatcttcgtgcgcgtcgtggagcgtggctcgttctcagcggtggctcgggagctgaacatcgggcagccggccgtgagcaagcaggtccgcgcgctggagcagtatctgggcggggccgtgttcgcccgcagcacccgacatctcgccctgaccgaccaggggcaacgcttctacagccactgccaggagattctcggccagctcgaaagcgccacgcgcagcttcgccagcggccaggaacagatcgccggccccctgcgaatcgccgcaccggtcagctacggcaggttgtgcatagcgcccctgatcgggactttcctgcagcgccatcccgaggtgcggatcgacctgcgcctgaacgatcacaacgaagacctgctcatggaaaacatcgacttggcgatccgcatcggcgtggtgaagagcgaggggctggtggccgtgagcctgggcaccagcacacggcgggtttatgccgcgccggcctacctggatcgccacggcctgccacgcaagcccgccgaactggcaggccacaactgcatcgcgttcacgttgctggagcattacgaccgctggcacttcagccgtagagcggaagtgctcgatgtggccatcaagggcaacgtcaccagcaacagcagcgaggccatccgtgaaatggtcctcggcggcctgggcatttccctctctccggaatggctgttcgccgcggacctcaaacaggacagcgtgcgcagcctgctagacgattaccagaccacctcgctaccggtcagcgccgtgttcagccgtgagcgacgacgctcggcacggacgatggccttcatcgattttctccgggaacacctgtaa

SEQ ID NO: 331114 - DNA, 1002 bp, Pseudomonas aeruginosa
atgaatcagaccatgcttgccgctatcgccgagtccgcccaggcccccctggccgtacgctatattgctcgcccagtgcccggtaaggggcaggtcctggtccgggttcacgccgcgggggtcaacccgctcgataccaagatcgccaccggtgcaggggcgcacgcccgtcaaacgctgccggcggtgctggggctggatctcgccggcactgtcgtcgaactgggcgaggcggtcgagggcttcacgcccggccaggaggtctttggcatggccggcgggatcggtgacgcccagggcactatggccgagtacatcgccgtggatgcccggctgatcgcggttaagccgcacgcattcggcatgcgtgaggcggccgccttgccgctggtattcattaccgcctgggaaggcctggtggatcgcgccaacgtccgtgccggtcagcgcgtgctgattcatggcggcgccggtggcgtcggccaggtggctgtgcaactggccaaggcccgcggcgccgaggtctacgccaccggttcggcggcgagtctcgacttcattcgctcgctgggggccacggcgatcgactaccaggcgcagagcgtggaggcctacgtcgagcaatacacggccggcgagggtttcgatattgtctatgacaccgtaggcggcagcacgctggatgcgtcgttccaggccgtgaagccttatactgggcacgtcctgagctgcctcggctggggccagcacagccttgcgccgctatcgttcaaaagtgccacctattcgggggtcttcgccctgacgccgctgctcaccggcaagggccgcgaacatcacggggctattctgcgtcaagccgcgatactggcagatgccgggcaactgacgatacgggtggatcaccaacagtttgcactggatgagatcaacgacgcattccgccaggtcgcggaaggtcgcggcaaggggaagacggtaatccaattggtgagtgaatag

SEQ ID NO: 331115 - DNA, 951 bp, Pseudomonas aeruginosa
atgcacagaatcggctacctgctctccgacgactttcaggtgttgtcgctcgccacccagacggttttcgagtacgccaacatcgtggccgaggcgccgttctactccatcgcatttttctccatcgccggcggcatcgtgcgttcgtcgctgggccttgggatagaaacccaggctctggacagtccaggcctggccgatacctggatggtcgccggggttaatacgccgctggatacgccgcccagcgaagtggctctggcgttcgtgcgccaggctgggcagcaggcgcggcgtgtagcgggtatctgtaccggtggtttcgtgctggcccaggccggtctgctcgacgggcgccgcgctaccacccactgggcctatggtgccgcgctgcagcgcctgtatccgcagatcagcgttgaggacgatcgcatcttcatcattgatggcagcgtgtggacctccgcgggcatgaccgccggtttagacctggcgctcggcatggtggagaaggatcttggctcggaagtggcgcgttctgtggcgcacaagctggtcatgcatcagcgccgctcgggcgggcaatcgcagcattcggaaatgctcagcctggcgccgaaatccgaccgcattcagaacgcgttgaactatgcccggcagaacctacacaagccgctgagcgtcgacgacctggccgaggccgtgcacctcagcccgcgccagttcacccgcgtgttcaccaccgaaaccgggcaatccccggccaaggctattgagcgcctgcgtctggaggcggcacgggtgatgatcgaacagagccgtcactcactcaacgtgatcgccaaggaaacggggttccgtgatcgtcgccatatgcgcgaagtgtttatccgcggctttggcgttccgccacaggcgatacggcgggatgtgcgtggcgtaagcgtctga

SEQ ID NO: 331116 - DNA, 801 bp, Pseudomonas aeruginosa
atgagcaacccatcaaaaggcaccgcactggttactggcgcatcgtccggtatcggtgccctctacgctgaacgcctggcccagcgcggttatgacctgatcctggtcgcccgcaaccgcgaacgcctgaacgacctggcacgccgcatcaccgacgacacccagcgtgtggtcgaggtgctgcaagccgatctcggcgacgcccagagcctggccactgtcgaggccaagcttaaggacgatgcgagcatcacgctgctggtcaacaacgctggcatcggcacccatacgccgctgctcgacagtgacgtcggcctaatgacgcggatgatcgacctcaacgtgaccgcgttgatgcgtttgagctacgccgcaattcccggatttgtcgcacgtggcaacggcgccatcatcaacatttcgtccatcgtcagcatcgctccggaagtgctcaacggcgtgtacggaggcagcaaggcgtttgtcactgccttcagccagtcgctgcatcacgagctggccgacaaaggtgtgcgtatccaggccgtgctgccaggggcgaccgccaccgagttctgggacaacggcggtctgccgctggagcatctggaccccgccatcgtgatgccggccagcgctctggtcgacgctgcgctgatcgacttcgatcgcggtgagctgatatccattccttccctgcatgacgccagccaatggcaggcctacgagtccgctcgccaggccatgctcaccaacctttccactaaccggcctgcgccgcgctacagcgcccagcattga

SEQ ID NO: 331117 - DNA, 765 bp, Pseudomonas aeruginosa
atgaaactcagtggcaatactatctttatcaccggcggtacctctggcatcggtcgcggcttggccgaagctttccataaacgtggcaacacggtgatcattgccgggcgccgtcaaagcctgctggatgagattgctcgcgccaaccccggcatcgacaccgtggtgctggacatcaacgatccgcagcagatcaagcaggtggcgcggcaggtgatcgagcgtcaccctgaactcaacgtggtgatcaacaatgccggcatcatgccgttcgacaatgccgcttcgggtgatctcgacgacgagcaggcggtcggcctgctgacgaccaacctgctggggccagtgcgtgtcagcgctgcctttgtcgagcatctcaagcgtcagccggacgcaaccatcattaacaacagttcggtgctggcattcatcccgattgccgtcaccgcactctactcggcgaccaaggccgccatccattcctacagcctgtcgcagcgcttcatgctgcgtgataccagcgtcaaggtactggagatcgcgccaccatgggtcgacaccgacctgatccacaaaagcggcgacccacgtgcaatgccgctggatgccttcatcaccgaaaccctggcgaagctggaaacggcaaccaccgaggtgatcgtcgatggcattaccgcgctgcgtgccaatgtcggccctaacgagcatgccctggtggagcaattcaaccagtcgctcatcgacaaccccatcccagttgcctga

SEQ ID NO: 331118 - DNA, 1191 bp, Pseudomonas aeruginosa
atgcacagtcctataccagggccagatcgccgggcgttgcgcctgctcagtctggcctatttcgttcaggcggtcggtgcgctgtcggtagtcggcagcctggaggcgatttccaccgcctgggccttgagcaatgcacagagcgctctgctgatcaccgtgttcggcgtgacgttcgcggtctcagcccctgtgctgcagatgaccttgggccatctgcgccgtcgttcgcaggtgttgctcgggttgtcggtcttcagcctggcggcgctgctgtttgctgtagggtcgagctatgaaacgttgctgttggctcgggtactgatggggctgggagcaggctttatcggtcccgtactgggtgccctggggtcgaacctggtcgcgcgcgagcaacagggcagcgccatcgccgtcgtgctgctcgggttgagtatcgccggtcttgccggaatgccgatcagtgcctggatagcccatgagttcggcgcgcgcagcctgtacttgggcattggcgccagcggcctgctaacggcagcgatgattggcctgtgggtgccggatcgcgtggcgggacaacgcgccgcgccaaccgacgtgctggcattgctcacgcacgccaccacgctcagtgcctttctggtggtgtttttcgtgacttcgggcgtgttcgccacctacgcattccttgcgccgatcatcggcaacgatttccatggcaacgcgaatgacatcaccctggcacttggcgtgctgggcgtggcaggtgtgctgggcaatctgctggtcacgcgtctggcattgcgaaccagtgccgagcgcttgctgctgctcggcatcgcgctgctggcactggacctgttgggcctggcggtgatgccaagacagcttggtggcttgctactggccctggtggtctgggcactggcgaccgatattgtgtggccctcgcaacagcggcgcatcgtcgagctgatgcccgagcaacgcggcattgccttggccttgacagcctcgttcatgttcggcggcattggcctcggctcggccgcagcggggtggctctatcccgtgttcggctacatcggtttgctgtttgcctccctgatgtttctgctgctggcctttggcagtctatgtttctccgagcgccgcgcccgtatgcaggcgcccgtttctgggctgatctga

SEQ ID NO: 331119 - DNA, 957 bp, Pseudomonas aeruginosa
atgaccacctgcccccactgtctcgcgccagccgctcctgcacctactgttcgccgcccagtcctgacgcctcagctcaaaggtttgggcttactgcttatggcgattcttctttggggggtgaactggccggtgatgaaagccggactcggtcatgtcaccccagtgtggttttcggccagccgctttggcatcggcgccgtgtgcctgtttgcggtgcaactggccaccggcagcctgtatcgaccgcgcaggcaagacctgccgctgattgctagcgtggggttgctgcagatgcttgccttcaccttgctcggtgcgctggctatggcagacataccagccggccgctctgccgtactggcctacaccacgccgttatgggtcatgccgttggccgtactgtttttccgtgaacagctggccatgcggcaatgggtaggagccgcgctgggcatagtcggcgttgcggtgttgttcaatccgttctcgctcgactggaatgacgtcaggctggtgcgcgccaacctgatgttgttggtcgcctcggcctgctgggcgttgtgcattcttcatctgcgctataccaaggggcgggctacggcttaccagctcgcaccctggcaaatgctggttgccagcgttccgctgctggcgctggcacgcaccgtggaagggccttttaccggcgatggttcggcgacactctggcagatcgtgctgttcgtaggggctgccgccaccgcgttctgcttttgcgccgtcaacgctgccagcatgtggctgccggctaccagcatgtccctggccatgctcggcgtgccgcttgtggggttgctgagttcagtcgtgtggctgggtgaaacgctgagtgcgagcctagttgccggtgtgttggcgatctcgttcggcatcctcgttgccatcgtaagattgcaacccgaccggcatgcttga

SEQ ID NO: 331120 - DNA, 507 bp, Pseudomonas aeruginosa
atgagagcccttgaccgtaccgacattggcattctcaatcggctgcaggaggacgccaggattaccaacgctgagctggcgcggtcggtaaacctctcctctaccccctgcttcaatcgagtcaaggccatggaagagctgggccttattcgccagcaagtgacactgctggcacccgagttgctgggattgaatgtcaatgtattcatccacgtcagcttggaaaaacaggtgatcgatgcgttggcgcgctttgaaaatgccattgccgagcgtcccgaggtgatggagtgctacctcatgaccggcgacgccgattacctgttgcgcgttcttgttccggacatccaggcactggagcgttttattctcgaccacctaactaagattccgggcgtggccaatatccgctcgagttttgccctcaagcaggtgcgctataaaacggccttgccgctcccagccaatggtttggtgattgacgagcgtcgtggcgcgagcaaataa

SEQ ID NO: 331121 - DNA, 1179 bp, Pseudomonas aeruginosa
atgcccaccaaattcctactgcgccatgccacactggccctcgcactgatcagccctgcggcgtttgctcagccccaacctcttgcgccccacctggcggcggagcgtacagtcggcgtgctcgagcaggtatttgcattttatgacgccatgcccactggcgtgactgtcagtgaaaccgggaggattttcgttaacttccctcgttggggcgacacggttcccttcaccgtcgcagagatacgcgacggcaaggtgctgccctaccccaacgcctcgcttaacagcgaagaccctaacgatcccgccaaaggctttatcagcgtgcagagtgtggtggccgatggcagagggcgggtttgggtgctggataccgccgcacccaaattcaccacgccgcgtcctggcggtgccaagctggtggccatcgacctggccagcaaccatgtggtgaagaccctggtgtttcccgcctcggtcatcctgcgcagcacatacgtcaacgacatgcgctttgattttcgcgtgggcgagcaaggcaccgtgtacgtaactgattcgtccgtctccggcccaggcggcatcatcgtaatggacattgctagcggcagcgcacagcgccgcctgagcggtgcgccgcaaacctcggttgacccggcgttcgtgccggtagtggaaggtcgccccgcgctgttgagcaaaggtcctgatggcggtttcaaagcgctgggggtagccagcgacggtatcgcgctctctgctgacggcagcaccctttacttcagcccgttgtccagccgtcacctctatgccgtcccgacggcttcgcttcgcaatgctcggctcagcgaggcgcaactgcagcgagaggtggtggacctaggcgagaaaggcgcatccgacggtcttgaggccgatgcaaccggtgcagtgtatgccagcgactacgagcacaacggtatccgcaaacgtcttgccgacggcagttggcaaaccatcgttcacgacccgcgggtgctctggcccgataccctgtccatcgggcaggacggctacctgtacttcaccgccaaccagttgcatcgctcaccgggcttcaacaacgggcaggatctgcgcagcaaaccctatagcctgctgcgggtaaaaatcgatgcggcgcctgcgcccacattttga

SEQ ID NO: 331122 - DNA, 654 bp, Pseudomonas aeruginosa
atggaaatcgccagcctcgccaagcgccgctacaccactaaggcattcgatgccagccgcaggatcccacaggccgccatcgacacgctgctcgaacaactgcgacacagcccctcctcggtcaactcacagccatggcatttcatcgtcgcctccacggacgagggcaaggcccgtattgccaaaggtaccgagggaggctttgcttacaacgccgccaaggtgctcaaagcctctcacgtgatcgtgctatgcagccgcactgacatgaccgaggagcacctgcaaacgctgcttgcccaggaaaacagcgacggccgcttccacactgaggaggccaagatcgggcaggataattcccgtcgcggctacgtggcgcttcatcgctttgatcagaaagacttgcagcactggatggaaaagcagacgtaccttgctttgggaacactgctgttgggggctgcctcgctggggctggacgccacgccaatggagggcttcgattttcgcaaactcgatgaggagctgggcctgcgggctaacggctacagcagtctggtgctggtagccctcggctatcgcgatgacagcgacttcaacgccaagctgcccaagtcacggctaccgagcgagcggatctacacctacctctga

SEQ ID NO: 331123 - DNA, 372 bp, Pseudomonas aeruginosa
atgtctaaacttgccgagttccgtgctgcggaaaaagcacttcaagagcaacttgcctacctcgattcgttcaagaacgacgccggcctcaagcgtgagatcaaatttgaggaagagctcaagtctctgatgaaggagtacgacaagagcctgcgcgatatcgtatctatcttggatcctgattctcgctccggtgtcggcaagctgcaggcccgaggagctagctctcagcgcaaggcgcgtgccgtcaaggtctacaaaaatccgaataatggagaggttgttgagaccaaaggcgggaaccacaaggtgctgaaagcttggaaggtagagtttggcaatgacgttgtagagtcttggttgcagaattaa

SEQ ID NO: 331124 - DNA, 1059 bp, Pseudomonas aeruginosa
atgcgaataggggttccaaccgccagagagttttcgcaggaccccggcgctgtgcagcgccatgccgagctctggaagacggtagcaatcggttcggtgaattgggagccagtcagctatcgcgctggtgctgaaccaattcttcttcctttgcagtggtgtttacgcactccatcggaatggatcgctgcaacaatggacgccgaggtttgtacggaatatgcagacctcgagcatatcgttgagagcgtagatgtggctttcagagcgctgcttgttgctcagcgcagcctctggataaataaaaagccagaggaggtcatcgcagctgcaaatttggcccagcgtctccagccaggatgcgctatggggcggcccctgcgcttgttggccgagcatggggtggatacgaagttcttcgagcgtaatgctgtactgctcactcgacttttggatgagcgattccagggtgaaccttctgagttgggcttatctacgttcctcgacgctcttgaggaaaatgagcattgggtccttgtagcgcctttgtgcgatgggctacttccattcaagaagctccggctcacaaccactcagctaaaagagtctcggctgcctggttctcggctcattgtcgttgagaacgaaaagtgccttcatcaactacctgctctcgatgacacggtcgcggttcttggatgtggtctcgatctgcagtggatggcggcaccctggttacgggaaaagcagctagcttattggggggacatagatagctggggctttaaaatgctcagtagtgtccgagaactttgtcccgatgtttctgctcttctcatgtcaagaaatgtgtatgagctatacgccccagggtctgcagtcgaagagcccgtaacggctcaggcatgccctccgtccggactttgtagtgaggaaaaggatctttactcgcacttattagggcaaaaaaagggccggttggaacaggagtacttgccttcagccgctgtagaggcggcaataggccactggagagataggtccgcgaatgacgtatag

SEQ ID NO: 331125 - DNA, 3306 bp, Pseudomonas aeruginosa
gtgaagcaggaagcttttgggcgggatagcgaaaccttcgttctcacctcagttgagatgtttaactgggggggctttcaaaggcttcatcgggcgccgattgacggcgctgggacagctgtcattggtccgacagggagcggcaagactaccctcgtcgatgcgcttatgaccctcatctgcgcgagcccgcggtacaacctggcatccaccggtggtcacgacagcgacagggatcttgcttcgtatgttcgtggtgtaaccggtccaggagacgggagcgctgggcaatcccacatcgcccgttctggcaagacggttacaggaatctccgcgacgctccaccgtgagtcggggatggttcggcttggtgcgttgctctggtttgagggcaccagctcatctgctgcagacatgaagaagctctggatattcagtacctcttctgaccatacgcttgaacactggttgagtgttcagcacgagggcgggatggctgcgttgaataagatggggagctcggaagctgggatctggacgtatcaaagcaaaaaacagtacctcgcccggctacgtgatttcttcgaggtcggagagaacgcgttcaaccttctgaatcgagcctcaggactgaagcagctcaatagcattgacgagatttttcgtgagctggtgctagatgatcgtgcggcctttgatcgtgctgcagaggtggctgacagctttgatgatctcactgaaatccatcgtgagttggatgttgcgcgccggcagcagcgtacgttggagcccatagctgaactgtggtcgcgctaccaatcgttggaaagccaagcaagcgagaaggcagccttagagcgacttgtaccagtttggtatgcggagcaggggcaccgcttgtggctggcggaaacggagcgtctgcgtcttgagtctcggcaggccgaggtggaggtggcatctgcccacgagctgctcgaggcgcaaaggcagcgcactgatgagttgcgacagctctatctcctgaagggcggcaccaacattgatcagctgagagcccgcgtgaatgattggagcaaaattgcttcgaagcgtgcgttcgactcaaagcagtatcagtcgctggctaggaaccttggtctttcagatgagctcgatttgttggtgttgcaggagaaccaagctacggcagagtcgcgccttgtcgttctgaggtccgacctagagcaagccaagctgacgtccttccagttgggtgtcgcagagagtgagcagtcgaatttacttgcgaggctaaaaactgagcggcaagaggttgagcgccggccgagctcaaatttgcgtccggatttccaaagccttcgctctgatttagccgcagagctcggccttgacgacagcgcactgccgtttgtggcagagctcgtccaggtcaaaagcgaagagcatcgttggagaggagccatcgagcgggcaattggtggccaccgactgcggattctggttcctccgcagtccatcgagcatgcccttcgttggatcaataaccggcataaccgactgcacgttcgcttgctggaggtgaagcgccccgagtcaccagcagtcttcatgccggatggctttactcgaaaactcacatacaaggatcatccctaccgcgaggcacttaaggcacttcttgccgagaatgaccggcactgcgtcgacagcccagaggtgctgagatctactcctcatgcgatgactgctgaaggtctcatgtcgggtaaggcccgcttctacgacaagcaggatcagttgcgattagaggatgactggctcacgggcttcgacaaccgcgaccgtctggcccagttggctagtcgaattcaggaggtcagtggccggcaagtgctcgctgctcaagagctcaagaatgctttagcagcggttagcttgcttgagggccaaattggggctttcgagcaaatcagccatgtcgatttcgcggacattgacctgcctggagcgcagaagcagctcgacgagctgaatcagggaatccaggaattgctccgacccgatactgatcttgcggcagcaaagcaggtcgcagaccaggcggcggagctggtcggcacgctagacaaacaacatcaacaggcgatcgcaaagaaagctctggtagatactcgcttcgagcacgcggcaacgagcacacgcaaagcgtttagccggtcggaagtgggtatgagcgaccaggagcgtgagctagcgattaggtattttccagaggtcgctccgaagtatttggcagagattggcgaacttgaattgcagttcactcggagcctgcagggtgagatcagcggcctcaaggacaggctcagtaagcttcaaaccgagctcgcaaagaaaatgtcggatgcgatgaaagaagacactggggctctggtagacgcaggccgagagctcgaggacgtgcacaaatacctggatcggttgagggtgctcactgaagaggccttgccagagaagctgaagcgattccgggactacctgaaccgctcctccgacgatggtgtcactcaattgttgagctacatcgagcagcaggtagctctaatcgaggagcgactggacgatctgaacagtacgatgtgtcgggtcgacttccaggcggggcgatatctaaggctgatcgcaaacaaggtgtcgcacgacagcattcgcgcgttgcagcgtgcgcaacgtgccctcaattcggcgaggttcattgaggacgaaggggagagccactacaaggcccttcgggagctggtggacattctgcgtgaagcttgtgagcgaaatcggactcaggccgctcgcacactcctggatcctcgcttccggttggagttcgcggtctcggtgatcgatcgggatacaggcaatacagttgaaacccggacgggctcacaaggtgggagtggtggcgagaaagaaatcatcgcctctcatgtcctgacggcatcgctgagctatgccttgtgcccagacggtagtagcaggccactctttggttccatcatcttggatgaagccttctcccgaagctctcatgccgtagcggctcgaattattggggctctccgggagttcggtttgcatgccatcttcatcactccaaacaaggaaatgcggctgctgcgccaccacactcgatcagcgatcgtagtgcaccgaagaggtatggattccagtttggtttcactcagttgggaagccttggatgagcactatcagcagcgaatgaaggtgcagagtgaagccaccacttga

SEQ ID NO: 331126 - DNA, 738 bp, Pseudomonas aeruginosa
atggcgggaattttcgatcagttggcacattcggcaggggatgatcagcggctggcagagctgcctgctgatgagtcagaacaggcggcgccccctgggtctcacgagccatccgacgatagtggtcgtactcatggtcgcattagagagaccgtgcaggagcttcttaagtacggcttgctggaggacagtcataaacccaacctctatcgcttagccgtcactcacgtcgctgaaattgcgagcgtccttgaacccctcgatttgggcgtcagtatcgacgagataagagggcttgcctttgtgacagtccggcaggacgtacgcgctgagccagatgagtggtcgcacccactcgtgcgaaggcagcgcctgaacctggagcaatccctcctcatcgcgatactgcgtcagcacttcattgtgtcagagcaggaaagtggtatcgggacgactgttgcacaggtcgcagtggacgatttgatcccgcagatacaggtctaccttggcgatttgggtagcgatgcaaaagagcgcaaccgcgttctcacgctactcgaccagttgaaaggacatggtttggtgtccactccggatgcgcatgacaacatcatcattcgcccgatcattgcccacttggcaaaccctgagaacctgcaggctctgctagcttggattcaggaccagcagcgactggaaagtggccccatcgacgcggccatggagggtgaagagtga

SEQ ID NO: 331127 - DNA, 1554 bp, Pseudomonas aeruginosa
atgccagatgactggtgtcaatcgagtagtgaaggactcacgcgagataccgacatggaagagagtactcagcagcttaccgagcgttatgtctcctcccgcagccagcatccggcgtggctgcttttggcatcccgacgggcgcctttggtcattagctgtctgcgcactctattcgagaaggctaacgatggaatcgttgtagaggatgctttgcaaggcttgtcagagctgttgtccagctatgcaagccaagagcttttcgagatagatgctgacaacgtccagctccaggcggggcgcgagttgcgggaatggatcaagcggcgactgatcgtcgagcgtgaaggcagagtttatgcaaccgatgctctggagatcgcaattcagtttgtagagtcgctcgacagccgaatgatgacgtctacagcctcacgattatccgtcgtacagcgcgaaatagagaatctcgagaccaatctgaaccccagccctgctggccgcatcgctagcctacgtcgtcgaattcacgatcttgagcttgagctgaagcaagttgaagcaggccacattgtcgttcttgatgaggcccaggctatcgaggggattcgagaggtatacagcctggcgaccagcttgcgggctgatttcaggagggtcgaggactcttggcgcgacgcagatagagcgcttcgccaatccatcattagcgagcagtaccaccgtggcgacatcgtcgatctgctgctcgatggacaagactcgctattgagcacacctgaaggacgggtgttcgatagcttccaacagcagctgcgacagtctattgagctggacgatatgcgtgtgcgcgtccgaacgattcttaggcatcctgctgcttccaaagcgctccagcgtagccagcagagagaaatgcgatggctagttctgagactggttcaggagtctcagtcggtgctccaggctagagcgcgcagcgagagggacgtcaaaggtttcatgaagaccgggcttgcccttgagcaccatcgcgttggccaactgctccacgacattttcaatgctgcgctggggttggattggcagcgccaaagccagcgtcgaaaagctgtgccactgcctcccattggaattccgatctcgggcatcccgtccgtcgagcgcttgcggtttaaggacgtcagtacgggcgcggatgcagagctgaatctcgatgttgtctccgccgggttagacgagattgatgcggacttttgggatgcgtttgatgggttggatcgaaatgcgctcatccgcgaaaccctgtcggtcttggctcaacacggaaagccgttaagtcttggagaactagcagctttgctaccgcctacacatgacctggagacattttctctttggttagggatggcccgtgaggctggtctccatgtgtacgaggatgaggccgagagcgtggagttggttgactcagaccagcagcgttggcggttccatcttcctctcgtcggtatggatagcgttgcactcaaggatattgattgggagttgtga

SEQ ID NO: 331128 - DNA, 1125 bp, Pseudomonas aeruginosa
atgaagaagattgaaaatatatttaatcttggtgttaaggagtttcgtagtctgggtcgagactatgcaatgttgatccttattgcttgggctttttcttttggggtttacagttcggcaacgggggtccctgaaacgctgcataacgcatctattgcagtagtcgatgaagatcaatctcaattgtctaagcagataattaggtcctttcaaatcccttattttcgggctccctccgaaattaatcaggctgaaatggatcatgggatggatacagagttgtatagctttacacttgatattcctcctgattttcagcgagatgtgcttgcgcggagaaacccgaaaattcagttgaatgttgatgctactcagacggttcaggcgttctctggggcggggtacatacagaatattgttgataccgaagttagggaattcattaatcgatatcgtggtgatccgtcgatgtcggcaaggctggctgtgcgagcggagttcaaccctaatttaactcaggcgtggtttggtgcggttatggaagtggtaaatcagattaccatgctatccataattctcacgggggccgcgcttattcgggaacgtgagcacggaacggttgagcatctattggtaatgccattgactgcatttgagattatgctggcaaagatttggtcaatggggcttgtggttctaatagctgcagccgcttctttgcttctcgttgtgcattcttggattggcgttccgctcaatggttcggtttggttgtttttgataggtgcagctatacatctttttgcgactacttcaatgggggtttttttagggactgtcgcgcgatctatgccgcagttggggttgttggttataattatacttattccgttgcagatattgtcgggagggacgacgcccagggagagtatgcctgatttggttcagaatataatgctattggccccaacaacacattttgtctcgctggcccaggcagttctgtttcgtggggcgggaatttcgatagtatgggggcagttagtacttgtgtttgctattggtctgctctttttcctctctgcactttggcggttccgcaagactattgggcaaatggcctga

SEQ ID NO: 331129 - DNA, 2736 bp, Pseudomonas aeruginosa
atgagcgacatacagacggtcgccagcctggccggcgtgtcgctgtgctatggccagacccgcgcggtggacgacgttagtctggagataccggccaaccggatggttggcctgatcggcccagacggcgttggtaagtccagcctgctggcgctacttgccggcgcgcggaagatgcaagatggcgaaatccaagtgctcgggggagatatgcgcgacgtgcgtcaccgccgcgccgtgtgcccgcgtattgcctatatgccacaggggttgggcaagaacctctacccgacgctctcggtgttcgagaacgtcgacttcttcggtcgcctgttcggccacgacaaggccgagcgcgagaggcgcatcgccgacctgctgcagagcactggcttggcgcccttcgccgagcgcccggcgggcaagctctccggcggcatgaagcagaagctcgggctgtgctgcgcgctgatccatgacccagacttattgattctcgacgagcccaccactggcgtagacccgctgtcgcgcaaccagttctgggaactgatcgggcgcatccgcgctggccgcgagggcatgagcgtgctggtcgccaccgcttacatggaggaagccgagcgctttgactggttggtggcgatggacgatggcaaggtgctggccaccggtacgcctgccgaactacgcgagcgtacagagaggcaaagcctggaggcggccttcatcgcgttgctgcccgagagcaagcgcgcgggccaccacgcgctggtgatccctccgcgttcgcaaagcgagggcgcgctgcagatcgctatcgaggccgagggactgacctgccgctttggcgatttcgtcgctgtggaccatgtaagcttccgtattgagcgcggggaaatcttcggcttcctaggctccaatggctgcggcaagtccacaaccatgaagatgctcaccggcttgctgccggccagcgaaggcacctgcgcactgttcggccagccggtggacgccaacgacatggagacccgccggcgagtcggctacatgtcccaggccttctcgctgtacgccgagctgacggtgctgcagaacctcgagctgcacgccaaattgttccacctgccgcccgccgagatcggctcacgggtggaggaaatgctcaagcgcttcgacctggacaaagtcagggacgagctgcccgacagcctaccgttgggtatccgccagcgtctatcgctggccgtggcggttatccacaagccggaaatcctcatcctcgacgagccgacctcgggcgtcgacccggtggcccgcgacggcttctggcaactgatggttgagctgtcgcggcgcgacggggtgaccatcttcatctccacccacttcatgaacgaggcgcagcgctgcgaccgcatctcgctgatgcacgccggcaaggtgctcgacagcgacaccccgcagggcttaatcgaaaagcgcggtctgcccactctggaagcgaccttcatcgcctacctggaggaggcagccggtagcacaccggtaccgggcaccgctccagctccggagaaagtcactgccccggatcgctacaagggcagcgaccgcttcagttggctgcgtctattcagctacgcgcgccgcgaggcgatggagttacgccgtgacccgatccgcttgactctggcgctactgggtaccgcgctactgatgttcatcatcggatacggcattaacgtggacgtggagaatctttcctttgctgtgctcgatcgcgatcaaactaccactagtcaaaactatgttctcaatatttcaggctcacgttacttcatcgagcactctcccatcgaaaatcccgatgaactcgatcagcggttacgaagtggggagttgagtttagcgttagagattccaccaaacttcggtcgtgactttaagcgtggtttttccccaattatcggagtctggattgatggagctatgccaactcgggccactacggtccagggctacattcagtggatgcatttaagttacttggctgaatcagcgcgtgagagtggcaatgccgaagctagttcggttgctagtactgaggtgcgctatcgctataacccagacgtagaaagccttaaagccatggttcctgcagtaatcccactgctgctgatcatgatcccggcgatgctcactgctctaggcgtggtgcgcgagaaggagcttggctcgatcaccaatctctatgtcacgccagtgacgcgcctagagtttcttctcggaaagcaactgccctatatcggtatgggcatgatcaacttcctgctgatgctggccatggccgtgctgttgttccaggttccgctcaaggggagcttctttgcgctgctggttggcgccttcctttacgtggtgactagcacgggtctgggtctgctactgtcgaccttcatgaagagccagatcgccgcagtgtttggcaccgccatcgctactatgatcccggccatccagtttgccggtctgatccaccctgtgtcctcgttagagggcgtcgctgcattaattggcagactctacccgacctcgcacttcctgattattagccgtggggctttctcaaaggcactgggagtcgctgatctatgggtttattacttgcctctggtggtgatggcagtggtgctgaccttgcttagcgtgtacttccttaagaaacaggaagattga

SEQ ID NO: 331130 - DNA, 927 bp, Pseudomonas aeruginosa
gtggacgtagctaccaaattgcctggtcgtgtcgctgaaatcaacgttgacgaaggtgacttcgtcaaactcggcgaagtggtcgcgcgcatggatactcaggtcctcgaggcacagttggcccaggcccaggccgaggtgcgtcgggcgcagaatgcgaagttcaccgccgagtctttggtcgcccagcggacgagtgagaaggccacagctgaggctgtggtggcgcagcgccaggctgaactcaccgccgcgcagaaacgcttcagccgcactgagcaattagttcagcgcaatgccttaccacaacagcaactcgatgatgatcgcgccgtgatgcagagtgctcaggcggcgctagcagcctcacgttcgcaagtggtttcggcgcaggccggcatcactgccgcgcgttcccaggtgatcgaagctcagtcggccatcgaagccgccgctgcgagtaccgtgcgcctgcaggcggacatcgatgacagcctgctcaaggcaccgcgcaatggccgcgtgcagtaccgcgttgcagagcctggggaagtgttggccgccggcggaaagctgctcaatatggttgatttggccgacgtctacatgactttcttcctgccctcggcgcaggcgggcaaggttgagctcggtcaggacgtacgcttggtgatcgacgcagtgtcgcagtatgtgatcccggccaaggtgtcctacgtggctagcgttgcgcaattcacgcctaagactgtggagactgctaacgagcgcgagaagctgatgttccgcgttaaggcgcggctcgatccggatctgcttgcgaagtatgccacctacgtaaagaccggcgtgccgggcatggcctacctgcgtcttgacccgcaggtcgagtggcctgcctctctgcagatcaaggttccgcaatga

SEQ ID NO: 331131 - DNA, 1050 bp, Pseudomonas aeruginosa
atgagtaggataagtgccgggctaactgctcaactggtgagtttcctgagcagtgaaaacctcgacacagagcgactctgcaaagaagtcgggatagccatcgacgagctaagatcgtcaaataaatttattccaagatcaagcgcccttcggttaatggagctagcggaaattgagagcggtaacccagacattggacttaaagcttaccagcactttcttccaggtgcttttcaattagtaggatatgcaatgatctccagcgccaatctaaaagacgcgctgcaggtcttagtacgtttttccaaacttctcggaaacggcttcactgtcggcctaacacaagaaaaaaatggcatacgcctgtggtacgttgacaacacagaagacagaacaaagaaatccagagtgttcaatgacgcaatattggcatcaactctcggactctgccgctggatggctgggggtaaacttcccgaaatccaagaaatagaattcatttaccccactccacaagacatctcagagcaccaacggctttttgattgcaccctacactttgggaaaaatagaaacagcatcttatttgacaaccacgcgctatcgctgccgctaagcactgcaaatgaaacacttgcactactccatggcagccttgctgaacatcaagaatattttttaaacaacggatattacagcgaacgcacacgaagcttgctcatcaagcgccttggccactccctctgcgacatggactctgtagcaaaagaacttaacgtcagtagtcgtttcttacagcgcgagcttgcaaaagagggtaaaacctttaaagaaatattcaatagcacccgaaaaagactagccgaacactacttaaaaaactaccactcttactccctagaccacataagcacactacttggctttaaagagctaagtagttttcacaaggcttgccttcgatggttcggcatgccaccagggagttttcgaaacactcacacagaaactcacccatcaggagtagaccagaaaataactcatacctaa

SEQ ID NO: 331132 - DNA, 1386 bp, Pseudomonas aeruginosa
atgatcggcgggggcattttctccctgccacaaaacatggcggccagcgcagacgtcggcgccattctcatcggttgggccatcaccgcggtcggcatgctgaccctggcgttcgtcttccagaccctggccaaccgcaaaccccaactcgacggtggtgtgtacgcctacgccaaggccggtttcggtgactacatgggcttctcttcggcctggggttactggatcagcgcctggctcggcaacgtcggttacttcctcctgctattcagcaccctgggctacttcttccccatcttcggcaagggcgacaccgtctacgcgatagtcggcgcgtcgatcctcttgtgggccctgcacttcctggtgctgcgcgggatcaaggaagcggcgttcatcaacaccatcaccacggtggcgaagatcgtcccgctgttcctgttcatcctgatctgcctgttcgccttcaagctggacatcttcaccgctgacatctggggcaagagcaacccggacctgggcagcgtgatgaaccaggtgcgcaacatgatgctggtcaccgtgtgggtgttcatcggcatcgagggcgcaagcatcttctcgtcccgtgcggaaaaacgctcggacgtcggcaaggccaccgtgatcggcttcatcaccgtcctgctgctgctggtgctggtgaacgtcctgtccatgggcgtgatgacccagccggaactggccaagctgcagaacccgtcgatggcgctggtactggagcatgtggtcggtcactggggcgcggtgctgatcagcgtcggcctgctgatctccctgctcggtgccctgctctcctgggtcctgctgtgcgccgaaatcatgttcgccgcggccaaggaccacaccatgccggagttcctccgcaaggagaacgccaaccaggtgccggccaacgccctctggctgaccaacatctgcgtacaggtcttcctggtgatcaccttcttcacctccggtgacccgaacggcatggacccgtacaccaagatgctgctgctggcgacctcgatgatcctggtcccgtacttctggtccgccgcctacggcctgctgctggccgtcaagggcgagacctacgagaacgatccgggcgagcgcagcaaagacctgatcatcgccggtatctcggtgatctacgcggtgtggctgatctacgcgggcggcctgaagtacctgctgctgtcggcgctgctgtacgcgcccggcgtcatcctcttcgccaaagcgaaacacgaagtgggtcaacccatcttcaccaatgtcgagaagctcatcttcgcggttgtcgtgatcggtgcactgatcgcggcctatggcctctacgacggcttcctcactctgtaa

SEQ ID NO: 331133 - DNA, 1257 bp, Pseudomonas aeruginosa
atgagcacggaaaaaaccaaacttggcgtccattctgaagctggcaaactacgcaaagtgatggtctgctcgcccggactcgcccatcaacgcctgaccccgagcaactgcgacgagttgctgttcgacgacgttatctgggtgaaccaggcgaagcgtgaccacttcgatttcgtcaccaagatgcgcgagcgtggcatcgatgtcctcgaaatgcacaacctgctgaccgacatcgtggagaaccccgaagccctcaagtggatcctcgatcgcaagatcaccaatgacagcgtcggcgtgggcctgacccaggaactgcgcggctggctggaaagcctggagcctcgcaaactggccgagttcctcatcggtggcgtggcctccgacgacatcccggaaagcgaaggcgccaaggcgctgaagatgtaccgcgactacctcggccactccagcttcctgctgccgccgctgcccaacacccagttcactcgtgacaccacctgctggatctacggcggtgtgaccctgaacccgatgtactggccggcacgacgtcaggaaaccctgctgaccaccgcgatctacaagttccacccggaattcgtcaacgccgacttcgaagtctggtacggcgatccggacaaggaccacggcatgtccaccctcgaaggtggtgacgtcatgcccatcggcaacggcgtcgtcctgatcggcatgggcgagcgctcctcccgccaggccattggccaagtcgcccaggcgctgttcgccaaaggagctgccgagaaagtaattatcgccggcctgcccaagtcccgcgccgcgatgcatctggataccgtgttcagcttctgcgaccgcgacctggtcactgtcttcccggaagtggtgaaagagatcgttgccttcaccctgcgcccggacgagaagagcccctacggcatcaacgtccagcgtgaagagaaggacttcatgaccgtcgtcgccgagtccctgggcctgaagaaactgcgcgttgtcgaaaccggcggcaacagcttcgccgccgaacgcgagcagtgggacgatggcaacaacgtggtctgcctggaaccgggcgtggtggtcggctatgaccgcaacacttacaccaacaccctgctgcgcaaggctggcgtggaagtcatcaccatcagcgccggcgaactgggccggggccgtgggggcggtcactgcatgacctgtccaatcatccgcgatcccgtggaatactaa

SEQ ID NO: 331134 - DNA, 750 bp, Pseudomonas aeruginosa
atgctgaggttaatatttgtggaaaaattaagtaggcaaatcgttcggcgccaggttcattgtcagagttgtacattagtggacctatgccttccttttgcgttgtcccatcgtgaaattgatattctcgatgaaatggtaaagcgcagccgacctttggagagaggtgagtttctatttcgtcagggagaggccttccgctcgatattcgctctccgcacggggaccgttaagaactattgcattactgatggtggagtggagcaaattacaggatttcaattgcctagtgagatccttggtttggccggtatgggcgaagggacgtatccaatgtcagctcaaacactcgagtccagttcagtttgcgagataccatttgagcgactggacgagttaactgaggtgattccgcagttgcggcgccaactgatgcggactatgagtcgcgaaattcgtgagggccagcaaatgatgctgctcttgtcaaaaaagacttcggaggaaagaattgccacttttttaataaatctttctgttcgatttcgtgctcgcggatattctgcccatactcttcggctaagtatgtctcggggtgagattgggaattatttgggcgtcgctatggaaaccgtttctagaacttttgcgaagctgcagcagcaggggctaattcgggtgaatggaagagaggtagagatggtggattcaataagactatgccaattggcaggtggagggtatcgatag

SEQ ID NO: 331135 - DNA, 1023 bp, Pseudomonas aeruginosa
gtgtttcgaataagctcaggattgatcagtcaactagtaaacgtcttgaggtgtgagggcctggatgctgagcgcttgtgccaggaagcgggtatcgatcgaaataagttgttgggtgtgggtggcttcttcgattcagatgatcttgtcagactggcagagatctcggctagagagtgtggtgtagcgcatattggattacgtgcctacgacgattttcttccgggcgtatttcaattggtaggctacgtcatgttgtcgagccattgcttgatggaggggttggagtacttggtgaagtactctgagctgataggcaatggatttgtagttgggctcgatgacgagggagatggtgtccggatttggtccatggattatcaagaaaatgaaactcctggcgctcacgttctgcaagatattgctgtttcgtctttgttagggtttctaaagtgggttttaggtgggagggatctatcatttagagaggtggcgttttcttatcagaagccagtagatgtgtctgaacatacgcgcttgttcggtgagaacgtaagctttggagaagctagaacgagtgttgtgcttgataaaaatatgctgttagaacctttgagtactgctgacgaaggcttgttgctgatgcatgataattttgcaaggtctcaagttgatcgattgcgccggctaacctatagcgattcggtaaagaaggttctgttagaacagctatctcagggcgtgagtgatatgaactcagtagctctagccttaaagctagggaagcgcaccttgcagagggggttggcgaaggaaggtagtaatttcaaggtaatccttgacggcgtacgttgccaattagcggagcactacttggcacatggttctatggatatatcgaaaatagctgaattgttagcctttaaggaggttagcagcttccacaaggcctgccagcgctggttcaaggttagtcctggagtgtttagggctaataggttcagggcgattttgcctgcttaa

SEQ ID NO: 331136 - DNA, 372 bp, Pseudomonas aeruginosa
atgtctagactcgctgagtttcgtgccgcagaaaaagccctccaagagcagctggcctatctggagtctatgaaaaatgacgctggtctcaagcgtgagataaagttcgaggaagatcttaagaagctgatgcaggagtacggtaagagcctgcgtgatgtcgttgccattttggatcccgagtctcatcgggccgcagggaaatcctccgtccggggggcagctacccaacgcaaagcccgtgctatcaaggtctacaagaacccgaacaccaacgaggtggttgagaccaagggcggcaaccacaaggtgctgaaggcttggaaagctgagtatggcaacgatcttgttgagtcttggctgcaaagctga

SEQ ID NO: 331137 - DNA, 1509 bp, Pseudomonas aeruginosa
atgagtgacgaagttattgagcagcccgacagcgagctgccccaagacacgcaagcaatcgttcaggctgttgagtctgccccgatcaaaactgttcgcatccaaaccacactggttgcaaagctaaacctggcagacttccagaactcggtcccggttattcgagagctgcgcctgatcaacgacactgatcagaagtacaccggtcttgaacttcaactgctatccgacctactcgtctttaagccgaagacgtggcacatcgacacgttgtcacctggcacgttcctacctatccctgggctagacctgcaaattgatggcgccctcctcgccagactgactgaggccgaacaagctgtcgtcaccttcactctgacagctcaaagccccactggcacagagcgtcaagaagtcgctcgtcttgagctcgatttggagctactgccccgtaatcactggggtggtctatcgcatcttcccgatatgacggccgcttttgttcagcctaacgacgtcgccgtcgaacggttgttgaagaaggcagcggagttgctgcgagcacaagggaaaaaccccgctctcaatggttactctggtggttccgcgcacgcatgggagattgcctcagccatctgggctgcagtcgcatccatcaagttggactatgctcttccgcccgccagcttcgagcagtttggccagaaagtccgtagcccgagccacatccttgagagtggtcttgcaacttgttttgacctatctctgctgttctgcgctgccctggagcaggcgggcctaaaccccttactgatcttcactcgtggccacgcgttttcaggcttctggctcaaagctgaagagttctccaacagcaccgtcgacgacatcaccgctctgcgtaagcggataaagcttaacgaactgaagctgttcgaaaccacgctgatcacccaaccaaacactccatcactttcttacgcgatcgagcgcggggctcagcacctggcagcaggacaggagcacgattttgagatcgcactggatatccgtcgtgctcggctacagcgaatcaagcctttggccagtgctgaggctactccagctctgagcagcgagagtcaagagcaacacgacgacgggctagaactccttatcgacctgcctccagagcttcctgatgaagcccccgttgaggtcgatgttgcttcgctcgatccgaaagatcgccttgcgcgctggcaacgaaagcttctagacctgtccttgcgcaacaacctgctgaactttaaagccgggaagaaagcggtgcgcctggaagctcccgatgccgccgccctggaggacattctcgccagcggtcagcagttgaagctgctgactcggccagacctcatggatggctctgatcctcgcgatcaagcattgcacgaagagcgagagcgggaagatatacgacggcagcacgccctagacgcgcttaagcgcaaagaggtacacgatctataa

SEQ ID NO: 331138 - DNA, 4059 bp, Pseudomonas aeruginosa
atgcttgcgctacgagagattgcagatcgtctggaagtgaatgctcaagctgtcggtttcagtacgttagaccatcacccgttgcacctgattgggaacaacgattggtctccgacctggcagcacaaggtcatcgaatccgcgcgtgagcttggcccatccatacatgtggtgcaaaaggcgagtgagcgctactgccagatgtctggttttcctccgctgccagccaatagcagaactcttaagggactgggtgccttggcaaaactccttcccactgccgctggacagaactggagctttgtccttcgccccgacgcacgagccatagggcaacgcctagaggcgggcgtgaagttcattgagcaacaccgtgccctcaatcaaacacttccagccttctggacgtccagcacgctggaagactgccaccgcggactcggtctattggctaggcatgcggagcttagatctggcctcccccaaccctggcctgtggcgggcatgattttgctcaaccaaggcttggagaccctcacggaggcagagcgaattaagcagtccctatctgtcgcctacaacgacacgatcgaaaccttggatgtccaagcacttctgaaagagtgggaactaggaagcgaggcgttctggccaaaatcctggctcgtccagcgcaagattcgaggcctattagcaggaactcaagtatccccttcgcctacatccatagctgaggaccttcaacgatggatcgctattcgcgagctccgcgctcgattagacgctatcgatccaggacagtccggcagacccgtctggaatagctccaaaacagatccagcacttcttgcagtgaccatgcgattacaagcagcgcttgcagcttctgccgagggccgtcaatggtcagatgaaggattcgaactcatcactcaagggcaagccggcgtcgcgatcaaagagacacttgaacgcatgcgggagattcgatctgtcgagagtgagatttctacactagagccacttgccaaggccacgagctcaatctgggccggcctgcagacggaggcaaaggcgctcaacgctgcggtggcattccaacgtgcgcggcgaccgattcagcacgagggccggcttgacgaagagcatgaactcgtcgcaaacggtgcttgtggagaattgctccagcgcgagctgaggactctcagacaacgtgaggcaatcgagcgagagctgggcaatctaactgacctacgtgagctaacctcgggcctctggctggggctgcaaacgaaagatgatgcggtctctcgcgtgctgaagttccatgcaaatttggccggagcaatctccgcgcttgtccaaacgcccgagcatgtcgaaggcgtgaaatcagctctggcacgcttgctcggcgacgccaacgctctgctcgagcccgaagcttcgttagctcaagcagggcgcgagctactaggttcgctggatcactacatcacgcagatacgcgcgtttgtcgaagctgggcagtttagggcggaggatgcggcaggatttagtgaacaagacctcagccaacagcgtcttcagtgcgaacagattgtgcaagctggtaatgggttacgtgcatggtgtgcttggaagagggcatgcgatgaagcatcagcgcttggcctgctcccattggttgatgccgtaaaagccggccatgtaccacagggatccgtacgtaagtccttcgagacaaactacgcgcgttggtggctgaacacggccgttgatcatgagcctgtcatccgtacgttcgtaagtgtcgagcacgagcaacgcattcgtgacttccgagcattggacgaccgcttcaccgcactgactcgcgatcttttgcgtgcacgcctttgcgctgaattacctatccaggactcagtgagcaaaaactccgaatggggcgttcttcggcacgagatcacgaaaaaaacacgccacctgccactacgtgagctgatgtcgaagatccctgacgcgctcaccaagctcacgccgtgcttgctgatgagtccgctctccatcgcccagtacttggccgcaaactcgagcatcttcgatgtagtgatcttcgacgaggcgtcgcaaattccggtgtgggacgcgatcggtgcaatcgctcgaggcaagcaagtagtgatggtcggtgaccccaaacagcttccaccaacttcgttctttgatcgagccgagtccacgcaggatgatgctgacgtcgaagctgaccttgaaagcattttggacgagtgcatcagtgccaacctgccaatccgaaacctcaactggcattaccgcagccggcatgaaagtctgatcgcgttctcgaatcaacggtactacgaatccaaactagtgaccttcccctcccctgtaaccaccgaccgcgctgtcagcttgcacatcgtcaacggtgtctacgagaaagggacagcacgcaccaatccggctgaggcaaaagccttggttggcgacttgatcggccgtctgcgcagccccggattcaaagagagcaaactgacaatcggtgtggtgacattcaacggtgaacagcaaaagctgattgaagatctgcttgataccgagcgtcgaaacgatcccgcgctggagagctatttctcggagagcgagctagaacccgtcttcgtgaagaacctggaaagcgtgcagggtgacgaacgagacatcatgtacttctcgatcacctacggaccggatgcagcaggcaatgttgcgatgaacttcggtccgctcaaccgtactggtggcgaacgcaggctcaacgttgccgttacccgagcccgccatgagcttcgcgtcttcagtactctgcgggccgagaaaatagatttggcgcgcactcaggcattgggtgttcgcgatctcaagcacttcctcgaatttgcagaccgcggtgctcgtgcgctagccgaaatagacaatggcagcctgggtggttacgacagcccattcgaagaggccgttgcaaacgcattgcgcctcaagggatggcaagttgttactcaggtgggagtgtcgtcattccggatcgacctggccgtagtggaccccgatgccccaggccgttacctcgctggggtagagtgcgatggagcgacctaccaccgcagcgcaacagctcgtgatcgcgacaagctccgcgaacaggtactcagaggccttgggtgggaaatccttcggatctggtcgactgactggtggatcgatggccagggtaccgctcagaagattcatgagcgccttgaagctctgttggttgaaagcagacagcaccgtgcggcacgggaagtccaagagcagttggcggctatagcagctgagagcgaagctccacttgaggacaatgtcgttgaattgccagtcgaccgctctcatttcaaagaagctgatggcttcgtagagccggaagctgaacccgaagaggccgaattgccgatggtgcgctatgcgcgcccacaaaccgacacagggcgtcccgcaattggcttcgctcactaccgggagagcgacccgctgagcgccgtggaaggtgtagatccagacgcattcttcgaggcgagctatgacaccgtcctggacatgatgatcaagcacgtcatcgaagaagaaggccctattctcgacaccacgcttgcacgccgaatcgcgcgcgtacatggatggacacgaaccggcgcgagaattcgtgatcgagtagcctccgtggccgatcgtgagcacagcaaggttgaagacgaacttggccagttctattggcctcgacgcttagcggatcgcgcgtccgtcgtgtaccggcaaccagccgatgccgacaatattcgcccagtagacgagatatgcggcttggagcttcttgcgctcgctcgctcgttagctgatcagagtcttgttggcgatgacctgctatatgccatggcgcgtgagctcggattgagcaaagtatctgcctcaacacgagcaaggatccaaggagcgatcgacaagctgttctcctga

SEQ ID NO: 331139 - DNA, 1101 bp, Pseudomonas aeruginosa
atgggtttatacattcgaaagtccgtccgagttggaccatttaaattcaacctgtcgaagtccgggataggggtttccgcgggcatcaagggattgcgggttgggacgggtcccaaaggcaactacatccacatggggcgcaacggcttctactaccgccaaacactctcacctcagggtacgtctcccacttctgcacctcccaaaccaaggacagctccgcctgccgcacaagagatccaatcacatacgcatgagcccctcagggaaattgatagtggcgagatcggcttgatggtggactcctcatctcaggcgctcgtcgacgagctcaataccaagcgcggacgtttacgtctttggccatttattgcggctctcacggtcggcgcatacgctctcctcgcctacaaacagctgccgtcttgggctggccacacggcactcatcgcaggtggattgctgacggcagcggcttattactgggatcaactgcgaaaaacgaccgtcatgctgtacgacatcgaatcggaatttgtgagtgttgtcgaacaattgcatgcggccttcgatggactcagaagctgccgtgcgacctggcatctccaagcccaagggaaggtaacggatcgcaagtaccacgcaggcgccagtcacctggtcaccagaagctcgatagcccttgggctgaaaaatccaccttttgtcaaaactaatgtcgcgactccaagcatcccggttggccgtcagacactgtattttttcccggacaaggtgctcgtattcgaggccaatggtgtcggcgctgtctcttatgaaaatcttagagtcgacatctcgacgacaaacttcatcgaagacggcgccgtcccgaaggactctgaaatcgtcagcacaacctggaagttcgtgaacaagaaaggtgggccggacaagcgcttcaaaaacaatcgaaagctgcccatcgtacgctacgaagaggttcagtttgcgagcaatacaggtttgctggagcgcattcagatctcctgcgtcggacgcacgcagcccttagctcaagcaatccacagcatcggaagggttaaaggcgtacgcttataa

SEQ ID NO: 331140 - DNA, 306 bp, Pseudomonas aeruginosa
atgaaaaagcgcgactttctgctacctctagccactctcactgccgcggtagcctcgaaccaggcatcgtcttccactgccatcaccaacaccgataaggcagcagaaggcaccgccattgagaaccaaggcgcggcactgccaatcgtcaacgttggcgagcaaatggtcactggtcgccaaggcgacaacctgttcagcttcatcctcaagcgtggtgaagacggccacatggtcgctgcccactactcacatagctcgcacgcttcccacagctctcacagctcgcactactcgagccgttaa

SEQ ID NO: 331141 - DNA, 297 bp, Pseudomonas aeruginosa
atggctgggttcgctgagctgaccttcgacagtcagctgtacagtacagaagccatccagaaggcggcatatcgctctatgcacgccttcacgctcgatcttaaggtcgacggcgggatcatgctttgcaagctgatcgggaacatcacaactgagcaagatgcatttgaacgcgctgtcgaagaattccgcaaggacgtcctcgactaccagctgcgtgcgcagcttcagactgaaaccgctcccatccgaaacctcatcatgggattggctttctccaacgccaggctgaactga

SEQ ID NO: 331142 - DNA, 1458 bp, Pseudomonas aeruginosa
gtgagtaaattccagggactggatgcctacacccggcgagatgggtacgagctgctgccgttcaaattcgatcgtctggagggtgatgactatgtcattaccaacatgactggcgaacaccttgtcgtgcctatgccggagttgcgcgccctcctctccaaagatctgaccgctgagcatccgctgtacgcgtcgctacgtgccaagcatttcatccgatacgccgatgaacaggcaccgctggatctgcttgcgctgaaactacgcacacgactctcacgattgaccggcttcaccagcctgcacatctttgtcgtgacactgcgctgtgaccacagctgcccgtactgccaggtgtctcggcaaatggacggggaaacctcgttcgacatgacgccagagatggcagataaatcgctggatttcgttttccgatcccccaacccagcgatcaagattgagttccagggtggcgagccgctcttgaatttcaagatggtgcgctatgtggtcgaggccgccaaacggcgcaacctggttgaaaagcgcgacctggaatttgttatcgccaccacgctttcactgctcacggacgaagtcctagagttctgccacgagcacgacatcatcctgtcgacctcgctcgatggcccagcagacctgcataacgcaaatcgcccccgtgtcggtcgcgatagcttcgagcgcttcgtggcaggcttggccaaggctagaaatgtcctcggcgtggacagagtcagcgccctgatgactacgacggataagagcttgcctcgcgtccgagagatcatcgatgagtacgtccgcctgggcttcaacggcatctttctgagagcactttctccgtatggttttgcgatcaaaactcgcaaattcatgacctacgatacagagcgctggctggagttttacaaggaaggcctcgcgtacatccttgagctgaacaaagcgggtatccccttcgtagagcactacgcatcgttgatcctcaagaagatgctgaccagtaatgacccgggctacgtcgatctcatgaatcccgccggcgccggcatcgctgcgatcgtcttcaactacgacggctcggtctacgcctcggacgagagtaggatgctcgcagagatgggtgaccagtcgttccgactgggcaacatcctgactgacagctacgaagacatcatcctctccgatgcgctgctcgatgctttggagcagtccttcactctaagtgcgccgatgtgctctgactgtgcctttgagccctattgcggcgctgagccagtcttccatcacgccatcttcaaagacgtcctgggccgcaaagctgagtcctcgttctgcaagcggaacatgaccatcttcaaacttctcatcggcctgatgcagtctgatgcatccactcgccgcctctttatgcagtgggccaacgcatgctga

SEQ ID NO: 331143 - DNA, 1044 bp, Pseudomonas aeruginosa
  misc_feature (297)..(306): n is a, c, g, or t
atggtgctacggacgactcgagcatttctggtttcttcgcagaatcttccggcaggctaccagcactacctaatcccagaatctcttgattggcgtgcccaagaactggaaggcaagagctcgttcactctgctgcccaatgactacgactacttgggccacaacgacatcatccgactggatggccaggcgatccgagtgctcttcagggccaactccggtcacaactcgctgttggtgacagagcagtgcaaccactactgcctgatgtgctctcagccccccaagaatatcgannnnnnnnnncccctgatccccagggagacgcccgaggtaggtttttcaggtggggaaccaacgctggccggagctcgattcatcaatctcatcaggatgatgaagtcgtatctgccgaaaactgtcgttcacgtactctcaaatggacggacgttcgctgacgagcagtttgctcaccaatacgctgagatcgaccaccccgacatcatgattgggatcccgctctactccgatgatcccgatctacatgactacatcgttcaagcacctggagcattccaggaaaccgttcaagggatcctcaacctcaagcgacttggccagaaggttgagattcggatcgtgctgcataaacagtcgatcagccgactgccgcaactgtgcgagtacatcgcgaggaaccttctgttcgttgatcacgtaactctgatgggtctagagatgatcggcttcacaagagccaatctagacgccctatggatcgaccctgcggactaccgagacgtcctgagtgaggcagtcggcattctggcggcctaccgaatgaacgtgtccgtctataaccaccagttgtgtctggtgaacgacgatgtccttccctattaccgcaagtccatcagcgactggaagaacgaatatgttcctgaatgcgagggctgcacacgcaagtctcagtgcggaggcttcttctcctcaggtgttcgcaacggctacagccgtgccatcacaccgtttccctcacgctag

SEQ ID NO: 331144 - DNA, 1185 bp, Pseudomonas aeruginosa
  misc_feature (668)..(677): n is a, c, g, or t
atgatctaccaatgcaacggatgcagcaggactaccttcgagacgtcttgttcctggtgtagcagctctcaggtttcgccatcaacagaggtgcaagggcagcgcctcactcctcttgatccgtcgttctatccggactttcagtaccagtccaagggactcattaaggactttttaggcaagaaaaaagagcaggcgcagttgaacgatctgctcaacaacgtgcttagaaagtacgcagagctcaagcagccgtacttcaccaatttcatccataccacccgcgagacggcgtccacgtccggcgaagtcggggtacccgggccgagattggatggcgtgtactcggagcgggagctgttccgggaggtactaatccgcaaagggtttgacgagcttgagggcctgccagcattgctggataagctgctccttactacggctttcaattccgtttacctgggcttctcccgggagctgagcaggcacattaaacctggtctcagtgagaccctgcgctcctggatcgaggaggcgggaaccacgtttcgctccgacctcgctctgttctatttctacctgtgggagaacgacgtctcgtttccaggcattcaattcaacatgcaggccaatagcactgccggtatcccattgctgccgctgcctgnnnnnnnnnngcctgccttccgagccgggctcaatctctgcgagacgatctatttcgacatccttgtggaacggctggggaaccaacttgagcacttcaatcccaaccagttcattacgatgtacctggtcgacgccatggacggcctccagttcgaggcctttttggtggagatattccagaccatcggcttcgacgtgaaggagaccaagaagactgccgaccaaggagcggatctcttcgtctcgcggttcggaaagaatatggtcatccaagcgaagaactacacgggatcagtgggcaacgccgctgtacagcaggccatctcagccaaggcgttctacggctgtgatgaggcaatggttgtgaccaattcgtactacaccaaggcggcgaaagagcttgcgacaacagcaggggttcggttggtggatcgagaggcgctgcaaggttacctggacgattacaaccagaagctgattgagatgtttcaggccgaagccgaggagcacgtctag

SEQ ID NO: 331145 - DNA, 639 bp, Pseudomonas aeruginosa
atggaattgataagtcaggaaaaggtaatgcaagtgctcgattgggcttacgagaaatctgtgaatggattctctggccttgattccgccgaggaactcgcagccagctacgccaaggaaggaggttccgcctacgatcaagccaactccttgattcgctggcagaacaccaaatcggccacctcgggctttctcacgggcctcggcgggctgattaccctacccgtcgcgctacctgccaacattacaagtgtgcttttcgtgcaaattcgcatgatcgccgccattgctcagctgggcggttacgacgttaaggatgacagggtgaagactctggtttttgcctgcctcacagccaactccgccaaggaagtactaaaggacatcggcattgccgtcggcaacaagctggcgatgaacgccgtgaagtcgatttccggtaaaacgctgatagagataaacaagaaggtaggcttcaagctcttcaccaaatttggtgaaaaaggcgtgatcaatctcggtaaagccgtgcccctcctgggtggcgtgatcggtggcagtttcgatgcatacacgactaacaccatcggcaacgtggctcgggacacattcacacccaaagaagtcgcaacggcgtaa

SEQ ID NO: 331146 - DNA, 219 bp, Pseudomonas aeruginosa
atggaaagcaatctatcgttgcagatcgagcgcgccgcacatgcggagtttttccggctttgggccgaggggcgcttcgtgcatcagcgactggggcaagcgttctataaccacttcaacctccacaagctcgccgatcaaacttcattgcagggcctttacgaggctgacggtgagaaagcttcgcgcttgatcatgaggctgttccatctccactga

SEQ ID NO: 331147 - DNA, 1005 bp, Pseudomonas aeruginosa
atgtctgaagcgaaggatacgctgctcaggatgtttgctttgctgcgtctgatccccgaattcccagggcacatcgcatcgacgacgttgttggagaagctgcgcgaccgcggctttttcgttgatatgcgcacggtgcaacgcgatttgaatcggcttagcacacctttctcgttgatgtgcgatgagagcgtttcaccgtatcggtggagcttcacaaaggatgcggagctggatctgcgagagatggacccatccactgcgctggttctgtatctggctcaggatcatcttaagagccttctaccgcaaagcgcactcgacctgctggcgccgcagttcaaccgggctcgtaactacttggaagggttggggcagaacggactatcgcattgggcgagacgcgtacgtgctgtgcctaatggcagagccttgatcccggcaccgatcccgctacagatatgggaccaggtgtcgacagcgttgttggagcatcgtcagttgcgagttctttatctcagccgcagcaaggcgacgcttaaggagatgcgactgcaccctgtcggtttcatttctcgccactcgatcagctacctgattgctacggttgatggttacagcgatgtcattcaatttgctgtgcaccgcatccgtgaggctgaatgtctcgatctccctgctgtggggggcgcggatgtggatcttgatgagtatctgaacggcggtggcttcaacagcgcaggccctgtgcccatggtagagctgaaggctgacgtctcacctcaaattgcctggcatttgggtgaaactccattgagccaggagcaaacgatcgagtctttgccaggatcggactggaaacgcttgaaggcttgcgtgccgcaggatcaggaaacgctgtggtggatattcggattgaacgagaacattcgcgtttatgaaccgcaaatttgggtagatgcagttaaggaaaaagcggagagagtcaggcagctgtacgtctga

SEQ ID NO: 331148 - DNA, 792 bp, Pseudomonas aeruginosa
atggcagtggaagaagacgtaagtgaagttgatgcgctgaagcgattgctggcgaatgcgaactctgagtacctcgatctattggtggactacatcactgatggtgggaaagggcgcgtaatgttgtcggctgccaactgcaaggccctggttcaggctaaggctgacggcgagtattccgaggctcagctggagctgcttatcagcgagctgctgcattttggaggcaacagcatcgccaatctgtggcgtagcgagggtgctccctgggcgtcgatcgtcgtggatgtactcgatcatctaagaggaaagcgcgaagacggagactcgatcattgagttggagcgtcgagtacttgtacagctccttaggcacttttggagcaagttgtcgggggctgaacttgagcccttatgtgaagtgctcaaggttaacggcatgccggacaaggaccagctagaggtgctacgccaggcggtaatgggggcaaccgaggttggtacaacgttagcgaaaatactggctgcttccatggcgagttcaactttcggagccagcgcggcgtttaccggcctttcctggggaggcgctgctgcgggagttgcacagtttgcggctggtcgcggcgtctcagtagcgttgggtcctattggactcgcgctggggggcatctggggtgcctacagcctaactgggcccgctttccgggtcacagttccttgtgtggtattgatcgcgctgatccgccttgaggcgcgggacctcggttatcctcacattcgttgcgactga

SEQ ID NO: 331149 - DNA, 1077 bp, Pseudomonas aeruginosa
atggctgagtcgatgaaggttggtttagtcctctcaggcggtggtgctaaaggcgcttatcaggttggagtactcaaggctcttagggagctcggtacgcgaattgatgcggtctccggtgcaagcattggggcgctgaacggtggcgttttggcttctgctccgtctctggacgtagcgattgagcgccttgaggaactatgggggcgtttggctaagcaatcgccgctgaacatgaaagtccccggctacctgatgatgcttgccgcggcgggtttgcggcttcagggcgcaggtactgcgctagcagctcttcatgctgcacaggacattgctcgccgactaaattacgagctgcccgaatggctggagtttcttgaggacagcttgctcgacgaccagccgctcagggagctaatggatgagtacctcgtctctgatgaccttgatactggtctgccgctgtacgtctccatctacaagagcagtggcggattgactgatcttctctccgctttcaaagcagagcttggtttcatcgatactccggattctgactttgttcatatccagtcgacggagcctgccgagcgcaagaagctgcttctagcgtccgctgcgattccaatgttgttcaaaccccggaccatcgaaggccagcggtacaccgatggtggtcaaggcggttggcaaaccatgcaaggcaacactccgattacgccgctcctcgatgcgggctgcaatctggtcatcgttacccatctcagcgatggctccccttggagccggcacgactttccaggtgcaaccatcttggagattcggccgagtgaatcgctcaatcgtgctcaaggtccccttgggggcgctcgtgacctgctcggctttgatgctgaaaagatcccctcctggattgagcagggttatcgcgacacgctcgcatgtgtcggtagagtcatggatgctcagaaaagtcgaaatgaactgcgtgtctccgaagcggcgctgggtactctcgaccagcaaggggcacaggcagatgaggcgctagcagacgcaatggctaggttgaagtag

SEQ ID NO: 331150 - DNA, 900 bp, Pseudomonas aeruginosa
atgagtgacgtcagcgcactgaacttagaatcggacgtcctccagctgcttaattccctgccagaaaaattcgttgtcgattttgccaacggcattgatgtcgctcgcgaacgccagcgctatatcgccggtaggactgctttcttctcccggatgtacgatggttttactggtcagggtgcacggcatcaggccgaaattaatgccaaccttaccgatggggtagagggggcgctggagtggctaaaagaccttaccggatctctggccaagagcaatcacgccattgtccaagtgaatgctcgtgtcagcgccctgaaggaagatgttgccaaaattgcaaactactcaatcactactcgccagtgcctagagacgttaggagttcggtgcgggaagctggagcagcaggtcgatcgaattgagagcttgcagaaggcacaagtccatcaagaagcagtcttcagtaagtgggcggcggggcgtctgagcagtttctcattgtcagggcgctgctatgcggcactggaggagctgcgttggggggcgtttggtgatcaccttcagcagctctcgggttctgagcgccagcagcaattggaattgctggccaatagagccattacccagctgagcaaagacgcgaatctaagccttggagagcggattggaactcgagatcgctggctcgcgcagccgcaagggcggcacgtgttggctgatgcaggtgacgctctggagtatctgggcgattgggctgacgtagagcgtaatccatttgtcttcgttgtctcccagagggctgaggagttgccgctacaggttccgcgcttgggctccgcgcagcgattcacagagacactcattagtgagcttttcttggaggcgcagcatggctga

SEQ ID NO: 331151 - DNA, 2196 bp, Pseudomonas aeruginosa
atggtactggctgtagtcggcacgatgaaggcagggaagtccaccaccatcaatgcgattgttggtactgaggtgttaccgaaccgtaaccggccgatgacagctttgccgacgctcattcgccacactcccgagcagatcgagccagtgctgcgcctggaaaataacgctccgattaacgatcttctggggcagctgtatgaaacatctcacactccagctgggaggcaggccatcaatggcctcgacagtaccgacgatatgaaagagctgctgaatatgattcagcggcaagagcgtttcggtaagaaatatgagggcgctgaggcaattttcggcttccttaagaacctcaatgatttggtgcgactgtcggcaacgttggaggaggagttcccgttctctagctatgacgaagtgcatgagctccctgtgattgaggtgcgctttgctcatttgggggatcaggccgaaacaggaggacgtctcaccctgctggacacacctggaccgaatgagtcggggcagccacatttgcgcaagatgctccgggagcaactgagaaatgcctctgccgtcttggctgtaatggatttcacccaactcaaatcggacgctgacgagcaggtgcgccaagagttggagagtatttctgaggtatgtagtgggcgtatgtatgctttggtcaataaatttgaccagaaggaccggcatggtgacagtgcagagcagattcaaagctttgttgctgacaccttaatggggcagcgccttaagcgagaacatgtcttccccgtttcctcacgttggggatatttggccaatcgggcccgccatgaaatcgctaatggacggtccttgtccgccgaccatgcttgggtagctgacttcggtgagctggctctaggtatggactgggaggaaactatcgaagacgcagatgaggtattgcgcagggcgaacatgctctggaagaagtctctattcagcgctccactcgataacgtcattcgcatggcacatggacaggcggcgaagcttgctatcgcttccgctgcgtcgaagctggtcgatatagcatcacgcctaagtaacttcctggaggttcgggatactgcattagccaaaagctccgaggagctcgaggcgcagatcaaatcgattctagaggatgtcgagaaagttaaagggcttgaagaggagagtggtgataagtccagcaaggtattgagggagatctcgagcgagctcgagcagattttccaaacaatcagaaggggcatcgagcaggagattgaggctaagttcaaggccggcaaagcctcggaaaaagaacgcgcccgttcgcagcgaaaagatatcgctccctccggtgttggtggtgtgctcagagcgatccttggagccccggatcgccaaagagaaggcttcggatttgattttgacgagagccatcccttgattgccttcaacaaccaggaagaagcggttgctcttgttaataatatagaaaaaggggtttcagaagtaatatcagatggcgagaaggtgatgaccgtagatctggaggtcctgctaaataagtttcgagagagcttttccagagacatcaagggcgaggccgaaaagttggtgaatgcgcttaatcaacgctttaatcaagatggattctctattgatgttcgccttcctgaatctgctccactttccttcccttacactgctagcgaactgctaggggaagtcgtcgatagcagaactcgttcggtcactcgatatcgccgtagtactagtgcttgggggaaagtctgcaaacttttcaatagctccgattggggatgggaatcctaccagtcccccgagggctactacgaagtcaatataaataaagtgcgtgcgcaaattaataattctgttactaagatattttctgagctgcgtgaaactaccgatgccaccattaaagctcctttggaggctggcgttcgccagtttttcgaacagctcaagctcacattggaaaatattcgtagtgacttggctcagagcctggttgataagcagagtagtcgaggggagcaacaggccttggctcagcgcctctctggactgaaacgaaatgtccctggagttcgcaaggacagcgaggagttaaagaacgacgttcagccgactaccaaggaggtggtggcatga

SEQ ID NO: 331152 - DNA, 159 bp, Pseudomonas aeruginosa
atgcccaccatcctgctcatctaccaccacacctggctcggcctgcatccgttcaagcaggtcaatttcgacatcaagaagcctccgcgcttcctcctgaagaattgcgatggtgttttcgtgcatgtcatctcctttaacgtgcctcttcttttctga

SEQ ID NO: 331153 - DNA, 2034 bp, Pseudomonas aeruginosa
atgactgttgaattgtcctcggcactttccggccatactgagacgctcgaactgctcgaaagctggtgcgagcgcggctggctgcgcgatctggaccgggcgttagcccagttcttcattgaattggacccggcagcatctccgctcctcatcttggccgctgcgctagcaagtcatcagctagggcagggccacatttgcttggatcttgaagcaactctgcagcatccaaacctgacactgtcactgccgcccgagggcgaagacccagaggtagcggagctactgccctcgcaaatactggcaggattgagtctagaggcgtggctagagtcgtgttccgctagtgtgttgttcgaaggggattgcgctccactcgtgttgatcggtccttgtctgtacatgcgacgttaccgggattacgagcagcaagttgctaccagcattgcgcgacggatgcgattgccgacagacgcaccagcggaccttgttgctcgcctgtcgacgttatttcccgagccgtttctgctggatggtgagcgcaagacagactggcagaaagtggcttgtgcgctcgctgcgcgagaacatttcactctcatcacgggagggcctggtactgggaaaaccaccacagtagttcgactcattgccttactgcaggagtcagcgcttggtgtgggggcgccgttgcgagtgagtttggctgcaccaactggtaaggccgctgcgcgtcttaccgagtcaattggtgaccaggtggcttcgttgccgctgccagcgaacgtacgtgagcagatacctactaccgtaaccacattgcaccgcttgcttggcagcttgcctgatacacgccacttccggcacaacgcaagcaatccacttccgttggatgtgctcgtggtggatgaggcgtcgatgattgacctggaaatgatggccaatcttctcggagccttgcctgaccacgctcgtttgatactgctcggagataaggaccagcttgcttcagttgaggccggggcagtactgggcgatctctgtagggaggctgagaggggcggttacagcgaagccaccaccgagtggctagagtctcagaccggcgagcaactggtggcagcagagttggtgcagggcgaacaagagctggcacagcgcattgtgatgttgcgtcactctcggcgctttggcagcaggtctggaattggccgattggcgcgtgctgttaatgctggtgatgcagaaactgcccgggcgacgcttgtcgatggagatgagagcttgcatgttaagcggctctcgggagagcaagatcgagctttagaatcgctgctgctcgatggcgtcggaactggagatcgacgtccctgcggctacgcgcattatctggaggtgatgcgggttaatcgtccttcgcttggtgatgatggtggggtctgggatgcctgggctagtcgtgtgttatctgcctttgaccagttccagctgctatgtgctcttcgtaaagggctttggggagtagacgaactaaatgcgcgcatcgctcacgcgcttcaggggaggggcctgttggaacaggaccacggttggtacgaggggcggccggtattggtaactcgaaacgattacggcttggggttaatgaatggagacgtcggtattgccttgcgtctgcctgagccttcggatctgcccgattctccgccaaatctggttttgcgagtggtttttcctcgtaacgatggtagtggcgaactgcggcatatcctgccgagtcgactgagtgcggtcgaaactgtgtttgccatgaccgtacacaagtcccaaggctcagagttcgagcactgtgccttgattctgcccgatacgataagccccgtgctgactaaggagttgctctacaccggcattactcgcgctagaagctggttcaccctattggaaagccggacgggcctattcgagagcgtcgtgcgaaagcggatagaacgacgcagtgggttgagagagtcactgattgctgagggctag

SEQ ID NO: 331154 - DNA, 3633 bp, Pseudomonas aeruginosa
atgagttcgtcacaacggcctctggccctgcgcttcccgctgtatggcagcagactgattgaagcaagtgcaggtacgggtaagaccttcaccatatccgcactctacttgcggctgatcctttgccatggaggcgagcacgccttccgtgagcccctcttgccgccccagatactcgtcgtgacctttactgatgcggctactcgagagctgcgagatcgcattcgtgcgcggttggtgcaggcggcggaggtttttcgaggagacggtgagccagacgagttgctcgaggagttgcgcggtgattttcccgaagctgagtgggcaagttgtgcgcgacgtttggagctggctgcgcagtggatggacgaggctgcggtctcaacaattcatggctggtgtcagcgcatgttgcgcgaacatgctttcgacagtggcagcttgttcaaccagaccctagagaccgatcacagcgacctactggctgaggtagtccgtgactattggcgacagcattgctatccgctagatggggctgcgctgtcatgggtggttaagaactgggaaacccctgcgggtcttggcaagaagttgcaggatctgcttggcgagacggacgctcctgacagcctctcgcttcgagaggtgattgatcacagccaagccaggcgagcgcaagaattgtcagacctgaaggcaccatggtcggcctgggcagatgagatcgaatcgctgctagatcaggcacgagaatccaaagcgttcaacggaagtaagctcaaacagccggactacaagggctggagcaggaagttgagggaatgggcctctggtgctgaggtggcactgaaaattggcagaggcgtcgagcgtctgactcccaacggcctagctgaaatctggaaaacgacgccgcccgatcaccctgccctgaacgccatgatcacgctgcccgagcaactgaaaaggctccctgatcccgttgagccggccttgcgccatgcagctgcttgggtgagtcatcgcttcgatcacgaaaagcgccaacgtgctgagatgggctttgacgacatgctgtcccgtcttgatgcagcgctgcagagtgacaatggtccgcgccttgccgaggtaattcgtcggcaattcccgatcgcgctgatcgacgagttccaggataccgatccgctgcagtaccgcatcttcgacacgctttaccaggtcgaggccaatcgggacgactgtggattgttcatgattggagatcccaagcaggccatctattcgtttcgtggcgccgatatttacacctatctgcgggctcgccatgcaacccagggacgccactacaacctagagcgtaacttccgttccagccagaacatggttgatgctgtgaacgagctcttcttgcgtgctgagcgctctgaagtcgggagcggggcatttctcctgcgcgacgagctgccgttcattcgagtggaggcagaagggcgcgaagaaacttggactgtggagggcgaggagcagccggcgctcactgcttggcagttcacccaagacgagccagtggcaaaaaagacctatcgcaaggctttggcagaagggacggccagcgagattgtccgtttgctcgatttgggacagcaggggagggctggttttagacgcgaaggtcagtttgactcgctgcgacctagtgacattgcagtgctggtgcgcgatttcaaagaagcccaggctatccgaggggagttggcaacccacggtgtgcgcagcgtgtatatgtccgacaaagactcagtttttgccggacaggaagcgcgagatgtcttgctctggcttcgtgcctgcgccgagcccgatcaagatcgtccgctgcgagcggcgcttgcgagtgcaacgttggggctggcgctcgtcgagctagaagctctaaacctcaatgagcgcacttgggaacttcgagtgatgcagttccgggaataccgccagcgttggcagcgccagggagttctgccgatgctgcgtcagttactccacgatttcgcgctgccacagcgtctgatggggcgtgcggagggtgagcgcgtactaaccaacgtgttgcatttagctgagctgctacagcaggcctctgctgagcttgatggcgagctggcactgatccgacatctgagtgagctgctagccaatgaggggcaggctgcggacgatcaggtgcttcgtctggagagtgatgaagcgctggtgcgcgtggtgacaatccacaagtccaaaggtctggagtacccgctggtatttttgcccttcatttgcgccttccggtcggtagatagcgataagccaattcggatacatgatggggagcagcggcgactggtgttcaacgccgacgcacaaaccttggcgcgtgctgagcgcgagcgtttgggtgaagatttgcgcctgctctatgttgctctgacacgggcacgacatgcgtgttggatgggcgttgcggatctgaaaattggtaacgcacatcggtcgcggctacacgattctgctctgggatatttgcttggcggtggcctaccgctagctgctagtcaagatttgaacagatggctggcgcctttgatcgatcctttgcgcagtgcagtcgcagctgccccagaagccagccaacagcatttccgcgcagatgaggcgcaactccctcccgttcaatggagtaccccagagcgggatgccgctgagcattggtggattgcgtcatatagtgcactgcgcctagacgagagggcgatcatcccagtgagtcggcatgaggatagtgcgccagacagcctggcgatgcagaactccactgacgatgacagctccgaagtggtaccggcatcgttgctcatgtccgctcagggactgcatcgtttccctcgcggatcgaatccaggaacgttcctgcatggccttctggagttggctgctgaggagggttttgcccactgtctagcgaaccaagcacagctgcgcgaggtcgtggcacgacgttgtcagcgtcgtggcctcgaggcttggatcgatccgttgcacgagtggctgttggcattgctgagtcagcaaatggccctcggcgatggtggctcggtgagcctaggagatttgactcagtatcaggctgagctggagttttggttcgaggcccggcaggtcgatgtcaggcagctcgatcaattggtcaggagtactgagctgcccggcctaccgcggcagcctttgcaagccgacacactgaacggcatgttcaagggcttcattgacttggccttcgagtaccaggggcgctactacgtagcggactacaagtccaactggctcggcgctgatgatactgcttacacgcgcgaggcgatggagtcgtcgatggcggcccatcgttacgacctgcagtacgtcctttacgtgctagcgctgcaccgtcaactgcgtttacgtctgccggattatgactacgaccgtcatatggggggagctgtctacttgttcatgcgcgctccaggaaatggtgtttaccaggtccgccctgcgaaggtgttgattgagcaactagacgccttgtttcttggccaatcccaggagagcttcgcatga

SEQ ID NO: 331155 - DNA, 3399 bp, Pseudomonas aeruginosa
atgcaggagcttgagcctggcctgatcatcatccacggcaatcacctggaagagctgcgttctctttcggtgcagtggatgcgccgctacccattgcggccactggaaaacgaagtgctactggtgcaaagcaatggcatcgctcagtggcttaagcttgcgctcgctgagcacgagggctgtgggatcgccgcggcacttgacgttgatctgccggcgcgctttctgtggcaagcctaccgcaccgtcttgggcaaggacgcgattcctcctcaatcgctgttggacaaggcccccctgacgtggcgtctgatgcgattgctccctggcttgctagctgacgatgctttcgttcccttgcgccgctttttgtcggacgacaacgatctgcgtaagcgttaccaattggccgagcgcttggcagatctgtttgaccaataccaggtttaccgcgccgcctggttggctgattgggctgaggggcaagatcggctacgcacatcgtgtggcggcgagcgtctgttagacgatacctctcggtggcagccggctttgtggcgagccttgctcagcgatgtagggcacgagcatttggcggagagccgggccggcgtgcacccacgcttcgtcgcccgcctgcgagagcttgaggaacggccaccaggcttgccgcgtcggttgacggtcttcgggatctcgtccttgccagcccaggtgttggaggcgctgcaggcaatggcgcgttttacccaggtcatgctgtacgtccacaatccttgccagcatcactggggcgatattgtcgaagacaaggatctgctactccacgactaccgacggcagcagcgtaaaggtggactaagcgggccattcgacgacacgcagatgcaccaacatgctcagccgttgttggctgcgtgggggaaacaagggcgcgactacatcaacctactcgaccggcatgacgagcctgagcgttatcgtgaccggttcgagcgcatcgatttgttcactgcggctcctgaaagcacgttgcttggccagttgcagaacgacatcctggatctgcgcacgctggccgaaactcgagcgactcacccgccggtggatcctgatcttgatagctcgctgcgcttccatgtagcccacagcgctcagcgtgaagtggaggttctgcacgatcagcttctggcgtgctttagctccgacccgagcctacggccgcgcgatgtaatcgtgatggtgccggacgtgaatgcctatgcgccgcatattcaggcggttttcggtcagttcaccccgggggacgcgcggttcatcccgttcaccttggctgaccaaggcgtacgaggcaaagaacctctagtgattgcattggagcatttgctgcgtctgcctgagagccggcttagtgtcagcgaaatactcgaccttctggatgtagcagctgtacgtgcgcgctttggtatcactgaagaggacatgccgacacttcgtcgttggcttgagggtgctggcgtgcgttggggcttggacgctgcccagcgtcagtctctaggccagagtgaagggctggagcagaacacatggcgcttcggtcttcgacgcatgctgctgggatatgcagtgggggcggccggaagttttgccgagatcgaaccttacgatgaggtgggtggcctcgatgcagtactgataggtccgctaactcgtttgctggacgcactcgatcgacatttgcagcttctgcgagagcctactacctcgtcgacttggggagagcgtttgcgcgggctgctggatgcgttcttcctgccctttagtgatggcgacgagatgttgcgtactcaactgctggacgctctcgagggctggttagcgctttgcgatgctgcggcattgagcgagatgttgcccttgcctgtagtgcgtgaggcgtggctggaaaacctcgatcaggggcggctgagtcagcgattcttggcaggcgcggtgaatttctgcacgttgatgccgatgcgagccatcccattccgtcacgtctgcttgctgggcatgaatgatggtgactatccgcgcagtcaggcgccgctggactttgatctgatggctggtgattaccgccctggtgaccgatcgagacgcgaggacgaccgctatctgctgctcgaggcattgttggctgctcgtgaacgactctatgtgagctgggccggacgcagcattcgtgacaatagcgaacgacccccttcggtactcatcggccagttgcgcgatcacttggctagcggatggcgcttgtcgagagcagggaaactgctcacggcgctgactacggtgcacccccttcaaccctttagtcgccgttactttgggggcgagtcaggtctatttagctatgcccacgagtgggctgagctgtatgggcaggtagctgcagcaacagcggagcctgccctttctcagtgggaggagggccgcaaagtcagccccgagcaattgcagagcttcctgaaggatccggttaagtacttctttacgcgtcgcctaagggtgtacttggacgaagaggaacagacgcagttggatagcgagccctttggccttgatggtctggaacgctaccacttgcaggatcaattgctcaaagctgcactggcagtgccgcaggaagatcgcgaggatgctttggaagcagctgccaatcgattgaggcgcagtggtcaactgccgcttgctggctttggcgagcagtaccgtgcagatctcttggggccattgccaaatcagatggagcgatacagctcgctatgcgagctttggctcgaatgccaagagtcttccctgcaactggcttttgaagcctccggtatacagctgcagggttggctcagtgggctgcgtcgtcatgctgatggacgtctggctcgtttggaattgatgcctggtagcctcgccaacgataacgatttgaagtggcaccgtttgttgcggccgtacgtgatgcacgttattgcagcggcctgcggagcatcactgacgacgctgttggtgggggaggatcagtcgctgagcttcgcgccggtatctgaggtcgatgccgaacgcgtactaggtgggtggttgcaagcttggggcactggtatggcggttcctctgccagtggctctgaaaacctctgtgacttggctgcagaaccaggatgaggacaaggcgcaaagctgttatgagggcgccttcaagatcgtcggtgaggttacctctagcgccagccttgctcgccaatatcccgactactctgcgctcatcgcagacgggcagttcccgattttgagcgaacagctctatcgatctcttttggatagtgagctgacccagcttgaggagtcccaggcatga

SEQ ID NO: 331156 - DNA, 615 bp, Pseudomonas aeruginosa
atgaacgatgttttccagattgagccgctcacccagattgaccgagcgcagtcctacattcgcgcatacccccatattttgtcggcattgaagacgccgtacgtactggatgagcaggccttcgtttgcggcgcccacatggtgtacgggtggatgccaaccattttggagatccacgtcagcgagtcggttgatgtacatgccggggtggcattgctcaacaaggctcgcactgctggacggcttagctgtgaagagattgagcaactggcaggtctcgttaatcgttcggtcgttggggcatccaagctgctgcactttgtgaatcctgaggcattcgcaatttgggactctaggatctatcgcttcctacaccagaagcctgcacacgcttatcgcgtcaacaacgccggcgagtatgaaacctatctggacctgctgcagcgcttgcagcaggacgatcgattcccagggctccatgcctccgtcaatcggaaaatggggtatgcggtttcgccgctgcgtgcacttgaagtggtgatgttcctgaactctccctccgaggcgacgcccccagagagtggaccggctgcggcagcggctgttgctgtttag

SEQ ID NO: 331157 - DNA, 594 bp, Pseudomonas aeruginosa
atggagctattcagggcaattccatccagccagatagctaaggcaagagaagggcagcgcaggcgttcgtccattcgcatcccaagcaacgtgccttatgtggtggataacctctgggagtggctaaggcctttgagcatgccctctcggcgtcacgctatatatgccagtcccactcccgaaatggcgcttgccaacgtgagtgccccccttaatgacggtgagcactacattgcgtgccgcgtgatcgtcgatccagaccatgtacgaattgcgcagctacccgtgcgtgatgcgcgtgagcatccagacattcgagtgatcactcgttgggtgagcagcaatcgctatgcatttaccgcactagagcctgcgcaaaaacagcaggtagcgccgctgttcatgcctggcttaggacgcgaagagcttgagggcttactccacacggacagttgggtggagcagctctgccgccacattcgccagacttcgaccttctggaacgctgcgtcgacgcccgtcgctgcctctgagggggagctgttctttgagctcattgacccgtttgttacctaccggctggagccggtctga

SEQ ID NO: 331158 - DNA, 999 bp, Pseudomonas aeruginosa
gtggaacagctttatcgccaagacctaatccttggcctacttccgaacaaggaaaatgcgctcgatagcgccgccgttcatcaacgtgtaaccagccaagggctagacgtcgacaagcgcaccatccagcgggatctgagtgaactcgagctgaagtatccccatgtgcacagtcgccttaagggcagcggaaaagctaaattgtggtgggcggacaagtcgctctcacgccttagcatgttgccgaccgatgcgatgaaccttgtcatgatcatggatcatgcatctcggttcggtatggcagcgcaggtgcaaaagctatccactatccgggagtacgccgtctccctcttaaagggaaatcgccccgcccaggactgcacaggaaagatcgtcagcaatacccgcttcgtaacgcttgccccaagctcggtggaccccgatgtgctcgcagtgatacagcaagcactgctggacgaaagcagtgtgaaggctcgttatctgaagcgaggcgcgcagcagcctaaggagcttcatctcaagcctctgggcctgtcctatcaagactccaacatctacctctcctgcgtcttcaaagggcttccacaagacagcatcgccgcgcttccactgcaccgttttctgtcagcccgttcgactttcgaagacctccccgctcccgaaaacttcgacctcaactccatcgccgcacagaaaagcctggtaggcctgaagacagaccacccagctctcctaaagcttcgcgtaagccagacacttcacgcgcgtttgcaggaaaacgcactcacccatgaccagcaattggaagcgctcacagacggctggtggctgatgactggcagcctccatctgagccaggggctagatctgtggctcttaagtcagggggagcatgtggaggtgctcgaacccattgagctacgcgagcaaatctccgagacagccacgcgcatggcgatgctctacaaatcgcaatag

SEQ ID NO: 331159 - DNA, 750 bp, Pseudomonas aeruginosa
atgggaaagcaccgagtgcagcgactggcgcatgaggttccaacggcacaagcgctgcctcgggactgcatcaagataggattggctgccgaaacgcataccgaagccaggcaggtcgtgaacgacatccagatgcactgcgatggcctcctcgccttagaccaactgcgctttcgccggcaccggttcacggctctggacacagcccagagctggtccaaccaacgattcaacgagatccattggcttagggcttcgccctccgaccctatcccatatccgcagctgtttgctcacgcaaaaatcgttcatgtccatcacctggatccccctgcttccgatactcaccctcacgctcgtcactacctatggcgcagctgggatgaactggctgcctactgggcaagcctgtacgtagcccgggagaacccaagcgtccccggactcgattggaacagctacaccacatggtcaccaggacctggattcggccaggtgacaaatagctggggcaccactgcccccctcgccgcgaccggcctactggcgcaagtacagcctgcagaccatgcaggcacgacccaagccttactgctaatcgagtccaatctcgacctcacgattggcgatctcacaaacgttgttgaccggcttggagcagctatcgagtgccaagtcattgccactggctggctgtctaaaggccactcgggctgtggcctcaaactcctgagatttggacccgcgtga

SEQ ID NO: 331160 - DNA, 2148 bp, Pseudomonas aeruginosa
atgcgcagtaagactatacgcgccgcaggcccgcactctgatgacgtcaccccgcttacgctgaagtggatcttcaccttgattctcgacctgggcggtcaccgccagctgatcggtgagcgcaatttcaatgatgatgcgcttgccatggagctgggcgtggctgagcttgaggagcaattcaaagagcggcgcttccatttcgatgatgacgacgaagacacctcgcctccgaagcaaggaaccagcttccgtcaaaaagtgctcagtcggatggctgcagagcaacgtcatttcctgcgcgatcatcccgcacccaactacccggacaacttggcagaaaacctgggccagttggcgcaattgattggcctggaggagattgatcgcgcgctgctcggattttgcgtactcatgcatagcgatgcactcctggaggaagcaaccgatcagctcggccagatcggattcaaccgaaccttgcgagtcctatcccacctgcttggccacccaccagaggccatcaggctacatctgtctgcccaaagcccactggtacgtactgggcttgttgaagtgaatatgtctcgcacctatcgctcgggtctcattgatcggctgggtgttggaaacaaggatttgcttcgagacttgcgcttccacagcggctcccccatcggtctgtttcagagcgctttccgcaaggcaccagagggcgagctatgcatcgatgactaccggcacctcgcgctccccctttcaattgcccgcccatatctcaagcgaacgctccaggaagcagcgcgcggcgtaaacgtgctgatctacgggcctccgggaacggggaaaagtcagttgcctcgcctactcgccgaggagttgaacgcagagctttacgagatcgcctgcactaatcgtgatggtgatcctatcgatggccgcggacgcctatgcgccctgcgtacagctatgggcatcctgaatcagaaggaaacgatgctggtgctcgacgagattgaggacctgatcagcgagccaaacatttacgcccctgatcaaggcaaaagaaagggctggatcaatcgaatgttggaagaaaattcgctgccctgcttctggctcaccaataacattcaagctttagacaacgcctacatccgccgcttcgacttgcttctggagctgcaaaatcccccgaaatccgagcgtgagcgcatcatccggaatgcgggaggagacctggaagatgcattggtcctacgtatggccagccacgaacacctcactcccgccgtagccacccgggccctgcgggtagcagaaagcctacgcggatcggccgatgccccaaatctgaatcgagcagttgagtacatggtcaacgccaccctacaggcacaaggcttcgacaaactcgcacgcgctcaggaccaagtactgctcgttttttactcccccgagcagagcaacactgatgttccattggaaggacttctggagggactgacgcacaatcgcgatgccagactgtgcttctatgggccacctggcacgggtaagacggcatacgggcattggctggcgcgagaaatcggccagccgctgctggttaagcgagtctccgatcttgtttcgccctacctgggcatgaccgagaagaatcttgcccatgcttttcagcaagccagggacgaggatgccgttcttcttctcgacgaagtggacagcttcctccgggagcgccggtatgcccagcactcctgggaggtcactgcagtgaacgagatgctcatgcaaatggatagccaccggggcttgctgattgcctcgaccaacctgatggacaatctcgatcaagcggcactacggcgcttcgatctgaaggttggttttggttacctgcgccccgagcaggtcagccatttgtttcgcctgcatttggagcagatggggcttagcgcccctgatactgaacaagatgcgaaagtaaggaggctgcagcgcctgacgcccggagacttcgccactctcgcccgccgctctcgtttccgcccattttccgatgccgatgagttctttcatgcactgcaatcggagctagccctcaaagaggcgccggcacaacgcccaataggctttgtgcattga

SEQ ID NO: 331161 - DNA, 1512 bp, Pseudomonas aeruginosa
atgcgcatcgggatcgattttggaactagctacactgctgcggcggcctacataaacggcgccattcagcacattctttttcgaggcgaaagccagtttcgtacggctgtttttgttcctgaaaaaccagtcgacatgagccagttcgatgaatcgctctacgtgcaggaggtcgccaatagcatcctcagctcaaagagtagctacacccagaagctcaaaaagtatgaagaagcggctagccggatccgagtggattaccgcaggcaggttcgtgatggatacctttcagaagaggaagccatcgcgaaaataggtcaagccatctttgccctgaacaagcctatcctgaggtccgatgacgatctcaggaaagccgcgtatagcgagattcgtcgccgctgggtccaggcccaaatttctgagagccgtgagcagtcgaccagcatcgatgactctgcagtcttcggcgaagaggcaattgaagagttcttcgcttatgaggccggccgtctgatccagtctcccaaatccatgctcggcttcaagctaggagaaccccagcgcgttgcgatagtccgcattgtctccaacgtactacgtcatatccgtttggccgcctgtgagcagctgggcacggacgtgaccgaagcgacaatcggacggccggttacgtttcgaagctccatgggagaggctgggagtaagcaggctatttgcctgctgcgcgaagctgccttgcaggctggatttacatcggtcgatttcctcgctgagccagcggcggcagcaattacctatcacgccagctcgcctattatgcggcgaacagtaatcgtcgacgtggggggcggcacgactgacatagcgctcggagacgtcggaggctcagctagcgagcccaaaatcgacacgacatggggagtgggaaaaggaggtaccgatgtggaccttggtctttcgctcaaggcgatcatgcctaagttcggtaaagaccagtgcctattgctcgcccctgtttatgtgaatgcagcgatggtcagtgatctcaaccggcagaaagagtttcggcagactcagttgcttggagtgcaagaaccatttctgagtcgtattcgctctctgcaacgcaacggggtaacgatccggttgaaccgcgatgtcgaggcccttaaggtggccctgagtgcagaggcccaagccgagaccgtgcttgattacattgagtcggatctttcggttgccgcgacgcgatcggaccttgagcaagggcgcgagcgatttatgcggtcgttcgaccagcttttacatcaggtgagcgaggcgactgccaacagcgctcccgtcttattcctcactggtggcatgtcgcgggcgccctacattgctgaagcggtgcgtaagcatttccccgacagtgagatcgttaatggcgatgcatcgttaggtgtcgttggaggcttggccatacacgcggcgatgaatcgctcttcgttgactgtgggcgtgtga

SEQ ID NO: 331162 - DNA, 306 bp, Pseudomonas aeruginosa
atggtgcgcgagagcctggagcccggacaaagcgtctcggtggtggcccggcgcaacggcatcaaccccaaccagctgttccactggcgcaagctctaccaggacggcagcctctcggcggtcagtgccggcgaagcggtggtgcccgcttccgagttggccgatgccctcaagcagatccgcgagctacaacggatgctgggcaagaagaccatggaggccgagatcctcaaggaagcggtggagatcgcccgctcgcgaaaatggattgcgcactcacccttgttgccgggggacgaccagtga

SEQ ID NO: 331163 - DNA, 840 bp, Pseudomonas aeruginosa
gtgaaggcggtcagtgagagtctcggtgtggcgcgctcgcaattgacggctcgactcaaacaacccgctccgggagagcgatcgcgtcgacgtcgaacgctcaatgatgtcgccctggtcgagcagatcaagcaggcggtcggtgagctgcccagctacggctatcgccgggtctggggtctgctgcgccggcagcatgagcagcaggccttgccaccggtcaacgtgaagcggatgtaccgcgtcatgcgtgaccacgacctgttgctggagcggcggcgcaaacagccaggtgtggtgcaacgtcacgacggacgtgtggccgtggacacgagcaatacccgctggtgttcggatggcttcgagttccgctgcgaggatggcgaaaagctgcgcgtgaccttcgccctggactgctgcgatcgcgaggccatcagttgggtggccagcccacatggctacagtggcgacgatgtccgcgatgtgatgctggaggctgtcgagcaacgcttcggtgacgagttgccggtgtcgccagtgcaatggctgagcgataacggctcggcctataccgccgaacagacccgggcctttgcccggcagatcggcctgctacccctgactacaccggtgtgtagcccgcagagcaacgggatggcggagagcttcgtgaagaccatgaagcgcgactacatccgccacatgcccaagcccgatcgagcgacggccctgcgcaacctgaccatcgccttcgagcattacaacgaggaacatccgcacagcgcactgaactaccgctcacctcgggagttcaggcgcttggctgaggcatcaacttaa

SEQ ID NO: 331164 - DNA, 2715 bp, Pseudomonas aeruginosa
gtgaatcccgcctatcggaacaaggacgtgatactcagcaatagcctcatcagcgccggcctcacattctcacctcgtttcactgcttacctgaccgagaatgagctcaccctaaagctaggcgaccagaactactcctggccgctcgtggcgatcgcggagattgagctgcgccccggcattgtttgggcagcagcgcagatcaaaacgctcaacggcgatgacgttaagctcgacgggatcgaaaagatcgagggtgaccgttggcaaagcgcattcagatctctgcagctcaaatgtcttgccaccgcaggaaaggaggccttggcagactatgccaaatggtcgcaaaagattatcagccggctccccaacagctggcatccctcatggatgggggaccatctggccagcaccaatccaactgatgaactcaaatgcgggttatccgttgaagctattgcttcgcacccgttgatagttgaggcccgcaaggcctatcccgatattctaccgacgcctcccatcaggcccgctcaaggtctaaatgctcacctgagcaagcttaatgaggcactcttcgagcagcacaagtcgttaccactgtttgacactctagaagccactccactcaccacggagcaacggcgggcggtgatctgcttcgactctaagctactgctagtagccgctgcaggctctgggaaaaccgccacgatggttgctaaggccgcctatgcaatcgccactggcatcgctaaaccccatgaaattctcatgctggcgtttaacaccgacgcagctgaagaactacagcagcgcctgaataagcgtctggaccaatacccagatgctgaccaaatcgcgtgcaagacttttcacagtttcggcttgtctgtcatcggtgaagcaactggctccaagccacgccccgcgccgtggcttgagtccagccaggacatcgccaaagtagtcgctctgatgcaagcgctggatcagtcagacgcgtccttccacagcacactgatgctggtcagaacagttttcgcccgtcctcttggcggaatgcccggcacggtcgcgtcatcgcagagtgacgacgatgagctggttacctcccggggggagaaggtgaaaagccgcgaagagcagctgattgcggactggctgttcttccactgggtggactaccagtacgaggccccgtatcccttcaatacggccgacgcccagcacagccaatatcaccccgacttctactatccacaaattaagctcttccatgagcacttcgcattggacgcccacggcgttccgccgaaggagttcaagggctatgcccagggcgttacctggaagcgtgcgttacaccagcagcatgaaacggatctgttcgagacaactagccatacgctgcgctccggtgaaggcctgccggcgttgcaacacgctctggagagtcgcggcgtagtcctaaagccagatcctgatcgaatcccaacaggccgtcctccactagagtacgacgctctggcaagggtcattcgtaacctgatccagcacgccaaaggcaaccacctaacgccgagcgagctcagtgagcgagctgcgaaagtcgaccctattcgtggtcccttgatcatccgactgtatgagaaggtgcttgagcgctggcaagctgagctaaaagcaaccggcacagtcgacttcgacgacatgatcaacctcgccattgatcacgccggatcgggccggtaccgctccccatacaagctcgtcatcgccgacgagtatcaggatgcctccgctgcccgagcgcgacttcttcgcgcgattacagtacggccagacacattcctcacagccgtgggtgacgacgcccagagcatcaaccgcttcgccggcgccgacatcagcgttatacgggattttaaggcgttctacggctcaggaacggagctgcggctaacacaaacctttcgctgtccggaggagatctgcaaggtctccagcgactttattcagcaaaacccactacagctcataaaggacgtaaagacgacctcaactgtgagcggaaaggccctccagtgctacgccgcgcagagcgatgatgagctgcgaggactggtggaaagcaccctaaccaggatcgcggcaaaactcaaaaccgtgtgggatctgccgcgtaaacccacgattatgctgcttggccgatatcgcagcgatcagccgtacaacatgcccgagctcaagcgaatctgtggtcccaatatcgagatcaacttcactacggtgcacagcagtaagggcaccgaagcagactacgttctgatgctgaatgtcacccgcggccgcaaaggatttcctagcgagatcgccgacgaccctgtccttcaagcagctatgcccctgcctgaggagttccctttcgctgaggagcgccgcctcttctacgtagctctcactcgggcacgacgtggcgtattcatctatacgcttgagtcgcgccgctctgcatttctggttgaactagagaaaaaggggcaaatcaccataaccggccaggatggggcttcggtgtcatctgaaccatgccccgtttgcggaactggctttcgcaagctcaaatcagggaagtatggagagttctatgggtgctcccgttatccagcctgcagatggacgcagaacctcgctaccccgcctagatga

SEQ ID NO: 331165 - DNA, 999 bp, Pseudomonas aeruginosa
atgcatcggatcggctacctgctcggcgacggctttcaggtgatggccctgggcacacagacggtttttgaattcgccaacgtgagcaaggagcaggtctaccaggtcaccaactactccgtcaggggaggcccggtgcgttcctcgatcggtgcggtggtggagaccgacattgccgccaaggcgaaggtcgagacgtggatggtttccggtgtggtcaacccgctgctgcagaatcctgagcaggcgcagttgagcttcgtacgagagatgcctggccgcgcgcgcaggatcgttggtctatgcaccggctccttcgttcttgcccaggcagggctgttggatggtcggcgtgccaccactcactgggcttatgccgacgcgcttcgggaacaccacccagagatccgcctcgaggtggacagaatcttcatcgaagaccgtggggtctggacatcggcaggccttacggcggcgatggatctggccttgggtatcgtcgagaacgatctcggcactgcgacggccaatgctgtggcgcgcgtgctggtcatgtaccaccgtcgcagcggcggccagtcccagcactcgcagatgttgtcgctcgcccctaaatctgatcgcgtgcaagcatctctggagttcgcacgcgccaatttggcgggagatctgacggtggatgccttgtcggcctccgtgcatctgagcactaggcaattcacccgggtttttctggcggagacaggactcacccctgcaaaggcaatcgaacaactgcgggtggagtctgcacgaagcatgatcgagcgtggtcgacatgcccttgaagtggtagcccgggagaatggcttccgagaccgcaggcatctgcgagaagttttcgtccgagttcttggggtttcgccgctttcgctgcggcgccatgcacgtggcgaacctctagcagacgacgataagcagcctacggtgcaatctgaacgcgcaacggctgtcgcctag

SEQ ID NO: 331166 - DNA, 846 bp, Pseudomonas aeruginosa
atgaccgctacgcccctcgccctagacgctccgacgaaattcatcgagctcaccggacgccgcctggcctatcgaaccatcggcaccggccggccgctgctgctgatggtgcgctatcgcggcaccctggatgactgggatccgctgttcctcgaccatctggccagccgcggcttccaggtaaccatctttgactacagcggtctcggacaatcgaccggtgaaccaagttacaaccccggcgccctggccaaggacgccatcgagctgatccaggcgctggatctcggctcagtggtactcggaggctggtcgctaggcggcattgctgcccagatcgtcgttgcgcaggcaccggcactggtcagccacgccgtgctgctggcgaccactccgccaggccagctggccaagccgggcgagaagctgttctacgagctggcacgccgcgagaacgacttcgaggacttcgtcagcctgttcttcgaacccacctcggcgaaaagccgcagcagcgcggaacaggcctggagccggctggcggcgcgcaccctggagcgcagcccgacagttccgatggaatgggcagcggcgcagttgggcgacgggccgaaggcgtccgtatttccggtgcaggccgtactcgacgcactcaaaggcacctcgatcccgcttctgcacttgggagccgatcacgacatcgtatttcccgtggagaactggtacgcgctcagcggccagctgccgacgctgcaactggtgagcttcccgcgcgccggacacgggccccacatgcaatacccgcaggccaccgcccagcacatcgcggccttcgccggccagtga

SEQ ID NO: 331167 - DNA, 1050 bp, Pseudomonas aeruginosa
atgactgaacaactgacctacaaggccgtggtcgcgaccgcgccgggccagctggaactggtacgccttcctttgcgtgaaccgggcgtcgggcaggttcgcattcgggtcgaggcgtgcggcgtgtgccactccgatagtgcgaccgtagagggcttcgcccctggcgtgacctatccccgggtaccgggccacgaagtggtggggcgtatcgctgcgatcggcgccggagtgtccggcctgcaggtcggacaacgtgtcggcgtgggtttcctggcgggtgaagatggcagttgcccatcgtgccgtcagggcgacccggtgaactgccacagcccggttatttccgggattaccgtggacggcggctatgccgagatgatgatcgccgaagcgcgaggtctggtgcgtgttcccgaacagctggactccgccgaggccgctccgctgctctgcgccggcctcaccacgttcaatgcactgcgcaactccggggctcgggccggcgatgtggtggcgattcagggccttggtggcctgggtcacttgggtgtgcagttcgcgcggcacatggggttccgtacagcagtcatcgcacgtggtgccgaaaaggccgcactggcgaaggaactgggtgctgaccactacatcgatgcgcgaattgaagacgtcgctcaggctttgcaggcattgggaggtgccaaggtggtactgggaacggcacctagcggcgccggcatggcccagaccatccccgggctggccccgcgtggccagctggtggtggttgcggtgcctggcgatgccctgaccatcagcgcgaccgaccttatcttcggttcgcgcgcggtggtcggggctctgacgggcaccgtagctgacaacgaacagacactggcgttcgccgagcagcagaacatccgccccttgatcgaaaccttcgctctcagcgacgcccgccaggcgtacgaccgcatgatggccgccgacgtgcgctttcgcgcggtgctggtgatgaacccatccccggatgcaggagctcgccaatga

SEQ ID NO: 331168 - DNA, 1014 bp, Pseudomonas aeruginosa
atgaaagccatcgtgtacgatcagcccggtctgcctatcgacgatccccgttcgttgtacgaagcggagatggacaaacccgtgccgggcgctcgcgatctgctggtaaaaatccaggccatcgcagtcaacccggtggacagcaagctgcgccagggcatgcccactcccgcacctcgcatcctcggctgggacgccgtcggtatcgtcgaagcggtcggcgacggcgtcaccggattttcgccaggtgacctggtctggtatgccggcgacattacccgtccgggttgctacgccgaatacggcctggtggatgagcgcatcgcagctcgccggccggcctcgatcagtgccgcggaagcggcatcgctccccttgaccagcatcactgcctgggaactgctgttcgatcggctgaaggttgccgaaggcgcaggccaaggccagtcgctgctgatcatcggcgcggccggcggtgtgggttcaatcctggtgcagctggctcgtcagttgacccaactcaccatcatcggcacggcctcacgcccgcagactcaaaagtgggtcagcgaactcggcgcgcaccacgtcatcgatcacagccaaccattgcagacgcaactggctgcgctggaacttccccaggtcgatcacgtcatcagcctcacccacaccgaacattactacccacagcttatcgatgttctcaaaccgcaggggcaactagcgctgatcgacgaccccacctcgctcgatgcgatgccgctcaagcgcaagtccatctcgctgcattgggagttcatgttcacccgctccatgtaccgcactgccgatcagaaccaacaacgggccctattggcccgagttgccgcgcttatcgacagcggtgtgctgcgcagcacggtgggtgagcacttgggcgcgctgagtgcagacaacctgcgacgtgcccacgcgctgatcgaaagcgggaaggcccagggcaagatcgttctggaacagtccccaagctaa

SEQ ID NO: 331169 - DNA, 522 bp, Pseudomonas aeruginosa
atgtcccgtctcgcagcactctccctcgaccagtctcccgctgcctcccgtactgcactgcaaggtgtggaaaagagcctgggctttgttcccaacgccttcgctacactggctcactccccggccgcactgggtggctacatcgccctgtcccaggccctgaacaaaaatggtctgaccccagcggaaagggaggccgccgctctcgccacttcagaagtgaatggctgcgactattgccgagcggcccacagcttcttcggcggcaaggccggactttcgccggacgagatcctcgccgcgcgtaccggcacgctcaatggcgtgacagccctggcgcgagcaataactctcagtcgaggacagattagcgacgatcagttgaatgcagctcgggaagctggtcttgacgacggcaagattgtcgacgttattgcccaggttgccttgctgacattgaccaattatctcaacaacgttgccgacacggttatcgacttcccgcccacgatcgtctcatga

SEQ ID NO: 331170 - DNA, 450 bp, Pseudomonas aeruginosa
atgcccaatatcctgatcaaggtactcaccggagctttcagcgagccgcaacgtgagcgcctgttgaagcgtgtcagcgaggcggcgatcgtgcatgagcgcataggcaacgatccacggcagcgcagcctctgctgggtgctcatcgaggaagttcgggctgccgattggctatgcggtggcgcaaatgtgcatgctcaggccattccctacatcgtcatggtcaaggtgcctgccggcgtcctcgatgagcagatgcgcaaggactacgtgctgggtctgcaccaggtcatcgaagaaagcgccgagccggatgtcggacgcatgctaatgacttcgatacagctaacggacattcccgatggcacctggggtgcaaacggaagtctttggcgcctggccgatttcacccgagctgccgggtacgggcatcttctccctggtgcctag

SEQ ID NO: 331171 - DNA, 960 bp, Pseudomonas aeruginosa
atgtatgatttcaccattctggtcataccgggagcattcgcctcgagcgtggcctccaccctggacatcctcgccagcgccgcgaccgtcgccgagcgacgcggcctggccacgccgcgctggagggtctgcggcccccgatccgggccggtgacgctggggcatggcctgcaactgcacgccgaacggctggaaaacagcgccgaggacaactcctgctgggtcataccgggtattggcgtgagtgagatcggcgcgatccagcgccgcctcgaagaaccctgggcggcgcccctgctctccgcactgcgcgcgcgcatcgccagcggcaaggagattgccgcgtcatgctcagccgttttcctgctgcaggcggccgggctgctggatggtcgacgggtcacaacctcctggtggctggcaccgcatctgcaggcactcgcacccgactgtcgcgtggaccctgacttcatggtgctggccgatcctccactgaccaccgcgggtgccgcctttgctcaaaccgacctcatgctgcatctgctacgccagcgtctttcgcctgaaatcgccgacgcggtgagcaaggctctgctgctcgaccgccgtcaactgcagtcgcctttcgtcatccccgccgtgctggtgcaaggcaatgcgctggtctcgcgtctgaccgcgcagatcgaggaatcgctgcccgacgtagcgagcgtcaaggcgctggccgacagcctaggcatgtccgagcgcaccttgtcgcgccacgtccacaaggcgacgggacactccactcggcagctcatccaaagggtgcgactgaacaaggcgagagcgcttctcgagtccggccaatactcagtcgaagcggttgccgctcaggtcggctatcaggatcccactgctctccggcgcttgatacgacgtctgctgaacacgactccgcgccaattgcgctag

SEQ ID NO: 331172 - DNA, 399 bp, Pseudomonas aeruginosa
atgacgagccacacaacgttcctttccgatgttctgagacgaggtgagataactagccagatcaagcgttatgttgaggcgatcaaggctagtgaagagcctgcctacaacctctcccatgattacgacggcgagcctctctatcgcccaacatcgctagtgatttccgtcgatcagctaaatcagatgcacgacctcatcatggatctcgaggatgaaccggaagacgaggcgcttcgagcttttctgcatgcctgccggtgcgtgggacttgagttcagcccactggtgggcatggtctgcctgaatgaaagtgaggatggctacctaccgccggaggaggcgctgaactggctcgtgaaaaatgtgcgggcgcatttcccagcagtgcaagagtga

SEQ ID NO: 331173 - DNA, 669 bp, Pseudomonas aeruginosa
atgcttcgccataccagtaacaccaacctccatctgtaccacgccagaaccttccagggccttcctgtaatggcagagaaaggccctttcattgagcagtacctctctcgtttgcacagcaccattgagcgttccctgaggcagtactccagagtgtttgcctttcgagtggatctccgtttaccactgtccttcgagctacctgagtacgcctacaccaacgaggtcattagtaggttcctagagtccttcaaggccaagatcgagcatgaccgacagagggctaacgctcgtaatcgttacgcacatgacagtagggtcagatatgtctggactagagaggagagcaggggagagcgaccgcactaccacctgctgatcctcctcaatggagatgcctactacagcctcggtcgcatacggtcagacgcgaacaacatgatcaatcgtctgcatgaagcatggggatcagctctggggctctctgtagatttgctggatggcttggtggagattcccgacaacgcggtgtatcgaatcagtcgcgacatccgcacagagcaggaggacaaactccctgatctattccggcgagcgagctatctctgcaaggcagctacgaaaagctatggggatggtcagcacggtttcggatgcagtcgtggatag

SEQ ID NO: 331174 - DNA, 1815 bp, Pseudomonas aeruginosa
atgtggggttcaaaattaaaatttgagaattatcaattttcggtaagttttcttcgaatcagcacaaaatccacaaccagctttcaacgtaaccctgctattttcgctagccctagcagaaatagcagaagaatcatggacaaacttatcagcaccacccttaaatccaccgatcccgaagagccgagaaagcaggacgagtggccatgctatcgagagcagagcctctttgaggctgcagtagaggagtcatcccgccagttggaggtgtctcgagagatggccatgatgtgcgcactcggagccatggcagcgacttgccaacgctatgtagatgtggaattgccctcaggaagtaaagccccagcttccctgatgctcttaacaatcgccgaatcaggagagcgcaagaccaccacacagaattatttttttggatcaatagacaagataaatgaagaagctattgaggctaattccaaggatctcctagaacatcgtataaagcataagctctggagcacggagcagcgtcacctagagcggatgtatggtaggtatgcaagtgcgggtgacgatgaggcggctgatacggcgactaaggaaattgaagagcacttacgacttgagccagtccctctcccttcaggaaagttcctgtatgaggatacgacgccccaagctctggttcagtttctctacgaaaacgcagagaatggctgcctgctgaccagcgaagctaacagtatcttcaatggaaaggccatgagtgagctcgacaagctaaatactctttgggacggaggcactctaatcgtagatcgtctatccagagcccctattacgctaaaaggcgctcggcttaccatggcgctaatggcgcagccaagtgtaatttccaatttcatggggcggcgtggggaagaggcgcgcggtactggttttctcgcacgcttcctcgtagcaaagccaaaacccaaggccggtgagcgcactaacagtatgggatctgctgcccgaccacggaagaaagctttcgataaccgaatccgtgaaatttttgaaactccacttccagccatccgacaaacgcttacattttctgaacctgcaaagactctgtggtttgaaatcaacaaatacatagaagaacagatgcaagaaagcggcctattctactacatgaaagatcacgcttcaaaattactggaaaataccagtcgcgtagctgctgttctgcacgcgtttgaaagaagctcaactgatgaagtcgaaatcgatctgttcaccttgaagttcagctggagatttgcccaggcctgctcggggcattttgccaaaaacctggctaatgaaccgcagatcatcacagacacctgcgagcttgcaaattacctgttgcgaatatctcatgatgacccgcgcaataatcgaatctttgacgaaggcgcgccaggtgcggatctgagaatgaatagatcaaacctacccccccatctgagagacgggttcaagaccacagttaccctcactcaaattaaacagctcggcccctacagacttcgaggcagagccaatgcagaccgattacaagctgcgattgagctattaggaaaactcggacacctaataaacgacagaggccgatacaatttcaaagaatcaattattacggaagaggaacccatactccgaaatggcgagatcgtcacaatcacggcactgccactatataaaaaccaagaatttgtacgtgatgaacgcgtgagcggacgaccaagatccgggcgttactgtatttttaaaaacaaataa

SEQ ID NO: 331175 - DNA, 831 bp, Pseudomonas aeruginosa
atgtcgactaaatcgcggatcaaacgcgcatactgcgtccagctggacgaagtggtttccattactcaatcccggcaagcattcttctcgctcccagagcctcgccgtagcttcgagtttctgtgctcgaataaatcgtgtcttgaccagccgataaaagccgagatcactgccgtcaactacgacaagcatccaaatgacacctaccgagcagcccactttcgggagaacgacaggtatagccacgcgccgggttgtgagtgggtgatcgatgaagacgtcgatgaggtgaatggcaagctacctggtgaaacagacgaggaggccttcgtccgtcgcgccagacgtaagcttcatgactacatcgatgtctttgaccccaatcctgagcgagacactgatgcgggtacacctggaagcactgccggtggtggcgaggaagatactagcgggacgcgtggcaaaggatcacgccaaggcggaaaggcgtcagggaaccacagtactactgaccttgagcgactggtcgagtgctatatccaagcgcgactgaagctctcagacgaagagttcaaagcgatgaggctgaaggtggtcggccagagcgagatgcccctgcgcaaggccgcgtggcaattgcgtcgtaagctcgtcgcagttgctggcgcgttgaggggggaccaaagcctacggtcgaggttgggttaccatggcgagaatctggagagagatctgcgtggttggatcgtcgatacctccatcgagctagatgggcagtcaatcgatggatatagagtcgtttctcgtgaggcccttgaggtcatcttgtga

SEQ ID NO: 331176 - DNA, 732 bp, Pseudomonas aeruginosa
atggccaagctcgtccagctatcgaatacctcctgggaacaaccatttcgcgaccgcaagaaggagcacgtgctgtggggctctcatcctgcggttcgcgagcactgtgacctcgtagaccgcacccgtcggcttctccaaatttcgttcgatccgcgcttcgacctagatgtagtcgattacttccacatcacgagcggacgagagatccagttccctaaggtactggtcgaaatgatccgccccatcgtgctggaaaacccggaatctagcttcatcgttaccgtgcttgatgcagagaagtacaaggaaggccaagagagcaagcaagacaccgccgccttagttaccgctcgcgccacgaccgtaatggcacgtgtcggtcagcagcggtttagaaagcaactgatggcgttctggggggatgcatgcgcactctctggagtgaatgaccccaggcttctagtcgcatcgcatatcgtgccctggagccgatcagacgcagacgcgaagcttgatccgtttaatgggctgttgcttgctccgcattatgatcggctcttcgaccaaggcctgatctcgttcagcaatgagggctcgattctcctgtcacgggctgccgagaagctgccacccgagttcggattgtcgtcgaccatgacgttgcgcaaggtcgatccgaaacacctgccctaccttgctacccaccgccagacatttgggtacgcataa

SEQ ID NO: 331177 - DNA, 774 bp, Pseudomonas aeruginosa
atggcaaaccattcgatcaaggggaaaaccgtactcatcgccggtggtgctaagaacctcggtgggctgatcgcccgcgacctcgccggacaaggcgccggagcagtggcggtgcattacaacagcgcgtccagtcgggcagaggccgatgagacagtcatcgcactgcaggcgctgggcgcgaaagccgtggcattgcaggccgacctgacccgcgccggcgcggtggaaaagctcttcgccgacgccatcgccgcggtgggccgccctgacatcgccatcaataccgtcggcaaggtgctgaagaagcccatggccgagatcagcgaagccgagtacgacgagatgatgacagtgaacgccaagtcggcgttcttcttcatcaaggaagccggccggcatctcaacgacaacggcaagatctgcaccatcgtcacttcacttctgggtgcgttcacgccgttctacgcggcctatgccggcggcaaggcgccggtggagcactttacccgcgcggcggcgaaggagctgggagagcgcggtatctctgtgaacgccgtggggccgggtccgatggatacgccgttcttctacccagccgagggccaggacgcagtgaactaccacaagaccgcagccgccctgtcgcccttctctcgcaccggcctgaccgacatcgaggacgtggtgcccttcatccgccacctggtcagcgacggctggtggatcaccgggcagacaatcctgatcaatggcggctataccaccaagtaa

SEQ ID NO: 331178 - DNA, 1203 bp, Pseudomonas aeruginosa
atgaccgccagccccgacgcgcaccacccgctgctccgccaccgtgacggccatcatgcacgagtgaccttcgaggaactgctgttcgacctggtgtacgtgttcgctgtgacccagctcagccacaccctgctgcaccacctgagctttatcgggatggtgcagacgctaattctctggttcgcggtctggctaggctggcagtacacttgctgggtcaccaactggttcaatccggaaacgccggcagtgcgcgggctgatcttcgccatcatgctgccggcgctgctgatttccacaagtctgccccatgcctttggtgagttcggcctgatctttgccctcgcctacgtggcgatgcaggtggggcgtactgccttcatcctattgcaactaccagccagccacccgctgacgcccaacttcaggcgaatgctcggctgggtatccatcgccgcgctgttctggatcggcggcgcattcgccgacggcccctggcgcatcgccttgtgggcgggggccgtgatctgcgagtacgtatcgcccatgctgggcttcgccctgcccggccttggccgctccgaaaccagcgagtggaccatcgaaggcggccacctagccgaacgttgccagttgttcgtcatcgtcgcgctgggcgaaaccctgctggccagcggcgcggcgctgtccgaagcggagcactgggaagtccccgtgctgttaggcctgctggcgaccttcctcggcaccctggcgatgtggtggttgtacttcggcacagccagcaaggacgccacccaccgcatcacccaatccagcgatccggggcgcattggcgcctggttccactacatccacgccctgctggtggccggcatcatcgccaccgccgtgggcaatgacctggtgatggccaaccccgacgggcgcttgtccaccatctacgccgtcacccaggttgccgggccgttgctctatctgctgggcaatgtgctgtacaagtgggtggtctaccgggtggtgccgaagtcgcacctggcgggcatgctcatcctgctgatgctggtgccgatggccttcgccacagacctgctgatgacgggtacgctgactaccctggtgctgctgatcgtcggcctgatcgagacgcgcgtcacccgccagttgcgcgctcgccacgccaccacacaactgccgcactga

SEQ ID NO: 331179 - DNA, 906 bp, Pseudomonas aeruginosa
atgaatcgcatcgagcagtaccgcatcttcgtccaggtcgctgagctgggcagtttcatccagacttcccgtgcgctcaaactgccccgcgcgacagtatcagccgccgtccagcaactggagtcaggcgtcggcacgcgcctgctgcaccgcaccacacgtaaggtaagtttgaccgccgacggcctgctgatgctggagcgagcccgccagctgctgctggagtatgacgaagtggaccagctgttccagacgcatccgcagcaggttagcggacgcctggacgtagacgttccctgtcgcatcgcccggcgcctgctgatccccgcgctgcccgaattcctccgccagtacccacgcctgcagctgggtctgggctccaccgaccggctcatcgacccggtcggcgaaggcgtcgactgcgtgatccgcttcggccgcctgagcaacagcagcctggtggtgaagccgatcggccaggtgctgctgatcaattgtgccagccccgcctatctcgccgaatacggactaccgcagcacccggacgacctgaacaacggccacctgtgtattggctataccgccactagcggcggccaggccctgccctgggaatacaccctcgacggcagcgaacagacctgccaattgccctgcagagtcatcgtcaacaacgtcgaaagctacatcgccagttgctgcgcgggactcgggctgatccaggtcccgctgttcgacgtgcagcatttactggacgcaggcgtcctggttgagaccctaccgaaccatcgccccgccccgatgccggtatcgatgctctaccccaaccgccgccatcgctcccgtcgactgctggtgtttctggattggttcatggcacagatcgaacctttcctagcgcagtaa

SEQ ID NO: 331180 - DNA, 1860 bp, Pseudomonas aeruginosa
atggttcgggttgaaatcgacgcgatgtgcgatctcagtcgctggaaagaactgacggaccgcttccaggacacaatcgagacgctatctgacgagtctctactgagatttgggcatgcgagtgcagcgcaagccaaacccgaattactgcagcttgcaagagacgaagccgcccgaaggacagagactgaagctgctccacgtatcgccaatatgctgcagcatctgcactgggagatgctgttggacgcaggcgattcagccaccgtacgccatgaactggagcaggctggagttaccccgcaatgcacctctgtcatagagttgtactttgcaacccgagcctatagcgaggatgaagcgctacggagtcgctttgtagatcgagtggcagagctagcccccgtctctgatgagccccaggctctagcgatgggatcccgtgcgatgcttcgtgcgcaccgctatgccgatgtgattgtcctgcttgagaaactactgcctgaagacgcgtttacaccactgcacgtcgatttgctgcacagctatgttctcacaggtcattacgctaaggcccgcgacctgctcctgtcgatgtcctcagcatggcgcagctctccggaggcgcgagggcaggcactatccctctacaacaatgtgggggactgggcccggatgagagaagtcctggagcgaagcatttctgatgctcctacagatgctagcgcgtggcttacgctaatccgagtatgtgcatgtgagggcgccatgaacttggacgccttaatggcagacgttcccagcgaactcgttggtccagccaaagacctgctgctgttggccagtatagagatgcgtcatggccagctggaaaaagggctgaaccgagtcgcgcgcaccatgcgtagcacacatggggatgttgaagtcgccgcaacacatgtgcaagcgatgctgttggtatccgagagcatggatatggtctaccactccccaggattggttgctcctggaacgtccgtcgagctatcggatgagctcggaaatcttcatcacataagcatcgactttgacgacgcaccctctcagtctgggccagctgagttcatctcaccgagctcgtcattcgcctctaacctgctggggttgagcgtaggggaaacggtgtccgtcagtaacctggtaggcgttcaggtgtttcaggttaagcagatacgcagccttcacctacgtcttctcgagctatctcataaggtcgttgcggagtctgtagttcccagtaagaacctcgtgtccatgaccattccgcaagatgccagcggagagatggacttctcgttttttcagaggcaactcgatcagcgtacagccgaaatcgctgacctattaaagctttatgaacagcccccccttactcttggtttgattgcgaagcaattagggcgagacattatcgagctggtatgtggctggccctcagatggaccatacctagaggtttccttgggagggggggtagcccacgatgtcccgccctgctcgttagaagagtccagctgggttgttgaccttacaatgctgaccgaactggcgatccttggccttttggatgtgctcggcgagctacctagagtctatgtcagtaccgcaacacgaagggcactggatatgaaaatcgagtcctcaacgtcgtttcgcaggcgcggcacaatgttttcacatgaggggcagcttgggtttcatgaagagacagaagagtcgcatgcaaaagaacaagccttcctcaacagcataagcatagcgatctcgagttactgcactagtgattttttgcggtgtgccatgggtgatgtccagtga

SEQ ID NO: 331181 - DNA, 1347 bp, Pseudomonas aeruginosa
atgttgctgataccgagcagaggcattcagctgccactcgtaagcgtgacagtgccggtcgtgggcttttacttgctcagtccgctgatagttctgataggtcacctggtgacgctgcggcggatcccgatgacattcccaaaactcctcaacaccgagccccatgctaggcatgagcagttgaacgtcagcactgattacctcatggtgatctgcctgctcttcgcgggaccagccacactgttactgatcacctgcagattcgcggcttatcaaagtccagtcgtgtttctcatccaggcggccgcgctggtctacgcctgctatgcgacgttagtgcgttttcatgaagtactgcctgaaaaggtccggacggcacagacaccggttaagtgggcttgctaccttgccggcacggtagtgggctcatggctgctcctctgcgccgatgtgatactgattccggctcagtactcagcaaccgtatggctcaagactcataccgccttgttggataatgaggacgagggaacgatagcgtggataccccacatccatattgatcgtgcagatcggctctggtctggtgtggcaactaccgatgccgacctcgccgagcactcaggaaaagtggacgccaaggagctgttcatgacacgcggagtggcattggacctacgttcaaggaacctccgatttctggatatcagccaacaagtcattcctcgggtctgggcgcatgatgcagacctgtccggcgctaatctgtcattcacgcgattgtacgggtcggtgttcgtggggaccaagctcaacggagctagctttgaccttgccgcgttggacggttccactttcatgcacacgacgataagtaacacgaccttcaggcatgccaggctcaagggcagctattgggacaacgtagtagtcaatgactcagactttctgcaggccgacctatccttggcgtcactctacggcgtgaaattcaatcgagttgtgatggcaggaaccgacctgacagccacctcgctctttgaaaccgaggcggcagaccttgctattggttacgtggagccatacaagatcctaacagcggtggagtcagatgagctgatgaaggagacatcgccggttcttgaggttgcccccgaagccgctcttgctgaaattgccaagcaaatctgccgaccaaacattgattctggatggacatacgcttggagcaatttcctgcaaatcaagagcatggttggggcttccgagcccggagtcatgtctgcccttcagggactgttcaagttggagcggtgcaaggatctgccggatcgtggatttgagtga

SEQ ID NO: 331182 - DNA, 429 bp, Pseudomonas aeruginosa
atgagcagcaattctgcgaaaaggggagagttggcgcgtaaagcgcgatcagttctcggagctagcacagcggaagctgcgcagttggtacatgtatccaaacgcacctgggaactctgggagtccggccagcgcgaaatgccggaagcgtcctgggaactctttgtttacaagatcacccatggcatcactccgactgatgagcgcgagctgcttgtggttgttgacgataaccaagcgccgttggatgtcgtttcgagtgacaccttcctgaacctcacggagcaaggaccgggggaatatgaaatcagctccatggctgtgagtcgcgagactggccgccagtacattcaccgcactcgcttcaagctgaagccttacaacgaacacgtactgaaatttgccgagcgccatcggcagtgggattga

SEQ ID NO: 331183 - DNA, 915 bp, Pseudomonas aeruginosa
atgacaacgaacttcgtcgccatcgacctcagccagttgccgccaccacacgcggtggagcaactggactacgagcagatactcgccgagcgcaaggcctacgccatcagcctctggccggaggatcagcaggcggaaatcgccgcccgcctcgccctggagtccgaaccgctgaccaagctgctcgaggaaaacgcataccgcgaaatgctctggcgccagcgggtcaacgaggcggctctcgccaacatgctggccagcgcccagggcgccgacctcgaccagctcgccgccaactacaacgtcaggcgcttggtcatccagcccggagatccgtcgaaggtgccgcccgtgccggaactgctggagtccgacgacagcctacgcgagcgcgcgcagatggcctgggaaggcctcagcaccgcgggaccccgtaacagctacatcttccacgcccacgccgccgacggtcgcgtcggcgatgcctcggccgtcagcccatcgcctgccgttgtcgtggtgacggtgcaggccgcccagggcaacggcagcgccccggcggacctgctggccatcgtcgacgcctacctcaacgacgccgaccgtcgccccgtcgctgatcgcctgacagtccagtccgcccaagtgctcgagtaccgcgtcgacgcgacgctctacctggccaccatcggcccggagtccgagccgatactcgatgccgcccgggcccgcttgacggcctacgtccatcagcgtcgacgcctgggcatggaagtgtccgaatcggcggtgcatgcggccctccacgtggaaggcgtgcgcaaggtcacgctcagcaactggtcggacatcgccgccacaccagcccaggcgccctactgcaccggaattacgctgacgctgggggatgagtga

SEQ ID NO: 331184 - DNA, 189 bp, Pseudomonas aeruginosa
atgcacgaattattgaagatgctggacaacccgcgcagcttgctgaacttctcgctggcgattctggctgtcctggcggtgttcttcatgttgaagagcggcgcgcaagctgattcgagccccgtcatcgatacccagaaaacaggggccatcattctagtcagtcccgagggagacagggcggtatga

SEQ ID NO: 331185 - DNA, 1320 bp, Pseudomonas aeruginosa
atggctcgcacaacggctccccttaccgacaacgcctgccgcactgcaaagtctcgcgaacgtgagtacaagctttttgacggcgatggcctttacctgctcgtgaagcccaatggtcgcaaaggctggcggctcaggtacgtgaagcccgatggtcgcgagggcctgacctcactcggcaattacccggtggtcgggctggctgacgctcgccacaagcgcttcgagctcaaacagcagctcgccaacggcattgaccccatccaatccaagcagcaggccaaggtgcaagccgtgatcaatggccgtaccttcgaaagcgtcgcgctcgattggtatgccgggatggtgcccaagtgggcgccgggccacgccaagactgtgctcagccggttgaagactcacgtattccctttgctcggtgccagggcaatcgtcgagctcgatacccacgacctcatgcagcctctagaagccgtgacgaaacgcggcaccatcgacgtggcgcttaggatcaagaactacctgcaaagcatcatgcgcgaagccaaacggctgcggctgatcaccgcgaacccggctcacgacctcgacggctcgatcagagcaccacgggttacacatcgacccgcactacccttatcgcggctgccagagctgcaagcacgcatcgacgactacaaaggtcgtccactcacacgccttaccgtgatgctgtcgctgcacgtgttcgtacgctccagtgagctgcgcttcgcccgctggaacgagttcgacctcaatcgcggcatctgggagatccccgacactcgcccggcgctcgacggcgtaccgttttccacaaggggtacgaaaatggccggagacattcacgttgtacccttatcgccgcaggcagtgaccttgcttgagcaaatccacgcgatcaccggcaagttcgaactggtgttcgcgggagatgccaaaccgtggaaacccatgtccgaaaacacggtgaatgccgcgctcaggacgatgggctacgacaccaaggtggatatttgcggccacgggttccgagccatggcgtgcagtgcgctggtcgagtccgggctgtggtcagagacggccatcgaacggcagatgagccacaaggaacgcaacaacgtgcgggccgcttatacccacaaggccgagttcctcgaagagcgccggatgatcatgacctggtggagccggtttctggaggcgaaccgcgaggaccatgtcacgccgcatgagtttgccaagcagacgggcgagaacgtcacgcggcttcgcagtgccaagaggaccgagtaa

SEQ ID NO: 331186 - DNA, 981 bp, Pseudomonas aeruginosa
atggcattggtaggtaggcgggatggccgcaatttcggctatggcaggcaactgagctatgcaggcccgcaggcgttgaaagacatgttcggcggcggccattacggcacggtgaaggcacactgtgatcggtggcaggcattcgtgaagtggtgccgctcagaacacgggccgggtatcaatgatgcgcggcagattgatcggaaggtgttggtggactatgcggcgtatctacgcgacatggttaggcgcggtgagcttgctgtcagcaccgcacaaaaccgcctatccagcgttaacaggaccatggcggcgcttcgcggtgatcagtacgtgaggttgccaagtccgagcaaggcgttgggtatgcagcgcagcggggttcgtcactcggtgccgcagggacaagatcgcgaacaggttgatgagatggtcaatgcgctttgccgaaataatcagcaacgggccgccgcgattgttctgttggcgcgagccaccggtatgcgcttgcgtgaggccatcttggctgacctgccacggttaagccgtgaggctaacgatctaggcaagataaacatccaggatggcaccaaaggtggccgcgccggcgcttcggcgccacgttggatagcagtggacgatcatattcgcgatgctcttggattcgcatcgcaagcgtcaccagctggtagccgcaacctgattgcgccaaacgagagctacctgaatcttctgcaggaaagcatccgctctgcgcgggatatcctgcatgcacacaacctcaagggcttccatgagctacgagcggcgtacgcatgtgagcgctacgagcagatcaccctacatcccgcgccaatcaacagcggccaatgttgccaggtagataggaaccttgatcgtgaggcccggtggcaaatcagctgcgagctggggcacgggcggatcgacgtggtcgccgcctacattggtggccaggcatga

SEQ ID NO: 331187 - DNA, 3012 bp, Pseudomonas aeruginosa
gtgactatcttggaatatctggattctactgaagaaaagctaagaaagtgtcagttagaagcagtgcgcagcttcgttaggtatgccgaagagaataatactgagagaggctttctgatcaacctgccgacaggtgcggggaaaacaggagttatctctcttatatcacatctgtcagatgccttgaaggttcttgtgatatgtcacagaaaggccgtgaaagatcagttatttaaagagatttcgaaaaaattcttccgtaatacaattggtgatcaagagtttgagttaaagaaaacctatagggactctaattttgatcagggtgacggagtttatatcacaagctttcaaaagctgacgatgctgagtgacgaagaattaaagaatgtccaaagcgattttgatctaattattgtagatgaagggcactctgagccctctccagtttggcgtgagataatacgtcagtccgcagctatgaaagtagtggttacggcaactccttatcgtaatgatttgtttgagctgaacgtaagtaccgatcatttttatgtttttacatttaaagaggcgatcgatgatggggttattatggagccccagtatgagcaagttgatagggaggaagatttgcttgcaggcattctaggctacctaggtgcaaatgaagatgtgaaatgtatcgtgaaatgcaagagtctggaagagatattaaaataccatgaactcctgtctcaatcttttatcacggcaagcgtgcacgagcgactagaaatcgacgaggcgcaaaataaatttaagcgagttggtccagctcttaaagttgagggggtgcgggtgataattcaccagcacaagcttgatgaaggagttgacatccctgaggctaagttactgatacttacctatgaactgggtagtggtcgtgagctagttcaggcagtaggtcggattgtacgccggtatggagcaacccaaccgctggtgatcgacctgagccgcggggcaaatgagggcatgtgggatggatatcaaaaatttgatagctatctcgccaatggtggtgcaggcgaatttgttagctcgttaagcacaagttacttgattgaatctttcttagagagctttccaaaatatagttattttgatggtaagttcaaagaaagagttgacctcaatagtgttgatccagaagacgatctcaagatccctcatgtgtcagtctgctttgtacaaaaagaggttgatttctctctgccgctactgatggatcgattgtattgggaattgcatggttctggatcgctagtcaaatcttatgaagaagttcttgatttgcaggtcatgatttatgttgagttcaaaagttcaaagttttttacaaataagcttttctttgagcctaggctgcatgtggttgtggtaaaagaaattgattctggtgtcgctatcttcgatagcggcggtggccgttattataatcaggagcagtataggcttggtaatgcaattcatattgacaagctgactgctttggctgctaaaacagcaattaatcagattaaggaaactcacgctcgcgctattggccgggctttgcgccgtccagagtccgtagcattgaaagggcagaatcttgatggcgggcgcggcagtcaaagtaactcccgttacgcattaactatggtgaaggtcgataatattggcctggacggcaaaagagacagtagtttttacattggcgctaggtccgggcgggttgtcgatcaaaaagaatccaacttcactcttcaagacatttctgaatgggtcgatacgataagccaatgtatcaatgctggagggaatgctgggcgacttatcaagtcctatgctcagccggtcagcgaaaaacccacgtcagcaattttgtcagtgctgctagattttaccgatcttgagggccctgaagctacgaatcacggagtgatttatcctgattttgtttatgttgactatcagcaggggattactttcgacgctcaaggtgatcttatagagctttcgttaagttactcggatgatgatgggttttttgaagttgctctaagtggagcgtcagaaggaagagctgatatcgagtgggtagtggagtatttgaattccggacatagattgaaagtgctgtacgaggacggtgtaacgtatctagcaggagctttttacaagctagccttaccctacgaacgcggaattcctgctgaagaaagctttgcaggcaatgccatttttccgcttgacgcacttatagctccagatctcagagagaaggggcacacgctcaatcataagtatcatcggactactagaactgattttgatactgattcgatattttacttaatcgacttgctgaaggggtatggggaccaaacaactccaatcggaaatcttggtccgttcgcaacatatatacctggctgtgatatagttctttgttgtgatatgggtattgagcctgctgattttattttgtcttcgccggaaaaattgtgcttcgttcatgttaaatgtggtgactcattaaatcctcaatctccagccggtgctattgcagaagttggtagccaggcaataaaaaatattcacatgttagtttcagggcctagaagagtgaagcctggaaatttctctacatggaagcaatcctggcccgctgctggtgctgagtttccgctagatactcgttataggttggtggaaggctctattaatcatcctgcgccacttgatgactcactctctgagagggtctgggatgttatatgtgagcgggtagtatcgatgaaatgtaaaaaggagatttggattgttgctggtaattctttctcagctagtcatttcacgagaagtatgcagagcccgctagcatgttcacccacaagtattcaggcgtatcaactaattgagggctggctgagcactgcagatgagcttgatgtggatctcaagattttcacatccccgtaa

SEQ ID NO: 331188 - DNA, 4317 bp, Pseudomonas aeruginosa
atggatctgccccccgattcccgtaccgccctgcgcgactggctgaccgagcagctcgccgacctgctcggtgaaccgcttgccgacgtgcgcgccctggcggacgacgacgacctgctgggctgcggcctcgactcgatccgcctgatgtacctgcaggaacgcctgcgcgcgcgtggctcgacgctggacttcgcccagttggcgcagcgcccctgcctgggggcctggctcgacctgctggcctgcgcggaccggctgtccgccccggcaacggtcgcgctgccgacggcgcaggatcgcgaccagccgttcgagctgtcttccgtgcagcaggcctactggctgggacgtggcgccggcgaggtgctgggcaacgtcagctgccatgccttcctggaattccgcacgcgggatgtcgacccgcagcgcctggccgcggcggcggagtgcgtgcgtcaacgccacccgatgttgcgggcgcgcttcctcgacggtcgccagcagatccttccgacgccgccgctgtcctgcttcgacctgcaggactggcgcaccttacaggtggacgaggccgagcgcgactggcaggcgctgcgcgactggcgcgcccatgaatgcctggcggtggagcgcggccaggtgttcctgctcgggctggtgcgcatgccgggcggcgaggatcgcctctggctgagtctcgacctgcttgccgccgatgtcgaaagcctgcgcctgctgctggccgaactgggcgttgcctacctggcgccggagcgcctggcggagccgccggcgctgcatttcgccgactacctggcacaccgtgcggcgcaacgcgccgaggccgcggcgcgggcccgcgactactggctggaacgcctgccgcgcttgccggacgcgccggccctgccgttggcctgcgcgccggaaagcatccgccagccgcgcacccggcgcctggcattccagctttccgccggcgagagccggcgcctggagcgtcttgccgcgcagcatggcgtgaccttgtccagcgtgttcggctgcgccttcgcgctggtcctggcgcgctggagcgaaagcgcggaatttctcctcaacgtgccgttgttcgatcggcatgccgacgacccgcgtatcggcgaggtgatcgccgacttcaccaccctgttgctgctggagtgccggatgcaggccggggtgtccttcgccgaggcggtgaagagcttccagcgcaacctccacggagccatcgaccacgccgcattccccgccctggaggtgctccgcgaggcgcgccggcagggccagccacgctcggcgccggtggtgttcgccagcaacctgggcgaggagggcttcgtcccggcggccttccgcgacgctttcggcgatctccacgacatgctctcgcagaccccgcaggtctggctcgaccaccagctctaccgggtgggcgacggtatcctgctggcctgggacagcgtcgtcggcctgttccccgaaggcctgccggaaaccatgttcgaagcctacgtggggctgctccagcgtctctgcgacagcgcctgggagcagcccgccgatctgccgttgccctgggcgcagcaggcgcgccgggccctgctcaacggccagccggcatgcgccacggcgcgcaccctgcatcgcgacttcttccttcgcgccgccgaggcgccggatgccgacgcgctgctctatcgcgaccaacgtgtcacccgcggcgaactggccgagcgtgcgctgcgcatcgccggcggcctgcgcgaagctggggtgcgccctggcgacgcggtcgaggtcagcctgccgcgcggaccgcagcaggtcgcggcggtattcggcgtgctcgccgcaggcgcctgctacgtgccgctggacatcgaccagccgcccgcacggcgacgcctgatcgaagaggccgccggggtatgcctggcgatcaccgaggaggacgatccgcaggccttgccgccgcgcctggatgtccagcgcctgctgcgcggcccggcgctggccgcccccgtgccgctggcgccgcaggcgagtgcctatgtgatctacacctcgggctccaccggggtgcccaagggcgtcgaggtcagccacgcggcggcgatcaataccatcgacgcgctgctcgacctgctgcgggtgaacgcatcggatcgcttgctggcggtctccgcgctggacttcgatctgtcggtcttcgacctgttcggcggcctcggcgccggtgccagcctggtcctgccggcccaggaacaggcgcgcgatgccgctgcctgggcggaggctatccagcggcatgcggtgagcctgtggaactcggcgccggccttgctggagatggccctcagcctgccggcgagccaggccgactatcgcagtctgcgggcggtgctgctgtccggcgactgggtggccctggacctgcccggccgcctgcgcccacgttgtgccgaaggctgccgcctgcatgtgctgggtggcgctaccgaagcgggcatctggtcgaacctgcagagcgtcgatacggtgccgccgcactggcgttcgattccctacggccggccattgccgggacaggcctaccgggtggtcgacacccacgggcgcgacgtgccggacctggtggtcggcgagctgtggatcggcggcgccagcctggcccgcagctatcgcaacgatcccgaactcagcgcccggcgcttcgtccacgatgcccagggccgctggtatcgcaccggcgatcgcggtcgctactggggcgacggtaccctggaattcctcggtcgggtcgaccagcaggtgaaagtgcgcggccagcgcatcgagttgggcgaggtggaggccgcgctgtgcgcccaggctggcgtggagagcgcctgcgcggcggtgctcggcggtggcgtggcgagcctcggcgcggtgctggtaccgcgcctggcgccacgggccgaaggctccatggaactaccggccgcacagcccttcgccggcctggcagaggccgaggcggtactcacccgggaaatcctcggcgcgctgctggaggcgccgctggagctagacgacggtttgcgccggcgctggctggactggctagcggactccgccgccagcgcgctgccgtcgctcgacgaggcgttgcgccggctcggctggcaggccgcggggctgaccgcgatgggcaacgctctgcgcggcctgctcgccggcgaacaggcgccggccgcgctgctcctcgatccctggctggcgccgcaggcggtggccgcgcgcctgccggacggccgcgaggccctggcgcgcctgctcgaagcgctgccgacgccggctgccggcgaacgcctgcgggtggcggtgctggatacccgcgccgggctctggctcgaccagggcatggcctcgctgttgcgcccggggctggaactgaccctcttcgaacgcagccgcgtcctcctcgacgccgccgccacccgcttgccggaacggatcgtggtgcaggcgctggacgacggcctgctacctgccgagcacctcggtcgctacgaccgggtgatcagcttcgccgcgctgcacgcctacgaggccagccgcgaaggcctggcgctggcggcggcgctgctgcgcccgcagggccgcctgttgctggtggacctgctatgcgagtcgccactggcgctgctcggtgcggccttgctcgacgaccggccgctgcgcctggcggagttgccgagcctgttggccgatctcgccgctgcgggactggcgccgcgttgcctgtggcgcagcgaacggctcgccctggtcgaggcgctggcaccgggactcgggctcgacgccgccgcgctccaggccggcctggagcaacgcctgccccaggcgatgcggcccgaacgcctgtggtgcctgccaagcctgccgttgaacggcaatggcaaggtcgatcgtcgccgcctggccgagagcatgacccgcgcactcggcgagtgtcgtcacgagccctcggcggaggagccgctggaagcccatgagcaagcgctggccgagtgctgggaggcggttctcaaacgcccggtgcgtcgtcgcgaggcgagcttcttcagcctcggcggcgacagcctgctggcgacccgcctgctggccggcatacgtgagcgtttcggcgtacgcctgggcatggccgacttctatcgccagccgaccctggccggtcttgcccgccacttgcaggcgcagaccgtcgaaatcgaggaaacccaactggaagagggcgtgctatga

SEQ ID NO: 331189 - DNA, 756 bp, Pseudomonas aeruginosa
atgagcgccgcctgggtccggccgttccgcctgacgccgatgccgcgcctgcgcctggcctgcttcccccatgcaggcggaagcgccagcttcttccgtagctggagcgaacgcctgccaccagacatcgacctgcttgccctgcagtacccgggtcgcgaggaccgcttcaacgaggcgccggccacccgcctggaggacctcgccgacggcgccgccctcgccctgcgcgatttcgccgacgcgcccctggcgctgttcggccacagtctcggcgcggcgctggcctacgaaaccgccctgcgcctggaaagcgccggcgcgccgctgcgccacctgttcgtctccgcccatccggcaccgcaccggcaacgcggcggcgcgttgcaccgcggcgacgaggcggcgctgctggaggacgtccgccgccagggtggcgccagcgagctactcgaggacgccgacctgcgcgcgctgttcctgccgatcctgcgcgccgactaccaggcgatcgagacctaccgacgggcgcagcccatcgccctggcctgcgccctcgacgtcctcctcggcgagcacgacgaggaagtcagcgccgccgaggcgcaggcctggagcgacgccagccggactcccgccaggctgcggcgctttcctggcggccacttctacctgagcgaggggcgcgacgcggtgatcgagcacctgctgcgccgcctcgcacatcccgacgccctttcccgagaggttgcatga

SEQ ID NO: 331190 - DNA, 900 bp, Pseudomonas aeruginosa
gtgcgcaagggcctgcttggcgaggtaccgcagaccctgtggctgatggactacccgctgttcgagcgaacctactacgggctggtggtgaacttcgatgtcttcggcaacgtctcgcaccaggcgcagacgcggctgtacttcgacctgatccgcaacggcgccgagcagaacttcctccgcctgatgccggtcgacgcgcgccagccgttgctcgacgactggtaccagaacagcggcaagctgaagatgtggatggactaccaggccttcgacgacgacacgccgagcgcgctgggattgccggagaagcagccgaagaaggccttcgccgaagaactgctgcgtcgctacggcgacctcaatgcgcgtcccgacccgatcaaccgctgcctggacggcaactgctatcgaccgggcatcgaccgcgaactgcaggacgccgagcaggccttcagtcgcctggtgagccggccggcggccggcctcaaggtcatcgagcgcttccccgaggcgaccatgctgcggatacgtacgtccagcggcaagcgcgaggtctataccgtgctgcgcaaccgcgcgcacagcaatgtcgccttcatgctcggcgagtcgctgcgctaccagccgggcctggacaccctgacgatctacccgggcgtgctgtccagctacccgaacttcatgttcgatctgccggcgacggatgccgaggccttcgtcggcgccctggaggcggcgaagagcggcgaggacttcgacaaggtggtcgaacgctggggcgtgcgccgcagcaatccgcagttctggagctacttccacgatctcgaggcgtacatccgcgaaaccgagccggtcgaggcgggcgcactggacatgaaccgctacgagaacctctga

SEQ ID NO: 331191 - DNA, 915 bp, Pseudomonas aeruginosa
ttgactcagcgtctgttcgtcaccgggctctccggtttcgtaggcaagcatcttcaagcttatctggcagcggcccacacgccgtgggcgctccttcccgtaccgcatcgttacgacctgctggagccggattcgctgggcgacctctggccggagctgccggatgcggtcatccacctggccgggcaaacctacgtgccggaggccttccgcgatcctgcgcggaccctgcagatcaacctccttggcaccctgaacctgctccaggcgcttaaggcgcggggcttctccggtaccttcctgtacatcagctccggcgacgtctacggccaggtggccgaggcggcgttgccgatccacgaggaactcatcccccacccgcgcaatccctatgcggtcagcaagctggcggccgagtcactgtgcctgcagtggggtatcaccgaaggctggcgggtgctggtggcgcgaccgttcaaccatatcgggccggggcagaaggacagcttcgtgattgccagcgccgcgcggcagatcgcccggatgaagcagggcttgcaggccaatcggctggaagtgggggacatcgacgtcagccgtgatttcctcgatgtccaggacgtgctgtcagcctatctgcgcctgctctcccacggcgaggcgggcgccgtctataacgtctgttccgggcaggagcagaagattcgcgagctgatcgaactgctggcggacatcgcccaggtcgagctggaaatcgttcaggaccctgccaggatgcgccgggcggaacagcggcgggttcgcggcagccatgcgcgactgcacgacaccacgggctggaagcctgaaataaccataaaacagtccctgcgggcgatcctgtccgactgggagtcacgggtacgagaagaatga

SEQ ID NO: 331192 - DNA, 1362 bp, Pseudomonas aeruginosa
atgctgattcccgtggtgctttccggcggcgccggtacccgcctttggccggtgtcgcgtgaaggacagccgaagccgttcatgcgcctgcccgatggccagaccctgctgggcaagacctaccgacgtgccgccgggctcctggccgggcatggcgaaatcgtcacggtgaccaaccgcgagcattacttccagagcaaggaccagttccaggcggcccgcctggggcggcatcggggacatttcatcctcgaaccgaccggacgcaacaccgctccggcgattgccgtcgccgccctggcgctgcaagccgaacatggcgacgcggcggtactggtggtgatgccggcggatcacctgatccgcaacgaggaggccttccgcgaggcggtggggcatgccgcgcgtctagccgtcgccgggcacctggttaccttcggcgtggtgccggacgcagcggaaaccggtttcggctatatcgagctgggcgaccggctggacgagcagggggcggccaaggtgcgccgcttcgtcgagaaacccgatgaggaaaccgcccgtcgctacgtggaaagtggcggtttcctgtggaactccgggatgttctgtttcacggcctcgaccctggtcgacgagctggcgcagcatgccccggccctgctggagcaggccagggcctgcctggccgccagtgcggcggtgaagatggccgatggcatccagcatgagctggcgggcgaagccttcgccgcgctgccggacatttccatcgactatgcgctgatggagcgctccgcgcgggtcgccgtggtgccggcggccttcgactggagcgatatcggttcctggggcgcgatgagcgcgctgctcgacgcggacgcagagggcaatcgcggcagcggcgacaccctgttcgtcgacacccgtaacaccttcgtgcagagcgacgggcgcctggtcgccacggtcggggtcgacgacctggtcgtggtggatacttccgatgcgctgctgatcgcccgcgccgaccgggtccaggaggtgcgcagggtggtgcagcggctgaaggacgagcggcacgaggcctatcggctgcatcggaccgtcaaccgtccctggggcagctataccgtcctcgaggaggggccgcgcttcaagatcaagcgaatcgtggtcaggccgggagagcgcttgtcgctgcagatgcaccatcaccgcagcgagcactggatcgtggtgcaaggcatggccagggtcaccaatggcgatggcgcgcggctggtcaacagcaacgagtcgacctacattcccgcgggccaccggcatcgcctggaaaacccgggggtcatcgacctggtgtag

SEQ ID NO: 331193 - DNA, 771 bp, Pseudomonas aeruginosa
gtgacggtttcggccagggtccccagcctgtcgctgcgcctccgggtgccgcccgcacgcctggccggcgccgagggcggggccaacgccagagaggcgcccacccaggccgccgccgtcattcgccaacccgaggatgaagcccacgtggatacggataccgcgctcgatatcggcaacgataccgagcatctgctacaggacgtgcagggcaccctggccgacctcgccggcatggcccagcaactgagccagcagaagcaggaagcgctcaagcagcaggagtcgctggagtcgctccagacgcaactgcacgagaaggagcggcaattgcaggaaaaggaaaagcagctccggcagtggcacaagcgcctgcaggacgaccgccaggcgctggagcgggaaaccgagcagagcaaccgtctcctcgccgagcgcagcgcggccctgcaacaactcgcggaaagcgtcgaagcccgcgagcgcagcagcgcgcggcgagccgaagtactgcagatcgagcaggaacgcctcgaagagttgcgcagccagcagaacctgcgccaggccgaactggaaaagcgcgaagccagcgtccagcagcgcagcctggaactcggcgagcgcttcaagaagctggaaagcgcccgcgagaagctggcgcagatcgtcaagggtttcaacgagaccgtacagttcaataccgctctgcacgccatcagtcataccgggttgaagcgccaggaagagagcgcagccgaactggaataa

SEQ ID NO: 331194 - DNA, 891 bp, Pseudomonas aeruginosa
gtgttcgtcgatgaacttgacctcggtaggctgggcttcgacggtatcgtcccggcagaaaccggtcgccccgcttaccatcccagcgttctgctgaagctctatatctacggctacctcaatcgcatccaatccagtcgccggcttgagcgtgaggctcagcgcaacgtcgaattgatgtggctgatcggacgtctgacaccggacttcaagaccatcgccaattttcgcaaggacaacggcaaggccatccgcggcgtctgccgacagttcgtggtgctgtgccagcaactcggtttgttcgccgaagcgctggtggccatcgacggcagcaagttcaaggcagtcaacaatcgtgaccgtaacttcaccagtgccaagctgaaacgtcggatggaggagatcgagtccagcatcagccgctacctcactgcgctggacactgcagatcgtcaggagcctgccgttgctcaggtcaaagccgaacgcctccgcgacaagatcgagaccttgaaagccaagatgcaggagctcaaggaaatcgaggttcagctcaacgaaacaccggataaacagctctcgctgaccgatcccgacgcccgttcaatgaagacgcgtggcacgggaatggtcggctacaacgtgcaggcagcagtcgacgcgacgcaccacctgatcgtgacccacgaggtcacgaacgacggcgtcgatcgagaccaactgagctcgatggccaagcaagcgcgagcagccatgggtgtcgaggcactctcagcggtcgccgacagagggtatttcaaaggcgaagaaatcctggcgtgccaggaagctggaatcactgttctcgtacccaagacactgacttcgggggcgacagcggcggcccgatga

SEQ ID NO: 331195 - DNA, 180 bp, Pseudomonas aeruginosa
atgggcctgctgagatttctgggtctgttgtatgtgctgcttagcatcttcgccggcagcgccgccgtagttgcgttggggattcttgcggtgcgcttttggccgctgatgctggtaatcgtaacgactctcgccgtgtttcagatggcgtctaagcgcctgcgcgcgtctcggccttag

SEQ ID NO: 331196 - DNA, 1206 bp, Pseudomonas aeruginosa
ttgatccgggctcgggaatacgatccggttttccagcacgagacaggctacatctgcgcggtggagcagggggaaaacatgggttcagatgaactgctgcgtctgtaccaaacctgggccgatggcggtgtaggcctgatcctcagtggcaacgtcatgatcgatcgccgcgcactgactggtcccggcggtgtggtattggaaaacgaccggcaattggagcggttccgtcagtgggccagttcggggcgtagccgaggggcgcaattctggctgcagatcaaccatcccggccggcagatgctggccagcatgggccagccgaccatggcgccgtcggcggttgcgctggaactcggtgccttgtcgcgaatgttccagatgccgcgggagatgagcgaggcggatatagacgatgtcgtgcatcgcttcactcgtactgcagtgatggcagaacaggccggcttcaccggtgtgcagatccacgccgcgcacggctacctgctcagccaattcctctcgccgctgagcaaccgccgcaaggatcgctggggcggttcccaggagaaccgtgctcgcctgctactggaggtgatccgctcggtgcgcgcgcaggtgtcgccgcagttctgcgtcgcggtgaagctgaactccgccgacttccagcgtggcgggttcgacgttcgcgatgcgcgccaggtactgcagatgctcaacgagctgccagtggacttggtggagttgtccggtggcagctacgaggcgccggccatgcagggcgactcgcgggacggtcggaccctggcgcgcgaggcgtacttcctggagttcgccagggaaatggtgtcttcggcgcgcatgccgctgatggtcaccggcggcatccaccggcgcgaggtggcggagcgggtgcttgctggcggcatggccatggccggcatggcttcggcgctggcgctggcgccgcggttgccgttgagctggcagcgcgtccaggaggtcgaggcgcagctgccgccgatccgctggaagcacaagctgctggcggcccgcgcctacatggccagtatcaagtaccagatgcgtgccatcagcctgggccgttcgccgaaaccctcggtatcgccattgctggcgctggtcctggagcgcctggacgtcgcccgacgcacccgccagtaccgcaagtggatggcgcgcggctag

SEQ ID NO: 331197 - DNA, 951 bp, Pseudomonas aeruginosa
atgatcaagaagacattgctggcggccttggtcgtcgccttgcttgccctgggctggaccttcaccccgcagaagcttccgctgcctgcgcaggccggtgcgctgctgccgcccgtgcccgccaccacggtcgacatttcggtggcggagaccggcaccatggattcgaacgcgctactggcctatcgcggcggcgagatcaagcagctgccgttcggcatggactgcttcgtcatccgccatcccagggggatcatcgtgttcgagggcggtttcggccggaacctggccgagcatatgaagaccgtgccctggctgatgcgcaccttggccaaggtgcatgcgcagacgccgctcgccgaccagctgcaggctgcggggatcacgcccggccagctcctcgggctgttcatcacccataaccactgggaccacatcggcgccgtcgaggacctcaagggcgtaccggtcttcgtcaaccgtaccgagcgggagttcatcgccaacggcggcgaggcgaccgcgctgatgcgcagctttgagccgctgaactaccaggtgtacgacttcgacgggcctgcctacgccggtttcccggccagccacgatgtgttcggtgacggctcggtggtgatagtgccgatcgccggccacacgccgggttcggtggtggccttcgtgcgcaccgcgcagcatgactacgccctgatcggcgaccaggcctggcagcacgagggcgtggacatcccggcggaacgcccctggctgtctcggcgcatggtcgacgaggacccggagacggtacgcgccaacctcggcaagctgcatcagttgcaggcggcaaatccgcgcctggtgatagtgccctcgcacgatcgccgcgtgacctcgaccctgcctaggttccttgctgtttcgacgacgtccgccgaggtatccacgcagccttga

SEQ ID NO: 331198 - DNA, 411 bp, Pseudomonas aeruginosa
atgagaatcggtgaactgtcgcgccgcaccggcctgacgccatcgaagattcgcttctacgaggcccaggggctgatccgccaggtcaggcgtcagggcaacggctatcgggactacccggcacaggcggtgcagttgctggagatcatcaccagcgcccagcagtccggtttttccctcggcgagatccgccacctgctgccgacacccgatttcgccaactggaaccgcgaggagctgctctcgacccttcgccacaaggtggcggagatcgaggcgctgcaacgcaaactgcggcagaaccgggcacggttactgacggtgatccggcacacggagagcaagcctgccgaccggccctgttcggccaatgccgagcaagtgatggacacgttgcggcgatccgcctag

SEQ ID NO: 331199 - DNA, 753 bp, Pseudomonas aeruginosa
atgcagaaaccatccaagatcgtactgatcaccggcgccagttccggtctgggcgccggtatggcacgggagttcgccgctcgtggctacagtctggccctgtgcgcccgacggaccgagcggctgctcgaactggcggacgaactgacgaagacattcggcgtgcgagtcgaggtcgaggcgctggacgtcaacgaccatccagaggtgttccgggtgttccgtcacttcgccgagcgattcggcggtctcgatcgcatcgtcgtcaatgctggcgtgggggagggcaagcgcatcggtaccggccatttcgaggccaacaggcgtaccgccgaaaccaacttcattgccgccctggcgcaatgcgaggctgccgtcgagatatttcgccggcagaatgcgggccatctggtgcttatctcgtccatgagtgccatgcgtggtctgcccaagcacctgacaacctatgccgccagcaaggccgcgctcgctcatttgggcgaggggattcgcgccgagctccttggcacgccgatcaaggtgagcacgctgttccccggttacatccgcacggagctgaatgctggagcgaggtcgctgcctttcgctgtcagcgaggaagtcgattgcaaggcgttggcaaagaccattgagcgggcaccgagcagtgcttgcgtgcctgcctggccgtggacggcgatggcgatcgttatgaaggttctgccgctgtggtgggttgccaggatgaactga

SEQ ID NO: 331200 - DNA, 276 bp, Pseudomonas aeruginosa
atggtgatcacgctactgaaccccaaggcgatcgtgttctacatggcatttttgccgctgttcattgaaccggtgaggcaccagggcttggtgacctttgcgttcatggcggtgactgtggcggtggtgaccttcctctatggcctggcggccgttctgctgacccacaaactgaccgagcgcatgcgggccaatccgcgtgccgccaatttgctggagcgttgggctggagcttgccggctgggatttggcatcaagctggcggcaatgcgctag

SEQ ID NO: 331201 - DNA, 792 bp, Pseudomonas aeruginosa
atgaattcaggtcacggagatgtggatgcgagggtcgcggtgctcgtggattgcgacaacgtatctccagacatcttggagcacgctttgcgcgtagcagcgcagtatggccgcgtcgtattgcgacgtggttatggtaaccaagcgactctcggaagccgatggcaggacgctctcgttcagcaggctttcacgccttgtttgcagtatcagtatgccgcgggcaagaacacgtcagacatcgcgctagccctggatgccatggaggcactctttgatgagcgcgcggacacgttctgcttggttacgagcgactccgacttcgcttacctgtgccgcaaactgagagaaaggggggcggtcgtttgcgttgttggggaattgaaaacgccggctgccttgcgcaatgctagcgaccatttctcccaatggaaccgcccggagcaagcgcaggatgcctcgaatgatgcggttgtcgcagcggcggcaccgaaaaaggcagagcctccaaaatctcccgtgaagcttcggcctaggtttgtcgttgaggctgtgtcgctgatggcgagcaatacgagtgatggcaaggtctcgatgggctcgttaggtagttacctgaagcggacggactcggcgttttccccgaagacgtatgggcactctggcctgctggatatgatcaagacctatgacttgctggtatcaattcaggagccaggtgggcactactctgtgatgcttgcgccgaaggcagagccgcagagtgaggagcacgaggcgacgggaagctag

SEQ ID NO: 331202 - DNA, 267 bp, Pseudomonas aeruginosa
atgaagcgtttcatccagggcgaatgtcgaggtcaaaccacgctactgcccgagagcctggatgactacgtcgcggacaccaacccggttcgagtagtcgatgtgttcgtcgatgaactagaactcggccgtttgggctttggtggtgtggttcccgccgaaactggccgccctgcgtaccaccctgccgtcctgctgaagatctatatctacggctacctcaatcgcatccaatccagtcgtcggcttgagcgcgagccgttctga

SEQ ID NO: 331203 - DNA, 855 bp, Pseudomonas aeruginosa
atgaacctctacctttccggcccacctctgtgggtcggttttcttcgagtactgccggcgctgctgctcagcgccctcctcgccggctgccagtcaccccgcgaagcgctgcagcagttggctgatgagcatgggcggaaactagagatcctgccggggcaaccgttcccgctcgccatactggtaccgcagggcacagcgaaaacagctcgcctgcgcgtttacttggaaggcgatggccatgcctgggccacagcaacacagcccagccgggatccgagtccgcacaatctgctggtggcgcggctggccgtggacgatccgacgccaaatgcctacctggcgcggtcttgccagttcgccaccgcaccggcctgtgaaccctcgctctggaccaataggcggttttcccaggaggtcgtcaccagcctcagccaggccctggaccagttgaagcagcgttacggcaaccgagagttcgagctagtggggtattcgggaggtgcagcgctggcgctgctgctggcagccctgcgggaggatgtggcgcaggtacagaccgttgctggcaacatcagcccacggctttgggcgcaaatgaaagagctttcgcccctcaacggttcgctggatccgttggactatcgggatcaactggcagcaataccgcagcgacatctggtaggcgaggcagatgacgtaatcccagcatcgctagccacaacctacctagtacgactacttccatacgcctgtagccaagttgtagtctcctcggctacagatcatcagcaaggctgggagaccgcttggagaaaatggcggggtgagccgctacattgcaatagtaattga

SEQ ID NO: 331204 - DNA, 318 bp, Pseudomonas aeruginosa
atgaagaagtacatccccctactgcttatggctgtggcgctgtccggctgcggcgcggaaccacccatcaccgtggagctggggcacaacccctattggggatcgcctcagttgcagatcaccgccaagaaagacgccgtcacgatcaacagcgtgaccatcaaccgtggcaactgcaaagccaacgcctatgaagtcctgccctaccaggtgccgttcggtgacgtcctgaaggtcgactcgcgctactgccagaagatcattgaggcgtcgatctccaccagcgagggtgattacgacttcagcttcggcaactag

SEQ ID NO: 331205 - DNA, 402 bp, Pseudomonas aeruginosa
atgggctggctgttctcatcccgtacccgggcagagctgatccgggacctgactcaacctgaagaccaagttcgcgcccacgttcgcgttattgcccacaccctgcagggcaatatgctgtggtcggtcaccgaagtgacagcgaaaactgaaggcgtttacccagacctcgctcccggcgagtccatgcgctacatccgctgtgatctgctgcaacgccgtggcggtgagtgggggtacaaagccatggacgagtccatggcgccgtactactacagctgcccactgcgctatctcgatatggccaaggaactctcgcccgcctggcgcgagaaggttcgtgctcatcacgcacagcgatgtcagttggcgaccgccctggcgggtggtgcagcccgataa

SEQ ID NO: 331206 - DNA, 447 bp, Pseudomonas aeruginosa
atgagccttgatgatttcttcttaagagtcgatgaaaagcttgaaacagccaagaaaaatgaaaccttgctaaaagcatccatagataagaatcttaaaacactcaaagaagctgtgactcgagtcggccccttggcagaaaattacgcagccaggctgcaagagcgcggacttaaagccgacatccaaaagtcagatgaaagcataacactcagcttaacctacagaaatggcagctatcaaactatcactcttggtggatcttcaagagagaacctcatcggaataactgtcaaacacgtcgataacaacggagagattgccatatcactagatgactctcgctcctacgactcagagaactgggaagatggaatttacgaaaaacaattaagaaaattcatcgaagactttatctcctacgcagagagtcatggtggattttaa

SEQ ID NO: 331207 - DNA, 750 bp, Pseudomonas aeruginosa
ttgaaacacccagaaatcaaaagcctctacaaatacagagcatttaatgagttctctctccagatgcttatcactgagaccgcctggtttgcaaagccaagttcattcaatgaccccttcgactgcggaatactcattgatgaagagagaatggaggaaagcatacagactgcaatcacagaggcatatgcaagaaatggagtgagagaagaggagatccctcgacacgagctagagattaagcaagaagacaaagaagctttctatagttatagaaactctgtaaatattacaatacagaacacaggcatatttagcctaagcgaagtaaataacgatgttctaatgtgggctcactacgccgatagccacaagggattttgcattgagtactcgagatctcctgataatattttaggaaaaacagcagagccggtactttaccaggaggaactaccttcactatccgcatccgctgtaacaagccgcaacggaagtggcattaacagcttatggctcacaaagtcctcccactggcgctatgaaagagaatggagaatattaagccacaagggcggaaattcacacgaattcccatgcagaatagcctctataattttgggcttaaacatgaacagagaaaatagatacacaatacgtcgaatcatgaaaaacagaggagttatatttaaagaagcactgagagagaagagcaaattcggcctaataatttctgaagcacaaacataa

SEQ ID NO: 331208 - DNA, 771 bp, Pseudomonas aeruginosa
atgcctcaacttgtacgaaatgctcgcgcctacctactttctctagaggtctccgatgctcagattgactctcaacttacacattggaaggaactacggcaggactccctagagggcatttatcggtcacttctagcccacgccaaaaacaggcggggaatgcctaatacgataggagacatctcacgtctgaagggcatatttttcaacttcgatccacttaaggtaatttcacactacagcagtcatacggacatacttaacgaaataatcaagaagaaaatcccaacttctggcaccatagatatccaaaacaacaaaagccactgggtagtttatgcaaagtccgcattggcatccggaaaatttcttagccgcttccaaaccgctcaagactttcatgacttcgtccaatcattttatgtcaacgaatactcccgcctggcactaccactacttctaaaagaggaaatctttggctttgggttcgcactggcctgtgacttccttaaagaaagtgggcatagcggcttcatcaaacctgacactcatgtcaatgacatctgtcgagcagccaatataacatgctccccaacagattttggtgtattcaaggacgcaattaaatactgcgagaagcacgacctcgtcccgtacgaatttgataagttaatttggcttgtcggcagcggaaatttttacctccataacttaaaggtacctgcaagcaagagcgagttcatatcaaaatggcttcagcgtaaagcttaa

SEQ ID NO: 331209 - DNA, 1956 bp, Pseudomonas aeruginosa
atgaagatcagatccatccacatttacagccatgatggccaacgtcgtgacctcacattcaaggtggacggactcaacgtcatcaccggtcgctcctccactggcaaatctgcgctttcagagatcatcgaatactgcatgggacgatcttcgttcaacgtccccgagggtatcattcgcgacaaggtggcctggttcgccgttatctaccagttcgagaaggagcagttgctggttgccaaaccaaccccttctggcagcggcgcaagttgcagtacggcgatgctgcgcagaggtgtgcaattgcaagcacctgagttcaaggacttggcggtcaacaccgacgacgaaagcatcgtcgaattgttgtcgcgcctgctcggaattcccgagaaccgtaccgaagtcgcgctggagcatagtcgcaacagctacgacgctaacgttaagcacacgttctattacctgttccagaaacaggggttggtcgccaacaaagaccaacttttctaccggcagaacgagcagttccaaccgcaggccatccgtgacacgttaccgatcctgctcggagtctcttccagcgaccgctacgaactggagtccaagttgcgcttggcgcaacgggatctgagggttaaccagaagaaactggaactggcacgcgatgccgtcgacacatcgcatgtgcaggcgatcggcctctactcggaagccaaaacagtcggggtcctcggcactacagatgagattctcaatgcagacgggatcatagaggtattgaggtctgcgttgtcatggaagcccgaaacgatacctgacgacgacagcagccgggtttcgattctggaagagaagctcgttcagttgcgccgtaatcgccgggatgcccaggggaggatcgatgcagctcggcagttcgccaaacgctcaggcggctacgaaaacgaggccgccgaacagatagaccgcctggcgtcgatcaaagccctgccgaagaatccagacagcggcgaatggcaatggccattcagcgaacaaaatctggcactagaatccccggttgccgttgtcctgctcaacgaactggaatcgctcgacaaggagttgcgcgtcgcaaccggccaacgtcctaagcttgatgcctacttgaccgaactggccggtaccgtggacgagataaaggatgagatcaagcagacggaggcggagctgtccgcggcgatctcggctaacgaatttctcgccaagatgggctcgcgcaacaatgccgctgcacgcgtggtcggccgtatcagcctgttcttggaaacgcttctcccaaatgaggatcttgccaatctggaagccgagagtcgccgcctcagcaacaaggtcaagcagcttgaggagcaaatcggggcggatgacagcaacgagcgcctgacatcgatcctcaacaacatctccgcacagatgtcacgatacatccagaagttcgacgccgagttcggtccttatcccgcgcggctatatctacctcaattgacaatcatctttgatcggcccgagcgcccagtgccaatgggcaggaccggcggtggcgaaaaccatctcgcgtaccatctgtcggcgctactcgccctgcatctattcgcggcgcagaacaatcgaccaatcccgcgcttcctactgatcgaccaaccaacacaggtttacttcccctctgagcaggtttaccaagatgccgatggttcagtgcagaagacggaagccgacgccgaccttgatgcggtacgccgtctattcgaactgttgctgaagttcacccaagaagaggttcccggcttccaactaattgttactgagcatgcgaacctgcgcgaacagtggttccaggacgcgttggttgaagaaccatggactaagccacccgcactagttcccgaaaattggccgtcagaaccggtgaattga

SEQ ID NO: 331210 - DNA, 489 bp, Pseudomonas aeruginosa
gtgaagcgatgggatcagcgccctttcgaggttcgaaacctgttcaaccctgcattctgtggcttagtcatgtttcgcgccttggctggctacgaagaagaggacgaccgcggcatgcccttctcgctgtcgcttctcgtgctgcccctaagcctgcacaaggactcgcgagaggtgatcgctagcagcccacgcagctatctgctcaagaccacagagaagaaccagcaaatcatggtgggatttgccgaccgggtcacgcagatgcttccctacgccttcgaggggttcggtctattgatggaaaggggctgcatcgccgtcgcgaatgacggacgcattcagaccatccccaagaaggtgcgcaaggtcgtcgatggaactgccgaaactgtcgcctgccaaaaagtggcgcgcgtcgtaggaaaggaattcgcacgtatcgctgaccgggcgaccgtttacacgactttcgggattcgcccatga

SEQ ID NO: 331211 - DNA, 1224 bp, Pseudomonas aeruginosa
atggccgggacatctaccgacaaattttcggccggtgagcaggggctgggatacatctaccaggcgcgtcttgctcttctacaactgctccaattgccggaagacaccgccatcttcctggaaaaggacgatgatcttgatttcgtcgacggccagggtgggaagtccttggcctcacttaagcacaaagcgatcggggacagactgaccgacttgtcggctgacttctggaagtccgtcaacatctggttagtgcgatataaacgtgacggccgcgttgcatcgaacctgcagttcttcctcttcaccaccggcgaggtgtcgactgactcattcctgtcccgtcttctccccagtcagctcaccacccccgacgatgacgaaactctgaccgaactagcccaaaaggcactttcggcatcgaaatcgaaactcatcacgccgattgccgcggcgttcgaggagctgaatgatgccgagaagcaggatttcctcgaacgtatcctgatcctcgatagcagcccgcgcatcggcgacattcccgtgctcataagggacaagtacatgcgaagcatccggcgtgagtaccgcgagttcgtcttcgagcgactggaaggttggtggaccgatgtcgtgatcaagcatctcaccggtgataggcctgaaggaatttttggctacgaagtatctgacaagctctcgaacttcgccgaggagtacaaggcagataacctgcctatcaccttccgcggaaaactcccttccgaagacatcgacattgatactgatccgcgcctattcgtggcacaactgcgcgagataggcatttccgctaatcgaatcaggaatgcaattttggattattaccgggcgttcgaacaacgatcggcctgggcacgcgagagcctgcttgtgttgggagaggtcgaggaatacgaagatcgcttggccgatgagtgggaccgctacaaggatgtcattttcgagagcctggaagacgacagtgccgaggatgcgcttcgccaagccggcgctgaactttacaactgggcggaatttgaaaccgcaaagatcgactccctgcgcattcgtgcacgggtcacggaaccctacgtccttcgtggaagcttccacattctcgccgacagcactccccaacccagagtctactggcaccccagattcctcgaccgtctcggcgacgtactggaggcggcatcgtga

SEQ ID NO: 331212 - DNA, 1215 bp, Pseudomonas aeruginosa
atgggtaagctaacgaccaagaccatcgaatccttggctaggactgcagaacctggaaaaaccaacgatggcgatgggctctacttccaggtagccaaaggcggctcttcgagctggatctttcgttacaagctggacgggcgaagccgtgaaatgggactcggccccttcccggtcattaccctcagccaagcgcggcaactcgcagcggatcagcgaaaacttctcgcaaccgggatcgatcccctagccgcccgagatgcagaacgagaagcgaagcgagaggctgagcgccaagctgcagcgcgtcgtaccacgttcgaagatcttgcccgcgatcatcaacaggcccatggagccacctggtctgagaaatggcgtaagggctggctgcggaagctggagctatacgcattccccatcatcgggaagctatcggctgacgacatccaaaccgatcacatgctgagcgtcttgcggccgatttggtcgacaaaaacacgcaccgccgatgaagtgcgcggacaaattgagcaagtgctagatgcagcaaaggcccgccgccttcgcggcggtgacaatcccgcccgctggcgcggccatctggaaaacctcctcagcaaagctgaaaagaagaaagctcggcaacgccaacacttcccagccatgcattggcgtgacttgccgaagctgatgagcaagttggctcaagactccagtcgggatgcggtagccgcacgcctgctgatcctaactggggctcgctcccacatgatccgctttgcgcaatggcccgagatggactttgcagctgggacatgggcgcttccggccgaacgcatgaagatgagaaagccattcgtcattcccttaccttctcaggctgcggatatgctgcaaagcctacctcgtacgaattcgccgtatctgttcccagggaaaggcaagagcggtgccatacatgccaatgccatacgcaacctcctgcataagctagggcacgcagacattactcggcatggctttcgctccacattccgcgactgggccaacgagaacactcactacccgcgagaggtatgcgagttcgcgctcgctcatgacgaacgggatcagaccgaagccgcttactctcgctcagactttctagagaaacgcagggcactaatggctgattgggccgaattctgtacaagccacaagctgcaggcataa

SEQ ID NO: 331213 - DNA, 555 bp, Pseudomonas aeruginosa
atgctgctggagctggcggtgggcgcggccgagacagtcctcggcgcaaaggcctgccgatgggtgcggctcctgtccgcgcaggccgaagcgaagcaggccgctgttttccaggcggcggacccgctcccagtcgccagcgctgtacggtgcgggaaccgggcaggccgcgtgcaaggcctgctgcgaggccgggtcgaggcgttccagcttgcgcaggaggaggtcgaggttgcggctgcgacgctggtcgtcgccggtgcgttcgaacaccgccatgagtgccgcgccgctgtaaccctccagcagttccagcaagggtccggcggcagtcgcatcggcctgccagagcgtctcggccaccgcttcgcgccaactgcgcgggtcaccgccgatgaaggcgctcgccggcatttcgtagcgttccagcagcggatagacctgctcggccagttccgcagggttgccgtcgacgctcagggcgatccgcaggcaggctggagcggggccttcgagcaggtgttccaggggcacgcagaggaagtgccgctgtag

SEQ ID NO: 331214 - DNA, 717 bp, Pseudomonas aeruginosa
atgctggcagatgatggagtagttcaggttcaatcagggatgataggtcaaggagttcatctggcatcggcctcgctatatgcattaatagatttcatagcggatgagcttcctaaatggcgtgatcgctctgatagaagaagtgagagcgcggaaacagttctgacatcgcagctgtgcgctcacatgaatagcgcgtctcgaaagtcgagctgggattttcttcagtttcggactgaagagcctgatgagtcggtcgcgggtcgtaagattgacctcgttcctgctccttgtggttgtacggtatggattgatggtcgcaggcatactgattttgatccgctgctgcctattgagtgtaagcgtcttccaattccggctggcatcaagagggataagcttgagtatctttatagtaggtactcaagtactggtggcgttgatcgctttaaggcgggtcgccatggtgcggcgcacatgcttggcgcaatgattggcttcatccaagaaggcgcaatagccccgtgggaaaagaagatggacctctggaccaaagctttggtgcgcgcgaaggttggtggatggcaaaagacggataaaataacccttcatgaccatgactccgtgcgaaagttgggggttttaaaatcctcgcatgttcgtaatgctgggctggcagatattgagttgaggcatctttgggttgagatgaactaa

SEQ ID NO: 331215 - DNA, 1311 bp, Pseudomonas aeruginosa
atgctccagcaatatggcttcatttataatcagaagtctgctggctttcgcgatggttttttagatcgttgggatgtgcgagaattattggatttcatttctgttcgcggcttgtttcagaaaggaggggcggacactaaggttgtcgttgtggtagctgctgctcgacggccggtgccaaatagcaagatattgcatgccgtatttaggcggagcgggcgcgctgacgctgagcagggtttcgatatcgactattatgatttgcattggttgccgcgtgtcttagttcggaataatcccatcgcatggcgttcgaatctgcttggaggtggtcgtgtatatgacttcgtcaagcgattaacaagttatcctacattgcgcgagtttgctgagacgcagaattgggatttcggcgaaggattcatcgagggggcaaatggtatttcgaaccctgctggccatctgattgggtatcccctgctttcccctgatgcattgaccgatgatggggttgatgaagagaaaatcactgaagttccgctgaagcgcattgaggggccgcgctctagagcccgattctcccctccttatctagctattcgaaaacatgcaaacctgcagcacgtggtttggagtggtcggtatctgacctataagagcgagattgtgggttttgctgcgaatgggggggctcccgaggcgttggagcgtgtttcagcttggttgctcagcgagagtaaggcccttcgtgcctatgttgctgctgctagcacgcgcctctttactcgcaaggcgacggcgttgtcgagtgctgacattatggctttgccctacctcgatggaggatccctggatttaagtaagaatgaagccattttggctgaagatatagttgaatatcagtgtgattttattcgattgggtgatgcttccacttcgttgcgagaggtggctgggaaggatgcgttgcttaagtactcggcctgttatgtttcccaggttggtgctgtatataaggaagtcccccttgttgcgcttcagccttaccgttggccaggtgtgatctgttatccattttcgtttggcgaaggggcggtggattgggcggatgcggaagggcttcggggtaagttggattgtttgcttaatgagcagcgcggggcagggttatccataacgaggattgcacgtgtttacgatgggcaatttatttttctattaaagcccgatcgacttcgttattggctgcgttctattgctttgcgtgatgcagatgaaactttggctgagcttcgaatgcagggattttag

SEQ ID NO: 331216 - DNA, 804 bp, Pseudomonas aeruginosa
  misc_feature (769)..(778): n is a, c, g, or t
atgggtgaattttctaagtcgattgattggctcgcagcattggcggaggggagcgatcctggcgttgatgggctcgtgatagtagctggctatgatggtcgtgggaaattgccggaagagattgtgcttatggagaaggcgcgtgcttatggtgcgtatgctgttttctttgaagcaagtcagcataatcgctccccggtcgcgcaggcgttcgtgtttctttcttcggggcctgcggaggacgctgcatttgctcagctccataagcggctttggagttggggtggggtccccttaatttatcgaaagagccccggccttgtgcagttgttccgatgtgctcataagccagactttgcggccccaaatggggtgcctgtgtgtcggccaattaaaatattgaagcttgctgcgaaagtaaaaaaagctgatgcatggtgggattcaacacgtctccgtaacggtacgttatgggacgatcctgcggtctgcaagctgatgttgtcgtcttctaagtctgcccatagaagcttgattgaggcagtcaaacagctgaatagagagctaagtaatcagaaattacttagtccagacttgcgtcggcatctccttattttgtcattactgattgcctatcttgaggagcgtggagtattgctgccaggatatttcgcgcagcagaaagcaggtgctagtcgattttttgaggtgttaggggacggtgtcgctttagtctcaatgcttagagacttggaagggcgattcaatnnnnnnnnnnattcaatggtcatgtgttctcattga

SEQ ID NO: 331217 - DNA, 6366 bp, Pseudomonas aeruginosa
atgcagccattaatcgtttctcagcaggttacccagggcgtcgcagactttctgcgtacggctttcccatcaaccactcaaggtttcgaggggctgctggagcgctttctggcagaacgcagcaatatcttcaaaggcccgtatctgacggttccccttccgtttcgcaagcagcagctgaatggtgctccagcctttccgtggttgcctgcgggctttgtgccccatgcgcatcaggcaaaggcgtttacgcgcctttccggcgaatctgcccaatccaccttggtggccactggtacaggttcgggcaagaccgagtgctttctgtttcccattcttgagcactgtcggcaggcgcgtgccgatgggcggtctggcatcaaagccatcattctgtacccgatgaatgctctggccagcgaccaagcgaatcgtgtggctaaggagattgttaagacggctgcgctctcggggctgcgagctggtttgtatgtgggtgatgcgccagccgttgactccaagactgttcagcagctggatgagaagaacttcacggtcatcaccgaccgcgacgagctacgcgctaatccgccggatatcttgctgaccaactacaagatgctcgacttcctgctgattcgtgcggcggatgcctcgctgtggctgcagcagcagccggatacgttgcgctatctggtggtggatgaactgcacacattcgatggtgctcagggcaccgatctggcctgcctaattcgccgcctgaaagggcgcctcaacgcaccgccgggacagttggtctgtgtgggaacttcggcgacgctaggtgacgatggcgccgatgacttgttggcatttgccggcgatatctttggtgaggtcttggatgcctctgctgtgatcgccgaggaccgcgagtcggtgggtgactacctggctgaagcattggtggaatccaccctgtgtccgcagcctgctgatctggcggtgttggcgccagagcaatatggcgacctgcatgcttacctggctgcgcaagtgctcctttggtttggtcagccatgcagcgctgagcaaatggccgatttagcttggcgttgcgagttgggcgagcgcttgaaatgccatttcgccttccagaatctcttacgagatttggagcgtttagggcccaagtctgttttgcttggggacctgctcaccttgctgcgccggcgccttcctgcttgcgaggatgagcgttttgccctgctgtggctgtccagcttgctatcgctggtggcacatgcgcgaaaggctcgcgcctcggagcctccgacgcctctcaacgagaaggacgtgagctttttccttcaggtcaaagttgaaatctggttgcgcgagctacgtcgtatggtcgccatattggatgcggagccgcagctgcgtcatcacgatgacctgcgaaaggcggatctaacccgtctgcatctgccagtgattcactgtcgcgaatgccacgctacgggatggggcgcaacggtgcagaaaaccagccctaatcaactggggcacgacctccaagggttctacagcgccttcttcgccgaagacgtgtcgacgcgctttatattcccggcgacagaggacgcagatctaaaggtcttcgagcgcaaacaggtgtgcccaagctgcggcacgttgcacccatcgtcgcaaacggagtgttcgcactgcgaggatcagtcgctggtggcggctcacatcgccaacaacctgcgggaggcaactcgcaatggtgcgaagttcgccaaggcgcaccacgattgcccttattgtgcgggctacaagacgttgaccattgttggttcccaggcggccagcctggctgcggtgatggtagggcagctgtttgccacacgcttcaacgctgacaagaagctgatcgccttctctgactcggtgcaggatgccgcgcatcgcgcaggcttcttggctgcacgaacctggcgcttaaatttgcgtccggcgatggctcaggtaatcgctgatgccgctgctcaagggaagcccctgacgttggccgagttgcccgagatgttcgagcaacactggcgcggccaactgggcgatgggcaatacgttgccaacttccttccgcctcagatgcagtggctgcgtgattacgaaacgctgatgtcggaagggcagctaccagttggcagcaatctcttgcaggagctgtccaagttgctgccttggatcatcaaggctgaatttggtcaggatgcatacatcggccgcactctggtggctaccgcaacagcgagcttggtgccctacgccggcggactcgatgaggctgcacaatggatgctgcgtaggctgcgcgcaacgctggaggccatagccgctacaacgccagatgagctgatcgttttcctacgtggcttggtagaggtcatgcagcgagtaggtgcgtggcgtgatgctggtttggatttttatgcacggatgggtagtagcccctgggtgtacaagaagaacccaagtcatttcaagctgctatcaggtcctcggccgcctcgatttgtcagcctgatcgaataccagcgttgtgcagcagttaatggcagtcacgccgctttgttccgctcctgggccttccgtgctcttcctgcattgcatgatttggcacttggggccgatgagctgcttctgcccctttatcgcctagcctttgaggcgctcgaacatgccgggttggcaaggtatgaagctgctgagggtaaggcggatatccgggtatgggggcttgaacctgcaggcttccatctgcaggtaggcggacgtagttggcgctgcgactcttgccgcaccaccctaatgtctggtccggatgaagagctagccggagagccttgtcgacgcaaggagtgcaatggccatttgggcgcagctcaggctaatggtgactactaccgtaagctgtacctgaatgcagatattcggcgggtggtggctcacgagcatacaggcttgttgccccgcgagacccgtgaggcggtagagcgaagcttcaagtccgatgtggaaaggcctggcagcattaatgtgctttcagccacgccgacgctcgaaatgggtatcgacattggcgacctttcgagcgtgctgcagtgctccgttcctcctcagcaggccaactatattcagcgcgccgggcgtgcaggtcgaagtacgggcaacgccttgctcatgagcctggccaccagcaaaccgcatgatttgtacttctgggatgaccccaagtcgatgatcgccggttcggttcaagcgcctggggtcttcctcaatgcatccgcggtgctggagcgtcagctcactgcttttaccttggattgctgggtacatcagagtggacgcagcgctcaaattccctcggaaattagagctgtattcagcgcagtgaccaatcagagcacaacgcggttcccctatccctggttgagctatgtggagcagaaccgagctcatctgcttgagcgcttcctgaaactcttcaatcacggctcacatactcctttgagtgaaggtacccaggcttggctcgatcgcttcattcaaggaggaggagagcagggcagccccttggcctacaaggttgttaatcggctgcagggcattgcgtcagacgtggaaagcatcaagcgcaagcgagatgccacggtaaaggaaatcgagaagctgcaggcgttgcctgtccgtggtgaggagcaggaggaggaactgacgaggctgattcaggatcgcaccgcgctttcgcgtctgatcggaagcatcgaaggcaaggccacgctgaacgtcttgaccgatgaaggattgctgccgaactacgccttccccgagcagggcgtcttgctacgttcaatcatcgttcgagatccgaaacctggctcatcagcacctgattcggagacctttgaatacgagagaccgggctcaacggcaatcactgagttggcaccaaacaacaccttctatgccgaaggccggcgggttgtggtcaaccaggtggatgtatcgaaggctaaacccgagtactggcgattctgtcgtcagtgctcctataccgagccgctgacctcgggggatcagcatccgaactgcccccgctgcggagatgggttatggaaagacagtggccgggtacacgagatgctgcgcttgaccacagtcttcgcccgcaccttggatcgagacagccgcattgcggatgactccgatgagcgtcagcgtggcttctatgtccgacaagccctggttgatagcccgcctgatgcggtgcgccaagccttcgttgttgacgagcaggcattcccctttggcttcgagttcctggaccgagtgacgttcagggaggtgaactttggagagcagtcggagcaaggtgctccgatggaaatcgggggtaaggagctgaatcgccctgggtttagcatctgcagcgaatgcggcacgttgcaacgtaagcgcaaggccgaggagctataccgcaaccatgctacatggtgttccaagcgcaagaatcctgaggcaaacactcagcaatgtgtgttcctctaccgtgagttcagcagcgagggcatcaggcttttcctgcccgaagtaggctttgccgataccaatgaagcgttgctgagctttgtcgctgcattggagctggggttggccaaacgcttcagaggtgcggtggaccaccttcgcattgcgttggatatgcgtatggccgcaggttcggattcgcctcgctgctacctggtgatctatgacagcgtgccgggcggcactggctatctgaaggagctgatgcgtgcgcctgagcctttactcgaagtgttcgacattgcccttcaggctctgaatagctgctcctgcaatcagaatgctgaaaccgatggctgctatcgctgtgtctaccgataccacaacagccatgatcgggagtcgatctctcgcagcaccgctcagaagttgctgggagaggtggtccagtacaagggcgcgctcaagccagttactcatttggcggatgtgcagcccgccaaccatctcatggatagcctgctcgagaagcgcttcattgaggcgctgcgtcgcgagcaagcgggtctcaagttcaagctcagcgaactgctattcaaggggaaggctggttatctgctccaggctggttcacgtcgctggaagattgagctgcaggtcagtctcggccatgacgacggggttgtgattccctgcaaaccggactttgtattctggccggatgacggtacagatgaccttccgattgctgtctttgtggacggctggcagtaccacaaggacatcatcgcgactgatttggccaagcgaatggcagttgccaagagcggtaagttctctgtatggacgcttgtctgggatgacatcgagtccgctttgcagggtaaccctctcactgttctagctccctggccgaccttggtaccggttgagtcggctgccatggtgcagaaactgtgcgatgtgcaagggatctctgccctaggagctttaaccgctgttacgcccttcatgcagctgcgccgtcgcttggcagatacctgttacgccgatttacgcaagtttgccgttgcggctgccgtaggaatgctcatgccgccgggtgagccgttcgttctaaatgagttgaagggaggcgccttctggcagcggctggaagagttggggttacttgctgattgcagcgggcatcgccaaggtggccggcagctgggcggtgtgctgagcatcatgacctccatgcatccggaccagctcaagcagataatgacgggtaacggctccgtcgagtcggaacccattctgatcggtgaatggcggagcagtggtgtacccgaggaagagttgaagcagcgctggcagcagctctggcatgtaatgaatttgctgctgcccttgcgtcaactatggatgggggcggctgatatgcctggtttgccagcgctgcaagatagcccagcactcaaggttgggcaggggggcatgtcccaggcctggcaggccgcgattgaagactctgcacaggaggtgcacgagtggtgcttattattggctcaggcaggtattgccgaaccggaacctggctatgagctgctgaatggaaaggggcttgttgtggctgcgacggagatcgcatggccctcagtccaagtcgcaattttcttgccggactctctggatgcagtggatttgtttgctgcccaggggtggcactgtttcacagctgacggaggcgagctgccccccgagctgaggagtttattgatggagacactggcatga

SEQ ID NO: 331218 - DNA, 4914 bp, Pseudomonas aeruginosa
atgagttttgccatcactggcctgaccaacgccaacgagttctacagccagcactacctggacgagatcctcgaaaaagacctcaagtcgctgttcgaccagtggaaagagcagggcgccgacagccccgtcgcccgtctgcgcacagcctccggtgccaacggctacttccgtgctcgccagcgcttcctcagcgagcgcaagaccagcgagcgcgccagcctgtttatcgatctggtgcagccgctcttgcaggctatcggttatgaattagccccggaaaacctcgctctcgccgatggcgagcagccggtgctggccgcctaccgtgatgccaaacatcagccgttgctagtgatcgccgcagccatcgctggggtggatgacgaagagcttggtccgctgcagctcaaaccgcaggcagccgacagccaaagcaaaagtcaccaggccgacggtgactgggaagaaaccctaagtcgccgtctgttcgccgacgaccacccgccacgttgggtgctgttggtgcatcatgatgaatggctgctgatcgagcggagcaagtgggggcgcaaggctctgctcagcttcaaactgcccgacctgttcggcccgcgtgacgacaaactgctgcgtgccctcgcggccctcgccggcagccagtcggtattgcccgccgagggcggcgtggcgttgctcgacagtctggacgacaactcccacaggcatgccttcgaggtttctaccgacctcaaatacgccctgcgcgagtgcatcgagctgattgccaacgaggccatctggtacaagcgcaccgtggccaaggagaaggtctacgagcgcaatgacaccgacctggctgagcatctcagccgcgaaagcctgcgctacatgtaccgcctgctgttcctcttctacatcgaggcgcggcccgagctgggctatgcgcccatcgacgccgaggcctacctcaagggctacagcgtcgagcacctgcgtgagctagagcaaaccccgctgaccaccagcgaggcgcaggagggcacctacttccatgaaagcctcaagcagctgttcggcttgatctggcagggcttcccgcgccgagcggacaacagcgggcagatggacttcacggtagggcacgacctgctgctcgacaccggctttaccatcgccccgctacaaggccatctgttcgatcccgatcgcactccgctgctgggcagcgtcaagctgcgtaaccgcgtgctgcagcaggtgatcgagctgatgtcgctgtctcgtggtggtggcaagcgccgtcgtgggcgtatcagctacggcaccttgggcattaaccagctgggcgccgtttatgagtccctgctgtccttccgaggcttctttgctgaggaagatctgtacgaagtgcgccctgaccccaaaggcaaaaaggccagtacaggtgaggagggcgaagacggtgatgccgagacagaggacgccgaactcgacactgccagcgaccaggacaagaaaaaggacgccgaactcgacccgctggaggccgcctacttcgtcccgtccagcgccatcggtcagtacaccgatgccgagcgcctgtttggcggtaacccacgcaaataccccaagggcacctttatctatcgcttggccggtcgcgcccgggaaaagtctgcctcctactacaccccggaggtgctaacccagtgcctggtggagcacgcgctgaaggaaatcctccccggcaaaacggcggacgagatccttcagctcaccatctgcgagccggccatgggaagcgcggcgttcttgaacgaagcggtaaaccaactcgccgaggcctacctgcaggctaaacagaaggagctgggccagagcatcccccacgagcagtacaccgaagagaagcagcgggtgaagatgtacatcgccgacagtaatgttttcggtgtggacctcaatcctattgccgtggaactggccgaggtctccctctggcttaacgccatcttcaaaggcagccatgtgccctggtttggcttgcagctgtacaacggcaactccctggtcggcgcccgccgcgaggtgtttagcaccgcccagctcacccctggcagaggcgaaaacggcctacccgaacgcgactggcgcgccgccgcgccccaatcactgccgctgacgcaggcaccgaaggccaccgatatctaccacttcctgctgcccgctgaaggcatgggcatggtcagtgacagggtagtcagggcgctggagcccgctgccttcgagcagtttaggcaatggcgcaggtcctttaccgcgccattgaccaaggatgaagtccgtcgcgtgcaggccttgagccaagctgcggaaaagctctggcaacaacatgccgaggagctctcaagggtgcgcaaggccacctgcgatgagctgcacgtttggcccgacctgctcgcgaaccgtgcccccaccagcaccaagcagaaggacgacatctacaagcgcgaaatgctcagcgaggcgcagaaaaacgccagcccctaccgccgcttgaagctggtaatggatgcctggtgtgccctgtggttctggccgctggacaaggctggcgagctgcccagtcgcgagcactggtggtttgtgctggagaccgtgctgctcggtagcgccagccttagtcgcgccccgaccaccgacctgttcgcggaaacccagtcccagcaggggctggatttcactcccgagcgcgaccgctatggccatgtggatatcgccgcgctggtcgaggccttgccgcagttgcaggtggcccagcgggtggtgagtcagcagcattttatgcactgggcgctggagtttgccgatgtgttcaaggcccgaggcggcttcgatgtgatcctcggtaacccgccgtggatcaaggtggagtggagcgagcaggcactactgtcggactttgatccgcgctttgccatccgcaagctgagtgccaagcagacggcggatcagcgcgaggcggtatttgccgcgctgccgcaggcgcgggctgattacctggtcgaatgtgtggtgtccgaggggatgggcgctttcctgaatgccatgcagaactatccgttgctcaagggccagcagagcaatctgttcaaatgcttcctgccgctggtttggcaggtgggtagtggggtgcaggcgttgctgcatccggaggggccttatgacgaccctaacggtggcttgctacgcgaggccatgtatcagcggctacgggcgcactatcagtttcagaatgaattgaagttgtttgccgaaattggcaaccgggtgaagtacagcgtcaacatttacgggggagagcaaactccagcgttcaagaccatggccaatgtcatacacccgcagactacctttgctgctttggcgcacactggaggaggagtaacgccgggtattaagacagagtccggtaactgggacttgtctggccatcgcaatcgtgtagttgaagtggcggaaagcacgttggctacctttgctctactttatgacgtcgctgacacaccagctctacaggcgcgcctgccagccgtgcatagtcgcgaactggtctcagtattggaaaagtttgcccgtgtgccgcgccgccttggtgatctgcatggcgattacttcaccctagaaatgtggcacgaaaccggtgcgcaaaaggacggtacgatccgccgtcgaagcagaaacgagcagggctttgtcgccgcccccgctgagtttgtgctctccggtccacattcttttgtcggtaacccgctcagcaaaacccccaagctgatctgcgaaacgcacaaggcctatgacacgctcgacctcgaaaccctgcctgacgactacctaccgcgcagcaactatctacctgcatgcgatgctgccgagtatgcccgccgcgtacctcgtgtgagttgggtggaagagggcgagcgcgaggcgagagcggtgacgaggtattaccgcgttatcagtcggcgcggactgagcatttcaggggagcgtactttactctcggctattgcgccccgtgacgtttgccatatcgacggtgtgttttccgtatcggcaaaagatcagggtgtggtaccgctactggctgggctctgggcttccgtgccttttgatttcttcattaagagttcagggaaaggtgacttccgtagctctctagcagaaaccatggtgattccggagttgggtactcattcggcccgttttactgttcggacgctgagtctcaatagcctcactgcccattactccgatctgtggcgcgagggctggcaacccgaattccggcaggacaactgggccagtactgacccgcgtctaccgcaggacttctttgcccagctcactcctgagtggcagcgcaactgcgctctgcgcagagactatgttcgccgtcaggccttggtggaaatcgatgttctggcagccctggcactgggtctgaccctggaggagttgctgaccatctaccgtgtgcagttcccagtaatgcgccagtacgatcgagatacctggtatgacgcaggtggccgcatcatcttcactgccagtaagggcctggccggtgtcggcctaccgcgcaaacccggcaaaaaggacgaaccctgcaccctgatccaccccgacggccgccgcgaaagcaaacgcctcggctgggatgacgtgatgcccaaggacggcaagccccagctcgccgacggcactgtcatcgagcgtatggtcctggacgacacccagcccggcggaccgatcaatcgcatcatccgctacaccgcccccttcaccctcgccgaccgcgaagccgactaccgagtggcctgggcgcattttgaagcgagaggtcagtga

SEQ ID NO: 331219 - DNA, 756 bp, Pseudomonas aeruginosa
gtgagctcagatgcccccgttatattgattaccggtggtagccgcggcataggtgcagcgactgccaggcttgctgccgcccaaggctataacgtggctatcagcttcgtctcgaacgaagcggctgccttgaccgtggccgcagacgtcagagccgcggggcgccaagctttggctatacgtgcggacagtgcggaccccaaagaggtagctcgtctgttcgccgagattgaccaaaagttttgtcgaattgacgtgttggttaacaacgccggagtcatcgcaaagcagtcacgggtggaagatatcggcttcgatcgcatgcagcgcatttttgcagtaaatgcgatcggcccaattctctgcgcccaacaggcagggaagcgaatgtcgacccgttatggtgggcgaggaggtgtggtgattaatgtgtcatctgcttcggctcggctagggagccctaatgagtacgttgattacgcggcttcaaagggcgccctagagacgtttactacaggttttgccaaggaagttgctaaagaaggaatacgcgtcaattgtgttcgccctggacacatctacacgcagatgcacgctgatggtggcgagccagggagagtggatcgggtcaaggacacaatcccaatgggccgaggtgggcagcccgaagaggtggctagggcgatcctgtggttggcaagcgctgaggcatccttcgtcacagggacattccttgatgcgaccggtggaaagtga

SEQ ID NO: 331220 - DNA, 1197 bp, Pseudomonas aeruginosa
atgaaaacttcagcagagcttcatgtagcaacagacggctcaaattcatcgaggtcccggagtcttctagctgcatctattacgcacgcgctccatgacggctacacggatgccctgtatgtattcctgcccgtgtggcaaacacagtttggactttcctatgccgcgctggcgtcagttcgggcgctctattacgggactatggggggcttgcagataccagcagaccgcctgcttcgtaattggtcatcgcgagcggcactgattctctctactgcactagcgttggcaggttttctgctcatggccttgcctttggggttgatggggctctgcgcagggcttgtattggctggtgttggatcgagtattcagcatccacggggttcgatgcttgtcactgacgcctatggaacagagtcgcgccgtccattaggcatctacaacttctctggcgatctcggaaaggcggtgctgcctgcgcttgttgcagtgctgcttccccttctggcctggcgctccgttttagtgctgatggcgttagtgggcatcatgcttgtgatggtgctaaccaagcttgcccccgcgctgattgtcctgcggcaggatccacaaaagggcgctgcaagccacagcgatggtggaggagggtttgctgttcttgcgacggtaggtgccctagataccgcgacacggatgggctatctgctgttcttgccatttttgattcatggtcggggtggcgattcaccgacagtcggtatagcgcttgctcttctgtttattgggggagcattcggaaaaatcaccttcgggtggcttggggatcggttgggcgtcgtgaagtgcgtcatgttggccgaggcggtaacggcatcgctgattatctcgacgcttttcacccccctcgtacagacgctgatcttgctgccattgctcggcacagtgctgaacggtacgtcgtcagttttgtacggcaccgttcctgaactttccaagggtgataccggccgtgccttcgctgttttctacacgagcgtcattggctctggagggctcgcgccaattctttacggtgcgattgctgacttcagcagtcagacagtcgggttgcttgttactgccgcgaccgcagcggccgtagtgccgctgatactgaccctgcgcccgtatttgtcgcacaccacttactcttaa

SEQ ID NO: 331221 - DNA, 918 bp, Pseudomonas aeruginosa
atgcgccgtctccctcctctaaacgcactgcgtgtatttgaagtagcggccagaacagaaagctacgcggatgcagcagtacagttgggtgtaacccaaggcgctgtaagccagcaaatagccacgctcgaaagctggttgggtcaaaggctctttatcaaggaaggacgtcgaatggtcgcgacaccaatggcgcgcgtcttcgctgcagaggtcggcctatcgtttgatcgcctggctgttgccgcagaagcctgtggccgtcccagcgtgcgccgaatccttcgagtcagtgcccctaccagccttgccatgcgttggttaatcccgagacttaatcgctaccacgctgcccatccggacgtcgaagttattgtgacaaccgtttcttgcgtggtggaggacctacgcggcggagttgatgtagcaatccgacgcggcgtggtccgaaacgatctctggcctcagcactatgtcgttcctttgctggacgataacgatacgctcatcatgagcccttctctcttttcccaacgccccatccacgggcccgccgatatcgaagggcatacatggcttgcgagtgaaaccagggctggcgattgggggaactggctggaagccgcaggactccagcatcttgcagggcatccacgtcagactttcgatcacttcttcgtgacccgccaagctatagaagatggactgggaatcggaatcggaccgctgcccatgttggagatcgacatcactcgcggaaagctgatgacgcccctgcctaacatttcggttgcaaggaccggatacgtggccatcttccctcgccaagcagatcccacgcacctattttcggacttcgtggactggctggttgaagaagcctttcacccggcaggcaaggtctgcgttgacgagtga

SEQ ID NO: 331222 - DNA, 399 bp, Pseudomonas aeruginosa
gtgcagcgcgatgccgggcgcgagcaggagcaacttggcctcggcgagggcgttctggagcatgcctaccacctgttgcagcgcgaggcccgcgacccgctgagcctcgaccggctcgccgagcgcatgggcatcagcccggcctcctgcaagcgcaagctgcagaaacacctgacgcatttccaggcggtgcacgacgaggtgcgcaagcacgtggtgctgtacctgtactggtcgcgggactacagcaacgaggaggtcgccgagtacctgcgcttcaccgacaccaccaacttccgccgctcgttcaagcgctggacgggcctggtgcccagcgcggtgcgggatctgcggccggggcgggatagttggctggaacaccgtgcaacggatagttga

SEQ ID NO: 331223 - DNA, 1650 bp, Pseudomonas aeruginosa
gtggaggtcttgcggtactttaagtctcaaccaagagaaatgatcgctgaggtgctgcttcggcttttaagctactcagaggggttgatacgagcagaggctgctcttacatggctgatggtagagcgggagaatgacgatgaaattcttgagcggcttcagcgcgatacgcatccttccgtggtcagccgcattctggatgcggccacgtcgacctggtgtgagctcagccctggccaaaaggaaaaactagcaactctgctgcgttcgtcccacactgagcctgaaaccgcagcaattgcggtcttaagactcctgagttacttccgcgaagctgattttgaggactcaagcacgacggcattgaagccttgggagctggtgggtgaggttcttgcgccagcactcggacgctatccaaattcattcaggataattggtcatcgcctctacgaagtctactacactgcgcttgaatatctgtctgctgtgccttccgccgtggtgatggatgcttggattgactggctgcagaatcgtgtcgccgacggacagctccccgatgactatatgctgggggcggtgacgtcgctgctgcgtgcccaggctttatcttctgaggccagacgagcatgcatcgagcgattgcttgcaacacctagcacgggggcagtcttggtcttcgtggctgatcttgtctctggctgggatgcattgagtgacgaagagcgctcgattgtcagagcacacctcctgagtgttcgggaggacaatttttggatgaaggctgcagctctcacgcgaaataacgttccgtcagagattgaagagctaatcctagggaagggcaaactgagtatgccggttgcacagctgattgagcagttgccttcagatctgcttgttgcttgcgtgcgtctacacagaggagagccgcagcccctatggtacttgggcgcacatcatgggcgatcgccaatatggcctaaggtgattcggcagatcgcctgcatgccagagcacctgctttttgacgagtgtctactcgaactcattggctttgagcgtcactttggtccccatgcacttagcgaagtcattcgtgagcttgatgcacctagtcgcgatcgagtgttcagtcttctcttagactggaagacgagagtgaccggtgaatggcatcagctagagtttgacctgttgcttgagctagcggccagtgaaagcgtccgcggcgagatgattggtcgtatggtcgagaaggccggtcaaattttggagcgcgtcgaggacgccaaagcgtggtcgcatcggtcggatgttcatgacgcccttcggggcgcattctctctcgactttttgattggagatgcagagagaacggttaaagcgctcagttctgatgatccagattggtcagtagcagatgcctctgagagattggtctctatggtcgaggtggggagtcttcgactgccctcgtctcactgggaagtaacccgatacctgagggcccttgatgcggaggacgatttatttaaaaaagctgaggccgtacggaacgctgccgttcagacctacagcgctttgaagctctcagacaaatccacgccggtgacgcgcttaccaaattggattggtccacagtaa

SEQ ID NO: 331224 - DNA, 198 bp, Pseudomonas aeruginosa
atgctgattctcgacagggaaataaggctctccacggtcccaaatgacatcgtcgagcttgatacggctcatcgagtttacccagaactggagcttatcttcgtagcgctccggatccgctttgacgacctcgagcaagaattgatagcaaaggtctcgagttgtggggaaatgccaacgaagtcctttctctgctaa

SEQ ID NO: 331225 - DNA, 1896 bp, Pseudomonas aeruginosa
atgtcgatagaaatcacaggtcccgaacgatatgagtttcagtactgcgtcacgctggagctagtgcttctgttctgggcgaatggggttcgggcagtcgttgatagtggtggtgaggactcgacgctagatattgtgatagatggtagtaattttgaaatagaactgcaggtgaagggggcagagagccatgccaaggctatcgatagtgaggtcttgcgcgaatatctcgctcatttcccaagcaggaaggcaaaaaatagtttgcttgaaagattgttggataactcggaaaagctagtgctatttgtctgcactcagcgtgcaatggactttgcttcaccactggtggtcagacacgattggcaaggtaaggtccatcgtgttccccctttgcctggagctgcggcagagttatttatagaacagttaattgcttcaaagcctgtcaaagataccaagctcgagaaagagagagaaaaggcgctcttcgatcttgggggcaagaccactgcaaccaagctaaataccgcgttccagcgcctcttcgtacaggacaatgtgactaagggcagtgtcatagctcgcctttacgagcgattacgagctctcgggattcccaatgatagggtgaagctcgcaactctccagatgctgcaaaaagtgcgagatagtaaaggtttagggctcgacgtggttcctgcgctccgcgagattctagattcggagataacaccctctgtccggccacttgattacgttccgcgcggtggtgaggcgacgtggacccacgagctctctacccagcgtgcgctcctactatcaggcccacctcggtgtggaaaaacagatgcagcgaattggatagccagcgaaatgcagagcttcggctttgacgtcgtttccactggcttggttgaagaggctgagcgagtccttttagacaacagccgcagggagattctggtcgttttagatgaccctctaggttccgacttcgataaaggttcgagggctgcacaggcattgcaaaggctgcagagcttggttcgacgcattcaacccagcaggcgattgattgtatcccagtcgcaggaggcgctgctttctgtaagcgattgtaactctttggacgaggtgcaaacagggactcttcagtggcatgacttgggtatatgccctccgggcttcctcattaaagtgtggggcgtacaatcgaagcgcaatcaagtcaccgagtcagtgaggggggcggtggaagcggccctagctagcggggaaatcgatgttccagctggtgtactagcgcatctggcggcctatcaccaacaactggaagggcccgatgtgattcgtaaggcccaaaacttggctagcgaatctgccgctgatttcgcatcgaggctggacgctggcggtatgcagcaagttatgcgcgcattggcaattggatcgacggcggctgaaacctctgcagatcgtgaactggcatttatattgggcgagggcgcagagcttgagatgcctgctgatcacgagtactggtctttgtctcctgacgaaaagccaatggtgcccgagttagcgccagcctatgaagaggagccgagattgcctgagggtgcaaagcggcatctaatcagtttggaaaaatacagagtagtccgccggaagaagtcggagcatttcgaattttctcatccctactaccgttcggttgcccgtcatttagtaaagcgcgcagcctctctagagaaagacgatctactggcggccatacggcgcggacttttttcccctcagcaagcacctcaggggcgacagccaggaatctttggtggttgcatcatgatctggcgtcgcgccttgatgttggtgaaccgttggtactcttag

SEQ ID NO: 331226 - DNA, 168 bp, Pseudomonas aeruginosa
atggggatcgctataagagacaatgcctcctttggcctgaatcagttccatgatttcaaccgaaggagactcacgcatatcatctacgtttttcttataggcaatacccagtaccaagacgcgactgcctttaagagccttacctctttcattcagcccatccattag

SEQ ID NO: 331227 - DNA, 213 bp, Pseudomonas aeruginosa
atgaatacgctgcgcgacgctctgcccgagtatctccagcttcggcgcagcctgggtttcaagctgaaggatgccggcctgcaactgccgcggttcgtcgccttcgtcgaacagcacggaagtacgcacatcaccaatgcgctggcgttggcctgggcccaacagtcgcaatcagtgcagcctgccgagtgggcgcggcgcctgagctattaa

SEQ ID NO: 331228 - DNA, 1251 bp, Pseudomonas aeruginosa
atggaacccaccctcgaaggtgcgatggcactcgcgcgaagcgcgaccggacctctgtcgccgcatctcaccgcattcgttacatcgctgatcgaccagagctacgccatcagcagcgtgcgcgccaaggcttggcgagctgcggcattcgatgcctggctcgagacgcaaggcgtcgaactcgccgatttctgcgaagcacacattgaccaatactcgcagcgccagtatcagcctcgcagcgactgtcgcagcaagccgcacctgcacgaggcgcaggcactgctgcaactgctacgttacctgcaggcccaaggtctttgcgtagcgccgtcggcctgcacgcttcccgccgacacgctgctcgtcgacttcgagcaatttctgctgcgtgaccgaggactcgccgtcggcacggccagcgggtaccgggggaccgttcgcgagttcctcgttgatcgcttcggcagcgaacgcatcgactttggcgcgctgtgcgccaaggacatcatcaatttcgttcaacgccagccccggcgaccgcgcccccatgcactcaagcatgtcgtcaccgcgctgcgggcttttcttcgctggggccagtaccgcggagaggtcgacgcgacgctgatcagcgccgtgccgacagtagcttcgtggagtacgacaccaccgctgcccagagccatatcagccgagcacgcacgccgcgcgatcgacagttgcgatcccacgaccgctgtcggcctacgcgaccgggctgttctgttgttgctggctcgcctgggattgcgcggtggcgaagtcatcacgctgcggctagacgacatcgactgggacgccggttgcctacgcgttcgcggcaagaacggtagggagtgccggatgcctctgccggtcgatgccggcgaggccatcgctgattacctgcgcagcggccgaccaccgagcaccgaccgccgtctgttcctgcgcgcccgcgcaccggtcagaggcttgctgcacggctcggacggtatcggctcgatcgtgcgcaatgcgctggagcgggccggcatcgatgcgccgcacaaaggagcgcaccagttccgccatgcgctggctgtgcgcatgctgcaaggtggtgcgtcgctgccggagatcggcgaggtgctacgacaccgtgacccagcatccacgtcgatctacgccagggtggatgtcaccgcgctgcgatccctggctttgccctggcccggaggtgcagcatga

SEQ ID NO: 331229 - DNA, 2256 bp, Pseudomonas aeruginosa
atgagaaaatcgctgctgctttgcctattcctggccgcttttctcggaggagcagcgcacgctgactcttcgggtggactgaaccagttcaccccgccaccgggtgacacatccgtcgacttcctggaggaagtcttcggctccatcgtgggtaccatccactcgggcgggaatgtggaaggcggtgaaaccgaggacgtgctgggcagcatgatgtccgtgttcggtggtgccgtgatgttcctggggatgatcttcatcgcctacaccacgatcaaaggcaccgtggactccgctcaggatggcgaggtcctcggtcggaagatgagtgacatttggatccccttgcgtaccgctgcgggcggcgccttactgctcccgctcgggcatggctactcgcttatccagatcatggtgctctggctcgcgatacagggcgtgggtgtaggggatgcaatctggagccaggccgtcgaccagatcggcaaggacggcatgttgtcccggccgctgattccagactcccgaccactcgcagccaatatcctgaagttcgaagtctgcaccgcggcgatgaacaagcagttcgaggcctctggccgctcgactcgcatccaggctgtcgcatccgcccgcaaagtcgtcaacaccggggagatcgacgtcgatatcaccgatgccataccggtctacggtggcatcaacatggtccagaagtacaacaaggcgagctacaccgtcaccgactacaagtggaaggccaacgacaactcctacatcaaccccgatgtgtgcggcgccctcacctggaagcaatcctgggaggcctcggagggcaacagcaacaccaaggtcatcaaagaaccgattctcgcggcccacgccaaagccatccagcagatgatccaggatatccggccgacggcacagcagatcgtcgccgggcaaaagccggccccgggcgtgatcgacgccgcagcgaacacctacgaaaactcgcttcggtccgccgccaagaccgccgtgatgcaaaccagtgatcgagctgcagcggacttcctcaaggccgccaaggacggcggctggctgttcgccggcacctggtacaaccacatcgtcaaaatgaacgacgtgatgcaatccaccctgaacggcctgccggcggccgagcccattgccatcgtcgacaaggagaccaaggagacactgcagacctacgccgacgtcatgctcaccaccgacgagtatgccaagcaccgcgtcgactcggtgcggaacacctactacgccgagaccaatgtgcgcgagccccgtgacggtgaaggggcctgggagtacgtcaagaagatgatgtctgcaccgttcatgggggcgatcaaccagatgacccaaagtatcgccggctccaacctcaatcacatgagccaaatgaagagcttcggcgacgtcatcgtcacaaccggcgaagtgatgctcgcagcgatggccagtgccactggtgtcgcgaactcctgggcggcacaggccacagtgaaggttggctttgacgtaggtgcggtcttccagtttctctctaccttgatcaccacgctgttgattttgctgttcgctctcggcgtgacgctcagcacctacgtcccgatgatccctttcatcacctggacgactgcgatcgtaaactggttcgttcttgttctggagtcggtcattgcagccccgctgttcgctgtggcccacatccacccagacggagacaatgccgtcggccgagcgggacaaggctacatgatgatcctgtcgctagtgatgcgcccggccctgatgctgttcggtctcctcggcgggatgctgctaacccagcctatcgtcggctacatcaacgcggccttcatgtcggttgtctcggggatccaggccgacagcatgacgggcatcgtcagcttcatcgcctacgtggccatctacgtggtgatgatgaccaccgtggtgcacatcgtcttcagtttgatccactgggtaccggacaacatcctgcgctggatcggcaatggatcgactggtggtatcgccgatgctgaacggaccggcgacagcggccaggatgtgtttgttgcgggagtcagggaaacaaagcacggggccgcgggaggtctgggtggcggggcaaaacactccaaggggccagacaactctactcctggccgaagcatgccagacaacaacacactgctgggcgggccgcctcctggaggttaa

SEQ ID NO: 331230 - DNA, 1047 bp, Pseudomonas aeruginosa
atgaagacccaggaagagattttcgagctcgtaagaacagcacgccaacgaatgaaggaactgccatccaaaagactaaccaagtcgactgacgatggttatgttcgcgaatacaaccgaatggttggcgatgaaggggctaatccagagaaactatggtcagcaatctgtgcgactcaaagtaagtccacatatcgaagaagagtggccgcaacaatgcactgttgtcgtgctcagcttcaggaggcattgcggtgtcaagatgcggctcagcgtgtgggtgatatgagcgccctcagataccaagtggcagcgatcgaagaagtgatcgggatcttgaatattgttgaaaggcacaaagggcagtgtcctctcgaaaatacggtaaggaggaagtcaaaacgatctgacttaaaatatctacctggtaattggcgggatcagctgcataagcaacttgagggaagcaagtacgagctggcatttctggcggaggcagtgtcgggatgtcgaccaggtgagcttgagaaaggtgtcaaagtgatttgttccaaagagagcggactgttgactgtccgtattgataacgggatcaaggttactgacgagaaaggccagccctggcgtgaaatcacctatcgagtcgatcagaatccgttggtgagggctctctttgagaactgcagaaatgccgcttcgggcgcagaaaagatcgagacagttgtcgacatcgagaaaactaccaactggcgtgcagcgctgtcgtcggccggacaaaagctatggccgaggctcaaattccggatctgcccgtatcacctccgaaatgccgtggctagtgactggaagcgggccgggctcagtgaagaagagatctcggccgcactaggccactgcgtaaacaagacgtccagcaactatggtcagtttcagatcgggcagggggccggcggtttgagtcccgtcgaggtaagagctgcacgtcctgtcttgaatactcggactctatctccccaagtgaatcgggtctccctgagccccaaatga

SEQ ID NO: 331231 - DNA, 1203 bp, Pseudomonas aeruginosa
atgaggacaggaattttaggtttccagtctgaacgccttaagcagctcagatcagcctctgggctgacccaggagggtcttgctgaattaataggatgttcggctgggaatatttcaaaatgggaaactgggagctcatacccaacagctcccagctttcataagatctgcgagttttttggcgtctctgaaagttggctacttgaaaagccgataaagtcaggatttctaagaccgagtttctttaggtctcaggtcacaaccccaaaaatatcatgggatgtcgcagacgctagactagattggcttgaagagatttcttataagttacaggaaagccttgagtttcctcccataaacatacccgcttataacggaaacaatgttagagagatcagtgacgaggatatagaatccttggctgatgagtgtcgcaaaacctggcgtcttggtgatggaccgatacagaacgtcattcaagtcctagagaactttggcgccgtgacagccagatgcactcttggcttcctaaaaatggatggtgtatctcgatggtcagaggtcgacaataggccatatgttcttatcgcaggcgataaggctagcccgatccggaatcgatttgatgcggctcatgagcttggccatttagtattacaccgtggggtaggatttgatcaggcccgagtagactatcacttacttgagaatcaagcccatcgatttgctagcgcatttctaatgccatcagaatcattccctctagaggtgaaatggccgactttagatgggttcttggctctcaagaaaagatggaaagtatccatcgcagccatgattaagcgctgtcacgatctaaatgttgtagacgatgaagctgttgtgcgtctttggaaaggacgatccgcacgtggctgggtaaaaaaagagcccctggatgaagagttcagctttgagcagccgaagctaatttctagaagcgttaagatgatcattgaaaatgacatacttactaaaaaccaactgaaagaaattcttggcgttccttcggaaaagctggaagagctttgtgccttagagaaaggttacttccaatcaaatgacgagcagaaaattatagacatccgcatccgagccaatagccctagggagactcatgcaaggagtacctctggagtcgttcttgggttccccaaaaaatag

SEQ ID NO: 331232 - DNA, 663 bp, Pseudomonas aeruginosa
atgaatacacaagatgagatcctgagctatctgcgcaagaggatcccgcgcaaccacttcgaagaaatcaagaacgtagtcccagtcgccttcaagaaggcccatgacgcgggcagcgaccttgtacatatacccaaggaccggaaacgcgctcaggatcgatacgcttatattcaggacggtctagcaggtttgcagaaaacctggtcttcgcaggttgttccgaccaacccgaagggtgagttttatacgctgatgaacgctgagaatataaggttaacagcggcaatcaagccatggaaaaagaaactgcgcccagcaaaatatcggctgaacaactcaaagctcaacagattcttaatgtcaccgcagcttgagctactcggcgcgggtgatattactgttgatattgaaaatatcttgaatgcgattgtcatcccgctctcgccaccatggcatttggatcagtccaagccactagatattatcttggctgtaccgtacttcaatagctgctcggactatcacgtctggtgcagcctggacaaatttatcgagggctatgaaaaagagatcgcaggagatctcgaccttgcatggcctgttattcgtaagcaaatgcgccgcgacgaaggcttagacgagtctacgggcgaagaatga

SEQ ID NO: 331233 - DNA, 393 bp, Pseudomonas aeruginosa
atgatggagcctgtaacgagtatctcaagcgccctgatcaccttggttagcgcaccactaacccaggcggcgccagaaacactgatcgaagtcgccctgttcgtctggtacgaccccaaccccctcccctcgctgaaacgcaccctggagatcctggagggtattcagcagcgccgcgctaggttcattctggatgtaatccggcgctacccctgcattgagctcgaacgccagcaggcactgtgcgagctggcagacctgaaagttagttttcaaggtggcccgctgacggatttgctccgcgcctggggcttggacgaggccgacatcccgaacaccaaggcgatcctgccctaccagacccggcactacgctgccgagcggcgtaagtga

SEQ ID NO: 331234 - DNA, 2079 bp, Pseudomonas aeruginosa
atggggcagatcaagagtgatgtattgagtggcgtactagcccgtcgacccgcagatagggcgctactaaccccattcctcaacggctttgatgtgacctggggagccagtcatcgatcattcggaaccgacgttacggtctatttcctgcttcccgaaagctttatttctcagggattcggtattgaccaagagatagctcttttcgtaactgatttccctacgctggagcctcgtgttcttcaagcagttgatcagacgcttagagaagcccccgccaaaggccgcgttgaacaatcgattttcttcttgtcgtcgcccgcagacaatgggaggcagtggatggccgactataccgcggccaatccagactcacggctcgcagtcgtattcaactctaaaagcctagttggagcagctggaaacgcttggtacgtacgaaatcaaatcggagagcaacttttcacgcggaatcttttcgacaaccagcttccgattgattcagatctgttcttttttggtcgagaccagctggtcgctggcttcctcgatgcaattaagcggtcgcaaaatcgtggattgtttggtctgcgaaagacgggcaagacatccgtactgtacaaaattcagcgaatagtgagtagagacggtattggtaacgtctactactacgacgcaaagctgccatccatcaggtcactcaagtggcatgagctacttgcaaagatatctcgagatattgctcaggcgaacggactttcaatccccgaaggggtggatgaccccaggcgtgtttcggatgttttaatgcatatccttcgactcacgccttcagataaaattgcagtcttgattttcgacgagattgaatttatctcgcctgtcgctaaggatgatgtccactggcataaagaatttattccattctggcaaactttatgggctatacaaagccaagttcgtcgactttcaaacatagtcgttggagtcaatccgaaagttgtggaaatggacacggtcgatgaagtccagaatccgatgtttggcattattcagccaacatacctgaagggatttgcgcttgatgaacttaaaaacatgctcaaattcttcgggaagcgaatgggtatagtctttgatgcagatgcacaaacctatctcctgcagaggtacggaggtcatccattgctggttcgaatggcttgcagtgaagttcacaagtcgttagaacgggctgtagtccaaaggccggctaccatcagcgcgagcgacttagttaagggagaggtgcagcgcgacgaggagttacttttctactgccgtcatgtagtaagcgaacttcaaagattttacgccgacgaatataagatgctggagatgctggccagcggtcaaatcgccgacgttcgagaactttcagatgaacccgagtacaccagacatctcagagagtacgggctgttgaagtttgatacccacaaccgtccatcttttgagatacccgttgttggcgagtatgtaggcagagagcttgccaggcgcgagaagcgccagctcgtgcgaaaaattgtgtcggaaggcgatcgtattgactgggtgaagcgacgcacacagacagttagccgagagattcgaactcttgccagagagattgacaaagcgggacttccgaagctttttggtgacggggacttcccagaagcggagaggttctcagcgattctgccagcgacagatgttgacacttttgtagtttttataaatatttgcaatcgttgttttgtcgagtctattgagcgctatggaaacaaggccggtatcaaggggtacttctggagctcgatcaaaaccacctacccagatctttggcatgcactccagcggatcaaggtatatagaaacaatgatcttcatttggagctgaacgtaactgtagaggccgagctgaaacgctaccttgatatagacttggaggggcgcacagtttcacaagtaagggagccctggtttgctcttcagcaggccgtgcttgacgaattgatgctatgtatccagtacgagctagcccgccacagttag

SEQ ID NO: 331235 - DNA, 780 bp, Pseudomonas aeruginosa
atggcccgaattgaacttcgacctgccgtggacgagcttcggccgccttcgccccctgcacaccaacgcggtgatcttcgccttcggtgggtgcgccctcttcgccacctcgtactacgtggtgcaacgtacctcgcaagcccgactgatttcagacacgctggcggccttcaccttctggggttggcaggccgtgatcgtgggcgccgtgctgaccctgccgcagggtttcaccacctccaaggaatacgccgaactggaatggccgctggccatcctcctggcgatcgtctggatcacctacgcgatcgtgttcttcggcaccatcgtcaagcgcaaggtcaagcacatctatgtgggcaactggttctacggtgccttcatcctggtgacggcgatgctgcatatcgtcaaccacatgtcgctgccggtgagctggttcaagtcctactccgcctactccggcgccaccgatgcgatggtccagtggtggtacgggcacaacgccgtgggcttcttcctgaccaccggcttcctcggcatgatgtactacttcgtgcccaagcaggccgagcgtccggtctattcctatcgcctgtccatcgtccacttctgggcgctgatctccctgtacatctgggccggcccgcaccacctgcactacaccgcgctgccggactgggcgcagtcactgggcatggtgatgtcgctgatcctcctggcaccgagctggggcggcatgatcaacggcatgatgaccctctcgggcgcctggcataa

SEQ ID NO: 331236 - DNA, 309 bp, Pseudomonas aeruginosa; identical to SEQ ID NO: 327040

SEQ ID NO: 331237 - DNA, 378 bp, Pseudomonas aeruginosa
atgaaagagcttggttcggaatcgccgatggaaagtcttttcgacattcgttcgctggaggacattaccggcggcgagccggctgcattgcagcggttgctggaaactttattggccagcagtcgggatgatcgtactcggttggcggaattgcttgaactcgcagacctgcaaggagtggccgaacttgcgcacaggataaaaggggctgcgagggtggtgggcagcagcctattggtcgagtcttgttcctgccttgaaaaggcttgccagaacccatcggagtcttccgagcggatagccaatctggcctcttcattggaaggcaaactaagtgcgttcgaaatcagtatctcaaccgaattggcaaagctctag

SEQ ID NO: 331238 - DNA, 3015 bp, Pseudomonas aeruginosa; identical to SEQ ID NO: 329814

SEQ ID NO: 331239 - DNA, 363 bp, Pseudomonas aeruginosa
atgatcgagattgcgtcagcgtcttttcgagtcacaccctacggtgaggtggacatcgcagcactggacagaatgcgagccggattcgatacatcccaacttctacggctagttgaaggtctggatgcatgcctctcggaaatgggtggtatcaccgccttgcgtgacgaactgctgaaattgcacgcaatggcactgactatcgtcgaggggactgccccggctgcacccaccgagaacgcgtgtatctgggctgaagcagaatctgtgcagttgggcctagaagcgctggcgacgtggattcgctccgctcagggcttcctaactcccttgaccagtcttgagcctgagcatcagcagtag

SEQ ID NO: 331240 - DNA, 192 bp, Pseudomonas aeruginosa
atggagcacactgccgctcaaccggttgaaacggtcgtagacattacctgtgatgtttgccgccagagcactagcgttgaaggttatggtcaacagtttggaacccttcaggcacactgggggtatggctccaagcatgatggcgagcgctacaaggttcatctttgcgagctttggttttccgcacactaa

SEQ ID NO: 331241 - DNA, 1539 bp, Pseudomonas aeruginosa
atgcaggagtacaggaagctaagaagtacgcttgataagtcccattcagagctcaagaaaaacctgaaaaatgaaaccctgaaggaggttgatgaactcaagaatgaagcggggttgccaggtaaagcggtcagtgccaatgacatccgcgatgaaaagagtatcgttgatgcactcatggatgccaaagcaaaatcgctaaaggtcattgaggatcgcccggccaatctttatacggcttcagactttcctcagaagtcagagtcgatgtaccagagtcagttgctggccagccgaaaattctatggagagttcctggatcgccatatgagtgagctggccaaagcgtacagcgccgatatctataaggagcaaatcgctatcttgaaacaaacgtctcaagagctggagaataaagcccggtcattggaagcagaagcccagcgagccgctgctgaggtggaggcggactacaaggccaggaaggcaaatgtcgagaaaaaagtgcagtccgagcttgaccaggctgggaatgctttgcctcaactgaccaatccaacgccagagcagtggcttgaacgcgctactcaactggttacgcaggcgatcgccaataagaagaaattgcagactgcaaacaatgccttgattgccaaggcacccaatgcactggagaaacaaaaggcaacctacaacgccgatctcctagtggatgaaatcgccagcctgcaagcacggctggacaagctgaacgccgaaacggcaaggcgcaaggaaatcgctcgtcaagcggcgatcagggctgccaatacttatgccatgccagccaatggcagcgttgtcgccaccgccgcaggccggggtctgatccaggtcgcacaaggcgccgcatcccttgctcaagcgatctccgatgcgattgccgtcctgggccgggtcctggcttcagcaccctcggtgatggccgtgggctttgccagtctgacctactcctcccggactgccgagcaatggcaggaccaaacgcccgatagcgttcgttacgccctgggcatggatgccgctaaattggggcttcccccaagcgtaaacctgaacgcggttgcaaaagccagcggtaccgtcgatctgccgatgcgcctgaccaacgaggcacgaggcaacacgacgaccctttcggtggtcagcaccgatggtgtgagcgttccgaaagccgttccggtccggatggcggcctacaatgccacgacaggcctgtacgaggttacggttccctctacgaccgcagaagcgccgccactgatcctgacctggacgccggcgagtcctccaggaaaccagaacccttcgagtaccactccggtcgtaccgaagccggtgccggtatatgagggggtgaccctcacaccgttgaagaccgagccggagtcctatccgggagtgctactggacctaaacgatctgatcgtgattttcccggcggattctggagtcaaacctgtttatgtattaacctggcaaataaatagggcatattag

SEQ ID NO: 331242 - DNA, 1335 bp, Pseudomonas aeruginosa
atgaacaaccacaacggtaccctgcaccgtggctggcaatcgctccagcgctggcgcatccagatcttcgtcatcacctggctggcctacgccgccttctacttcacccgcaaggccttctcggtggccaagctcggcatcgccgaagacccctccttcgagctcgacaagagcgccatggccgatctcgatgccctctacctggccgcctacgccgtgggccagttcatgtggggggtgttcgccgaccgcttcggcacccgcgtggtggtgctcggcggtttgctcacctcggcgctggcggcgctggcgatgggtaccttcgccaccctgccgatcttcgccgcctgcatggtggtccagggcctggcgcagtccaccggctggtcggggctgtgcaagaacatcggcgccttcttcgccacctacgagcgaggccgcgtgctcggcctgtggagtacctgctacgccttcggcgggctggtggcgacgccgttcgccggctggtgcgcctaccggttgacgcatgactggcgcatggccttcctgtcctcggcgggagtggtgctggcggtggccgtgctgttcttcttcctccagcgcaaccgtccgcaggacgtcggcctgccgcccgtggaggccgaggccgcgccccccgccaacgcgccccggccgagccattccggcgccctgctgaaggcgctcaggaatccccacgtgctggtcctcggcatcgcctacttcctgctcaagccggcgcgctacgcgatcctgctctggggcccggtgatcatctacgaacgcatgccggagatcggcaaggtcgcctcggccatcgtgccttcggccttcgaggtcgccgggctggccgggccgatcctcatcggcctggcctcggacaagctgttcggcgcccgccgcatgccggcctgcgtgctcagcctggcggcgctgaccctgagcctggcgctgttcgtcccggcgatgcagagcggcagcctgtacctggtggtcggcctgctgttcatgatgggcgtcaccctctacgggccggactcgatgatcagcggcgccgccgccatcgacttcggcaccagcgaggcagccggcaccgccaccggcttcgtcaacggctgcggctcggtcggggcgatcctcggcggcctgctgccgggctacttcgacaccctcacggtgttcttcgtgttcaccgccaccgcgctgctcgccagcctgctgctggtgccgttctggaacagccggccgggcgcgcgccgcgtcgaaccgaaggcgcatgccggcgggccgctgctggcggccggcaagccgcgttga

SEQ ID NO: 331243 - DNA, 6720 bp, Pseudomonas aeruginosa
atggtggggcgttggagtgcgtggatcgtcgccgtggcgatctgtctcatggtcggggacgcgaccgccgctggctggcgttcggcaaacttccgtgtctatagcggcgactacaatggcgacggtcagccggacctctacctgaaggcggtcacttcggtggtcgtggtgggaggcgaagtggctacgccgattccgctcctgccaccgttgaagaatgtcgtcctgctgcgcaatggtgccagctacagcgccctctacgatccaccggcggcggatctgaacgccgtggcctggacggcggcgccctaccagagcttcatcggcgacctgaatcgcgatggcatcctcgacctgatcctgcagccgaacgattccagcgactcgctgctgatcgtcagcggcaacccttccgcgcacggcgtactgcaggtagccagcggtaccgggctgggcaccgagatcggctatgacgccggcgctcgtttcgcccttggcgattggctgggcaacggcggtaccagcattcgagtcagccatccgacccaggggcagagcacgttgttcatcgatgccggtggacaactggtggctcgctacctgagcgtacccactccgcttcccggcgtggtactgggcaaggcagcggaagccttcacagccttgaacctgctggctccccaggcaggtgtgagaggcgacggtggggtggactaccgctatccccttgagctgccgccaggcattgctgggctgcaacccgagctggcgctggtccagggcggtgggggcggcgtgctgggcgaaggttggagcctggctgggctgtcgtcgatcgagcgttgtccggcgagcatcgcccaggatgggcagaaccgccaggtcggcctgttggagtcggatcgcctatgcctggatggcatgcgcctgcagttgctgtccggcgagtacttcaagccgggcagcgtctatcgtaccgagatcgacagcttctcccgagtccaggccaccggcagcgccgcctcgctcggtttcgaagtacgcactcgggacggtcggatcctgacctatgacggcgcggctgcgattaaggcgcaaggagcggcggttccctatcaatggggcatcagttcggcgacggaccgcttcggtaataccatcgagtaccgctacctggccgccaacagtctggtccccagcgaaatactctatgccggtaaccgggtttccttcgagtacgcaggcgccttgcgcagcgtgccgcgctatttcgccggtggctataccagcgccacccatgtgttgaccgcggtcgccgtgcgagggcctgccgcgcagcagttgtttcgtaccgagcttgcctacgagcgcacccagggggacgccagcaaggtgcgtttgaagcaggtgcaacggtgcgcctgggggagcgccggcaaggagtgtctgagtccggttgccttcgactacctggcgggcgtctatggttataccgggacggctgaatccgctggcttggacaagttcgactatgtgctgatcagccaggccagcttcgtcaccgccgatctgaatggcgacggccgccacgccctggtcaacgccaccatgggcaagctgaaggcggtgagctacgacggcggcagcctggtcgagcggctattgtacgacgccgataatacgccgttgttttccctgacgcggatggatttcaacggcgacggcaaggacgagatcctcttcctgcgcatgaggaaggatccgaattccgcgaacgccgacatgcagtggatgctgtatacggccaatggcgtggttgccctgggcgatacctggaccgccccgccggccggccccaacggcatcgtctattccctggccggcggttccaccggcttcgccacctacgcgccgctggtggctgatctggaccagaacggctcgcttgacctgttcctgcccatcaatggcagttgggtggcttacctcaatcgttccggagccatcccctccttcgctcgtagtgccctgctcagcggcttcaagaccatcgactatggctggttctcctactggggcagtgatcccggcggcggcgtgcgcctggccagcggcaaggccggcaagctgtctgcaggtatctggcgcagtggcagcggcatggcgccggcggcgatggtcgaccttggcatcgagctggcgcgggcgctgaccgccgatgtcaatggcgatgggcagatggactacctggtacccaacgcctccggcaaggtcgatctgttgctgaataccggcggccccctgtcggcgggtttgttccagcgcctggggacttcgttgtcggctgcccagttgctgccagagtacaggtttcgcgcctcgctccaggactacgcggccaaggccgtcgactacgatggagacggccgcgaggaaatcctctatccccgcgcttccggcactttcggtctgctccgctttaccggcaacggcttcgaggaactggactccggggttccgctgagccgccgtttggcaacctcgacgacacaactggacaagagttgccaggatgccctggcggtctggaagcggatcatggacaccgcgccggatgccgccgggcgcgagtcggcgagttggctgtactaccagaccgccgccaactgcggcttcagcccggaaggcctgctggtagacccctacgagatgttcgtcgcggacgtcaacggcgacggtttccaggatgtgctggtcggcggcagcctggtcgtcgagccgctcaggcgcagcatccgttggcgggcgttcctgcacaaccgacgctcgccggaactgctcagtcggatcgacgccggcagcggcaacagcctcggcatcgaatacgcccggctcaacgatcccgccgtgcatacgccgcaggtcagcgccttcccccaggtttcgctgaatattcccagaccggtggtcagccgcctgcgggtcgccgacggtatcggcggcacgcgcgactaccagtatctctatcagggggcgcggctggacctgctcggccgcggcttcctcggtttccgccagatggaggttcgcgatctggcacgcgggcgcacccaggtgaggatgttgcgccaggacttccccttcgtcgggcgcctggacaaagaggaaaccagcctcgccggaaaactcctggcgcgtcagcagaaccagtggaagtctgccgcgaccatcgccggcaagtctttcttcgtctacccggcccagttcaacgaggaacgcttcgaccagggcgcgccggtcagcgccacgcggcgcaaggtggtgatggacgagagttacggcaatcccacccaggtgaccgaggaaattgccgccagcctgaccggcggaaccttgcacagccgggtggtggagcgccagtacagcaacgacggcgcctcctggctggttggtttcgtcacccgcgaaaccgaaagtaccagtggcgacagcgacagcaagtcgcgggtgcaattgcgcagcgcgcagccggggactctagcgccggccagcgaaacatctttcagtggctcgcccggtgcggagatcacccgtcaatacagctacgatggcaacggccggatcgtccggattaccaccagcggcgccggactggcggcgcgcagcgaacagttcggcgcctaccaggggccctggccgggcactcggtccaatgccctcggccatgtcgagcgcttcgcctacgaggcggcccgcggccaaccgaccagcaaggtcgacgccaacggcctggccgagagttatctctacgacgctttcggccgggaaaccctgcgccgcttcgccgacggtagcctgctcgccaccgactatctggtttgcggcagccgggcgatctgtgccagcggcgccaaggtagccgtgcgcacgcgtaccgtcaggggcagccagcagggcgcggtggaacgctggcagtacctggatggcttcggtcgggtcctgcgcgaccgtcgccaggccttcgacggtcgttggatcaatgtcgacaacagttacgacgcgctgggccggcagcgttcgactaccgagccttacatcgaggcggcgaccgtcctacagaccacctgggacgcccaggaccggccgttggcccggcagttgcccagtggggcgcaactgagctacagctacggcgcgcgcgctgctggtggcagttggaagcaatatagcctcggctacgacggaaggagcctgaccgagcgccgcgaatacgatgcgcgtggcaagctggtgctcagtaccaatgccctgggcagcgccggcgaggtgtccgttcgctaccgctacgacgccgacggcaacctggcctggacccaggtcgctggcgacagccgcagcgagatccgcatgagctacgacgcggcgggccgtcgcaccggccttttcgacccgaacagcggccaggaaagcgtgcagtacgatgccctgggccaggccctggtgcgtaccgccagcgacggcagtcgcaccgagcgcaagtacgacctgctcggccgggtgctcgagcagaccgaccgcctgggcggccaggccagcatttcgcgctggcagtacgacacgggaacgaaaagcctgggcaagctggtcggcgtggccgggccgggctatcgccaggcgctgctctacgacgatctcgcgcggttgaaggcgagaggctgggatatcgaagtcgacggtgtcacccgcagctaccaggagtcgtatggctacgacggcttcagccgcctggcgagcaccaccctgggcaacggccaggtgctgcgccatctctacaatggatacggcttcgccgctggggagcaggacggcgccgggacgacgctgcggcagatccaggctcgcgacgcccgcgaccagatcgttcgcgaaagctacggcaacggtgtgctaagccagcgcgactaccagcccgccaccggctggttgacgcgcatccaggcgagcaagggcggcagtgtcctgcagagcctgagctaccgctacgatggcctcggcaacctgctggagcgcagcgacgcccgcggctacagcgaagtgctgagctacgatgacctcaatcgactgttgcgcagcgcgcggaccctggatggcacacaggtggtccaggactttacctacgacgccctgggcaacctgaccggcaagagcggtgtcggcgcctatcgctacggcagctattcgagcgccgagcagcagctctgtgctggtcgcggcggggtggcccagcccggaccgcacgccgtgcgcggcaccagcgccgggacgtattgctatgacgctcgcggcaaccagctcagcgggccggggcgacaagtcaagtacgcatcgttcgataaacccgtggaaatttccgcaggttccagcctcagccgcttctcctacgatcccgagcgcaagcgctacctgcagacggtggatgggcgcacctccgtctacctggacgaggggcgtttcgaggaggtcaacgacggcgggcgcagttggcaggacgcctacgtcggcgactacctgatcctgcgcaaggaagggggcgccgtcaaaaagctctacctgctgcgcgatgcgctcggctcggtggaaatcctgctcgacgccaacggtgccgtcagcgaacgccagtctttcgccgcgttcggcgaacaccgtggcgctgactggaaggacaacggcaaccaacccaccgccacctccacccggcgtggcttcaccggccacgagcacctggaggagtccgggctcgtccatatgaacgggcgggtctatgacccggtgatcgggcggttcctcagcgccgatatcgtctatcaggatacggccaatgcgcaggcctacaaccgttactcctatggctggaataatccgatcgccagtgtggatccgacggggtatgcgttggaggaaatttcgtctggcaatagttggtactcaccgtttataagtaatagttggctggttttggggaatgcctttaaaggtaatcttccagatagttactgggacttaggggtgggggcgttcaagcagaatcttaactttgcggcgactacccttgctggaaatccattttctatttatgggttttcgcgggtaagtgaaagttttgataatttactttcccctaaaggtgtagatcagagggcaggagctggagtgtatgagcttggcagtctatttttcccaactgcaggagataaagtatctggatgggttgcaggttttgcgagtcgcctcagatttgctccagccttaagaggagggataggagtttctagtcctgcttggaaaggttctgggccgactcctggggttttaggggtagagccaggttcactatcctctaaatcgttgaggaattattatccgagcactgatagtggttctatagagtatgtgtttgatccgataagtaaaagctttgcggtgggaagacctaaagattttcgtccaatgttgagtcagcatcagcaattggctgattcaattggggctgctgatgctacagttgtcggtggaaaattttggcgtggcccaaatggtgaattctttaccaatgaatatagtgggcactactggaggaattggtcggaagaaaatcgcaaagtgtttgttgatgtgatgaataaatatggtgtgaaggttgagcaccggagagggatgtga

SEQ ID NO: 331244 - DNA, 351 bp, Pseudomonas aeruginosa
atgggcaagagagtggttgtattgctatggctgctattcacatcaatgtcagcccacgccatcgataaaaaagtcaacaacgtcaccatcatgcgtgtgggcttcatggtagacgcgaattctccgggtggaggctggggcttcatcgtcagcaagccgggagcggcggattgcggctttggcctgatgcgcctgccgccgatgaataccgatgccggcaaggccatgctgtcgctgatgctgagcgcccaggccacacagaacaaactgccggagatcgcctattcggccagcgccacggtgaacgcggtatgccagatcacttcggcgcagatagacagcggcgcctga

SEQ ID NO: 331245 - DNA, 2853 bp, Pseudomonas aeruginosa
atggacaagacttaccagccgcacgccatcgagacttcctggtacgagacctgggagtccaacgactacttcgctccgagcggcgaaggccagccctacaccatcatgatcccgccgccgaacgtgaccggcagcctgcacatgggccatggcttcaacaacgcgatcatggacgcgctgatccgctaccgccgcatgcagggccgcaacaccctgtggcagccgggcaccgatcacgccggcatcgccacccagatggtggtcgagcgccagctcggcgcccagggcgtgagccgccacgacctcggccgggagaagttcctggagaaagtctgggaatggaaggaacagtccggcggcaacatcacccggcagattcgtcgcctgggctcctcggtggactggtcgcgcgagcgcttcaccatggacgacggcctctccgaagcggtcaaggaagccttcgtgcgcctgcatgaagacggcctgatctaccgcggcaaacgcctggtgaactgggacaccaagctgcacaccgcgatttccgacctggaagtggaaaaccacgacgagaagggccacctctggcacctgcgctacccgctggtgaacggcgcgaagaccagcgaaggcctggattacctggtggtcgccaccacccgtccggaaaccctgctgggcgacgccgcggtcgcggtgcacccggaagacgagcgctacgccaagctgatcggccagttcgccgaactgccgatcgtcggccggcacatcccgatcatcgccgacgagtacgtcgaccgcgaattcggcaccggctgcgtgaagatcaccccggcccacgacttcaacgactacgaagtgggcaagcgccacgacctgccgctgatcaacatcttcgacaagaacgccgcggtgctggcccaggcccaggtgttccacctcgacggcagcgtcaacccgaacctcgaccccagcctgccgcagagctacgccggcatggaccgcttcgccgcgcgcaaggccatcgtcgccgagttcgaggccatgggcttgctcgagaaggtcgacgaccacgcgctgaaagtaccgaagggcgaccgctccggcaccgtcatcgagccctggctgaccgaccagtggtacgtcagcaccaagccgctggccgaagacgccatcgccgccgtggaagacggccgtatccagttcgtgcccaagcagtacgagaacatgtacttctcctggatgcgcgacatccaggactggtgcatcagccgccagctctggtggggccaccgcatcccggcctggtacgacgaggccggcaacgtctacgtcggccgcgacgaggtcgaggtgcgcaccaagcacaagctcggcaacgaggtcgagttgcgccaggacgaagacgttctcgacacctggttcagctccggcctgtggaccttctccaccctcggctggccgcagcagaccgagttcctcaagaccttccaccccaccgacgtactggtcaccggcttcgacatcatcttcttctgggtcgcgcggatgatcatgctcaccatgcacctggtgaagaaccccgacggcaccccgcagatcccgttcaagaccgtctatgtccacggcctggtgcgcgacggccagggccagaagatgtccaagtccaagggcaacgtgctcgacccgctggacatcgtcgacggcatcgacctcgataccctgctgcaaaagcgcaccagcggcatgatgcagccgaagctggcggagaagatcgccaagcagacccgcgccgaattccccgaaggcatcgccagctacggcaccgacgccctgcgcttcaccttctgctcgctggcctccaccggccgcgacatcaagttcgacatgggccgcgtcgaaggcttccgcaacttctgcaacaagatctggaacgccgccaacttcgtcatcgagaacaccgatggccaggacaccggggtcaacggcgagccggtcgagctgtcctcggtcgaccgctggatcatctcccagttgcagcgcaccgagcaggaagtcacccgccagctcgacgccttccgcttcgacctggccgcccaggccctctatgagttcatctgggacgagtactgcgcctggtacctggagctggtcaagccggtgctgtgggacgagaacgcccccatcgagcgccagcgcggcactcgtcgcaccctgatccgcgtgctggagacggccctgcgcctggcgcacccgttcatgccgttcatcaccgaggaaatctggcagcgcatcaagggccaggccggcaaggaaggtccgaccctgatgctgcaaccctggccggtggccgacgaaggcaggatcgacgccgccgccgaaggcgacatcgagtgggtcaaggcgctgatgctcggcgtgcggcagatccgcggcgagatgaacatctccatggccaagcgcatcgacatcatcctcaggaacgcctcgcccagcgaccaccgccgcctggccgacaacgagccgctgctgatgaaactggccaagctggaaagcatccgcgtgctggaagccggcgaggaagcgccgatgtccgccaccgccctggtcggcgacatggaagtattggtgccgatggccggcctgatcgacaagagcgccgaactggggcgcctggacaaggagatccagcgcctggaaggcgaggtcaagcgcgtcggcggcaagctgtccaacgaaggcttcgtcgccaaggccccggccgacgtgatcgagaaggaacgcgccaagctcgccgaggccgaacaggccctggccaagctggccgagcaacggcagaagatcgccgcgctctaa

SEQ ID NO: 331246 - DNA, 768 bp, Pseudomonas aeruginosa; identical to SEQ ID NO: 321942

SEQ ID NO: 331247 - DNA, 1650 bp, Pseudomonas aeruginosa
atgatggttccgaccctcgagcacgagcttgctcccaacgaagccaaccatgtcccgctgtcgccgctgtcgttcctcaagcgtgccgcgcaggtgtacccgcagcgcgatgcggtggtctatggcgcaaggcgctacagctaccgccagttgcacgagcgcagttgcgccctggccagtgccctggagcgggtcggcgtacaagcgggcgagcgggtggcgatactggcgccgaatatcccggaaatgctcgaggcccactatggcgtacccggtgccggggcggtgctggtatgcatcaacattcgcctggaggcacgcagcatcgccttcatcctgcgccactgcgcggccagggtgctgatctgcgaccgtgagttcggtgccgtggcccagcaggcgctggccatgctcgatgcgccgcccttgctggtgggcatcgacgatgatcaggccgagcgcgccgacctcgcccacgacctggactatgaggcgtttctggcccagggcgacccggggcggccgctgagtgcgccgcagaacgaatggcagtcgatcgccatcaactacacctccggcaccacgggggatcccaagggcgtggtcctgcatcaccgaggcgcctacctcaacgcctgcgccggcgcgctgatcttccagttggggccgcgcagcgtctacctgtggaccttgccgatgttccactgcaacggctggagccatacctgggcggtgacgctgtccggtggcacgcacgtgtgcctgcgcaaggtccagccagatgcgatccacgctgcgattgccgagcatgcggtgacccacctgagcgccgcgccggtggtgatgtcgatgctgatccatgccgagcatgccagcgtccctgccgtgccggtatcggtgatcaccggcggcgccgcgccgcccagcgcggtcatcgccgccatggaagcacgcggcttcagcatcacccacgcctacggcatgaccgaaagctacggccccagcaccctgtgcctgtggcagccgggggtcgacgaattgccgctggaggcccgggcccagttcatgagccgccagggcgtcgcccacccgatgctcgaggaggccacggtgctggataccgacaccggccgtccggtcccggccgacggccgcacccttggcgaactggtagtgcggggcaacaccgtgatgaaaggctacctgcacaaccccgaggccacccgcgccgcgttggccgacggctggctgcacaccggcgacctggccgtgctgcacccggacggctacgtggaaatcaaggaccgggccaaggacatcatcatttccggcggcgagaacatcagctcgctggagatcgaggaagtgctctaccagcaccccgaggtggtcgaggccgcggtggtggcgcgcccggattcgcgctggggcgagacaccccacgcgttcgtcgccttgcgggcggatgccttacccagaaccacgggtgacgatctggtccgctggtgccgcgagcgcctggcgcacttcaaggcaccgcggcatgtgacgcttaccgaactgcccaagaccgccaccggcaagatccagaagttcgtcctgcgcgagtgggcccggcaggaggaggaggccggcgacgccggccgctga

SEQ ID NO: 331248 - DNA, 840 bp, Pseudomonas aeruginosa
atgtcctcaccgtcaccccaagcgaggtgcgccccccatagggagcggtttatcgtagacctacagccacactccctgagctccagcgtacattgtgctcataaggtgctgctgctcgccccatggcgtgtgttcgcgcagacgctcatagggcgactgtcctgcccatggtgccggaaagcgccattgagcgcatgcagtggcgtcgctcggcgaaatccatctccgcctcaaatgcagctctacgtcgaaataccgatccaagtgctgcacgagctgacgccgccctcactgaggtgctgccctagcgtcttagggaaaaacgctcatctggccatcccagaacaggatacgcataccactgttggcaagcgccttgtcatgccggcctgtcagcagagaaacatccttagctaccccaaccgaccacagcatggatttgatctgatccagcacgccatgttgattgctgcaaagactagcctcgaactggcgcaacttcgtatcgtccacgttcggcaaattaagctgccccacaacgagcctaacgtctgtgtacaggtcatgtctgccagcgtgctcgatatagcgccgctccgcgaacggcctccaccccgcagtgtgattgactcctcccgagacattcgcgcctctaccaatatgagacccagtggctttcacccgatgcttgcgaatgcgcgccagaacgctttcacgcactgtggtacccacatagatccagggcgtcaaatccttcgcacctccgaacgccagcacgtacaacccataggtcttcgacaggttctttccatacgcagacacagggaccatggcatgtga

SEQ ID NO: 331249 - DNA, 525 bp, Pseudomonas aeruginosa
atgcccgaagacgaccacagtgctcctcgcctgatcaagaaatacgccaatcgccgcctatacgacacccacaccagtgcccatgtcacccttgctgacattcgccggctggttatcgatgaagtgccgtttcaggtagtagacgcgaagagtggcgaagacctgacccggagcatcctgctacagatcattcaggaagcggaaagtgatggtgagccgatcttctccagcgacatgctcaaggggatcattcgcttctacggcccgttccagggcatgctcggcaactatctggagaagagcatccagaccgtgatcgacatccagacccagaccggggtgcaatcctcgcaggcttggagtgactttatgcacaagcaggtgcccgtcatgcaggatctgatgagccagtatgtcgaacagtcgaagaagctctatctggggacccagaatcttttcggcatgttcggcggtatcccgcctggcaattcgaggcagaagaaaaaagacggtgatgatcaatga

SEQ ID NO: 331250 - DNA, 567 bp, Pseudomonas aeruginosa
atgtcttttttcgattcagaaaaactgcaaagcgcacagaaagccaaccttgacctgttgcagcagatcagtggcaaggtatttgagagcgtcgagcaactcagtcaattgcagttcaaggcgctacgcgcatccagcagcgagcagttcgacagcctacgtaagctgctgtcggcgcgtgacccgcaggccttcgccgagttgcaggcgtccctcactcagccaactgctcaggcagagcgcctgctggagttcaatcgagaggtgtatgacctggtttccagcactcaggcggatatcgccaagctcgccgaacgccaagtcgaggccggcgccaagcatgtgcgggaactggtggacgtcatcgccaagaacgccccggcgggtgcggagccggcggtagccgttctcaagtcggcactggaaagcgccggcagtgtctatgaaagcgcgcagaaggccgccaaacaggcagccgagatcgccgagaacggcatcgctgccgcggcctccgcagcaggtcaggcgacccgtgaagccagcaagactgcgggtgggcgcaagtaa

SEQ ID NO: 331251 - DNA, 2547 bp, Pseudomonas aeruginosa
atgagccaggaaagtttttttgcaaagcgagaagagagtttctcctcatttcataatctgttcgaacacctcggacgcctacagcatctgcacgggaagctcctgctcgatgcctttggtcaacgccaagaggctctgctcgcgccactgagagaagggcgcctgcgtgtccccagcgcaggcgattgctgggagtacctggtcgacttcggacagcgcaatctgctgttctgggatgcacttcgccagcgtggtgacaatacccttgcccacgagcgcgccggctatcccctgctgctcaagtttccctatgaggtgctggtcgacggccacgacctgcctcacccggtcaactactctctgctgcacatcgttccaccggatgaccagcccagcgataccacgcgccagccggtcatcgtcatcgacccacgcggtggtcacggcgccggcatcggcggcttcaagcaggattctgaaatcggcgaaagcttgcgcgctgggcacccgacctatttcattgctttcagccatgctcccgcaccaggccaaaccctgatcgatatcgccgaggccgaggcccgctacatcgaggcggtcagcgcgcggcatccggaggcagggaagcccgtggtgatcggtaactgccaggccggctgggcgctgatgggactggctgctgcacgtccggaactaccaggtctggtgatcgtcaatggtgcgccgctgtcctactgggccggagtcaacgggcgcaacccgatgcgctacgctggcggtctactcggcggcgcatggatgactcgcttgggtagtgacttgggtaatggccgttttgatggcacctggctggtcagcaacttcgagagcctgaatccggccaacacctactggagcaagtactacaagctgttcagcaacgtcgacagggaaaccccccgctttctcgatttcgagcgctggtggggtagtccaaccctgctcaacagcgaggagatcgaggtgatcgtcgatgacctgttcatcggcaaccgcctggctggcggtttcgggcgcaggagcagcagcatcgacctgaaacgcatcgaggcacccgtggtggtgttctgctcctatggcgacaatatcactccaccgcagcaagcactgaattggatagccgacgtctatcccagcgatctggcgttgcgcaatgccggacgcaccatcgtctatcttcagcatgccagcatcggccatctgggcattttcgtctccggcaaggtcgcccgtcgtgagcacagggagctgctcggcgccatcgatgccatcaccctgttgtcgccaggattgtacgaactggtgatcgacgacctgccagcatccgccagtgacgaccaggcttaccaggtacatttcgaatctcggtgcatcgccgacattctctgccacgatgaggatggtcgtagcgacgaattagagttcgccttggtcgaccgcgtctccggattcaatagtactctctacgactggcttgtgcgtccctggatgcgcagggcgatcaacgaaccactcgccgaatgcttgcgcaagagccatccgttccaccagcagcaagttgtctggagcagtctcaatccaacgctctggtggttggcaggccatgcggctctgacgcgcgtcaatcgccgcccggcatcgcccgacaatcccctatttgcctggcaagaggcatcgtccagcacggttgaggccctgctcgatggctatcgtgatgtccgcgacgcggcccaggagatgctcttccatagtttctatggcggtctgagcaccttgactggcgaccaggcaccacactcgcagcagagctacgtcgagcaacgtgacaaggctctcgtcgagcatctgcacgactcgcttcttcgtggtggggagcaggaagcgctcattcgcattctctgcttgctcgcgcatgcaagtggcaggttcggcaaggagcgcatcgaacaacttgctcaacaggcccgcacgctctcgcaacagctcggcatcgacccacttgccgtacgtgacagcgtccgtctgcaggatctgctggtctttgccctccccgaggagagtctgaatacattgccattgctggttcccgaggccgggcagcgtgaggcagtgctggcagccgccgtgtacctcgtgcccgaacttctctacgccgagggcgcagtgggcgaactctggcgccgtttgcacgaccagcttgaacaccccgtgccggccttcgcacaatcaacggtgccactcatcgctatggacagcgctccagaccagaccccgttaacgctgcaactccccgaggcagttactcgcactcccaaggtcggcacacggccaaggaagaaaagcgccgcccagtcttccgatgcacagatcgaaaccagtccgccccctgtggggaccaggagcaagagccccgtggctgcggtaaaaaaagcaggtcgcggcaaggcaactcgctctgcgccggcgcatgcccctgcgagccaggacaagggaggcagcgccgaatga

SEQ ID NO: 331252 - DNA, 933 bp, Pseudomonas aeruginosa
atgagccaagatcactaccagacgttgctgaaccgctgcgccgaaattggcccgctgcccaccatcgtcgtacatccttgcgaggcgaatgctctgcgaggagcgctggaggccacccaggccggactgatagccccgattctggtgggcccgcgtcacaagatcgcggcaaccgccagcgaggctggcctggatatcgacgggttaaccgtggaggacgtgccacacagtcacgctgccgccgagcgtggtgttgccctgatccgcgaaggtcgtggcgagctgctgatgaaaggcagcctgcacagcgatgaactgctgcatgccgtggccgatcgtgaaagcggtctgcgcactgagcggcgcctcagccatgtcttcgccatgagtgtgcccagctaccacaaaacgctgttcgttaccgacgcggcggtaaacatctttcccggcctggaggacaaggctgacatctgtcgcaatgcgatccagatgctgcacgccctgggcatcgaccgtcctaaggtagcgctgctgtcggcggttgaaactgtcacggccaagctgccttcgaccttggaagctgccgcacttgtggtcatgtctcagcgtggacagattgatggcgcgttgctcgacgggccactggctttcgacaacgcgatcaacgccgacgctgcgcgggtcaagggcattcattcagaagtcgccggcgatccggacattctgctggtaccggacatggaagcgggcaacatcctcgccaagcaactgatctatcttgccggtgccgaggcggcgggtattgtcctcggcgcccgcgtaccgatcattttcaccagccgcgccgacagtccacgggcacgcatcgccagtagcgggctggccgtgttgctcgcccaagcgctgcgcacccaactaggtgtgtccatatga

SEQ ID NO: 331253 - DNA, 897 bp, Pseudomonas aeruginosa
atggatttcagcgccccggtgcgcgtggatcctgccgtactggcgcgcctggagacgctggaacccctggcgccgctccatcaaccgcacaatctggcggctatcaaggcagcgctcgagcacaatgcgcacctacctcaggttgcctgtttcgataccgcgttccatgccgggcgcagtgaaatgagccagctcttcggcctgccctacgcgctgtacgaacagggtgttcgccgctacggcttccatggcttgtcatttgaatatgtcagccagcgcctgatcgacagagctccagagctcgcttccggcaagctggtcatagcccatctgggcaatggctccagcctgtgcgccatcgaggccggccgcagcgtcgaggtgaccacgagtttcagcgccctcgacggcctccccatgggcagccgctgcggcgccctggatcccggtgtgctgctgtacctgctggatcagggtatgcaggttcgcgatctggagacgctgctgtatcggcaatccggcttgctcggcatatccggggttagcagcgacatgcgcaaactgcgcgccagcgacgacccacgcgcaaccctggccatcgacttctatgcctaccgaatcgcccaggaagtcgggcggctcgccacgtgcctgggggggctggacgcgctggtattcaccgccggtatcggtgaaaaggatgctgcgctgcgtgcccaggtgctgcagcatctcgcgccgctctttgggctgcgcatcgatgacgcggcgaaccaatgcaacgccgagcgcatatccactactgccagcacacgggctgtgtgggtcatccccaccgacgaagaaagcatcattgcccgccatgcctggcgtgtatatcaggatcaacgcttatga

SEQ ID NO: 331254 - DNA, 780 bp, Pseudomonas aeruginosa
atgagtatcaaggaaagcctgtccctagccggtaagcgcggcctggtggtcggcatcgccaacccgcattcgatcgcctggggctgtgctcaggctctgcatgacatgggcgctgagctggccgtcacctggctgaatgacaaagccagggtgcatgttgaacctctggcgcaacaggtgcatgccagtgtgcgcatgcccctggacgtgacccgggccggcgagctggacgcgctgttcgagcacctcgcagtgcaatggggatcgctggactttgtcgttcactgcctggctagcgcacccaaggaggaactccgcgggcgcctactggatagctccagttccgggtttctgcaggccgttgatatttcctgtcactcctttatccgcatggcgcgcctggccgaaccgctgatgccccggggcggcagtttggtgaccatgagttacctgggcgctcaggagacgattgaaggctatgccctgatggggccggtcaaggccgctttggaggccagcgtgcgctacctggccaccgaactggggccgcgcaacatccgtgtgcacgccatttctcccggccctatgccgactcgggcggcatccgggctgaaggactttgatcacttgttagaatcctcgaccaatcgcgcgcccttacgccgcctagtcactttggaggaagtcggcggcctgtgcgcctggctggttagcaacgcgagccaaggtcagactggcggagtccacttcgttgatggcggcctgaacatcctcggttga

SEQ ID NO: 331255 - DNA, 681 bp, Pseudomonas aeruginosa
atggagcactattcgcacatacttctactttgcgacccttttctgcgagagtcagccgccatggagcgggctagagcacttgccgccgcttgcggcggccatctacatctagccattctggatgacttaccaatcggaatggggggaattgacagcactctacaaatacgcgctagagaagagacgagaaagcggcaagagaagtggctgaccagcaaagccgacagcatgcaagcctggggcatcaggacatcggttcaggctgcgtggactgaagatgcagtgaaagaacttcttgaaattgtgataaataaaaatgtcgatcttataataaaagacactctactcgagaaaagcttgcatcgtgcctttataacaccactagactggaagattctgcgccactgtaaagtagcaacacatttagttagctcgaccgaccaccctcttccgcagaaagtagctgccgcactcgacttatcaaagagcacgtccgaaagtgatgaattaaataatcgcatcatggcatcagcaaaacaactcgcccttcaaagtaatgctgaacttcacattcttcatgcgcacaacttaagcacggacttcttagtttatgcggccggcccagtgccatggacgcccgtgctacaagataaaaaaacggaatatccacagcaggaatga

SEQ ID NO: 331256 - DNA, 1050 bp, Pseudomonas aeruginosa
atgaagcaaaggcctcggatctactacaccgaaagccagaaggcgccgatgtgggatcgctggaaggcaggtgattccctccagcagattgctcagctgttcgaccgaaatcattcctcgatccagcggattctcgcggagacaggtggtattcgcccagctactcgacgacgttccaggttggcgctcacactagttgagcgagaggagattccaagagcacttgctgttggccagtcgatttggcatatcgcgatgcgtctggaacgagctccatccactatcagccgcgagatcagccgtaacgctggttgtcgaagctaccgtgccaaccaggctgaacaggcggcatgggatagggcccgtcgccccaagctttgcaagcttgcccagtccccaaagttggcgcagcttgttgcggagaagctccagatccagtggtcgcccgagcagatcgctggatggttgaagcgtacatatccggacgtggccgaccaagtgtcacgcgagaccatctaccgtagcctcttcatccaggcccgcggcgcattgaagaaggaattgctggagtatctgcgccgtagtcgtgcgatgcgccggtcacgtcatcacacccagaaagccggtaaccatggccgtatcagcgatacgacttccataagcgagcggccggccatcgtcgaagatcgtgcagtaccaggacactgggaaggcgatttgttgtgcggtagcaaaaatagtcagatcgccacgctggttgagcgccacagccgctatgtgatgctggtgaaagtgaatggaaaggacaccgagacagtggtgaatacactgatcgagaatgctcggcgattgcctcaggagctccaccaatccctgacctgggatcgaggcaatgagatggctgctcacaagcgattcactctgacgacggaaatccaggtctacttttgtgacccacagaacccctggcagcgcgggatgaatgagaacaccaacggcctgctacggcagtactttccgaagggaactgatctctcgctgtactcgtag

SEQ ID NO: 331257 - DNA, 1110 bp, Pseudomonas aeruginosa
atgaagcttgtacttaatttcgatggttcagcccttaccgcaaacaatctccagcaggcaatcacagctgcgggagccaacacaaccatcaatatcgacactgctcaggccgtcaacataaccacgctcctccaggtcatcggcatcgcgggaaataccaagcgcctgaacgccacattcaatggtgctcagttgacctcaagcaatctgcaacaagcagtaaatgcatccggcagcaacaccaatatcgccgtcaataccgcacaggcagtaaacatcaacacgctgctttccataatatcgtccgtgggcactaccaaacatttcagcgcggatttcaatggcgcccaactcaccgcaaataatctgcagcaggcggtaaccgccgcgcaatcaggcacaagcattagtgtgaacacggctcaagcggcgaatattaccgcccttctcgaggcgataaatgctgcgggcagcagcaaggcatttagtgcaaacttcaacggagcccagctcactggcacaaacttgcagcaagttcttaccgccgccggcacaaatacttcgattggcgtaaataccgcccaagcaatcaacatcacaacttttctacagttgctcagcatcgctggaaataccaagaaattcagcgccgatttcaatggcgctcaactgacttcgaacaacctccagcaagccgtcagcgcggcaggaaccaactcgagcatcagcgtcaacaccgcccaggcggcgaacatcacacccctccttcaggccatacaaaatgcgggcaacaataaaaacttcagcgccgacttcaatggcgcgcagttgacagcagataacctgcagcaggcgctgactgccgcgggcactaagacaaaaatcagtgttaacactgctcaagcagtgagcatcaactccatgcttcaacttctctctattgccgggatcagcaaactcttcagcgccgcgttcaacggtgcgcaattaacggcaaacaatcttcaacaagccgtcagcaatgctggggcgaacacgacgatcattgtcacaagcgctcaaagcgcccccatcgctacgctgctggatgccatcggcactgcgggctaa

SEQ ID NO: 331258 - DNA, 570 bp, Pseudomonas aeruginosa
gtgccgctccacatcatccgccagatgttgcgcgctccactgtccggcgtcgccgagcaagacccgggctcctgccagcaggggtacgaagagttgttcggcagcggcatcgaaactgatcgaggcgaactgcagttggcagtcgccggggccgacgccgtaggtgcgtgctgccgcctggcagtgcgcgacgagcgccgcctggctgaccgccactccttttggctggccggtcgagccggacgtatagatcacgtaggccagcgtctcgccagctacctccggcagcggccgcgtatctgcactcgccggccaggcggcggtctccagcggcagccgctcgacctctgccgggtagggcagccgctccgccagggtttcctggcagatcagccagcgcgcgccgctgtcgcgcaacatgtacgccaggcgctccgcggggtagttcggatccagcggcaggtagccggcaccggccttgaggatgcccagcaggccgacgaccaggtcgaaggagcgctcggcagcgatcgccaccagcgcttccgcggccacgccgcgcgcccgtag

SEQ ID NO: 331259 - DNA, 1149 bp, Pseudomonas aeruginosa
atggttaatcaagggggcgttgtgatcaagagctctaaaactttgctctttggcttcttgattcttgttttcctttttgtctgttacttttttagttttgatgtaagctcctatgttgatgagctttcgatagcttttatagtgcttgcgctttttgtttatatttttctctcattcctttctttagggtttaagcccacctctttgacagttcttttttttgtatcgacggctgtgttcatttttgggcggtttttttcaaaaatattgaatcccgatgttgatatttttgcaatagacttttttgctacatataaactagctccttatgatggggtgaggcttggctttttatcgatgatattcctgttttcaatgtatatgggagctgtgctggggcgggatatcaagtttaagctaggtagttctggcggtgtagaggaaggaggggggcatttctctcccatgcttcgcatggttatctttttcttggttgtcattatctgctcgataaatctgtatgtagaatacaggaattatgtgatttcgtcatctgatggttatctgtccctatattcttttcagggcgaggcttatgccggtggtaagttttttaaaagcctcttctatattgcacttggtttgagctactcattttgtctagagcgtgagaagaaaataataatactctcgttgtttgtcatggggctcttgtctttgctcgcaggacagcgaggagggtttgttatttctctattcatgctgctctgggcatatggaataaaccataaggtcagttggtttggcgtactggctgccttttctttgttttttctcagcctggttttgtttggctctttaagtgcaaggagtttggccgttaatttagatagtggttggttagggtttgtctccaagtttctatatgatcaggggatatccttgatggtctttgatgtttctactaaggtttctgactatcctctggtggctacgattcagaattttgtccctggtgcgtctaggcttgcatcaatcttctatgacttgcgcatgcaagacgtgagttatgcagactatcttgcatatcacctcgatcctgttacatatcttggagggctaggtttgggatcaatgtcatcaacctaa

SEQ ID NO: 331260 - DNA, 756 bp, Pseudomonas aeruginosa
atgggtattgcgagcaatccggcacgtatagcactggtcaccggtggtatgggcggtatcggtacggcgatcagccagcgcctgcatcgggatggattcaccgtggtggtgggctgtaatccctactccagccgcaaggcctcctggattgccaagcaactcgaggcgggcttccacttccactgcatcgactgcgacatcaccgactgggacagcacccgccaggccttcgacatggtgcacgagactgtcggcccgatcgatgtattggtcaacaatgctggcatcacccgcgacggcaccttccgcaagatgtccccggagaactggaggacggtgattgataccaatctcaccggcctgttcaacacgaccaagcaggtcatcgagggcatgctggccaagggctggggacgcgtcatcaacatctcctcgatcaatggtcaacgaggccagttcgggcagaccaactactccgcagctaaggcaggcattcatggtttcagcatggccttggcccgcgaggtgagtggcaagggcgtgactgtcaatacggtttcccccggctacatcaagaccgacatgaccgcggcgattcgcccggacatcctcgaggacatgatcaccggcattccagtcggccgtctcggccagcctgaggagattgcctcgatcgtggcctggctggcctccgatcagtctgcctatgccaccggcgccgacttctcggtgaacggcggcatgaacatgcagtga

SEQ ID NO: 331261 - DNA, 1179 bp, Pseudomonas aeruginosa
atgatcgaagtcgttatcgtcgccgccgttcgcaccgccatcggcgctttccagggaagcctggccggcacccccgccgttgagctgggcgccacggtgatccgcagcctgctcgaacagaccgctctggatagcagtcaggtggatgaagtgatactcggccacgtacttaccgccggtgctgggcagaatactgcccgacaggcagcggtcattgccggcctgccatacgccgtaccggcgatgaccctgaacaaggtctgtggctccggcctgaaagccctgcacctgggcgctcaggccatccgctgtggcgatgccgaggtggtgatcgctggcggcatggagaacatgagccggtcgtcctatgtcctgcccaatgctcgcaccggcctgcgcatgggccacgggcagatactcgacagcatgatcgtcgacggcctgtgggacgccttcaacgactaccacatgggcatcaccgccgaaaacctggtagacaagtacggcatcagccgcaaagcccaggacgaattcgccgcagcctcgcagcagaaagccgcggctgccattgaggccggtcgcttccgcgacgagatcgtccctgtgagcattccgcagcgcaagggcgaggcgctgagcttcgacaccgacgagcagccgcgtgccggcaccaccgctgagtcgctgggcaagctgaaacctgccttcaagaaggatggcagcgtcaccgccggcaacgcttccagcctcaacgacggtgccgccgcggtgctgctgatgagtgctgcaaaggccgcagcactcggtctgccagtgctggcgaagatcaccgcctacgccaatgctggcgtcgatccggcgatcatgggtatcggcccagtgtcggccacccgcagctgcttggagaaggcaggctggagtctggcccagctggatctgatcgaagccaatgaagctttcgccgcccaggccctggccgtgggccaggagctgggttgggatgctgacaaggtcaacgtcaacggcggcgccatcgccctcggccaccccattggcgcctccggctgccgcgtactggtaagcctgctgcatgaaatgctcaggcgcgacgcgaaaaaaggcctggctaccctgtgtatcggcggtggccagggcgtggcgctggccatcgagcgctga

SEQ ID NO: 331262 - DNA, 369 bp, Pseudomonas aeruginosa
atgggtattgcgagcaatctgggacgaatagcactggccaccggtggtacgggcagtatcggcgcggtgtcggcctcccgcagttccttggagaaggcgggctggagtttggcccaactggatctgatcgaagccaatgaatctttcgccgcacaggccctggccgagggccaggggctggattgggatgctggcaaggtcaacgtcaacagtggcgccatcgcccgtggccacccagttgacgcctccggctgccgcatactggtaagcctgctgcatgaaatgctcaggcgtgacgtgaaaaaggtctggctaccctgtgtgtcggcggcggccacagcgtggcgctggccatcgagcgctgagtga

SEQ ID NO: 331263 - DNA, 894 bp, Pseudomonas aeruginosa
atggagctagcagaaattgagagcggtaacccagacattggacttaaagcttaccagcactttcttccaggtgcttttcaattagtaggatatgcaatgatctccagcgccaatctaaaagacgcgctgcaggtcttagtacgtttttccaaacttctcggaaacggcttcactgtcggcctaacacaagaaaaaaatggcatacgcctgtggtacgttgacaacacagaagacagaacaaagaaatccagagtgttcaatgacgcaatattggcatcaactctcggactctgccgctggatggctgggggtaaacttcccgaaatccaagaaatagaattcatttaccccactccacaagacatctcagagcaccaacggctttttgattgcaccctacactttgggaaaaatagaaacagcatcttatttgacaaccacgcgctatcgctgccgctaagcactgcaaatgaaacacttgcactactccatggcagccttgctgaacatcaagaatattttttaaataacggacattacagcgaacgcacacgaagcttgctcatcaagcgccttggccactccctctgcgacatggactctgtagcaaaagaacttaacgtcagtagtcgtttcttacagcgcgagcttgcaaaagagggtaaaacctttaaagaaatattcaatagcacccgaaaaagactagccgaacactacttaaaaaactaccactcttactccctagaccacataagcacactacttggctttaaagagctaagtagttttcacaaggcttgccttcgatggttcggcatgccaccagggagttttcgaaacactcacacagaaactcacccatcaggagtagaccagaaaataactcatacctaa

SEQ ID NO: 331264 - DNA, 1272 bp, Pseudomonas aeruginosa
ttgaaaattgtacaaaaaataaccagcccgctcgattgtcccgccttcatcgccgcccaccgccagaatcctcaagactttacccgccgacgccagctcaccttcaagaacctcgtcctgttcctgctcaatcagccgcgcacggccctgcaaaccgaactcgatcagttctatcgcgtactcaatcaggcgtcgactgagacgcaaatggtcactgcgcaggccttctgcaaagcgcgcaaaaagctcaaccccgaggtatttgaaagtctcaatcgcctcctgcagcaacaaattgactgcttcgggctgcgtcagaagtggcgtgggctgagggtgctcgcggtggatggctcgaccgtgcatttacccctggagtcgaccatggcgaccttctttggcagtcactctggctttcccatggctcgcttgtccacactctacgaagtcgctgacggtcaaaccttgcatagcctgatcgtgcccctgacagtcggtgagcgcgactgtgcccatctgcaccttgagcacctgccggctgacagcctgacgctgtttgaccgtggttaccctgggcactggttattcgcgctattcgcgcagcaacagcggcactttctgatgcgcctgccctgtggctataacgcccaggtcaaagcgtttctacactctggccaagttgaagacacacagcttttcgtggccaaccatcctgaagcacgtctgttctgctccgaggctggcgttgatcctgccagccagatcgagctgagactgatccgggtcgagttggccaacggcgaaagcgaggtattgctgacctcgctgctggatcgagaagcctttcccgctgaggtgtttgccgagctttaccaccgccgctggggcatcgaaaccgatttccgtcgcctcaaacaaaccctgacgctggacaacttcagcggccgcagcgtgaccgctgtaaagcaggactttcatgccgctcaactgttgaagaacctggcgctgttgatgcagcacctgctacagccggtcatcgaacagcgccacaaaggtcgcaagctgcgatggaaagtcaacttcacccaaggcgtgtcacggctcaaaaataccctggtcgagctgctggtgcggcactgtgctcaggggctgagcaatgtgctggccttgatggctaaaagcctcagtgccgtacgctcaggccgtagctttgcgcgccaacgcaaacgcgcagccagccgaggttgtgagggctacaaaccgacgcgctga

SEQ ID NO: 331265 - DNA, 570 bp, Pseudomonas aeruginosa
atggccggccaagcgttccacggtggaggcgtcgaacagatcggtggcatagtcgaaggaggcccagatgccgttttcgtcttcctgaatatccagcgtcaggtcgaactgcgcagtctggccgtcccaggccaggccttccagacgcaggtcctccaactgaacctcgggcgtcaccgagcgtatctcgctctgatggttgaacagcacctggaacagtgggttatggctggcattgcgctccggctgcaaggcttccaccagttgctcgaacggcaggtcctggtgcgcctgggcctccagcgcgcgttggcgggcctgtgccagcagctcgtcgaagcccatccgaccgtccaggtcggccttgagcacctgggtgttgacgaagaagccgatcagccgctcggtctccacgcggttgcgattggcgatcggcacgccgacacggatatccgcctgcccgctgtagcgatacaacagcgcctggaacgaggccagcaacagcatgaaactactggcgccttcacgctgggccaaggctctcacggcctcgaccagttcccgcgatag

SEQ ID NO: 331266 - DNA, 606 bp, Pseudomonas aeruginosa; identical to SEQ ID NO: 330450

SEQ ID NO: 331267 - DNA, 228 bp, Pseudomonas aeruginosa; identical to SEQ ID NO: 323684

SEQ ID NO: 331268 - DNA, 264 bp, Pseudomonas aeruginosa; identical to SEQ ID NO: 327042

SEQ ID NO: 331269 - DNA, 528 bp, Pseudomonas aeruginosa
atgttcgccgccgccaaggaccacaccatgccggagttcctccgcaaggagaacgccaaccaggtgccggccaacgctctctggctgaccaacatctgtgtgcaggtcttcctggtcatcgtgttcttcacctccggcggtgccgacggcgaaatggacccgtataccaagatgctgctgctggcgacctcgatgatcctcatcccgtacttctggtccgccgcctatggcctgctgctggcggtcaagggcgagacctacgagaccgactcggccgaccgcaccaaggacctgatcatcgccggtatctcggtcatctacgccatctggctgatctacgccggtggcctgaagtacctgctgctgtcggcgctgctgtatgcgccgggggtaatcctcttcgcaaaggcgaaacgtgaagtgggccaacccatcttcaccaatatcgagaagctgatcttcgctggcgttgtcatcggcgccctgatcgcggcgtacggcctctacgacggcttcctcactctgtaa

SEQ ID NO: 331270 - DNA, 294 bp, Pseudomonas aeruginosa
atggcaacccccgcctacatgtccatcaccggcaccaagcagggcctgatcaccgccggcgccttcaccgaggattcggtcggcaacacctaccaggaaggccacgaggaccaggtgatggtccagggcttcaaccacgaagtgatcatcccgcgcgacccgcagtccggccagccgaccggccagcgcgtgcacaagccggtggtcatcaccaaggtcttcgacaaggcctcgccgctgctgctggccgccctgacctccggcgagcgcctgaccaaggtcgagatccagtga

SEQ ID NO: 331271 - DNA, 126 bp, Pseudomonas aeruginosa
atgccgttgacccacatcgaggcgatgtacagcacggtgccgatggtggccagccagaagtgcgcgttgatcaggccgacgctgtgcatctgctcgcggccccagagtttcgggatcatgtggtag

SEQ ID NO: 331272 - DNA, 639 bp, Pseudomonas aeruginosa
ttgcatcctgctttggagcagggaaagcgcgggacattcttaatcgacgcgacttcgggacagtccgcagagaaatcctcgataacctcatttctggcacaaccttcccccgcgactcctggctcttctttggagggccaacttcaagaggtattcctcgccaagcagttggaactctcggagatcgccgtcaagcgctaccacgatgaccacgcaaccgcactgagcatgccagcagaagcaccattcagcttcgacaccgctcgacaccaacacgacgagagcaaattatctaaggccttcgagtcctgggcccgccgagcacgcgatactgatggaaagagccgagacgtacggaagcgcataagtgagtgccaagtaacgatcaatcgcttcatcgagcttctgagtgaccttttcgtacagaacatccggaggaaaacagttgaggaattccagggactgcttcgtcagctccccagcaaaggcgaaggaatcagatcactgaatgcccataagcagatcgccaaaagcagatgcactaaatctcctccggctcagcactgtgaccatcaaaaatcgactgatggcactgtcgtccgtactgaactatgccgtccgcatggaatatctggatga

SEQ ID NO: 331273 - DNA, 1137 bp, Pseudomonas aeruginosa
atgacccaagccgccctggtaaacccgaccattctcacgtggtctcgccaacgtgcaggcctgtcgactgaacaggtcgcccaaaagctccctgtcaaacctgaaagcgtcgaaagatgggaagcaggcgaggcaaaacctacgttcttgcaagctcagaagtgggcgaatgttgctcacatcccctttggcttcctctttttgccccagccaccagcagaagaactccctctacccgacttgaggactgtacgagggatagcgcctgaacagcccagtcttaaccttctggacaccataaaggacgctatacggaagcaagactggtaccttgagtaccttcaagaccaagagcgcgcagtactgccttttgttggacgatttacgccgcgatccccggtgaaagctgttgtagcagacatgcgtcaaaccctcggagttaaccccgatgccgcgcgccttgactacgaaaaatacagccgcgcactcattcaagcagcggaagacgctggtgttctggtcatgcgcagtggcattgcattggggaacactcatcgcaaattagaagttgatgagtttcgcggctttgctattagcaacgcgtacgcacccgtggtcttcatcaacagcgcggatgcaccaactgcgcggctcttcacgctaatgcacgagctcgctcacatctggatcggcagtagtggtgtttctgatggaaatactgcaacaggtcgagaagaggagcgattctgcaacgccgtagcgggcgaatttcttgccccagaagaactattccgtgcagcgtggaatgtgcaaataagctgggaagaaaacctcgccccactatctacacgcttccatctgagcaagctggctataggtcgccgcgcacttgatcttgggtacatcacacaacctcaatacagcgcctattatcgacgcgtactcaaggcttttcaggacaaggaaggcggcgcgggagactactacagaaacgctactgcaaagaacagcgcccgccttagcaaggctgtgctgaacgaggcactaagcggtcgactgctattgcgcgatgcagggataatcctaggcgtgcagccggccaagttaaggacacttgccaataagctcacggaatga

SEQ ID NO: 331274 - DNA, 501 bp, Pseudomonas aeruginosa
atgaagcatttactcgacgcgaataccctgatcgaagccaagaatcgctattacggtatggccttctgtcctggcttctggcaatggctgctcttgcaaaatcaggcactggagttggccagcattacgtccgtgatggatgagattgccaaaggcaaagatgaactggcgcaatggacagctgaaaacccagccttcttccacaccatcagcgatgaccagacgcaggcagcgtacattgatgttgccgctcatgtcgcacagcaggcacccaaaatgaaagtaggtgcactggaagagtttctgtctggagcagacccctggctcattgccaaagcactatctacaggcgccacagtggttacccacgaggttctaaatctggaagtgaagcggaaattcattatccccaatgtctgcgaacactttcaggtcccctacatgaatacgttcgagcttctccacaggctggatgccaagttcgtcctgccacacccgtag

SEQ ID NO: 331275 - DNA, 1014 bp, Pseudomonas aeruginosa
atgagcggattccaggaccagagtatcgacgaaggcgtgcgcaagcgcaccgcctaccagaacgatcggcgtgcacgactggcattgaacgtcgagcgacaggacggcggtatcctgcagattccggtggccagcgatatgctcggccatgaggagcacgagcgtatccagcagaacaccttcctggctgtgatgccgctggtccgcctgccaacgctgggcaaggccggttatggcgaccagctgcccgccggcgcgctaccgcgggcgggacggatctacctgttccaggacggcaagttgtggcgcgaactggaatgtgatggcaagggcaacctgttcgaagtcgatctcctgcaggggcgcagccagcgtgcggacaagcgtccggccgtaggcaagacacaagcgctgatcctggtgccggtgctggtcaaggggcagttcgtgatcccacgctacaccatggcctatagcgaaactccctggccttggtcgtacatcgactggctggaggaggacccgcagcgggtcaaccggcgctgccagcagatggcgtccgcttggaacgcctcggtggccaaccagcactggaaagcctccatccatcaacccgcgctggtcattgatcatcacgcccagggtttgcgacctcgcgacttcaacgtcgagagcgcgctggaagacccggcggaattcacacctgagttcgccgcctttcgcgaagagtcgctggtgtgccagttgcagcgacgccagcaggaattggcgcccctgctgaagcaggctccgccctctgcgctacctactctggaagccggagaggacgtactggaaaccctcaagctgcgtggccatcccaacctcatcgggctgatgctcgacgactcgctgttcgccttgcgccacgctgcggcgcaggcgcgccactgcgccgcctacttgcgcagccacactattcggtgcaggcatcagtgtatgggatggctaccgagctttgaggcagggagatag

SEQ ID NO: 331276 - DNA, 1230 bp, Pseudomonas aeruginosa; identical to SEQ ID NO: 323964

SEQ ID NO: 331277 - DNA, 2331 bp, Pseudomonas aeruginosa
atgccacgttgtagtacccgttccgcccagcgcctgtctccgctgttcctggtcctgtcgctggccgtcctcggcctggcgccgccggtccatccggcacctgccgagactgccgccgcgcaagaggaagagcagtggacgatcaacatgaaggatgccgagatcggcgacttcatcgagcaggtatcgagcatcagcggccagaccttcgtcgtcgatccgcgggtgaaggggcgggtcacggtggtatcccaggcgcggctcagcctgacggaggtctaccagctgttcctttcggtgctcgccacccatggctacgcggtgctgccgcagggcgaccaggcgcgtatcgtgccgaacatggaggcacgccaggacgccgcgcagaagaccgtccgcgatgggccgggcagcctggagacgcggatggtccaggcgcagcagacctcggtggcggaactgatcccgatgatccggccgctggtcccggcccatggccatctggccgccgtaccgtcggccaacgcgctgatcgtcagcgaccgccgctccaacatcgagcgcatcgaggcgatcgtgcgcagcctcgaccgggccggcgaacatgactacagcatctacgacatgcgccatgcctgggtcgcggaaatcgccgaggtgctcgatcgcagcgtcaccccggccgccgggaagagcgccgccaccgtccaggtccttgccgacagccgcagcaaccgcctggtcctgctcggtccgccgcaggcgcgagcgcgcttgctgcggctggcgcagtcgctcgacgtcccctcgtcgcggtcggcgaacagccgggtgatccgcctgcgccatggcgacgccaagacccttgccgccaccctcggggagatcggcgaatcgctgcacggcgagcggggccaggatggccggggaagcggcaagcgcggcctgctggtgcgcgccgacgaatcgctgaatgccctggtgatcctcgccgacccggaggatgtcggcctgctcgaggacatcgtccgccagctcgacgtgccgcgcgcgcaactgctggtggaggcggcgatcgtcgagctgtccggcgagatcggcgacgccctcggggtgcaatgggcgctgcgtagcgggcatgtcgccggcggcgctggcttcgccgacagcgggttgtccatcggcaccctgctgggcgcgttgcaggccggcaagccgccggcagagctgcccgacggtgcgatagtcggcctcggcagtcgcgatttcggcgcactggtcaccgcgctgagccgcaatagccgcagcaacctgctgtcgacgccgagcctgctgaccctggacaaccagaaggcggaaatcctggtcggccagaacgtgccgttccagaccggcagctacaccaccagcgccagcggttcgagcaatccgttcaccactgtcgagcgcaaggatatcggggtgaccctcaaggtcacgccgcacatcggcgaggaccgcatgctgcgcctggagatcgagcaggaaatatcctccatcgcgccaaccgccaccctggcggcgaaggcggtggacctggtgaccaacaagcgctcgatcaagagcaccgtactggctgacgacggccaggtcatcgtcctcggtggattgatccaggacgacctgcagcgcagcgattcgcgggtaccgctgctgggcgacatccccggcgtcggccggctgttccgctcgtcccgcgagacccgggtgaagcgcaacctgatggtcttcctgcgaccgagcatcgtccgcgatgccgccggcctggagcgcatcagccatggccgttaccgttccatccagttgctgcgcggtgccgccggcgaaccggcgcacccgctgttcgaggatgccggcgccatcgacctgcgtcccgccgcccaggtcgcaccggcacctattggctcgccgcgcagctatccggctccagccccggtgctgatggagaagccgcgcctggcggacccggcgtccctgggcgacggtcgcggcggcgaggtaccggaggttcgccagggcacgcacgcgccgcagccgccgtcaccccagcgctacgccgtgcgattggtcgagggcagcagcgaagccttcatgcgcgcgctgatcgagcggcatccgggcctgtcgttgcgtttgcgccgcgaactgcgcgatggccaggagctgttcgcggtggagcggggcgactacctcgacccggagcaggcacgccgggccctggcggaactgcccgaaagcctgccgcgagggaaggcgcgggtggttgcgcatacgccgggaagcgccctgtga

SEQ ID NO: 331278 - DNA, 2277 bp, Pseudomonas aeruginosa
atgactgagcagggcggcgaggcgctgtaccaggtggcggtgcgcgcgctttgcgagttcagcgccaagcgcggcgacctcgacctgcgcttcaccccgtcgcccagcgccctggaaggcatcgccggacataccctggtgacctcccggcgccccgctcactaccagcgcgaagtggcgctggacggacgctaccgtcacttgcaggtgcgcggccgggcggatggctacgatccgcaggcgaactgcctggaggaaatcaagacccaccgcggcgacctcgccctgcaaccggccaaccaccggcacctgcactgggcccaggccagggtctacggctggctgctctgcgccgaacggaagctggaggaagtcgaactggcgctggtctacctggaggtcggcagccagaaggagacccgcttcgtagagcgggtgcgggccgacgagctgcggctgttcttcgagagccagtgccaggcgtttctcgcctgggccgagcaggaactggcgcaccgccagcggcgcgaccgcgaactggccgcgttacgctttccccacgccgaattccgccacggccagcggcaactggcggaggcggtgtacaaggccgcctccgccggttgttgcctgatggcccaggcgccgaccgggatcggcaagaccatcggcacgctgttcccgcaactcaaggcgatgcccgggcagcgcctggaccggctgttcttcctggccgccaagaccccgggccgggccctcgcgctgcatgccctgcgtagcctggaaggggagaccggcggactgccggtgcgggtgctggaactggtggcgcgggacaaggcctgcgagcacccggacaaggcctgccacggcgagtcctgtcccctggcccagggcttctacgaacgcctgccggcggcccgcgccgccgccgtggaggcgcgctggctggaccaggcgcggttgcgcgaggtggcgctggcgcaccgggtctgtccctactacctgggccaggaactggcgcgctggtgcgacctggcggtgggcgactacaactactacttcgatctcggcgccatgctccatggcctggcccaggtcaaccagtggcgggtggcggtactggtggacgaggcgcacaacctggtggagcgcggccggcggatgtattccgccgaactcgaccagggcgatttcctcggtgtgcgcaaaaccgccccggaggccctgaggaaaccgctggagcgcatccagcgtgcctggaacgaactggccaagacccaggcggacgactaccaggcctacgacgagcctccgcagaagctgctcctggccttgcagaacgcggtggcggcgatcaacgacctgctcgccgagcaaccgcaggcgctggagccggcgttgcaggagttctacttcgcgatcctgcagttcggccgtctcgccgaactgttcggcgagcattcgctgttcgacatcgagaagcgcccaggccgcaacggccgcagcctggcccggctgtgcctgcgcaacgtggtgccggcggcgtttctcgccgagcgcttcgccgccagccgctccaccgtgctgttctccgctaccctcgggccgcgcgactattacgccgacctgctcggcctgccggcgggcacgccctggctggaagtggactcgccattcagcgccgagcaactggaggtgcacatacagcgtcgggtttccacgcgctatgcgcagcgccaggcatccctggcgcccatcgcagctattctcggcgagcagtttcgccagcggccgggcaactacctggccttcttcagcagcttcgattacttgcagcaggcgctggacgtcttccgccaggcatacccgtgggtgccatgctggagccagacgccacggatggacgaggcggagcgccgggtcttcctcgagcgcttcgtcgcgggcggcgagggcatcggcttcgccgtgctcggcggtgccttcggcgaaggcatcgacctgcctggcgagcgcctgatcggcgccttcatcgccaccctcgggttgccccaggtgaatccggtgaacgagcagatccgcctgcgcatgcagcgcctgttcggtgacggctacgactacacctacctgtatccgggactgcagaaggtggtccaggccgccgggagggtgatccgcagccgcagcgatcgcggcgtggtgcacctgatcgacgaccgtttcgcccaggccaaggtgcgccggttgctgccgggctggtggcaactgcgttga

SEQ ID NO: 331279 - DNA, 309 bp, Pseudomonas aeruginosa
atgacaccgaaccaggccgcgttcttcagagcctggttcgagcgagcgctctcgggaggggttcgctggtttacctgccgcttgaagatgcctgagatcctcacgggaactgcggagtttgagtgtcggtttcgggggaaatattcatgccggcttgtccctccaagtatgtgggagttcgcgttcgttcttgagcttcgtgagcagtcgctcatcccgccaggctgggagcagttcccggactactggttcaacatgaacatcttggatctcgcgatgaaccgcgatggccactggccggaggcataa

SEQ ID NO: 331280 - DNA, 1005 bp, Pseudomonas aeruginosa
atggatgatgaagatttaaaagagttggagaggactatatctgatttgctttctccgtatgaaagtgaggggaaggtaggtgcctcacttgatgaatcgcctattactatatatgccaatcaaattccttattatataaatgatacttggctgactaactggagtgtggctgctcgtacagggatagctcagtcgttaattgactctataaatacgactattgggcgacccatggtcgtgtctgaccactatttcagagggcatgaaattagcgtaagaacggttcctgagactggtggtagtaatttgataaccatgtctgatttttcggcaaagctcaactctcaaataaatacatttatacaagataggattgatgaagataaagaagcaaaggttgctctaatccagcagtcaatggagtcattggctgctgaacaaattaattccgactttacggcgaggcatgagcttccggctggttctcgtccaaacaccgtaacgattccccaggcaggtgactctgcaatcacggtcggatatggatttgacttaggacagcacgatgagcaggagctgatttccatggggataccggtttctaccagggacaaggttcggcctggcctgggcttgagtagaactgaccctaatatatattctgcgcttgctttaatcatccctccatttaccgatgatgatgggatggtgttgttctctacgaaactaaatagggtggctggcgctgttcgtagcaaattctctgacgtttggagtgggttgcctccagccgtccggacggtagcggtagatatttactatcaatatggtcaagggaaagtctttcctaattttgaggcggcaataaggcagcatgattgggttgctgtagtctacgagttgagaaattgggatggtcatccaaatgtacccggcgactacagaacaaatcgcttgaatgacagggcggactatcttcaacaagctttaggtcttccgaactag

SEQ ID NO: 331281 - DNA, 282 bp, Pseudomonas aeruginosa
atgtcctctacccagcaccaactgatcgaacagtgcgccacccgcctgcgcagcatcgtcgaagccctggacaacatccacgacagcacctcgcaccgctggtcgacggacctcgacgaccttcactcttccgccgagagcctgctggctctgatcaatgaccacctcggcggccgcacactgctcgccggcttgcgggccggcgttcggaaatatctgcagctgcttctcggtaatcagcatcggtactctccagtaacgttaatgctctgctatcggtag

SEQ ID NO: 331282 - DNA, 237 bp, Pseudomonas aeruginosa
atggcgacggtcaacccctggcgtcggttcatcgggctcttaccgggcggcgcgcgcacggtgggggaggtgatcgacgtcgacgagggcgccggcacctgccgcgtccgtctgcgaaacaacgtcgtaatcgcggctcggggcaccgcggtgccggtcgggcagatggcgttcatcagcgatggcctggtgaccggcccggcgccgcagctcccccagttcgatatcgaggtctga

SEQ ID NO: 331283 - DNA, 270 bp, Pseudomonas aeruginosa
atgaccggcaccgaggtggcgcgctcgcgcgggatctgcgagctgtcgaagggcggtaaccaggcgatcgagacgcgccgtatcccgctgttccagaaggatgacggggtaccgggcctggtgcagccgggaatgctggtcgaggtcagagacgaacaggcgacgtggcgcggtctctgcctggccaccgatatctcggccgagggggtgggggctagccgcgtgtggcagaccctgcgaatcgagcgccactatccgggaggttcctga

SEQ ID NO: 331284 - DNA, 300 bp, Pseudomonas aeruginosa
atgatccgagacaagcagaaagcattcgtcatcctcgaagggcttcgcgcctacgagttctacaaacctgtcgatctccgcgggctcaagggtagctactcgaaggaggagttgctggggaaaatgccggacgacgagttcgagcactatctcaaactactcgagggagagggcttcattcgctccacggaagccgcaccagacggtaagcaggtgttccatttgacctggaaaggccacgacctggccgaggagcttgaagatatctattacgaagatgaagaagagactgatggctaa

SEQ ID NO: 331285 - DNA, 417 bp, Pseudomonas aeruginosa
atgaacacgaacgcaccgcaggcaattgagtgcccggtctgtgactggctggaaaacttggaaggtgatgactggaacgccgcgtgcgaagaaatcgcggctttcgccaagcaaggagggaaggaagtgcctgaacagagcggcaactctgttcaggcgatgactgtactgggaagcagagtcaggcctagtgtggcaggccgagtgggatgtgacaaccgttccccctccgccctggcggctatcgctaccctcggcgcggagctgatcgcttaccgggtcaaccgtcgccccgagcaacgcccccacctgctggcgctgttccgccgcgcagcccgtatcggagccctttgtgcgagtgatcgcgccaccctgcgggccagcctcttcgcaggtcaggaggtgtcccatgcgtaa

SEQ ID NO: 331286 - DNA, 201 bp, Pseudomonas aeruginosa
atgaaccagcctcaaaccatcatgcccctgtcagtcggccccgaagaagccggtcagatgacaggccatacccgtagtgcaatttatgccgcgatcgcccgtggcgacctctgttccttcaagtctggcaagcgccgattgatcttggtcagcgaactccaagcctggatcaatcgcctggccaaggagaacgcccgatga

SEQ ID NO: 331287 - DNA, 717 bp, Pseudomonas aeruginosa
gtggccaggccaagaaaatcagttgatcagacgtcgaccgtcagcgtatcgctgcgtgtagaccccgccatcaagtacgcgattgacctagcggcaaggattcagaagcgcaccgtcacgggtgtagttgaatggtcagtcgaaaaggcgctaggcgaagtaaccatgcctattgacttcatggtcgaaggggatagtgggcgtcctgagctaccagagcctcagagtgttatagacgcggtaaaggaaagactttggtcgccagacgaagcgatcaggcttgtgaggcttgcctttgaataccccagcttacttagctttgaagaaagcctaatatgggaatctatacgtctttcgccgccattctggaaattcaccccgcgagttttgacggatgctagtccttggaaaaatgcaaggcttgtggtgatttctcagtattgggaaactcttgttaaaagagttcgggatgagggcggaatagttcaggtttcttatgaggatgtaggtcttcccactccgcttgaactagaagagcgaaaggcgcaggccataaaagattcttcgggatacctggaagagcttgccttggaaaatgataggctgatgcgagaaaataaagcgctaaagtatctgacggataatctcaaagattttcttatgaagatcgatcctcaaaccgcgaagcttatagaagatttaccgccgaagccttag

SEQ ID NO: 331288 - DNA, 1215 bp, Pseudomonas aeruginosa
atgaaagccaagctcactctctccctactgaactccctagaaaccaccggcacaacctacgaggttcacgacaccacggtaacggggctattcgtgcgcgtaacagcgtctgggcacaaagcctacgtcgtgacatggggaagggccaaaaagcgcaccttgggccgcgtaggcgtcctgacgctcgatcaggcacgcaaggaagcgctccagtacctggccgaggcccgcgagcatggggagcccctggcggttacacaggggcggcggtccgcaaactccctaacccttcgcgacttcattgacgatcattactcgccctggatggccaccaacctcaagagcgccgacaagaccctgaacctgctcaatgtcggcttcgccgccatcatgggcaagcgtttaaacgagatcagccagcgcgaccttgaatcgcagcgcatggcctggctgaaggccgggaacactgacagcacagcaaacaggaaaatggcctcgatgcgtggagccctatccagggctatcgagtggggctttctgaccgaacatccaatgacacgccttaagcaactcaagaccgaccgcaaaggccgcatccgctacctactgccggacgaagaggcccgcttgcgccaagccctcgacgaccgtcaggaaacgatccgggccgaacgcgacagcgcaaacaagtggcgggaagagcgccacaaatcacttctacccgacttaagggaggtcgcgtttcccgatcaccttaaacccttgatactggtatcgcttaatactggaatgcgccgaggtgaagtattcaacctgacctggacggatattgacctgaagaacaagctaataaccgtcgagggcgacacctcaaagtcaggacaaacccgacacatcccaatgaacaaggaaacagtggcgaccattgaggaatggagaaaacaatacccccgtaattccggctatgtattcccaggcaaggatggcaaccgtctggataacgtcaagaaatcttgggatggggtattgaaacttgctggaatcgagggctttcggtggcatgacttgcgacacacgttcgcgtcgaagctggtgatggccggcgctcccttgaacaccgttcgcgacctgctaggccactcagacctagcaatgacgctgcgttacgcccaccttgcaccagactctaaggcttcggcggtaaatcttctataa

SEQ ID NO: 331289 - DNA, 669 bp, Pseudomonas aeruginosa
atgtcagaaaacgagaaaccgctgaagtggctacgaaagcaggatgacgaatggaaatgggccgccgcgtaccttagggaacggcttagcgcgaaagagatggcctacctgagtggcgatccgcttacccagttttcatcgtatgaaaacaccgccagcagcatcaggcagatccaagagaccagactggacctgatcatcaagcttcagggagccattcggcagcgccgttaccgctctgacagcaatggccgaaaacctcgaacattcaccctcagcaaacaaaccctttccaagctgaactcaatcgcaaagcgaaataacgctgacgagacagctgtaatcacagcgctcatagaaagagaaggactggccgccgaggccgagagggattacaaaaagctgctcaaggaagcaatcgaacaggagcagaaaattgcttcccagatagaagcctctctggaggcccagcgagacgaggcgctaaaacacgccgagcgctttctaaagcttcttgcccagtgggaactgatgaggccagacgaaaaaccaccagccgccagcgaggaggatatcgccaaacgtgtcgaacctagaatgaaggagctgcaagacgccatagcctacgtcgccttcagaggctcggtgtttacggagcgccgtacttag

SEQ ID NO: 331290 - DNA, 1362 bp, Pseudomonas aeruginosa
atgcttgctaggcttcttgatacgaaactaaggcccggtgatccagatgctaaattttttctcattgcattctggagccactatggcgccgtgacgcctaaacctcgttcgctgaagcaattggctgaagacctgcggcttccggtgcaagctgtttcaaaagcggttgctcaactggttgatgtgggggtactgcgagtcgttactcagcccgaagggaaggggcggccaaggtgtacctacgagatgagcaacgctatccagtcggctctgcgggatgtcgaggaaagaacgctgaaacaccccgctctggtcaagcatgtcttgggtggagagcgcatcagggccatctgggctggctggaaggacgatgcgcagactgcgaaggagctcaacacacgctcgcgagacgagaagcgagttgctccagtgcgggcggggaagctcagcttggcgaatcgtttgctgctcatgatcttgctaagccacgcagatccgtttggggttgccagggggctgagtagcaaggagctctgcttgttgacgggaatggatacggcctctctcaagcagcgcttgcgcaggcttacggagctgggattcattcgtagacacatacctgggttggcgagtccgattttcgccgagaagctcaggagcgtttattggcttaatctgaaccaccttcagctttcacctgctgacgacgttgtttccgtcgtggtgcataaaaaggccgccgatcaagacatcgactacaagtttttggctggcgtcagacttgatcgcaactccttcctaaggcgaggggaatacttggcacctcgcagcgtggttcgtctctttaggcgagcgccagatcatgcgtttgatcagcttgagctttttatatgtgactgcgtattgggctttctgtcgcgccactgggttcaggctgattcagccggatggggaaaggtgcgcggtgtggactcgacggtgaaggagcaagtgtcggcattctttcgactgccgatgcttgatcccaaggacaaagcgattctggaccacgaggagattttcgacttcttccaccaccaagtccttgagctggccagagaggtggtccaacgtttttcgcaggtatccagcattgatctggccagggttagctacatcttggtgccggcgcatgtgtcgactggccaccgttgcatcgctctgttgactgaaagagcctcggacgaggggctggccaagcattggatggtcaccaaggggagcgatgatcctgtggtgaaaagcgtgttgagggaggtggatattccgctggagctgcgcgaaaagtcagggttgctcacgccagcacgagctgccgggtaa

SEQ ID NO: 331291 - DNA, 231 bp, Pseudomonas aeruginosa
atgcgaatcatccgtcttaaagaagtcatcgactcgactggcctggcgcggtcgaccatctacaaatacatctcggaaggcaccttcccaaagccggtatcactgggcgaccgctgcgtcggctgggtcgatagcgaggtgcacgactggatcctggcccggatcgaggagcgtgaccaagctgagggagcgtccacgcgtcctatcggccatctgagcatggccagctag

SEQ ID NO: 331292 - DNA, 969 bp, Pseudomonas aeruginosa
atgaacaaccgcaagcacaacacccacctctcacagtccgacatagccctgcagatcgaatcactcgtccaagctatcgagcgcagcgatacacccgcattccggatcactcataaacggtcaggctatgagcaggtcgagcagaccagactctcccggtccttcaccaacgtccagcagatgtacaacctgttcgatgaccgagtgccatacgactacagcgagcacctgttagcgttccgggaggcatgggaagacatcggtcttcagcgctcaccgaatggccctgtctgcatgagcgagacgggtacgtactggctcagtcatgaacagagcatgaacgtactcacagaacggatccgtgagctgacacgagagcagtggtatcggcgcaggaagtgggaccgacaggaattagccaagcagcaggatagggacattaccgagtacacggatgcgatgatgagtcgatactcgcgtaccgcgatcatcaggttgaacctgtactactggtctgaggcacaagccaggctacgtatcgaacaagtgttcaatcacttggatgccctgattaccaagcaccaccgccatccgatcttcgagcatcttatcggatacatctacgccgttgagcagggggatcgaaatgacggcaggggttaccacatccatgcagcctacttcttcaatggcaacatagtgtgccgggatgtctgtaaggcaactaggattggcaagctgtgggaggagatcactcgtcgtcagggctatgcccacagctgcaaccatgataaggaacagtacggcgacaagctaggcatcggccagatccatagggaggatcagtcgaagcggcctaatacccacgaggcaatgaggtacctggtcaaggacgatcagcacctgcgcttgaagcctgcgggggctcgctgtctgcgcaaggggactcttagtcgttctcgtcggtga

SEQ ID NO: 331293 - DNA, 309 bp, Pseudomonas aeruginosa
atgctcccgctcctacttaaaatattcaatgagttcgaaacacgatccggaaccgacctaaaattcctcaagaactatgcagaaattgaattcaacaaagttttttcatacctaaacaatcacttgaataataaaaaatttttagtcgaagacagactcacaggagcagacttcatgctgggttttgtagtgaaaggcgcacttaatctgctcaagtctagcggtgcatttccacatatcgaaagctatattactaatattgaaaatcagataagttacaagcgagcactggatatagatgccaattaa

SEQ ID NO: 331294 - DNA, 243 bp, Pseudomonas aeruginosa
atgataaaactccaccatctaaatgactctaggtcgtttcgtattctgtggctactggaagaaataggccaaccatatgaaatcattcggtatcagcgtgataaagaaacccatctggcccccgaaaccctgaaggacattcacccgctaggcaaatctccggttattgagctcgacggcaagataattgcggagtcagggtcgattacagaagttttgattaaagaattcgcccccatctag

SEQ ID NO: 331295 - DNA, 594 bp, Pseudomonas aeruginosa
atgaaactacgttacgacgatacgcgtcagcatctactcgataccggccaccgcatgatggtggttaagggcttcactggtgtgggccttaacgagattttgcaggccgctaacgtgccgaaaggctcgttttaccattattttaagtccaaagagcagtacggccagtcgttgcttgaggattactttcgcaattatttggcgagcatggatgagcgttttgccgtcacgggcaacacggctcgcgagcgcctgatggggtattggcagaagtggctagacagctactgcgagccctgcgacgaccagaagtgcctggtggtgaagctgagcgcagaggtagctgatctttcggagcccatgcgcctcacgctgcgcgatggtgcagatcaaatcattgcgcggatttctgaatgtattgagcaggggcagcgagacggttctctggcaatgggcgatgctttccacactgcgacggccctttaccagttgtggctcggtgcgagtctgctgagcaagctacaccgtaatagtcggccgctggaaaacgccatggccacaactcagaccattctgacctctgacaacatctga

SEQ ID NO: 331296 - DNA, 1035 bp, Pseudomonas aeruginosa
atgccccaatcaaagctaatcaatcggcgcgtcgttctggcctcacgtccccacggtgcgcctctcgaagcgaattttcgcattgaacaaagccccattcctgagccagcagaagggcaggttctgttgcgtaccgtttacctctcacttgacccttacatgcgtggtcgcatgagtgatgcaccgtcctatgctgcgccggtggaagtcggtggagtgattgtgggtggcactgtatgccgtgtggaggcttcgaaaaacccggcctacaaggtcggtgactgggtgctgtcctttgctggctggcaggactacacgctgtccgatggaagcgatctgaccgcgttgggtgagtcgccggcgcatccttcttatgccttgggcatctttggcatgccgggcttcaccgcttatatgggcttgctcgatattggccggccgcaggcgggtgaaaccctggtggtggcggcggccaccgggccggtcggcgcgactgtggggcagatcggcaagatcaagggctgccatgtggtcggtgtcgccggcggcgcggaaaaatgccgacatgcggtcgaggtgctgggttttgatgcctgtctcgatcaccgtgcgccggacttcgccgagcaactggccaaggcctgcccggcaggtatcgacatctacttcgagaatgtcggcggcaaggtcttcgatgcggtgctgccgctgctcaataccaaggcccgagtgcccgtctgcggcattattgcgcactacaacgataccgctttacccaacgggccagatcgtttgcctgctttgatgggcagcattctgcgcaagcgtattcatgtgcagggtttcattatttttgatgattacggccaccgctacgacgagttctttaacgatatgtcgagctggtttgcgcagggccggattaaataccgtgaagaattagtgagtggtctggaggaggcgcctaaggcctttatcggccttctcgaggggcgcaattttggcaagttagtggttcgcgtcagtgaggactga

SEQ ID NO: 331297 - DNA, 243 bp, Pseudomonas aeruginosa
atgcatacacccagtaagcgctcgcataaaataaacgccatgttctggcgtgtagtggttggttgtctggggctttacccaacactcttgttggtgctgagtatattagccccgctgacccgtgatctgagtttcccggtaatggtgctggtggaagtgctggtattggtgcctgtcacccagcttatttcctttccattggccgggtggctggttgcccgtttaaggcgaatagattcgtga

SEQ ID NO: 331298 - DNA, 462 bp, Pseudomonas aeruginosa
atgcaaacgctaatcatcaacggacagtcgcagcaggttgacgttgcccccgatatgcctctgctatgggtcctgcgcgatgtgctgggcctaaccggaaccaagtatggctgcggcattgcccagtgcggcgtgtgcaccgtgcacctcgatggccagccgattcgttcgtgcgtgacgccgatttccgccgtggcgggccgcgcgatcaccaccattgaggccatcggtgagacggtcgtcggccaagccgtgcagcaggcctggctggcgcatgaggtggtgcaatgcggttactgccaatcagggcagatcatggccgccacggcgctgctgcagcgccagccgaagcccgatgatcaggcaattgatgccgccatggcgggcaatctgtgccgctgcgccacctacacccggattcgcacggccattcacagtgttggccaggttgaggaggcgtga

SEQ ID NO: 331299 - DNA, 2193 bp, Pseudomonas aeruginosa
atgaaaaagcctaacgaagtgactgttgatatgtcccgtcgccgcctcttgcagggcagcggtatcgccctcggtggcttggtgttgagtacctggctaccgccgctggtggccaaaagcgcagccgccgaggcggctgcggcaggtcggcttggtgatcactccgcggagggttacggtgcctttgtccgcgttggccccgatggcgtggtcacggtgatctcgccgaaaattgaaatgggccagggtgcgcaaaccggtattgccatgatggtcgccgaggagctggaagtgcccctggatcaggtggtgatccaggaagcgccaccgaactcggcgctgtataccgacagcctgatgcagtttcaggccaccggtggttcgacttctactcgtgttacctgggagccgctgcgtcgggcgggcgctacggcgcgcatcctgttgatccaggcggctgctctgcaatggcgcgtcgcgccgagcctgtgccatgcgcagaacggccaggtgtttggccccaatggcctgcaggcggcctatggcgacttggtcgagacggctgcgacgctgccattgcccgacgcagtgccgctgaaaacccccgagcagttcaagttgctgggcacccccgcgcagcgtctggatacgcctgcgaaggtcaacggcaaggcgcactttaccatcgacctgcaaatccccggcatgctggtggcctccagtatcacctgtccggtgtatggcgggcggctgctcaacgttgatgacagtcaggcgcgacgagtgcctggggtgcgcgacatcgtgcgcttggacaatgctgtggccgtcaccgcgagcaacttctggacctgtcagcaggccatcagggcgctgaagatcgagtgggacctcggcccacatgccgcgattggttcagcgcagttggaccaggagctgctcgccgccagtagccgtgatggcgtggtcgccaagcgcagcggcgacattgagcaagcccagcagcaatcggccagccagttcgaagcggtttacgagcaggcgctgttgtcccattcgccgtttgaacccatgagttgtgtggcccatgtgcgcaaagatgcctgcgagctgtgggtcggcacccaagtgccggtgtttgcccagcagacggccgcccaagtcaccgggttgcccgtggaaaaaatccaggtgcacaaccaattgatcggtggcgcattcggccggcgtctggagtttgatttcatcacccaagcggtggccatcgcacgccaggtcgattacccgatcaagctgatctggagccgtgaggaggacatgacccacgacctctaccggccgctgtatgccgaccgtatgcaggccgccctcgacgagcagggacggccgctgggttgggagcaccgcatcgccggcgcctcgattctcgcccgttatgtcggcagcttgccgcccaatggcgtggatagtgatgccgtggaagtggcggtagaccccatctacagcctggcgcatttgcaggttcgttacatccgccaggagccgagcgttgtgcccgtgtcctggtggcgcggcgtgggcccgctgcgcggcacctatgccctggagtgttttattgatgagctggcgcacaacgccaaagccgacccggttgcctaccgcctggaactgatggcggagcaaccacgtgcccaggcggtgctgcgtttgctggccgaaaagactgactggaataagccgttgcccgcagggcagggccgtggtgtggcggtcagtgcggtgttcggcagctatgtggcgaccctggttgaactggagatgcagggcgacttgggcatacgcatcaagcggctggtcagtgtggcggattgcggctttgcgactaacccgacctcggttaaggcgcagatcgagggcggcacgctgttcggcctgtccgcctcgctattcaacgaaatcctcatcgaaaacggccaggtgcagcagaccaacttccacaactaccgacagctgcgcatcagcgaagcgccggcggtggaggtgcacctgctgcctagcctggaagcaccgggtggcgtgggggaggcgggtacggcattgattggcccggccctggtgaatgccttgtacgcggcctcgggtcagcgcatccgtcgcctgccactgagccgcttcggctactacccggtttaa

SEQ ID NO: 331300 - DNA, 1221 bp, Pseudomonas aeruginosa
atgaaattaataagcaacctactgacgctcgccagcgcggctctgctggcgcaagcggcctatgcgcaagaggacttgctggctaagggcgaatacctgacgcgcgctgccaactgtatggcttgccataccgtgcctggcggtcaacccttcgccggtggtgttgagttcaagctgccgttcggctcgctgttttcgcccaacattaccccggacccgcaaaccggcatcggtgcatggaccgatgacgagttcgtcagtgcgctgcagaccggcattggccgtgacggcaagcactactacccggcgtttccctatacctcctacagcaaaatgtcgcgcgatgacatcctcgcgatcaagggttatctcgacagcctggaaccggtcgagcaagcaccgcgcgaaaaccacatcggcttcccgttcaatcagcgctggggcatggttttctggaatttgctgttccttaacgatgagccatttcaggcggacagccagcgctctgctgagtggaatcgcggcaaatacctcgtcgaagggccgggtcactgcggcgaatgccattcaccgcgcaacctgtttcaggctgtcagcagcgagcgctcgctggccggtaatctgatccagggttggaacgcctacaacatcagtgccgaccccgtgcacggcattggtgcctggcccacggacgtgctagctggctatttgaaggatggcgcagcgccaggcctgggtttgtcttcagggcccatggcggaggtggtggaaaacagcttgcgccacctgaccgacgctgaccgtcaggcgattgcagtgttcctcaaggactcgccaccgcgcagtgaaggcgtgcctcgcccgcagcaggtcacgcttgcagaaccgggcagcggcaatgcactcggcaacaagctgttcgccgaagcctgcgccagttgccaccgctgggacggcacgggcaaccagagccagacggccatgctgctgggcttgaagacggtcaacgatccggccgccagcaacttgctcggcattctgttgagtggccacggcgccgccgacgccccagtgaatcggcgtatgccatcgttcggcagcatttataccgatcaagagttggccgcgttgagcagctttatgttgcagcgtttcggcgagagtggtgcgcaggtttcggtgccggctgtggcaaagcgccggaccgagtccctgcattga

SEQ ID NO: 331301 - DNA, 1209 bp, Pseudomonas aeruginosa
atgtcgggcctgaacacattgctggatgcgctcctggccgagcgggaggctggccgcgaagcggtgcttgcgactgtggtcaaggtcgaaggttcggcgtatcggcggcccggcgcgcgcatgctggtgtcgcgcttcggccggcccgagggcaccatcagtggcggctgcctggaggcggaagtggcgaaaaaggcttggtggctgaccgaagccgggccggcgctgcgcagctacagcaccgcagaggcggatgacgccagcgaggaagcgctgagcttcggcctgggctgtaacggcaaggttcacgtgctgttcgagcgcctgccggccggcccttgcgccttggtcgatgctttgctcagcgtgcgcgaccgccagcagcctgcggccatcgccacggtaatcgccagctcgggcgcggctgcgccacgcttaggcgagcgtttgtgcttgatgcctgggcaggaggccgcgggcgagttgctgcgctcggtgctggttgagcaaatcagcgccgacctgcagcagaccttgctgcgcggcaagtcatcccgtggtctctacccgaatggtctcggcgaagtggaagtgcttctggagtacctgccgccggtccggcgtctggtgatcttcggcgcgggccatgatgcccagccgctggtgcgcatggccaagctgttgggttggcatgtgacggtgatcgacggccgggcgcactttgcccgggccgagcgttttgccgaggctgaccaggtgctggtcggcgatgttgagcagcctttcgattaccacgagctggtgcgcggggctgcggtggcggtgatgacccacagcctggtgcaagacgcgcattggctacagggtgtgttgcacagtgaaccctgctatgtcggtcagttggggccgcgtgagcgcaccgagcgcttgttggccggcatccacgaacaattggctaaaccgcaggacgagctgccggggctggaatgtttgcattatccgatcggcctggacctgggtggcgacaccccggaaagcgtggccatggcggtgctggcggaaattcaggcagtgctcaacggccgcaatggcggcagcctgcgcttcagatctgcgagcatccatgacagcgaccctgtgctaatggctggccgggatcaaacggatgttgcggcagaaggttgtcggctggtggccgtgcagcgttaa

SEQ ID NO: 331302 - DNA, 339 bp, Pseudomonas aeruginosa
atgagtcaagccatacgcgttgtagcgatactgatagccaaggctggcaaagagtcgcaggtcgagcagattctgcgtgcctgtgtgcaaccatcgcgcgccgaagacggctgcctgtcttacgtcctgaatcgctgtattgaacaggccgggcgttttgtcttcgtcgagcgctgggccagccatgaggcgatagcgcgccatcggcagatgccacattacacggccatggccgatgccttgggcgagctgctaagcgatcgtcaggtttatgtgcttgaagcgctggcggaggacatcgaacccgccattgatccccgtacgggcgttgtcgggtga

SEQ ID NO: 331303 - DNA, 831 bp, Pseudomonas aeruginosa
atgctgcgtgccgtcgagttgctcagggatgttgccggggttgaggaactgcgcattaccggcggcgagccgctgctgagtgaccggctggagccctttctgcagggcataggtaagctggcgttgcaggacattagcctgaccaccaatggccagttgctggccggcaaactgccgttattgcgcagcgccggcatccagcggctcaatgtgtccctcgatacgctcgacccgagtgccttccgcacgatcgccaagggcggcgacctgcagacggtgctcaacggcattgagcaggcgcgccgagccggcatgagcatcaagatcaacatggtgccgatgcgtggtagcaacctcgatcaagttttgcccatgttggcgttctgccttcagcagggctacgaattgcgttttatcgaacttatgcgcatgggccatctggcccagaatgcagaggcttttcgtacccagttcgtcggccagcgcgagctgctggagcttatcggcgagcgttatgccttcacccaggctgaggcgccggtagactccaccgcgctgcgttatagcgttggcgagcgcggggcgttcggcatcattgccaacgaaagcgcgcccttttgccggagctgcagccgtctgcgcctgtcgtctaccggcagtttatacggatgtctgtcatccaatcgcgggcactttatgggcacgctgttggatctgccgactgagcaggcacagccgcagctcaccgcgttgctcggccgtgcgctggcggacaagcaggacgctacgtttaccggcagcgcgctgattatgaaatcggtgggtggctga

SEQ ID NO: 331304 - DNA, 600 bp, Pseudomonas aeruginosa
atgacagaaccgcgccgcaaccctgagtgtattggcctggtactcgccgccggcaccgggcagcgcttcggcagcgacaaacgctgcgccaagctggccgacggcaacagcctgctacgcgcaacagtgctgcgcacgcaagaagccttcagcgatgttcgagtcgtgctaaaagccgaggacgatgcccaggccctggctataccgcctggcgttcagctggtacgtgcggcccacgccaaacagggcatgggctcaagcctggctgccggcatccagagcctggcacactcgcaggccactgcggtggcggcgctgcttggagatatgccgtggatttctgccgccaccctgcggcaactgcgagcgcaggccgacgctgaacatatcgtcgtggcttactgcgagggtcagcgcggccacccggtgttgttcggccggcgcttctggccggagctgatgcaactgcaaggcgagaatggggccaggggcttgatcgccagccatgcgcaacaggtgattgccgtgacgctcgatgaccacggcattctgcgggacgtcgacaggccggacgacctcagccacccaccgatttcataa

SEQ ID NO: 331305 - DNA, 1392 bp, Pseudomonas aeruginosa
atggcttacgccactatcaacccctataacggggaattgctcaagaccttcccagaaaccaccgacgaccaggtcaatcaggcgctggacgacgcacatagcgcgttcctcgactggaaagaacgcagctttagcgaacgcagtgccattctccagcgggcagctgaactgctacgcgcccaggccagcgactatgcccacctgctaaccttagagatgggcaagatcaccgctgaggctttgggtgaagtcgagatttcagcgcgaattttagagtattacgctaagcatgcggaggggctgctagctcccgagaaactccctgttgcagaaccgtctgagggggaggcaactttaactcacgagccgctgggaatcattctagccatcgaaccatggaacttcccctactaccaagtagcacgcatcctcgcaccgcaattagcagccggcaataccctactgctcaaacatgcgtcaaacgtaccgcagtgtgctgcagctttcgaacagttgatgctagatgcgggcttaacatcgggagctttccgcaatctctacgcaacgcgtcaacagatcgaaagcattatcaacgatgatcgtgttcatggtgtcgctctgactggctctgaaggagcaggcgccatcattgctgcgcaggccggcaaggcgttgaagaagtcgaccctggaactaggtggtgcagatgccttcgtggtactgcgcgatgccgagttggataagactgtgaagtgggccgtaatcgggcgtcactggaacgctggacaggtgtgtatttcctccaaacgcatgattgtggtggacgaggtctatgaggagtttctgagtcgctacacagaaggagtggcgcagcttaaggctggtgatccctttgcccaggaaaccacgctggcccccttgtcatcgcaggccgccgccgacgagattcgtcagaagatccaggtggcagtcgctcacggcgcgacagccaccgaagtcggccccagagtccctaaatttggggccttcgtgcaaccaactattctgactgacgtaaagcccgataaccccgcctattactgggagttcttcggcccagtgtcgatgatcttccgtgccagggacgaggaggacgcggtgcgtattgccaacgattcgccgttcggtctgggcggctcggtattcaccgccgatgccaagcatggcgccgaggtggccaaacgcatctccactggtatggtgttcatcaaccatcccagcacctcgagggccaacctacccttcggtggtatcaaacgctccggctacgggcgcgagctaatcggcttgggcatcaaggaattcgtcaatcacaagctgattagcgtcatcgatattgacgcgccgttctaa

SEQ ID NO: 331306 - DNA, 1209 bp, Pseudomonas aeruginosa
gtgtcagcgctattcgaaccgttcgaactaaaaagtcattgcttacgtaaccgcattgccgtgccgcctatgtgccagtacatggccaacgaggggctggtcagcgagtggcaccacatccattacgcgagtatcgcgcgtggcggagcaggactagtgatagttgaagcgaccgcagtctcgcctgaggggcgaatcacacccagttgtgctgggttatggagcgacaagcaaggcgaagccttcatccccattgcccaggcaattaaggcagctggttccgtagcgggtattcagctcgctcatgcaggtcgcaaagcaagcgcgaatcggccttgggagggcaatggtcatatagccgaagacgaccaccgtggctggcaaacaatcgcaccgtctgccatcgctttcggagcccatttatcaaaggtccccagggcaatgtccttgagcgatatcgcgcaggtgcgtgaagaatttgtcatggctgcacgacgagccttgtcagccggtttcgaatggctggaactacacttcgcgcacggctatctaggccagagttttctctctgcgcattccaaccgacgcagcgatggctacggtggcaacgtggaaaaccgcaggcgttttctcatcgaaaccatgtctgcagtgcgcgaagtatggcctgagcaccttccgctgactgtacgcctcggcgtaatcgagtacgacaaccaggatgagcagacactgctcgaagccattgcgctgatacggcaactcaagaacgcaggtgccgacctagtcaacgttagcacgggcttcaacatcccgaacactgacactccctgggcaccggcattccttgcaccaatcgccgaacgcatacgccatgaggcgggcattcccgttgctgcggcctggggtatcgagtcgccagccctggccgaccgcttggtgcgcgatggccaggctgatctggtaatggtcggccgggcccacctcgctgatccacattggccatacgcggcagctcgcacccttggcgtcgagcgccccgcatgggtactgcccccccccttacgcccactggctcgaacggtatacgccggtggagtaatccgagtttcagcccctgtcaccacgtacggaaagaccggagcttttcatgccaccatgccacgagtaggagaatcacatggcttacgccactatcaacccctataa

SEQ ID NO: 331307 - DNA, 825 bp, Pseudomonas aeruginosa
atgagccttcaagacgaagcactcaaagcctggcaagcccgttatggcgagccagctaacttacctgctgccgacaccgtgatcgcgcagatgttgcagcatcgatcagtacgtgcctacagcgatcttcctgtggatgagcagatgctgagctgggcgatcgcggcggcccagtcagcctcgacttcctcgaacctgcaagcttggagcgtgctcgccgtgcgggatcgcgagcgtctcgcgaggcttgcccgactgtccggtaaccagcgccatgtcgagcaggcaccgctgttcctggtctggctcgtggactggtcacgcctacgccgactagccagaacccttcaggcaccgactgcaggtatcgactatttagaaagctacaccgtcggtgttgtagatgcagctctggccgctcagaacgccgcactagctttcgaggcccaaggactgggaatcgtttacatcggcggaatgcgcaaccacccggaagcggtgtccgaggagcttggcctgccaaacgacactttcgctgtatttggcatgtgcgtcggtcatcccgatccggcacagcccgccgagatcaagccacgcctggcgcaatcagtggtgcttcaccgtgagcgctatgaggccaccgaggcagaggcggtttcagttgctgcctatgaccgaaggatgagcgacttccaacatcgtcaacaacgcgaaaaccgttcctggtccagccaggccgtggaacgtgtaaaaggagcggattcactgagcggaagacaccgcttgcgagatgcattaaacaccctaggtttcggcctgcgctga

SEQ ID NO: 331308 - DNA, 303 bp, Pseudomonas aeruginosa
atgtccgcctacgtggttttcacccgcgagcacaccaccgacgctgctgaactgcaacgttacgcgcaggaggcgcctgccgcacgagaagggcacgacgtcacacgtctggctttctacggtcaactggaggtgttggaaggtccatcgatcgagggagcggtcattctacgtttcgaagatatgacagccgctcgagcctggtatgccagcccggcttaccaggcggcgctaaagcatcgtctctccggtgcggagtaccgagtttttctaatcgaaggcaccgacacatcacctaactga

SEQ ID NO: 331309 - DNA, 678 bp, Pseudomonas aeruginosa
atgaagatcctcctcgttctgacttcccacgagcaacttggcaacactggtgaaaagaccggtttctggctcgaagagctggccgcgccctactacgcctttatcgacgccggcgcgcaactgaccctggcatcgcccaatggcggccagccaccgctagacccaaaaagcaatgaacctgacttccagactgacgccacccgccgcttcgagaccgattcagttgccgcgcacgcgctggccaacacgctaaagctcagcgatgtaaacagcgccgagtttgatgctgtgttctaccccggcgggcatggcccgctgtgggacctcgccgaagacgccgcgtccatccgcttgattgagcatgccatagccgccggcaagccggtcgcagcggtttgtcatgcgcccgcggttctgcgccacgtcaagggcagcgacggccagccattggtcgccggcaaggcggtcaccggcttcagcaacagcgaagaggaggctgtaggcctgacccaggtggtgccgttcctggtcgaggacatgctcaaggctcagggcggccactacagcaagaccgccgactggcaggtacatgtcatcaccgacgggctgctgatcacgggccaaaacccggcctcctccgaagccaccgcccacgcgctgctcaacgtgctgagctaa

SEQ ID NO: 331310 - DNA, 1158 bp, Pseudomonas aeruginosa
atgctcaattttgacttccacaaccccacgcgaattatctttggtaaccaaaccattgcccggctggatgagctgattccgactgaagcccgcattctgctgctctatggtggccaaagcgctcgtgcgagcgggacgctccacgaagtccgagaggcattaggtttccgggaggtgcaagagttcgggggtatagagccgaaccccagctacgaaacgctaatcagggccgttgatacggttcgcatccatcgcttggactttctactagccgttggtggaggctcggtcattgatggcactaagttcgtttccgccgctgttggctacgacggtgatgcttgggacatccttgaaacgcggggcgcaagtattcggcaagccttgccattcggtaccgtactaactctgcccgcaactggctcagaaatgaacaacggcggtgtggtaactcgccgagcgacacaagacaagttgccgtttcgcagccctcacgtgttcccgcaattctcgattcttgatcctactaagacccagaccctccctacccgccaactcgcaaacggcgtagtagatgcgttcgtgcatgtcatggagcagtaccttacctacccaatcgatgcccgcgtgcaagaccgcttcgccgaagggctgctgcaaacactgatcgaaatcggtccgctgatgctggaggagtctgcggactacagcacccgcgccaacctcatgtggacggccactctggcgcttaatggcttgatcggtgcgggtgtgccacaggactggtctacgcacatgattggtcatgagctgaccgcacagcacggcatcgatcacgcacggacgctggctatcgtgttacccgcaaatctcgaagttcgccgtgaagccaagcgcgccaagttgctgcaatacgccgagcgggtttggcatataagccaaggggacgaagaacagcgcattgatgccgccatacaacagacccggacactcttcgagagtctgggcctaccgacgcgcctatcggcctaccagcttggcgctgacgtcatcgatgcgctgatcaaccagctcgccgctcaccgcctaaccgcactcggcgaacatgccgacgtcagcttagacgtcagccgcagggtgcttgaagccagcctctaa

SEQ ID NO: 331311 - DNA, 312 bp, Pseudomonas aeruginosa
atgtccggatcaggccggcaggttgaaacggtgaccgcagagcaggcagaggttgtgggccagtacatggcggtcgagcgactcgccgagctgagcgccaatcgcacaaccaccgaccccgccggccaggccgccgaggatggcgcccgatacggaaccgagggtgatgccgacagggccggcgaacgcgccgatagctgcgccagcctgaccaccggcgagggcagcgctgacgccccgtgcaacaccgcccacggtaccgatggcggctccgactttcatggcgtggtggaaagacgcgactttgggtga

SEQ ID NO: 331312 - DNA, 1851 bp, Pseudomonas aeruginosa
atgcaggtcgcgcgtattcacatcgagaattttcgcggcgttaaggacgcaactctcgatttcactaagcacgtggtacttctcggggataacaacacgggcaaaacaacggtgctggaggcgctcgatcttgtcctcggacccgaccggttgaacaggacaccgccgatcgacgagcacgacttctaccatggaagatacgtcgctaaaaccaagaagtctgtcccaggagatcagggcgagggcggaatgcaggagcctggcgccgaaaacgatgtagccggcgccctggaagacggcgctggcgcggaggcgccggccgaagatcaggcgctgcagattaaagttgacgtcacgatcattgatctgtctgaggaacagcgcaatcggttcggcgactacatcgaattctgggacagtaaggagaagaagctctatcaggaagcagtcccagagggcatcgatgcggacgtgatctctccagcgctgcgcatttccttcattggacagtacgactcggaagaggatgacttcgagggtaagacgttctacacgcagactctcgcagacgggggcaccccccaagccttttcgaagaaagataaacaggtctgcgggtttttgtatttgcgctccgtccgcacaggctcccgggccctgagccttgagcgtggaagcttgcttgatatcatcctgcgcctcaaggaggtgcgtcctcagatgtgggaggacgcgatcgggagaatctctgagttttcggtcgctgaagaccctaccctcggaatatccggagtccttcaaagcataaacaacgcattgaagaagtacgtgccgaaggaatggggcgtcgagccgcatctcaagatctcgaacctgacacgggagcatttgcgcaaggtgatcacggcgttcatcgcgaccggcgatggagctcacgctgccccgttctaccgacaggggaccggcacgatcaacatgttagtgctcgcaatgctttcgcagatcgccgaggacaagcagaacgtcatcttcgcgatggaggagcccgagactgccatccccccctacgctcagaagcgcatcatccatgaggtccgcaatctggcgtcgcaaacgctcttcacgtcgcactcgccctatgtgctggaagagttctccctcgacgaaaccgccatcctatcccgcgactccgtcggagtaataaagcaatcccgggtatcgcttccggaaagcgtcaagctcaagcgataccggcaggagttcaggactaggttctgtgaaggcttgctggctcggcgtgtccttgtggcagagggtgcgacagaagcttcggcatttccggtggcatgtcggcgccttgccgaacttgacccggccaagtacgcctctttggaagcgctcggtatttgtgttgtcgatgcaggcggagagggaagcatccctgatatggcgaggctgtatagggagatagggaaacggacatttgccctgtgtgacctgcaagacgccgcggcccaagcgcaaatccaggtccaggtcgagcacatgtacatgcacaacgagaagggcatcgagaacctcatcctgaaaaacacgccgcaggcggcgatggagaggttttgtgaccttctccaatggccggcagacctggcggcgaagtttccaaatcccaaggcggatgttgtcaacgcccttatggcgtacttcgcaaagaagaagggcgatttcggcatcgcagagtacgtcgcccaatgcagcgaggccgaaattccgcaatggatcagagaggcctgcatgcacctgaaggaactgagcatgttgccgcctgcgccggctgcagtagccaaatag

SEQ ID NO: 331313 - DNA, 1806 bp, Pseudomonas aeruginosa
atgaagctctctgagaagcaaaaggaagtcctcgtagccgaaggtcatctcctggtgatcggcggcccgggggcaggcaagacaactatctccattctcaaggcggccaagctagcggcaaccctgcagcctggtcaggaggtcctgtttcttagcttcgcgcgcgctacgattagccgcgtcattgaggccatcgagaatgaacatgacatcccgaaagccatcaagtcacggatcagagtcgagacctatcactcgttcttttggcgcatccttcagacccacggatatttactcggcctaccgaggccgctaacgatcctgactcctgccaacgaggcaatcgcgctatcggctgtccgaagtgagtacaaagccgaaggcaagctgagtgaggcggataaggccgaaaagaaggccaaagagcaagccgaacgacttcggcaggccaaggtcgaggggcgcgtgtgcttcgacctatttgcctgccatgtcgccgaacttctcgagcgaagcaagcggcttcgtgagctgattgctgctcgctaccccgtcatcatccttgatgagttccaagatacgaacgccgatcaatggcgagtcgtacaacagcttggctgcgaaggagtgttggtcgctctggcggatccggagcagcgtatctatgactggatcggtgccgacccggcccggcttgaccagttctgcgcaacgttcgagcacacggaaatcgtgctgcaaggcgagaaccatcgcagcgccggaacagagatccttctcttcggagatgaggtcttgacggggaggttttcgaagaagaagtacctcggcatcgagctcgaaacctatcccgcgaacgagaacgaagcctttaccgcgctgatcacccagacgtatgccgctcgcaaaaggctcgtcgactcaaagaagaaggactggtcgctcgctatcctcgttcctacgaagaaaatgacgcgagcagtctcgaatgtgtttaggcagccgcttgcgaagatgccaccgattcgtcactcagccgcggtcgacctcaatgcagccattctgggagctgagatcgtctcattcatgctgcagccgctgtgtctgttccacctcgatggggtgatcgacctcttgtgcaattacttccaggggaagggcggtgactctccggcgaaatccgacctgcagcaggcagcaagcattcgtaaggccttcgccctctacgcggagaagaaggctgccgataagccggtgcccaagaacagccttatggttccgctcttgcagacatacgaacaactgagagcaatccccttcacgggcgatccggatgaagactggcgcgctgtcaggaagaccatggagaacggtgcttgcctccgcttgagagaggttgccattgaagtcaagaacatccgtctgctggagcgcgggactcaattgcgccaggcgctttcggaggactggcggactttcgggcgatacgaaaacgcccttgacatcaccaggcaggcatttgtccgtgagcacttcgctactcagtcaaacccagaaaatggggttgtcgtcatgaacatgcataaggccaagggaaagcagttcgacgaggtgatcatctttgagggttggcctcgatgcgtgaagaagaagatcgtggcaaacccagatcggatcgtgagggcaaatctgagggaaaacattgacgatcaggccagacagaatcttcgagtcagcattacacgagggaagcagcggacgacgattctgaccccgcgtgaggatccttgtgtgattttcgtctaa

SEQ ID NO: 331314 - DNA, 1380 bp, Pseudomonas aeruginosa
atgacccgcgagcgccagtacatggcgcgcctgtcctggcaggcgacccacgatgcgttgaccgggctgaccaaccgccgcgagttcgagtatcgcctgcagatagcgctggaacgcctggagcgcaacagcgggcggcacgccctgatgttcctcgacctggaccagttcaagctggtcaacgacacctgcggccacgccgccggcgacgaactgctgcgccaggtctgtaccctgctgcaacaaggcttgcgcgagggcgacacgctggcgcggctgggcggcgacgagttcggcatcctgctggagaactgtccggcggaaaaagccgtggagatcgccgaccatctgcgcaagaccatccaggacctgcacttcacctggagcgggcagccgttcaactgcaccgtcagcgttggcctggtgcacctgctgccgggtatctcgaccctcgaggaggcgctgcgctccgccgatatggcctgctacatggccaaggaaaagggccgcaaccgggtccaggtgttccatcaggacgacgtcgaactatcgatgcgcttcggcgagatgacctgggtccagcgcatccacctggcgctggaggaagaccgcttcagcctctatgcccagcccatcgtgccgctgggcgaaggcgcggaggagggcttgcacgtcgaactgctgctgcgcctgcgcgacgagggcgggcgcctggtgccgccgctgagcttcatacccgccgccgagcgctacggcctgatgacgctgatcgatcgctgggtggtggagaatgccttccgcacccttgtcgagcgcgcccaggaccctcgcgccgagccgatcggcacctgcgccatcaacctctccggtgcgaccatcggcgacgagtcgttcctgcagttcctcaccgagctgttcgcccgttaccgcattccgccgcagacgatctgcttcgaggtcaccgaaaccgtggcggttgccaacctggccagcgccatccgcttcatcaacgagctcaaggacaccggttgtcgtttctccctggacgatttctgcgccggcatgtcgtccttcatctacctcaagcacctgccggtggattacctgaagatcgatggcagcttcgtcaaggacatgctcgaggatcccatcgatcgcgccatggtccaggtgatcaaccatatcggccacgtgatgggcaaacgcaccatcgccgagttcgtcgagaccgtcgaagtgatggaggcgctgcgcgagatcggcatcgactatgcccagggcctggccatcggcgcgcccctgccgttcagtcgccagcctccgggcgcagggctggatgcccagggcctgtggccgagcctcggacagaacctccggtag

SEQ ID NO: 331315 - DNA, 1302 bp, Pseudomonas aeruginosa; identical to SEQ ID NO: 328571

SEQ ID NO: 331316 - DNA, 1242 bp, Pseudomonas aeruginosa
gtgggtcgagcagtctccgcaggaagcggcatagaggccgagctagccaagcacaagggcgttgagatccacggcaacagcatccgcatcgtattcatgtggaagcgccgccgctgtcgcgaaaccctcggcctaccggttaccaaagccaacatcaagcacgccgcccagctccgggcggcagtgcttcatgccatcaagaccggcaccttcgactacgcccagcacttccccgagtcccgccaggccggtaactacagcagcagccgcgacgagcgcctgcacgtgctgctggcccgatacaagccgctcaaggccgtcgacatcaccgaggaaaccgagcgccgctatagcctggcgctcgacatctgcatcgagctgctgggcaaggatcgcctggccagcgtgttgctgcccgaggacatccagaacctgcgcgttacgctgatcgcaacccgaaccacgtcgacggtgaatcactacctggccgttctcgccggctttctgggctggagtgagtcgaacggctattgccggcctggcctggcgagcgcctgtacccgcttcgagatgaccgaccgcgaccccgacccgctcacgaaagccgagctggccgagctgctgaacaagggctgcctgcacccgatggatcgcgccgccgttaccctggccgtctacaccgggctgcgcccaggtgaactcggcgcgctggccagggaggacatcgacctgacgaaggggcagatccacgtcaaccgcgcgatcaccagcaaaggcgcgttcaagctgcccaagacaggcaagcgccgcaccgtgctgctgttcccgccggcactggaagcctgccgcgtactgctggccatcgaccacggcatcgagccgcagacgatcaccgtgcagctcaaccggcacgaatcgctgcaggagacggtgaccccgcttatctcccccgtcgtgcaagcacgcaagaagcacgtcaacccgtggttcatcccgtcgtcatggaacagcaagtgggcgaacctccagcgccgcgccaagatccgcccgcgccggccgtaccagacccgacacacctacgcctgctggtgtctggtcgcccgtggtaacctcgcgttcatcgccaagcagatggggcacaaggacttcaccatgcttgttcaggtgtacgccaagtggatggacgacgagtccccaaacgagctgcgacacatctggtcaggcatgcaaagcaccaactga

SEQ ID NO: 331317 - DNA, 156 bp, Pseudomonas aeruginosa
atgctcggatacagccgaacggccatcgagcacaaggtgaaaaacggcacctggtcacagggacgaatctggcgcaaggcacgagatggccgcatcttcatcaacattgaggaggtggacaagtgggtcgagcagtctccgcaggaagcggcatag

SEQ ID NO: 331318 - DNA, 846 bp, Pseudomonas aeruginosa
atgcttaggaagctttcagttgcagcactgttaatggcggcaatttcaggctgcgccagcggtggagggtcaccaaagaccaatgtatctgatcttaatgacccagcgacaacgccactagagaaatggtcggatgccttgcgctacctagatgctatgggtatctatggaatgagagatgttccgggtgagctatttgctaactcgccgggccaatctgccgaaggcggttccagatatggcgcacttgacactgcaagttttggacttagtgcagcttcgccacctaccggaatgagtggcggcgccgctcttggcattggctttgggctaatgcttcttagtggacctgtgcaacctgttcaggtcactcaaatcgctgcatgggttccgtctgacctggcctcttcacctgaagatgctgccagaattgttgaggaggaatataacaaagccagagagaaggtttttgttaagaaattacctcaagatataagcatgaccaagtaccctgccgcttctggccttgccttcgataagaaattccccaaaaaaagcaaccttgtcttgttctccgatcaagcaaaagaaagcccatggtttatcgacactccaaaatcatacggtccaatcttcattatcgaccataagctttcacatgaaatcacgctgaacactgaaggatttatgaaccttgaagggtggcgcactaaactcgctgagttttctgaagctctaccagaatggcttataatttatgacacagctaaatcatactctaaaaccaacaggttaccgcctgctgtttttaaggcgggcgaggcaagttactttataggaaaataa

SEQ ID NO: 331319 - DNA, 216 bp, Pseudomonas aeruginosa
atgcgcctgttcggcctgctgcatttgctgggtcaggcatcgttgcgcatggagcaagcgttgtggccggaagattacgagcggatgactcgtaaggtcaagggagtccagcgggaagctgaaggcgacaacgccaaatcgtacatttatgaagaagtcatgcagataaggcaggagcgcttcgataaagcacgacataatttgcaaggggtttga

SEQ ID NO: 331320 - DNA, 699 bp, Pseudomonas aeruginosa
atgtccgcctgccagtcccccatcatcgtcgccctggatttccccacacgtgaggccgccctggcgctggccgatcagctggacccgaaactgtgccgggtgaaggtcggcaaggaactcttcaccagttgtgccgcgggtatagtcgagaccttgcgtggcaagggcttcgaggtgttcctcgacctgaaattccacgacatcccgaacaccacggcgatggcggtgaaggccgccgccgagatgggcgtgtggatggtcaacgtgcactgctccggcggcctgcgcatgatggccgcctgccgcgagacgctggaggccttcagcgggcccaggccgttgctcatcggcgtgaccgtgttgaccagcatggagcgcgaggacctggcgggcatcggcctcgacatcgagccccaggagcaggtgttgcgcctcgccgccctggcgcagaaggccggaatggacggcctggtctgctcggcccaggaagcgccggcgctgaaggccgcccatccgggcctgcaactggtcacgccgggcatccgcccggccggcagcgcccaggacgaccagcggcgcatcctcaccccgcgccaggccctggacgccggctccgattacctggtgatcggccggccgatcagccaggccgccgacccggccaaggcgctggcggcgatcgtcgccgaactgggctga

SEQ ID NO: 331321 - DNA, 900 bp, Pseudomonas aeruginosa
ttgcagcgcttcaaccgcgagcccttcgcctacaccctgaaaccgccagcgaccggtgccgacggggtggacgatttcctgttcgacacgcgcagcggcttctgcgcgcattacgccggggcgatggctttcgtcctgcgcgccgcgggcattcctgcgcgagtggtggccggctaccagggcggcgagctgaatccggcgggcaactacctgctggtgcatcagttcgacgcccacgcctgggtcgaatactggcagccggagcagggctggctgagcgtcgacccgacctaccaggtggcgcccgaacggatcgaacaggggctggagcaggccctggccggggacagcgagtacctcgccgacgcaccgctgtcgccgttgcgctaccgtggcctgccctggctcaacgacatgcgtctggcctgggacagcctgaactatggctggcaacgctgggtcctggcctaccagggtgagcagcagggcgccttcctgcagcgctggttcggcgggctcgatccgacccgactgggtctgttgctcggtgccgcggcgatattgtcggtcggtctgctcgcgctgttcctgctcaagccctggcaaggccgtggcgatctgcgcagccgccaactgcgccgcttcgaacgcctgctggaaatgcatggcctgcgccgttcccccggcgaagggctacgctcctacggcgagcgcgccgcccgcgtcctgccggcgcaggcgccggccatcgcggccttcgtcggcgcgttcgaagcgcaacgctatggacacggcggtgccgatgatccagggttgcgtctgcgcgcattgcgccgggcgctgccctggcgcctggtgcgcgcgcccacgcgggatggccggggagaggagcaggcatga

SEQ ID NO: 331322 - DNA, 1578 bp, Pseudomonas aeruginosa
atgactgtgccgctgctcgatccgacaaagctgcgccggcaacgccagatcatggggctgttgctcggcctggtgctgctcatggcgctgatcgccggggctgcgctgtggctggcggtgcgccaggcccagcaactggcccagccgaacctgcacaacgagctgtggcagacctactcgctgcgcgccgaactggatcgcacgctggacgccgcgcggcacaccgagagcggcgaaggccaagccgacgacctggcgatccgtctcgaagtcctcgccagcctgatcgcgccgctgcgccgccagtcgttgttcaggcatctcgccgaaccgcgtccggaggtacaggccaccctgcaacgcctgatcgagctcagcgatcgctggtcgaaccaggccccctggggcgatcccgtcgccgcgcgccgcctggccgcggagatcgtccagcaggttccgcccttgctcgaaccgacccaccagatcgtcgtcgccagcaacatcgccctgaccaaccagttggacgtcgaccgcaagcgcctgcaccgggcgttctacgcgttgttctgggccctgctagggatcggtgccggcggtgccctgctggtgcttcgcctggtcaccgacttcaaacgcgcacagcaactggccgggcatctgatcgagcttaacgccaccctggagaaacgcgtcggcgagcgcacccgccagctcagcgaaggcaaggcgctgctgcatttcatcctcgaggccagcccgagcgacgtggtcctgctcagcgcctgcggcgccagcatccattacgtcagcccacgcctgctcaagcgcctgggttgccaggcccaggacgacttcaacctgccccggctgttcgccagcaccagcgaatacagccgcctgcagaacgccctggaggcgcgcggccaggtggatggctgggaagcccagctaagcggggaaacgccttgctgggcggtgatctgcgcgcgccacctggaaatcgacggcgagccggcgaccctgatctggtgctacgacatcagccggcgcaaggccatggagcaggaactgcgcctgctggccagcaccgataccctgaccggcctgcacaaccgccactcgttcctgcaccaggcggaactcatgctcaaggccgccgaacgcttccgccacccctgcgtggcgctgatgctggacatcgaccacttcaagaacatcaacgacagccacggccacctgaccggcgaccgcgccctgcaacgtgtcgccgagaccctgcgccagggcctgcgcgaggtggacctgctcggtcgcctgggcggcgaggaattcgccgcgctgcttccagaggtcagcctggaccaggcgctggacgtcgccgaacggctgcgcgccggcgtcgaggcgctacgggtgaacaatcccgacggcgaaccgctgcggatgaccgtgagcatcggcgtcgccctgcgcagggacgccggggacgacctggaaagcctgctggtgcgcgccgacagcgcgctctaccaggccaagagcggcgggcgcaaccgcaccgagtacgcgcccgcctga

SEQ ID NO: 331323 - DNA, 996 bp, Pseudomonas aeruginosa
atgcaacagaatgagaatttcgcaaagcaggccgagcaggcagaggcggagcggccggaggttgtggcgtacttcgaccgaaactatccaagcaccggcgatgccttcatctggtcgaactatgagggaagcccatacgagccagtgatgaccgtctcccagcacgagcgcatcgtcggggagctgcgggcggatcgcgattcgtgggcagagcaggcagagcagcgcctcgcggactgggatgaaatgcgtaaagagcgcgacgccgccctggccagggtcgcgaagctggagcacagccagtctttccagcgtgacatcgactatagcgtgctgagcgagtacgcctacaagcaccgcctgcacttcaacaacctttgcgccgtggttaggtcggcgctcattgccctgcccgcccaggctcagcacagcgggccggaagagttcagcttcgagtatcgccaccccaacggagagagccatacggtgacggtcagtcgggatcaagtgattaatgagatgcccgatttcctgttcgaggcgctgtgcagcaagttctgcaactgcgagccggcgggcgagacgaacgttgtcgagtgttgctgcgatgagtacgcggaggaattcaaactgctcgccgccgcgcccggcaaggaagtgcctcaagcctggatcgacgtgcaggcagagcgccgccggcagatcaccgccgagggctggacgccggagcacgacgacgagcacgccgatggacagatggcccaggcggccggctgctacgcgctccacgccggcggaatcggcacggactggccggacggtcgtcaaaatggcgctgcactgttctggccttgggacaaagattcgtggaagccgaccactccacgccgcgatctggtcaaggcctgcgccctggcgctggccgagatcgaacgtctcgaccgggcatgcatatcgcaaagtccccagccgggagccaccacggcctcttcctga

SEQ ID NO: 331324 - DNA, 1995 bp, Pseudomonas aeruginosa
gtgcccattcactggaagccgttcctggcaccctcgacgctggcgctcaagttcgccatcaagacgctcctggccggcggcctggcgttgtggtgcgcctttcgcttcgacctggagcagccgcaatgggcgctgatgaccgtgctgatcgtgtcccagccgttgtccggcatggtggtggcgaagggcttgttccgcctgctcggcaccctggtcggcaccgcgatgtcggtgttgatgatcgcgctgttcgcccaggcgccctggttgttcctgctggccatctcgctctggctggggctctgcacggcggcctcgacctccctgcgcaaccacgtttcctatgccttcgtactttccggctatacggtggcgatcattggcctgccggcggtggaccagccgctgctggtcttcgagcaggcggtggcgcgttgtaccgagatctgcctggggatcatctgcgcctcggcggtcagtgcgatcctctggccgcagcgggtcgagcagaacctcgacaagcaggcccacgccacctggctgctgggcatgcaggccgcgcgcggcgagatcgacccgcgccagcggcagccgcaggggctgctcaacgcgctaagcaagatcgtcgaggtcgatgcgcagcgcgaccatgcctggttcgaaggcgagcgcgggcggcgccgggccggcgccctggcgttgctctcgcgcgacctgctcagcctgttgcgcaccgcgcgcggcgtggcccggcaacgggcgcggctgagcgaagaggaagagcgccgggtggagcgctggctggccgcgctggccagcgccctggaaggaaccgatccggcgtcgatgcaggcgctgcgcgaggagttggcgcaggtcgcggtcgagccgcagtggagcaacgaccagcggtacctgctgacccgctgctcggtgctgctgctcaaggcggtgaatgccgagaagggcatgcgcgcggtggccagcggcgaggtcgaggggcgggtgggcagcgccggtaccctgtcctggcaccgcgacctgcagatggcgctgttctacggtgcgcgtagcgccctggcgttgctcgggctgtcggtctactggatctataccgcgtggccggcggcgtccggcgcgatgctgctggcggcggtggtgtgcagcctgttcgccaaccgcgacaacgcggtggccatcggcctgagcttcctgcgcggcatcgtctacgcgatcccggcggcgatgctggtcagccagtggctgctgccgcagtggaatggcttcccgctgctctgcctggcgatgggcgtgccgctgttcttcgccaccctgggcatggccgtaccggttaccgccggcaccgccacctcgttcgcgatccacttcatcgtcctggtcgcgccgcgcaaccagatggactacaacctcgcgaccctgctgaattccgcccagggcgtgctgatcggagtcggcttcgcggtggtgatcttccgcttgctgaccttgcgtccgggctggctgacccgacgcctgctggacgccacctgcgtcgatctcggccgcctcacccggcgcccgctggcgcaggcggagaactggttcggcgggcgcatggccgaccgcctgttgcgcctggcgcggcacgccaacctgttgccggagcaggagcggcggcgttgggacgatggcctcctggcgctcgacctgggtaacgaactgatccacctgcgggcctgcctggaaggcgcccgtggcgtcctgcgcaaggcgcgcgaccgcttcctcggggaactgggcgaactgcttgaggccggtcccgcgggtccgcgcagtgaccgcctggagcggatcagcctgccgttgcgcgaagccctggagcgtgacgctcgccacgacgacgaagccagccgcctggcgcgcgcggccctggcgcaactgctgttcacctggcagcagtggtgccatcaggaggaaagccatgagtctgcatga

SEQ ID NO: 331325 - DNA, 243 bp, Pseudomonas aeruginosa
atgaaggtaaaagatctgatcgctcaactctcgaggctggatccagagctgctcttggtaggatattcggaggatgaagacgtgcgcgaggcaggcgaacacattcggctttttgagataaccggcgtaaccgccgaacagtgcagccgcagccgcgatgagagcgggaaagcgaggattgagcttaccgggagcggcgcaggccacccggttgccctgctggaactgacgacagacatttga

SEQ ID NO: 331326 - DNA, 738 bp, Pseudomonas aeruginosa
gtgagccagacgtgcttccgctatcaggccaaggccagcgaggagaacgccctgatcgccgactggctggtccggctgaccacggcccatcgcgactggggctttggcctatgctatctgtacctgcgcaacgtgaaaggcttcggctggaaccacaagcgggtctatcggatctaccgcgagctggagttgaacctgcggatcaagccgaagaagcggctggtgcgggagaagcccgagccgctggcggtgccgaagacgatcaaccaggtctggtcgatggacttcatgcacgaccagttggccgatggccgcagcttccggctgttcaacgtgctcgatgacttcaaccgcgagggcctgggaatcgaagtcgacctgtcgctgccgtcggcccgggtgatccggtcgctggaacagatcatcgaatggcgcggcaagccgagcgtcatacgttgcgacaatggccccgaatacatcagcggcgtgctgctggcttgggccgagcagcaaggcatccgggtcgaacacatccagccgggcaagccacagcagaacgcttacatcgagcgctacaaccgaaccgtccgctatgcctggctggcccaaactctgttcaacacgatcgagcaggtacaggacaaggccacgcgttggctctggacttacaaccatgagcgtccgaacatggcgctcggcggcatcacgccggccatgaagctggcaatggccgcgtag

SEQ ID NO: 331327 - DNA, 267 bp, Pseudomonas aeruginosa
atgaagaagtcccgcttcaccgacagtcagatcatcgcggctctcaagcaggtcgaggccggtacccccgtgccggagctgtgcagggagcacggcatcagttccgccacgttctacaagtggcgcagcaagttcggcggcatggatgcgtcgctgatgtcccagctcaaggagctgcaggatgagaaccggcggctgaagaagatgtacgctgaggcccagctcagcgccgacctgttgaaggaggcgatgtcaaaaaaatggtga

SEQ ID NO: 331328 - DNA, 540 bp, Pseudomonas aeruginosa
ttgcttcagggtccgctgcacctgctcgtagcgctgcaactgggccccgcccatcagcacgctggcttcgtcggtacggttgtcacgggacagcgcgagcagggcggcgtgtccttcgaagtactcctgctggcgctggacgaactggtcgagcaacgcgcgctcctcgtccaggaccagcaaggggcggtattccctttccaccctggcgagggtagcgatgacctcgtccatccgttgttcctgctggcgcatgcgcgtggcgtcgtgcagcagcacgtggttcatctcgccgaggcgcagttcgctcatcaggccgctgagctgggccgaggcttcgacgctgggcagccagacctcgccgatatccttggcggcgcggttcagcgaacccatgcggttgtgcgcgaagaggccgagcgccaccagcagcgaggcgaggatggcgaagccgatgacggcgcgtggggtgatggcgatacgacgaagaagcatggggtggtctccgaccgggctgtgggaaggtgcttggtcctgtag

SEQ ID NO: 331329 - DNA, 213 bp, Pseudomonas aeruginosa
atgctgcgcatggccttcatcagttgcgccggctcgtcgtcgccgtcgctggcgatctcgccggtcaggtcgcgggccgcgatgcggtcggcgcaggacaccgcctggcggatcggcacgacgatgctgcgggtcagcagccaggcgatcgtcacgctggccgccagggccaccagcagcaccgcgaggatcgcggtggaggcccgggagtag

SEQ ID NO: 331330 - DNA, 2928 bp, Pseudomonas aeruginosa
ttgcagcacatccagattcgatgccgctgcttcgatcctgccgtcgagttcgctgatttcagcggtatggctcgccacctgctgcgccagcccgttggcggtttccagcgactggccgatatcggaccagtaggccgcgttcggcggcgccgtcttcgccggcacagccttcagtgcctggtacaaccgctgcccctgtcgcaccatgtcgttcttcgcgtagaccttggccgggtcgtacagcagaatgtcggcgaggtcgccgacctgcttctgcaagcccccgatatccacctgcatccgttcgatatcggagaagaactgctggcccagcgccgactcgacgtactcctgggtgatcaactggttgtattcgctggcgtcgctggagctggtgccggtgacccagttcgaccaggcgccgacgttgccgctacggtcgatcaagcgaccgcggaacgccagccgttcgccggccggtatcggcgataccaggtgggtattgcctgggtaggcgaacaggcccagcgcccgtgcggtctcctcgctgccgccgggagtggcggactgctggatctcggtgtaggcggtgtccgccgcgccgctggccgggaacccccactccaggccgatgcgccaggggccggccacgcagcgcaggtaggccagcgccggcggcggcgtggtcttgccctcgagagcggtttcctcactgctggcgtagaccgaaccgacctccatcacgttcaaggcgcgtacccgcaccagatagcgaccggcatagatgcccggcacgtcgaaaccgagcgccgaggttcgcggcacccgcacccagttgcccgagtccttgcgccattcggcctcgtaggccaccgcgttcggcgcggcatcccaggaggccgacaggctggtcaccgccaacccctggtcgaccttggtgaaagccttgatccgcacgttctgcggcggcgcctgcacgcccggcggaatgctggtgaccggcggcagctcgatgcgcgcaccgttgtcgatggcgtcgaacttgctcgcgttgtgttgcagcgcggtgatctcgaaaagattgtcctgcggccgggtgatgctcatgatgcggaagcgctgggtggtcaggctgttgctctgcagcgcccactgcccctggggccgaggcgtctccgaataggcggcggtcacgctcagcacgcggccgaccaccgactggacgctgcgcgcctcggccttgccgttcggcaggttgaccagcaggcgatcgccgggtcgagcctcgacgtcgcggtcgagggtcagcgcgcggccatccaccgcgctcaggcgtccgccgatctgcttgccggacttgaccgggtcggctacggcgatgatcttccccggcgccagcccacggccatccatgccggtgcggaaggtcaccgcgtcctgctccagctcctcggtcagcagcgcccactggccacgccgctgcgcctcgccctcggaggtgcagccgatcgcggtgatctccaactggctgatgccgtagcggcgctgcgcgcgatcattgttcaccgctaccggctggctctggtagccgttgcccggattgtcgtagttgaccagggccagggtgtggcgatcgcgctggcggctgctgctgtagttgaagtggctgccgtcgtcgccacgcacggtgttcgacggcgagaaggtgtaggcctcgtcctccggcatgtcggacaccgccaccatttccgcgccggaccagtaggacatgccgcggaagatcgctgccaggtcgcgcagcacggtccaggcttcggcgcgactctgcaggtacaggttgcagctgaagcgcggctcctggccgcccttgccgtcgggcaccgactggtcgcagtactgggcgatgcggtacagcgaccacttgtcgaccatgctcgcgtcgatccgccgaccgaggccgaagcgcttgtgcaacacgatgtcgtaccagtgccaggccgggttgctggtccaggccgacttgaacgagccgtcccaggtgccgctgtagctacgggtctgcggatcgtagttgctcggcacccgcacccgccggccgcgcgcttccaccgatatctgcggaatgctctggaactggctggcatcgaactcgacgaacagcagcgcggtgttcgggtagcgcagcttggcgtcgatcacctcggtgatcgcctcgacccgcatggtgtcggcgatgcggttgttgttctggttcggcgtcaggcggcgcacgcgcacctgccagccgctccgcgcctccggcaggtcgacacggtgggagcgctcgtagcggctggtggacttgtcgtccagcgaagccttcagcgcttcctgccaggcaccgccgtcgacggcgatgtcgatcgcgtagtcgatgtggtagccgaccacgtcaccgttttcctgctggcgctggatggccggccaggacaggcgcaggcgcaccgccgagagctgggtgttgctcaccgcgcggacccagggcgcgtcactcttgagctcgacgccgaccgccagttcgttttccacggcgggcacaccggcaatgtgttcctggtccaccgagcccggacggaactcccaggtcactccagggaagttcaccgagccgtccgccgccagcagcggcgtatcgtccaggtagatcgaacggccgtcgacgccaccgtcgaactcgccttcgcccagtgccaggagaatcttcgcccgcgcgatcgagcgcaccgagtccggcatctccaccggctggcgcggcttcttgctgccacccttgtggcccgtgatggtcttgttcatgacgttccttcaggcaaaaaaacgcccgcgcatggcgggcctgttacggcgttgccggctacagccggtcctcggcatagatgccggcgctga

SEQ ID NO: 331331 - DNA, 1179 bp, Pseudomonas aeruginosa
gtggcaagtacagatgtgctgatcgttggcgccggggcggccgggctgatgtgtgcgatgacggcggccggacgcgggcgccgcgtgcgggtgctcgaccacgccaacaaggccggcaagaagatcctcatgtccggcggcgggcgctgcaatttcaccaacctgtacaccgagccggccaacttcctttcgcgcaatccgcacttctgcaagtcggcgctggcccgctacacccagtgggacttcatcggcctggtggccaagcaccaggtgccgtaccacgagaagaaactcggccagctgttctgcgacaacaagtccagcgacatcctcgagatgctgctgcgcgaatgcgccgaggccggagcggaaatcctgctggacacctcgatcgaagagatcgcccgcgacgacgccggctaccacctgcgtaccagcgccggcgagatgcgctgcgagtcgctggtgatcgccagcggcggcctgtcgatcccgaccctcggcgccagcggtttcggctaccaggtggcgcgccagttcggccacgaggtgctgccgacccgcgccgggctggtgccgttcaccatcaccgaccagttgaaggagctgtgcgccgagctttccggcacctccgtggattgccgggtgagctgcaacggccaagtgttccgcgagaacctgctgttcacccatcgcggcctcagcggcccggcgatgttgcagatttcctcctactggcaaccgggcgataccctggaaatcgacctgctgccggaccacgacgccagcgaatggctggcgcagcaacagcgcgagcgtcccaacagcgagctgaagaccctgctcgccgagttgttcaccaagaagctcgccggactgctggccgaccgctggttcgtctccaagccgatgaaacagtacaccccgaccgaactggcgggtatcgccgggcagctttcggcctggcgggtcacgccctcgggcaccgagggctaccgcaccgcggaagtgaccctgggcggggtgagcaccgacgaagtgtcgtcgaagaccatggagtcgcagcgctcgccggggctgtatttcgtcggcgaagtactggacgtcagcggccacctcggcggcttcaacttccagtgggcctgggcctcgggttatgcggcggggcagtacgcctag

SEQ ID NO: 331332 - DNA, 381 bp, Pseudomonas aeruginosa
atggaaggcctgtgcgcacaccagggcgtcggcgaagccgttggccagcggaatcgactgggcgctaccggccagcgcctggacctgcggcaaggcttcggcaagctgggcgcgcatcgcatccaccggttccaccgcgaccactcgcgcgccggtacgggccagcaggcgggtgaacttgccggtgccagcgccgaggtccaccgcgacggtctgcggacgcaggccaagggcatcgcgcaaccagtcggagagcgcttccggatactcgggccggccctgggcgtaacgctgggcctcggcgctgaaaccttgctgggcggcgctgtgtacggacgacatgagggacctcctgggcggcagggaaagcccgaggtatag

SEQ ID NO: 331333 - DNA, 552 bp, Pseudomonas aeruginosa
ttgagggagcacggcgagccgttgcgcagccgcatcgaggcgctgtaccgcgaggagtcgcggcgcgtgctggcgaccctgatccgcctgctcggcgatttcgagctggccgaggaggccttgcacgacgccttcatcgccgccgtcgagcagtggccgcgcgacggtatcccgcgcaacccgcgcgcctggctggtttccgctgggcgcttcaaggccatcgacaacctgcgccggcgagcgcgcttcgacgcctcgcagcgactgctcgccgagcaactggaagagcaggccgaggcgccggcggaggagggcgatgcggtggaagacgaccggctacgcctgatcttcacctgctgccacccggcgctgacccccgaggcacaggtggcgctgaccctgcgcgaggtctgcgacctgcgcaccgaggagatcgcccgcgccttcctcgccgcgcccagcgccatcgcccaacgcatcgtgcgggccaagaacaagatccgcgaggcccggattccctaccaggtaccgaccctggaggaactcccctag

SEQ ID NO: 331334 - DNA, 489 bp, Pseudomonas aeruginosa
atgaagcgattcatcgaagaggtgagccgggcacaagtcagcttgcttcccgaaatcctcgcgtgcgagcaggcgggcattactcccttcgtgtccaagccgatgacctccagcagcaaagctgaagggcgtttcggtaaacaggacttcgtctacatagccgctgatgacgagtaccaatgtcctgctggccagcgtgcaatcaagcgtttctcgacggtggaagatggcctcgagctggatgcttactggagttctgcctgcccgagctgcccgatacgcagcagctgcaccacgagcagttatcgccgactcaaacgctggcggcatgaggcggtactggaggccatgcagcagcggctggatcgcgaaccagagatgatgagcgtgcgccgccagaccgtggagcacccgtttgggacgctcaaatattggatgggctcgacgcacttcctgaccagaacgctgcccgagtcagcacggaaatga

SEQ ID NO: 331335 - DNA, 714 bp, Pseudomonas aeruginosa
atgcccagtgggggtgaggcttccatctcgtgcatgacgcatcgggttacgacgttctatcggtacatgaatcgagagtcacactcgttgggacagaatatttttgacataaaagagttcgacctgaaacgcattttcctgatcccccaaaaagccgcctccctcctgaaacaacgtgctcgcaatctcaagcgagaccgccagataccccaccatgaagcccttgagatcgtggccaaaacggctggtttcgacagttggcgccaggtcgcagaggctactgagaagtgcagaccaattgaggatgcattccgcaggggctttcttctcgcctttgatggctcagaagtccctgacatagaaaacgatgaatccccaatccagtgggaggaatacgcgttcgaattactacgcaaccaactgttcgagaaatattgcgctcagcctgatgaagaggacccggctcaacgacctatatcgcagacgctcgatagcgacgacctcaaggagtactttgaacaggattggggccacatgtattttttcaggctgcgcagcgctggagaggtattgtccgtggttcagctattggagctggttgcaaagcattccttttggatgccgagactcgttttcgccaaaggggaactgatcgacacgtacgatctgccagcgactgacgagaacggcgaaatcgtaggattgcgcttctag

SEQ ID NO: 331336 - DNA, 3423 bp, Pseudomonas aeruginosa
gtgaatctaagggatatctttaatcgtctggcagggaagcctagctctaccaacgtcgaagcgaaaaactccagtgttgcaatcaacgggccaaacagtgctccggtgataatcaacgacgttgaaacgattactgaggcagttagtaagtcgaatgcggcccaatacgcagcattggcacaaggggtcgcaggagaactccagacggagtttgatcgtcaaattgatcactatcgtgagcaaatgaactcgggtgctgttaagcacgctctagagtcatttgaaaagcttctggttgatcaaaaagataatttaggcgatgttttgttgttccgggttaaggcgaatattgcactctgtcaatatcagctggggaatttcgcgaaggctccaacccttctgctcgaagcttgtacttatgcgccagaagacaagcgggcaattgcgttcaaggctctggcctttattctaaaggaagattttgatgcggctctggagtatggttacgataagatccgcgagtacccagataacgaaatcttagcgggctttattttacaagctgctcgtataaaatatcagaatgaaagcagttttgtagatccatttgagcagttcagcgaacgcctccgattgaatcagggtgttcgtattgcgcatatccacctgttggcgtcgcagcgagttgaaggttggagagagctggctcaagagtttcttagggaatacccagatgatgcgcaggtcaaaaacctgatcgccatgggcatcctccattactatgtggataatcgtcaaacgaccaatggctttacattcacccaagaagaggtgaatgaattgaagatggctgctgattatatatccgcagactggcaggaatttaaagaaagcgatagggttgcgcatgcaagcgacctccagaatattcaaaacctactgattctttacaaactaaccaataacgtagatgctctagttaaagagtgctcgtacgtgttggctgagctggcagatgatcagcaaattatcgaggcaactgctcagagtttaatcgatctccaagaggtagagttattcgagcaggctgtattaaaagtagctgacccggttaatgcaaagaagctccaatttctgaataaaatggctaggaaggattggcagagcctgagcaaggtccaagactatagctttgaaaagtacgatgagaaattttcaactcatgcccgagtggcggtgtacgtagcaagagcctttgtcggccaggctcgcggtaaagatcagctgtcagatcttctcactagctgcgaactggacagccgggggcggttgctcctgtttgaattgtctgcggcaagtaaaattctctcaatcgctaaaatggctcatgagtatggttatggccgtgtgacagaacgcactgaggatattgagttctttcactacatgaagcttgtacgcttccttatgctgtggcgagagattgtgacgcggcttgagccgcatcctgctgcaagtgaaaattatgagctgaaacacatgctcgcgttaggttttctcaatgagcacccgataagagcagaggccgtcgctttttttgaaaaacatatcaccccgaacccccgtgggttcgagcttctggctggcgccttttattacaagcgaaatgactttgcgcgcgccgtgcctctggttgaaaaatatctaagtgaaggtggagaggatttattcgcctttattgtcctgtgtgatattgcaaaattaagccatgatgcagttgcattaacaaagctttttgatacgtatgacatttatgctttggatggcactcctgagcagttcatgcatgtcgcgaggctgcgcgcgtcaatcggacaaggagagaaggccctagcagaggcctatcaattgtgggtcgaacatcctgactccgcaccagtggctctgggttttttcggcacttttatcatggtcgagaaggatgccattttaggtgccgtgacggttgtttgtaacggctgccactaccgccttgtgtcgtcagagggtaaggcaattgagaggacggttgaacccggcactgaggatcttctggagctatctccagaaaaggtagatttttacactcagcaggtatgggggaaggccgttggctacgaatttacccagcaaaagctgcaaggcgacattgtatggaggctcgaagaggtaaagcacccttatctccacgccttccacgatgtgtgccagacatacgaaacccgcttcccgacggcgggcggattgtggtctctacaggtagagaataacaatatcgactcgctgcttgctctcattcaacggcaaaatgactgggatgatgcgctattcggtcagattcttgagaagagcatgcctctcgaaattgcctcgggattgagcaagaagggcatttttgatgtatacgatcttgttcgatctagaagtgggatgatcagcacctgcataggtactaaagaagaacgacaaggcgcgatgcagttagtcgagagctatcaggggagacccgcagttctagatacttatacggcgaaggttgtggttgagcttggcatcctggatgctcttaaaaaatttttcggcagtgttatcgtttcgcaaaatacgttgcagacattgcagatgatgtctgtggataaagcggattttcttggcatcgcagggtctattcattccgatttggttcagactgtcactaagattcaagaagtttgtgaggttgttgagcataacttccctatgagtttggatgaattgacggacaagctggtcgaaacgaacgctgggtcaatttctccatatttcatagccaaggatcgaggggctctatttatttctgaagactcctactccagagggtttgctgctcacctttataaagtcacagacggagcatggcttcaggtcgttataaatgtgttggcgcagcgaggggtgatcccgcgagacttgtatgccagcgctgttctaggtgttgcggagcgtaagcaccaattcgtatctgtcggtccgatccttttggattacgtctatcagactgatacgagtgctgatctttctcagctctcaaccttgtgtggttttattggcgggcctagtgcagagctggagagtcactatcagttgattctccagttcatattggctcggtgggtgctcgactataatcccaggtatgatctggcggttgagaacatgctggcaatcagtcatggggatgcatttccgtctgctaaggcaatgaaagctacggcgatgctgctagaacggctgatcctgatacctggcggtaaaggaaaactgctggaactccgtgaccttcctgtgctgaggattagaaatttcatcattggatggtggcaaggacatttttacaaatggtga

SEQ ID NO: 331337 - DNA, 192 bp, Pseudomonas aeruginosa
atgagtttctccctggctgagaatcccgagttgatccttgggggcgcagttgtggtgtgcttggtgtttttcgtgacctttaaatttgtatggaagcgaaatgtgaacgtgaaagcagacaacggttctgctgcggttaacggggaaaattccggcaatatcacgattaatcatcggaacgagaagccgtag

SEQ ID NO: 331338 - DNA, 1482 bp, Pseudomonas aeruginosa
atgaagcgattcatcgaagaggtgagccggacacaagtcagcttgcttcccgaatgcctggacgacttcgtcgctgaagacaatccgatccgcgtggtcgaagccttcgtcgagcaactcgatttggtggccctggagttcgatggggtcactcctgccgcaaccgggcgaccgtcctatcaccctgctgtgctgctgaaggtctacatctacggctatctcaaccgcatccagtccagccgtcgcctggagcgcgaatgccagcgcaacctcgaactcatgtggctgaccgggcggcttgcaccggacttcaagaccattgccgacttccggcgtgacaacggtaaagccattcgcaatgtctgccggcagttcgtcgtgctgtgtcgccaactcgatttgttctcccagtcgctggtggccatcgatggcagcaagttcaaagcggtcaacaatcgtgatcgcaacttcactcacagcaagctgcgcgcccggatggagcagattgaaaagagcatcgaccgctatctggcagcgatggacaccgctgaccggacgcaatccgatgtcgctgaagccaagacctgccgcctccaggacaaaatcgagaagctccggcagcagatgcaagcgctcaaggagatggagcagcagctatgtgaagcgccggatggacaggtgtcattgaccgatccggatgcacgctccatggccaccagcggcaaaggcaccggcacggttggctacaacgtgcagactgcggtcgatacccggcaccatctgatcattgcccacgaagtcaccaacgtcggtcacgaccgcacggcgctggccacaatggccgagcaggcacgcgaagcgaccggatctgaatgcctcaccgtcgttgccgaccgtggctactacagcgggctggaaattctggcctgcgagcaggccggcatcacgcccttcatacccaagccgatgacctccagcagcaaggccgaagggcgcttcggcaaacaggacttcgtctacctcccggctgatgacgagtaccgctgtcccgctggccagcgtgcgatcaagcgtttctcgacggtggaggacggcctcgagttggatgcttactggagttctgcatgtccgcgctgcccgatacgcagcaactgcacaaccagcaattaccgccgactcaagcgctggcggcatgagacggtactggaggccatgcagcagcggctggaccgtcagccggagatgatgcacgtgcgccgccagaccgtggagcacccgttcggcacactcaagcactggatgggcgcgacgcacttcctgacaaaaaacctgcctcgggtgagcacggagatgagcctgcatgtgctcgcctacaacctcaaacggctgatgaacatctttggcatccgtggtgcggtagaggccctgtgcggacctgaggcaggccattttgactcgttactccgcctcaggatgccgtag

SEQ ID NO: 331339 - DNA, 1296 bp, Pseudomonas aeruginosa
atgaccggatcccggaaaaccctgattctcggatgcgcctccaccggcgccaagttcaccccgcgcaaccacgccgccaccggcgaccgcctgctcgacagcatctgcaccggcgccaccatccgcaccgcccccggcgaactgctggacgaagcgcgccagctctacgagatgggttgccgctactaccactatcacgcgcgcaacccgctgacccaggaacagaccaccgacaacgacatctaccaggcggtcagccgcgccctgcagaaccgcttccccgacctgatgttgagcttcggcgccagccgcaacggcagcgaggtgcaggagaacatccgccgcttcggcgagtgggagcgggtcagccactgcgccatcccgctgcacctgggcggtgcgcacttcgtgacgatccaggcggccatcgaattgcaggtgatctgcgagctggagaagcaaaggcgcaagctcgacctcgactatgcctccagcccggccttcctcgccgacctgcgcgactaccagccgtcgacggcgctggaaaaggccgagttgcagacccactccaccagcaagggcgccgactacggggtgacctcgccgatgacccagttccaggtctaccgcaacgccatccaggcgcgccagaagctcggcctgttccacgaggtggagtgggtgcagcacgtgcgcagctacgccatgacccgtttcgccgtggagcacccgcgcctgcgcctgggcggttccggccagttgaacgtgatcctgctgttcggcttctcgccacgcctgccgttcccggagacctaccagcagttccgcgcggtgatcgagagcgccaagagcctggagtacgatatcggcgaacccggcgtgcgcaagcgcaaggtcagcatcacggtcggcgcggcggtgatgccgcagcattccgcgcagcacttccggccgctcgacgtcggccctcgcgccggcaccccgctctgcgcggtgcgccggctggccgcctatgccgcgcaggcggacagccaggtcgacgtgctgcgggtcggcatggaggacacgccctatgcggtggacgatgacggccaggtgacgctcagcgacaactgccagttgctgcgccaggctctcgacgaactgcgcgccaacggcgccgaggccgagctcgacggcgaacggatcttccagcgcatgggcatggaacgcaccctcggcgaatacctgtcgctgcagcgcctgcatccgctcggcgaagccaacttcaccctcgcacgggagttcgtccagtga

SEQ ID NO: 331340 - DNA, 1248 bp, Pseudomonas aeruginosa
atgagcgcgctcttccccgccgcccccgacgccttcggtgccgacgaactgctgcgcctgcgccgcgagaccccggcctggggcagctacgcgcacttcgcccatggctccgccagcctgccgccgcaggtgctctacgacgccctcgacagctggctggaagccgagcggcgctggggcgtgcagcgcgccgccgagcatttcgccgagcccttgctggcggtccgcgacagcgtcgcgcgagtgctcggcacccagccacggcacatcgccctgctcgactgcgccagccgcgcctggtcggtggcctttgccgcggccctggccgcccatccacggatacgggcgatcagcagcttcgacgaatacggttccaacagcctgtgcctgctcgccgcgcgccagcagcgcgggctggagctgcgcctgatcgacgcacgcggcgacgccgcacagctgttgcaacggctcgacgagcagttgcacgacctcgcccccggccagacgccgctgctgtcgctcagcgcggtgcccaccgggcatggcgcggctaccgcgctggagggcgtggccgagcgcatccgcgcccatgacgggctgttcttcctcgatgccagccatgcggtcggccagttgccgctggcggtggaggcgatcggctgcgacgtgctggtgttcccgccacgcaagtggctgcgcgggccaaagggactcggcgtgctctatctcggcgaacgcgccctggagcgcctggccctgcccgacgggctggacgtcggcggcgcgcaatggagcgacgccttcgccttgcaggcacgggatgacgcgcggcgcttcgaatgctcggagttcaacccggggctgcgcctggcgctcaaggccagttgcgactacctgttgcagaccgacgtccagcgcatcgcccggcgcaaccgccagttgcgcgaacgcatcgcccagcagctctaccgccggctcggctggacgccgctggaacaagggccgcacgccagcgcgttgatgacctacgcggcccccgaactgagcggcgagcaatggctgaagcgcctccacgcgcgcggcgtgaacgcctcctacatcggcccgcagtatgcccgctgggcgctgcgcgagcaggcgctgccgggggtactgcgcctgactccgcactacctgaccgacgacagcgagatcgagcgcctcggcgaggccctggaggattgcctgcgacagcgcgccgccagttga

SEQ ID NO: 331341 - DNA, 819 bp, Pseudomonas aeruginosa
atgcccactgataccctcggactcgccgttgccaatcctgtcccgagcaagcgccgtctgcccggcgaccgtcggcgctgggccgccggtgccagcgtgctggccctggccctgctgtggtgggcggcgacccgtttcggctgggtcgacgtgctgttcctgccggcgcccgaacagctcttcgaagccctgcaacggctatggcaggagggctacctcgatgccagcctgctgcaacacgtcggcaccagcctgctgcgggtgctcctggcgctcggcgcggcggtgctgacggcgatcccgctgggcgtgctgatgggcctcaatcccttggccggagcggccctcgatccgctggtggagttctaccggccgatcccgccgttggcctacctgccgttgatcgtcatctggttcggcatcggcgagctgagcaaggtgctgctgatctacctggcgctgttcgcgccgctgctgatcgctaccgccgccggcgtgcgtcgcgtagaccgatcgcgggtgcaggcggtgcgctgcctgggggccagccgctggcaggtggtgcgctacgtgatcctgccgagtgccttgccggaggtcctcaccggcctgcgcatcgccctcggcgtcggctggtcgaccctggtcgccgccgagctgatcgcggccaaccgaggcctcggcttcatggtccagtccgccgcgcaattcctcgccaccgacgtggtggtggtcggcatcctgctgatcgccgccatcgccctggccttcgaactggggctgcgctgggtccagcggcgcttcgccgcctggggttga

SEQ ID NO: 331342 - DNA, 957 bp, Pseudomonas aeruginosa
atgcccacagaactatcgacccacggctggtcgctgcctgaacgccaggcgcgctgggccgaggccatcagcgatacctatttcgccctgagcctcgagttcgcccccgaacagcccttcggcggccacctacaacgctggagcactcccagcaccgccctcagcctgtcgcgcctgcgttccagccaactgggctattcccgcagcaaggcgcagatcgaccaggaccacgacgccttctacttggtgaccgtgccccgctgtgccgacgtgcacttcgagcaggacggccgcgagctgagttgcagccccggcgggttcatcatcgaacggggcgacgcgccctaccgattccactacggcgcggacaacgatctctgggtgctcaagctgccagagcgcgccctcaagggacatctgcgcggcccggagcgttacacccgctactgcttcgacgcgacccagggcttgggccgcatcttcgtcgaacaactggacctctgcgctcgccacttcgaaggctgcccgacggccgcccgccacctgctgctggaacaggccatgtccaccctgttgctggcactgcagcaggacgagcgggtgctcggcagcgaaggctccaacctcagcaccctgcacctgacgcgcgtcgagcagtacgtgcgacagaacctcggcgaccccgacctctcgcgccagtccatcgccagcgcctgcggcctgtccctgcgctacctccacaagctgttcgccagcaccccctactccctgggcgaatgggtacgccagcaacgtctggaggcggtccaccgccaactgcgcgaccctcgttgccaccagtccatcggcgaactggccttccgctggggcttcagcgaccaggcccagttcacccgtgccttccgtcagcaatttggttgtacggctcgcgaagttcgcggcacccgccctcactga

SEQ ID NO: 331343 - DNA, 2085 bp, Pseudomonas aeruginosa
atgcgtaaccaatatcgcctgggcatcgatgccggcggcaccttcaccgatttcatcctggccgaccgcgacggcggcgtgcagttgttcaaggccccctccacgccgcaagacggcaccctggccatccgcgccggcctcgcgcaaatcgccgacgccacgggccgcaccccggcggacatcattgccaactgcgacctgtgcatcaacggcaccaccgtggccctcaacgcgctgatcgagcgcactggcgtcaaggtcggcctgctctgcactgacggccacgaagacagcctggaaatccgcctcggccataaggaagaaggtcaccgctacgacgcgcactatccgccggcccacatgctggtgccgcgtcacctgcgtcgccccatcggcggccgcattctcggcgacggccgtgagcacagcccgctggacgagcgcgcggtgcgcgaagccatcgagtacttccgcgccgaaggcgtggaggccgtggccatctccttcgtctggtcggtacgcaatcccagccacgaaaagcgcgccgccgaactggtccgcgccgccctgccaggggtgttcgtctgcaccggggtcgacgtgttcccgcagatccgcgagtacacccgcacctccactaccgtggtcaacgcctacctgagcccggtgatggcccgctacgtcgagcgcatcgacatgctcttcgaggaacttggcgcccagcaacccgtgcgctacttccagtccaacggcggcctggcgccaggccatgtgatgcgcgaccgcgcggtgaacgccatcaactccggcccggcctcggcgccccaggccggactttccgtggcgcgccccttcggcatcgacaacgtcatcaccgtggacatgggcggtacctcgtttgacatcaccctgaccaacgccggccgcaccaacttcagcaaggacgtggacttcctccgtcagcgcatcggcgtgccaatgatccaggtggaaaccctcggcgccggcggcggctccatcgctcatctggatgagttcggcatgctccaggtcggtccccgcagcgccggcgccaagccgggcccggtgtgctatggcaagggtggcaccgaacccactgtcaccgacgccaacctggccttgggctacctgcccgacggcgccctgctgggcggcagtatccgcctcaaccgccaagcggcgttggacgccatccgcagccggatcgccgatcccctgggcatcagcgtcgagcgcgcggccttcggtatcaccaccctggtgaatctgaacatggtcaacggtatccgccgcgtctccatcgagcgcggccatgacccccgcgactttgccctgattggcgcgggcggtgcggccggaatgcacgtggtacgtctggcggaagagatcggcatgcagaccgtgctgatccccaaggtggcctcgggcctctgcgccttcggccagatcctctcggacgtgcgctacgaccagctcaccagcctgcccatgcgcctggacaccggccatgtggacctgccgcaactcaaccgcgccctgaccgaactgcgccagcaaggcctggtgaacctgcgggacgatggctttggtgacgaagccagcagttgccactacaccctggaaatgcgctacctcgggcagatccacgaatgcagcgtggaactggaacgccatcaactggacgaagcgagcctggcagagctgatcgagtccttccacagccgccatcgcaccctctactcctacgcggaaccggaaaacccggtggagctggtgaacctggagtgctcggtgatcggccacctgccacgtccgccgcagccggagttgcaaggtccgccccacccgccggcgcccgtaccggacagcctgcgcccgatgctcttcagcgccgatggcgactggcagtccaccgcagtgttcaacggcaaccgcctgctgccgggccagaccgtgcagggcccctgcgtgatcgaggaagacaccaccaatatcgtggtgcctccgggttggcaggcgaccctggagccgtcggctacctaccgggtgacgcgcggcgcttga

SEQ ID NO: 331344 - DNA, 1746 bp, Pseudomonas aeruginosa
atgaagacagttgatccgattaccctcgcggttgtccgaggtgcgctggaaaccgcgcaacgggagatgaccctgaccctggaaaagaccggccgctccagcgtattcaacctggcccacgactattccaactccctgttcgatcacctcccggagatgatcctccagggccaggacattcccatccacctgggttcgctgatccccgccatgaagtgcgtggccgaatttttcggcgacgacatcgccgaaggcgacgtgatctatcacaacgacccggcctacaagggcagccacatcctcgactgctgcatgtacaagccggtgttctacgagggcgagctggtgttctggaccgtctgcaagggccacctcaccgatgtcggcggcccggtgccggcgggttacaacccggacgccaaggagatctacgccgaaggcctgcgcatcccgccggtgaagctctgggagcagggcaagcgccgcgaggacgtgatcaatttcatgctcaccaacatgcgcgcccgcccctaccaggaaggcgacctcaacgcccagtacggcgcctgctccgtgggcgagcgccacctgttggagctgctggacaagtacggtgtggacgaagtgcgcgcctgcatcgccgagctgaagaacatggccgaccgccacatgcgcgcgctgctgcgggacgtgccggacggccactacagtggcaccgccgtgctggaggactccggccacgggctgggcgaactggccatcaccgcccatgtggaaatccgtggcgacgaggcccatatccgcatcgagagcccaccccaggtgccctatttcatcaactcctacgagggcaactcggtctccggggtgtacctcgggctgatgatgttcgcccaggtggcgccgccctataacgaagggctgtaccgttgcgtgacggtggacgttggcccccgcgggacgctctgcaacgccgaggaaccggcgccccacgtcaactgcaccaccacccccatggaaaccctggccgacgccgtgcgccaggccctggaacaagcctcgcccaaccgcgtcaccgcgtcctggggccacgccagtggcatcaacatcgccggccacgacccgcgcaatggcggcagcgagtacgtcaccatggtgctcgcctcgatcatcgccggggccggcgccaacaaagtaatggacggctggcacgcctgcgggccgctgagctgcttcggcgccctgatgagcggtgacatcgaactgctggaacacgcctaccccgtgctgattcaccgctacagcctgatggccgacagcggtggcgccggtgaattccgcggtggctcgggcactcgcctggagatcgaacccctggagcatgcgatgaccgtggtcggcttcggtgaaggccgccaattgccgaccgccggagctgccggcgcccgcaacgccctgctggcccccaagctcggccgcctgatccaccgccatgccgacggcgaggaagaccactacatccagaacccgatgctcaccgtgcagccgggcgagcggatcatcaacgtcaaccccggtggcggcggctacggcgaccccttgcgccgtccagtggcggcggtgctgcaagacgtacgcaacggactggtttcgcctcaaggcgcggcactggaatacggcgtgatcctcgacgccgacggccacctcgacgaaaccgccacccgcgccgcccgcgcccagttctga

SEQ ID NO: 331345 - DNA, 1176 bp, Pseudomonas aeruginosa
atgcacctgcaacgcactcggcttacctcgattttcaccatcctgctcgctaccggcctggcccagcctgccgccgccgtaccgatcaccgacaacctcgacctcggcggcgcgctgcgcggtcggttggactacgatcccgaccgggacatctccaagttcagcttcgacaccttcttcctcaccgccgactaccggtcggacacctggatcgccgccgccaagtaccgcttctacggcgacgcctacccctacgagtacaccgacgacgtgggcgacatcgcctttgccgagtacgcctgggtcggctaccgcttcacccccgagcagcaactgcaggtgggccagactgccgtgcccttcggcctcgcgccgtatttcggcagcaccttcttcgagactctgggcaacgtgatcggcctggaggacacccagagcatcggcttcaagtacctcgccagacgcggcgagtgggacctgcaagccgcgtactaccccattcccgccgagcagggccggggcaccagccgcggcggacgcacctacggcaccagcgtcgccacggcggacgactacgtggtggacggcagcgacaaccatgaacaggacatgctcgtcggccgcctcgcccatcactacgacgcgggggactggagcggggagctgggtgcgtcgctgttggcttcctccctggagaaccaggacaccgatcgcgacggccggcgcctcgccgccgccctccatgtcaccgcccagaacggcccctggggtgttcagctccaggcggcacggcaacggatgactccggaaaaccccggcgacgatcgcctggtgagcttcggcgctttcgacggcaccttcaacgtcgcggccaaaggcaacctctacgtggcggacctgagctacagcgtatcgggccgttacggctggttctcaggcatcaagctctatggcaactacagcctgttcgacaaggacgagcgagagttccgcgactcccagcgcttcatcgccggcacctccttcaccctcgggccactgtggatcgccctggagtggttgcacggcaagaacgacccctacatcggtggcggcagctacacccagagcctgggcgcgggcggtaccgatcactgggaaaaccagctctacagcaacattggttactacttctga

SEQ ID NO: 331346 - DNA, 1329 bp, Pseudomonas aeruginosa
atggctggaacactttcgaacgatccttcatcccccggacaatccgtgccggaggcccagcgcctcggtcgcggctccctcaccatggcctggtggggcatctgcagcgcgatgttctacctggtggtggccgccgccctggccatgggttacggcacctggaacgcactgatcggcctggtgttgtcggtggtcagttacggcgccatcaacgccgtgctgtcccgtcacgccatcgctagcggactgtcggtggcgcagttttcccaggtgctgttcggacgcagcggcgcggccctggccacgctgatcttcagcgccacagccatttactacggcgtgttcgaaggctcggtgatggcggtcgccctgcatcactacctgccctccgtttcgctgcccctggccttcctgctggtggtgacctacagcattctgctgatcttcggtaacgccatgcgctggctggacaagctcaacggtctactgctgcccttctacctgctgggcctggccgcggcggtggtcatggccatcgatgagtacggctactcctccgcctggctggaactggctccggctggcggcccggtgcccaacggctggtggaactgcttcacctatttcatgggcatctgggtgctgatgatgttcacctgggactacgcccgctacggcaagcaggaggacagctgctaccacgcgcggatcaacttcggcatgcccttctacgctgtcgccttcctgctcaatggcctggtgggaatcttccttgccgccaccattcccaccgagggcgggctgtcggaagtctcagtagtgctggccatcgtgcaactgatggggttgtccgggctgctcttcgtgtggatcagccaaacccgcatcaataccggcaacttctacctcgccgtcaccaacctccaggccttctccggccatctgggactgggccgcgtgccctacgcggcctgggccgtggcgaccggggtgctggcctacctgctgatgcgcttcgacgtcttcagctatctcctccaggccctgtcctatcaaagcctgttcatcgtcggctgggtggccatcgctctcgcccacctgctggcgacccgaggcccacgctacggccagggcgagttgccggccttccgcgcccgaggcctgctggcgtggctcgtctcggccctggcaggcatcggcctgcacctctccgatgacagcaccctggccaccgcctctgcgcctgctgccttcgtcatcgccttcctcggctacctggccgtccccgtgctgatgcgtcgcaaccatccccagagcgacctcggctga

SEQ ID NO: 331347 - DNA, 690 bp, Pseudomonas aeruginosa
ttggaagcactcgcccctcgccagaactcggcattcagtgggtacgagcgactcaagcaggacatcatccgtggcgtgttcaaacccggtgagaagctgctgatgagtaccctgaaggatcgctacgatctgggcgtgggccctctgcgggaagccctttcgcaactggtggcggagaagctggtggtcgccatcagccagaagggctaccgcgtggcgcccatgtctctggaagagctgaaggacatctacgacgcccgcgccaacctggaagcgatgatcgtcagcctggccatcgagcgcggcgacgatgcctgggaagcccaggtcctggcccactctcacaccctggccaaggtgatggaagtgaagacccgcgaacagcgcctggatatctgggaccagcgtcataaggcctttcacaccgccatcgctgccgggtgcggctccaagcacctgcttcaggcccgcacctacctgttcgatcaggcggaacgctaccgccacctctggctgacccagacggtgttctccgaagaggccctggagcgcaagcggcaggagcacgccgccctggtggacgccatcctcgcccgcaacgccgcccgcgccagcgaaatgatgcgcaaccacctgatgacccccgtgccgatcatcgccgatatcatgcaggccgacgccgggcactga

SEQ ID NO: 331348 - DNA, 978 bp, Pseudomonas aeruginosa
atgaacgcctttaagaagatcgagaaccttgtgatgccgttgccgctggagacccgtgggttcaccgtcgaaccgtcccagcagtcgccgcgcctgctcgagatcaccttcgcccgggaaaccgtcgaagccttcgtcaagaccgtgagcgagtggccggtgcaggctctggagtacaaatccttcctgcggtttcgctttggccagattctcgacgacctctgcgaaggcaccctgcgcccggtgctgctgaacaccatccttgaccgtggcaccggcggcatgctgatcaccccgatggggctggatgacgtgagccaggccgaggacatggtgaaattcaccaccgcctgcgcccacctgattggccgctccaactacgacgccatgagtggccagttctacgcccgcttcgtggtggtcaataccgacaactccgacagctacctgcgtcagccccaccgcgtaatggagctgcacaacgacggcaccttcgtgaaccagatcaccgactacgtgctgatgctgaagatcgacgagaagaacatggagggtggcaactccctgatcctgcacctggacgattgggagcagtgcgacgccttcttcagccaccccctggcccgccgtgaaatgcgctggaccgcgccgccgagcaagaaggtcaccgaggacgtgttccacccggtgttcgacaccgatgccgtgggccgtccgaccatgcgctacatcgaccagttcgtgcagccggaaaacttcgaggaaggcatttggctgaacgccctgtccgagtccctggagggcagtgagaagaaactctccgtgccggtgccggtgggcagcttcctcttgatcaacaacctgttctggctccacggccgcgaccgcttcatcccccacgagggcctgcgtcgcgaactgatgcgccagcgtggcttcatcagctacgagaaaccacgttacctgcgtggtcaataa

SEQ ID NO: 331349 - DNA, 1251 bp, Pseudomonas aeruginosa
gtgtacgatttcatcatcatcggcggcggcatcgtgggtatgtccacggccatgcaactgatgcaggtttacccagatgcaaaggtcctgctgctggagaaagagtccggcccggcccgtcaccagaccggccacaacagcggcgtgatccacgccggcgtctattacacccccggcagcctcaaggcgcgtttctgcctggaaggcaacaaggccaccaaggccttctgcaccaggcacggcatccgcttcgatgagtgcggcaagctgctggtggccaccagcgagctggaaatggagcgcatgaaggcgctctgggagcgcaccgccgccaacggcctggagcgccactggctgtccgcagccgagttgcgtgagcgtgagccgaacatcgtcggcatgggcggcatcttcgtgccctccagcggtatcgtcagctatgccgaagtcaccgccgccatgggccgagagttccaggctgccggtggtgaaatccgctacagcgccgaagttatcggcctcgacgagcgtgccgatgaggttatcgtccgcacccgtggcgacgagctccacggccgctacctcatcacctgctcgggcctcatggccgaccgcgtggtgcgcatgctcggcatcgagccgaacttcatcatctgccccttccggggcgagtactacctgctgcccaagcaacacaaccagatcgtcaaccacctcatctacccgatcccggacccgtccatgcccttcctcggggtacacctgacccggatgatcgacggcaccgtcaccgttggtcccaacgccgtgctggcgaccaagcgcgagggctaccgcaagtccgacatctccctctcggacctcttcgagaccctgacgtcccccggcatcctcaaggtgctggcgaagaacctgcgtcccggcctgatcgaaatgaagaactccctgttcaagggcggttacctcaaggaagtgcagaagtattgccccagcatcaccaaggctgacctcaccgagtacccggccggcgtgcgtgcccaggcggtttctcgcgacggcaagctcatcgacgacttcctcttcgtcaacaccccgcgcagcgtgaacgtgtgcaacgcgccgtctcccgccgccacctccgcgattcccatcggcgcccacatcgtcgacaaggtccgcgagcagatcgccgcgaccggcggaaaattcagcatcaaagccaccgacaacgagcagcgggccgccggctga

SEQ ID NO: 331350 - DNA, 1449 bp, Pseudomonas aeruginosa
gtgcaactgaaagactccagcctgttccgccagcaggcctatgtagacggtgcctgggtcgatgccgacaacggccagaccctcaaggtgaacaaccccgccaccggcgagctgatcggcagcgtgccgaaaatgggcgtcgccgaaacccgccgcgccattgaggccgccgagcgcgcactgccggcctggcatgcgctcaccgccaaagaccgcgccaaccgcctgcgccgctggttcgagctgatgatgcagaaccaggaagacctggcccgcctgatgaccctggagcagggcaaacccctggtggaatcccgcggcgaaatcgcctacgcggcctccttcctcgaatggttcggcgaagaagccaagcgcgtctatggcgacatgatccccggccaccaggccgacaagcgcctgatggtgatcaagcagcccatcggcgtcaccgcggccattaccccgtggaacttcccttccgcgatgatcacccgcaaggccggaccggccctggccgccggctgcaccatggtgctcaagcccgcctcccagaccccgtactccgccctggccctggccgagctggccgaacgcgccggcattcccaagggcgtgctcagcgtggtcaccggctccgctggcgaagtgggcggcgaactgaccagcaaccccatcgtgcgcaagctgaccttcaccggctccaccgaaattggccgccaactgatggccgagtgcgccaaggacatcaaaaaagtgtccctggagctgggcggcaacgcgcccttcatcgtcttcgatgatgcggacctggacgcggccgtggaaggtgcgctcatctccaagtaccgcaacaacggccagacctgcgtctgcgccaaccgcctgtacgtgcaggacggcgtgtacgacgccttcgtcgacaagctcaccgccgccgtggccaagctgaaaatcggcaacggcctggaggatggcatcaccaccggcccgctgatcgacgccaaggcggtggccaaggtacaggagcacattgaagacgccgtctccaagggcgcccgcgtcgtttccggcggcaagccccatgccctgggcggcaccttcttcgagcctaccgtgctggtagacgtgccgaaaaacgctgccgtggccaaggaagagaccttcggccctctggcgccgctgttccgcttcaaggacgaagacgaggtcatcgccttctccaacgacaccgaatacggcctcgccgcctacttctatgcccgcgacctgggccgcgtattccgcgtggccgagtccctggagtacggcatcgtcggcatcaacaccgggatcatctccaacgaagtggcgcccttcggcggcgtcaaggcatcgggcctgggccgtgaaggctccaagtacggcatcgatgactacctggagatcaaatacctctgcatcggcgtgtaa

SEQ ID NO: 331351 - DNA, 1278 bp, Pseudomonas aeruginosa
atgaacaccaaccagagcctgcaacaacgccgtatggccgccatcccccgtggcgtcggccagatccaccagatctatgccgagcgtgccgagaacgccaccgtctgggacgtggaaggccgtgaatacctggacttcgccggcggtatcgccgtgctcaacaccggccacctgcacccgaagatcatggcggcagtccaggagcaactggccaagctgacccacacctgcttccacgtcttcggctacgagccctacgtggccctggcggaaaagctcaaccaacgggtgccgggcgatttcgagaagaaaaccctgctggtgaccaccggcgccgaagccgtcgagaacgccatcaagatcgcccgcgctgccaccggccgcgctggtgtaatcgccttcaccggcgcctaccacggccgcacccactacaccctgtccctgactggcaaggtagtgccgtactccgccggcatgggcctgatgccgggcggcatctaccgcgcccagtacccgaacccggtgcatggcgtgtccagtgatgacgccatcgccagcatcgaacgcatcttcaagaacgacgccgctcccagcgacatcgccgccatcatcctcgagcccgtacagggcgaaggcggcttcaatgtcgcgccgaaagacttcatggcccgcctgcgcgccctgtgcgaccagcacggcatcgtcctcatcgccgacgaagtgcaaaccggcgctggccgcaccggcaccttcttcgccatggagcagatgggcgtcgccgccgacctgaccaccttcgccaaatccatcgccggtggcttccccctggcgggcgtggctggccgcgccgagttgatggacgccgtggccccgggcggcctgggcggcacctatgccggcagccccatctcctgcgctgctgccctggcggtgatcgaagccttcgagagcgagaaactgctggatcgcgccaagtctgtgggtgaaatccttactgccggcctgcgcaagatcggcgagcgccacaacagcctggtggatgtgcgcaacctcggcgccatggtcgccgtggaactgttcgaaggcggcgacaccgccaagcctgccgccgagctgaccggaaaagtcgtcgccaaggcccgggaaaaaggcctgatcctgctgtcttgtggcacccactacaacgtcctgcgcatcctcgtgccgctgaccgtcagcgatgcggacctggagcgtggtttggctctgatcggcgagtgcttcgacgagctcgcctga

SEQ ID NO: 331352 - DNA, 1398 bp, Pseudomonas aeruginosa
atgcaagcagataagaacaacctgagtcatgggttgaagtcccgccacgtgaccatgctttccattgccggcgtgatcggcgccggcctcttcgtcggctctggccgcgccatcgccgaagccggcccggccaccatcctggcctacatcttcgccggcgtgctggtggtgctggtgatgcgcatgctggccgaaatggccgtcgcctctccggacaccggctccttctccacctacgccgaccaggccattggcaaatgggccggctacaccatcggttggctctactggtggttctgggtgctcatcatccccatcgaagccaacatcgccgccaccatcatcaacacctacgtgccgcagatggagatctgggtgctctccctggtgatcaccctgctgctcaccgccaccaacctgctcagcgtgaagaactacggcgagttcgagttctggctggccctggtcaaggtggccgccatcgtcggcttcatcatccttggcgcctgcgccatcctcggcctgctgcccagcaccggtgtcagcggcgtctcgcgcctgtgggacaacggcggtttcatgcccaacggcttcggcgccgtgctcagcgccatgctgatcaccatgttttccttcctcggcgccgaggtggtcaccatcgccgccgccgagtccgacgccgccggcaagcagatttccaaggccaccaactcggtgatctggcggatcaccctgttctacatcctgtcaatattcatcgtcgtcgccctggtgccctggaccgacccgcgcctggccactgaaggctcctacgtcaccgtgctggacaccctcggcgtgccccacgccaaggccatcattgacttcgtggtactcacctcggtcaccagctgcctcaactcctccctctacaccgcctcgcgcatgctctattccctgagccgccgtggcgacgccccggcctgcgcccaggtgaccacccgcagcggcacccccatctacgccgtactgctgtccaccggcgccgccttcctcaccgtaatcgccaactacctggtgccctccaaggtgttcggcttcctgatggccagctctggcgccatcgccctgctggtgtacctggtcatcgcggtttcccaactgcgcctgcgcaaacgcctgatggccgaaggcaaggccctgagttaccgcatgtggctgttcccctggctcacctggggcgtgatcctgttcatcagcagcgtgctggtgctcatgctgtttcgcccggaccaccgcgtcgaggtcgtgtccaccatggtgctggccacgttagtggtctgctccggcctgctcatcacccgccgtcgctcgcgggaagtgcagggtggggcggcgttgcgcagcgcccagggctga

SEQ ID NO: 331353 - DNA, 915 bp, Pseudomonas aeruginosa
gtggattcgggtacgccggagctacgggagcacttcggctccggcaatgccgccaccgagcggcagacgccgtttcccatgatgcgcctggtggctttgatgaatgtgcgctcccacctgattctggatgcccaactgagcccctaccggcgtagcgaaatgcgtctggccgatgcctttcttcagcaaattcccgaccactcgatctcgctgttcgacaagggcttctggagtgccgatctgctgctgaccctggcccttcacggcgagcagcgccactggttgatcccggcccgcaaaggccctgtcagcgaagaggtgatccgttatggcaagcaggatcgcttgctgcgcatgaaagtttcgccgcaggcgcgaaattgtaacccggtgctaccgggctactgggaggcgcgtgaagtcggctacgaacggcagggcaaagtcaataccgtcctgacctcgctgccggccgatcgccacagtgccaaggccgttgccgagctgtaccaggagcgttgggagatcgagctgggcttccgagatatcaagagccccatgcagcagaatgcagtgaccctgcgcagcaagaagaccgacttgatctaccaggaagtctggggactgctcctggcctacaacatcatccgccgcgaggcgagtcaggcggccgtggcctttggtcgctcgcgatccgagagacgcttcaagccggcctgccaatacatcaccgtgcaactgatcgtcatggcagcggccaacccgatctcggcaaccggcagacgcttgtcggaactgagcgcgggagttggagggctggtcctcgatcaccacccaaggcccacaaggccaagggcggtgaagatttcaaaaacccgctatccggtgaaccgtaatgctgctccgcttaagtga

SEQ ID NO: 331354 - DNA, 3033 bp, Pseudomonas aeruginosa
atgagcatcgagacccagccctaccgctacgaggccattgccctgtccaacgagagcacggtggttgccgagtttgtgcccgagggggtcaaggaaaccggctaccagagcgaggcggcgctggagcaggcccttattgagcaattgcagcggcaggcctacgagtacctgccgatcagctcggaggccgagctggttgccaacctgcgggcccggctggagcagctcaacaaaatcgagttttccgacgccgagtggcagaagtttttcactacgagcattgcgggcgccaatgacggcattctggaaaaaaccgcgcgcctgcaggaagaccacgtccaggtcctgaagcgcgacgatggcagtagcaagaacatctacctgatcgacaaggccaatatccacaacaacgtcttgcaggtgatcaaccagtacgaaacgcccaccggcgagcagggcggcaagcacgccacacgctttgatgtgacggtgctggtcaacggcctgccgatggtgcatatcgagctcaagcgccgtggcgtggacatccgcgaagccttcaaccagatcaaccgttaccagcgcgacagcttctgggcgggctgcggtttgttcgagtacgtgcagctgttcgtgatcagcaatggtacgctgaccaagtactacagcaacaccgtgcgcgatgggcacttgaaggagcaatccggcaagcgcagcaaaagcaaaacttccaacagcttttccttcaccagttggtgggccgacgcgcgcaaccagcccatcaccgagttggtgggctttaccaagaccttctttgccaagcattcgctgctgaacgtgctgaccaagtactgcgtgttcgatgtggatcgcaagctgctggtgatgcgcccttaccagatcgttgccgccgagcgcatcctgcagcgcattgccacctcaaccaatcaccgccagttgggcaccgtggctgcgggtggctacatctggcacaccacgggctcgggcaagacgctgaccagcttcaaggccgcccagctcgcccgtggcctgccggacatcgacaaggtgctgtttgtggtggatcgcaaggatctggactaccagaccatgcgcgaatacgagcgcttcgagaaaggcgcggccaactccaatacctcgacttcggtgctgcagaagcaactggaagacccgaacgcgcggatcatcatcaccaccattcagaagctctcgcgcttcgtggccaagaacaagaagcacccggtgtacgacgcgcatgtggtggtgattttcgacgagtgccaccgcagccagttcggtgacatgcacggtgaaatcacccgcgtgttcaagcgctaccatctgttcggtttcaccggcacgccgattttcgcgaagaactcgggaagcggcggcaacccgttgcgccgtaccaccgagcaggcctttggcgacaagctgcacacctacaccatcgtcgatgcgatcaacgacaagaacgtgctgccgtttcgcatcgactacatcaataccctcaagatgcaggcgcggatcaaggacaagcaggtctcggccatcgacacggagcgcgccctgttggcgccggagcgcatcagccagatcgtcggctatatccgcgagcatttcgatcagaagaccaagcgcgccagcacctaccgccatgacggcaagcgaatggctggcttcaactcgctatttgcctgtgcctcaattgatgcggccaagcgttactacgccgaatttgccgcgcagcagcaggcactgcccgaggcccagcggctcaaggttgggctgatctacagctttgccgccaacgaggacgacgaagacggcctgcttggcgaggaggagttcgaggccgaggggctggatcaaagctcgcgggattttctggatgccgcgatcaaggattacaacgcgctgttcagtaccagcttcgacacctcggcggacaagttccagaactactacaaggatctgtcgcagcgcctgaagaagcgtgagctggatctggtcatcgtggtcaacatgttcctgaccggcttcgacgccaccacactgaacacgctgtgggtggacaagaacctcaaggcgcatggcctgatccaggcctattcgcgcaccaaccgcatcctcaattcggtgaagacctacggcaacatcgtctccttccgcaatctggagcaggaaaccaacgatgcgctggccctgttcggcaacaaggacgccaagggcatcgtgctgctgaagccttacgccgagtatttcgccgaatatcaggcgcgcgtcggcgagctgctcgacaaattcccactggggcaggctatcgtcggcgaagcggcgcagaaagccttcatcaagctgtttggctcgatcctgcggctgaaaaatatcctgacggccttcgacgattttgccgggcacgagattctcagtgagcgccagttccaggattaccagagcatttatctcaacctgtatgccgagttccgggcgacatcggcggcggagaaggagtcgatcaacgacgacgtggtcttcgagatcgagctcatcaagcaggtggaaatcaacgtcgactacatcctgctgctggtcgagcagtacctgaagaaaaaaggcacgggagaggacaaggaaatccgcgccaccatcgagcgcgccatcaatgccagccccagcctgcgcaacaagaaggatctcatcgttcagttcgtggagtcggtgaacaccagggccaaggtggacgcgcagtggcagagcttcatggcggccaagaagaccgaggagctggagcgcatcatcaccgaggaaaacctcaacgccgaggctgcgcgtgagttcgttgaacaggcgttccgtgatggctcaatccccacggccggcacggctatcaccaagattctgccgccggtatcgcggttctcgcagggcaacgggcatgcggtcaagaagcagacagtgctgggcaagctggcgttgttcttcgagcgctatttcgggttggtttga

SEQ ID NO: 331355 - DNA, 1242 bp, Pseudomonas aeruginosa
atgagccggatcgatgcgctgattgctgagctttgcccggaggggatggagttcaaggccctcgaagagttgggtgtaacctacggtgggctcaccggaaaaactaaggctgacttcagcgacggtaatgcccgatttgtttcctacaagaacatcttcaataacctcgcggtcaatcttgagcccgatgactttgtcagagtcggtcctgacgagagccagaactctcttgagattggtgatgtgcttttcacgggttcatcggagacacctgatgaagtaggaatgtcagcggtagtcttggagaagccatcggaagccatctttctcaatagcttctgcttcggctaccgattcaatgacgatgcactgcttttgccaggcttttcgaaatatatttttcggagcgatgtcgttcgccggcagattgtcatgagcgcgagtggtgtgacgcgcttcaatatttctaagaagcgatttttgaaggtgcgtattccaattccgcctaaagaaattcagcaggaaatcgtgaaaatacttgacactttcacggagcttgaggcggagcttgaggcggagcttgaggcgcgtcgcaggcagtacaagtactaccgcgacgccttgctcgctttcagcgatcaagatattcgctgggccgcgatggccgaggtcggcgagttcttccgaggtcgccgcttcaccaaggctgactatgtggataccggtgtaccgtgcgttcactatggcgacatctacacacagtacggcaccgccaccgagacaaccgtttcacacgtgcgtaccgatttggcgccgacgctccgctttgcgcagccaggtgatttgataatcgctggcgtgggcgagacggtcgaggatgtgggcaaggcggtggcctggctcggccatgacgaagtggcgattcatgacgactgctttgcctttcggcattcgctgaacccacggttcgtttcctattatttccagaccacggcgtttcacgcggagaagaacaaatttgtcgcccgagccaaggtgaagcgcttgtcctcagaaagcctggccaagctgaccatccctgttccctcgcttgaggagcaggcacgcatcgtcgccatcctcgacaagttcgatgcgctggtaaatgacatctccgtcggcctgcccgccgagattgtcgctcgccgccagcagtacgcgcattaccgcgaccgtttgctcaccttcaaggaagccctatga

SEQ ID NO: 331356 - DNA, 1002 bp, Pseudomonas aeruginosa
atgagcgaacagccggtaggtgagattgtcctgtacctgcgtggcgatgcgcccgccatcgatgtgcgtctcgacggagatacggtctggctgacccaggaacagatggcggatctgtttggcaaggcaaagtcgaccatcaacgagcacatcaagaacgtcttcgaggaaggcgaactggtgccggagcaggtgatgagaaaaatcggaatttccgaattttctaccaaaccgaccaacttctataacctcgacgtcatcatctcggtcggctaccgggtcaagtcgcagcagggcacgcgctttcgcatctgggccaccgagcgcctgcgcgaatacctggtcaagggcttcaccatggatgacgcgcgtctgaagaacctgggcggcggcagctactggaaagagctgctggatcgcatccgcgacattcgttccagcgagaaggtgctctaccgccaggtgctcgacctgtacgccaccagcgtggattacgaccccaaggccgaagccagcgtggtgttcttcaagaccgtacagaacaagctgcactacgcggcccacgggcagacggcagcggaagtggtcaggcaacgtgccgatgccggtaagcccttcatggggctgttgtccttcagcggcaagcagcccaccaaggccgaagtcagcaacgccaagaactacctcaacgccgacgagcttaaacgcctgaatacgctggtctcggcctatttcgacgccgccgagttccgtgccatgaaccatgagccgacctatatgaaggactggctcgcgcacctggagcaactgatcctggcaatgggcggcaaggccctggaaggtgccggtaaagtcagccatcagcaggccattgctcacgccgaatcggagtacgccaagttccgtgcccagttggccgagcagtcgagcgaggtggaagcggcctatctggaaaccgtgaagacggtgcagaagaaaatcaccgggaagaaaaagccatga

SEQ ID NO: 331357 - DNA, 1581 bp, Pseudomonas aeruginosa
atgagcaataccagagatcttgaacgcgccgaactgcacaaaaccatctggcgcatcgccaacgacctgcgtggcagcgtcgatggctgggacttcaagacctacgttcttggcatgctgttctaccgctttatctcggagaacctgaccaactacctcaacgaacaggagcgccgcgcgggcagtgcggattttgactacagcgatttggcagacgcccacgctatcgtgggccgttacgaaacggttcaggaaaagggcttctacatcctgccttcgcaactgttcgccaatgtgcgcaagcgcgcccgccatgacccgaacctcaacgaaaccctgtcgaaagtgttcaaggacatcgaggcctcggcgttgggcgctggtagtgaggacgacttcaaggggctgttcgatgacctggacgtcaacagcagcaagctcggccccaccgtggccaagcgcaacgaaaaactggtcaagctgctcgacgccatcggcgatctgccgctgggcaacagctcgggcaattttgccgacaacagcatcgacctgttcggcgacgcctacgaatacctgatgcagatgtatgcctccaccgccggcaagtccggtggcgagttctataccccacaggaagtctccgaactgctggcgcgcatcacggtggtgggcaagaaggaggtcaacaaggtttatgaccctgcctgcggctccggatcgctgctgctcaacttcgtcaaggtgctggggcacaacaaggtgcgtcagggcttctacggccaggaaatcaacctcaccacctacaacctgtgccggatcaacatgttcctgcacaacgtcaactacgagaagttcaacatcgcccatggcgacacgctgaccgacccggcgcactgggatgacgagcccttcgaggccatcgtttccaacccaccgtactcgatcaaatgggagggcgatgccaatccgctgctgatcaacgacctgcgcttcgctccggccggcgtgctcgcgcccaagagcaaggctgacctggccttcaccttgcacattctcagctggctggcggtcaacggcacggctgccattgtcgagttccccggcgtgctctatcgcggtggtgcggaagccaagattcgcaagtacctgatcgacaataactacgtcgatgccgtcattcagttgccgccggatctgttcttcggcacctgcatcgccacctgcatcatcgtgctgaagaagtctaagcgcgacaacgccacgttgttcatcgacgcctccagcctgttcgtgcgcagcggcaacaagaacaagctgctgcccaaacaccagaaggaaatcctcggcgccttcaccgcccgtcagaacatcgatcacttcgcgcgcctggtcgagaacggcgacattgccgccaacggctacaacatcgccgtctccagctacgtcgagcaggccgacaccagcgaggcggtggacattcgtgagctcaacgagaaaatcagcggtatcgttgcccggcaaacggagttgcgaaagcagatcgatgccatcgttgcggatctggaaggagcccacgcatga

SEQ ID NO: 331358 - DNA, 885 bp, Pseudomonas aeruginosa
atgaccattgatgctctctcgcaattgacccaggcccagcgcgaccgcttggcctacctcgaattgcgtctgcggtttgtcggagagatagggcgtcaggacctgattcagcgtttcggcattcaaacggctgccgccacccgcgacctcaccgcctatcgtgagctcgccggcaacaatctggcctatgatcgcagcagcaagatctatacgccgaccaaggagtttcgcccgctcttcaccttttctgctgaccgggtgctggcctggttggccgagggctttggcgatggcgagccggcaagcagtgcgccgggaatctcctgcgtaacgtccgggcgccttgctcagccggatctggacacgctgggtatcgtgacgcgtgccatttaccaccgctgccctctgcgtgtggagtactactccctaggcagcggcaagacccagcgggagatcgtgcccttcgcactgatcgatacgggcttgcgctggcacgtgcgcgcctatgaccgcaagcgcggtgcatttcgggacttcgtggtcacgcgcatcaagcggccaaagctgctgaaggagtctcccgtcgccgaacacgaacgccctgaacaggacgttcagtggagccggatactggaggtcgaactggtgcctcacccggatcaaccgcaccccgaaatcaccgccatggattacgccatgcaggacggggtgctgcgcctgcgcctgcgcggggccacggcgggttacgtgctgcgcaaatggagcgtcgactgttcgccagatcatcggctgcgtgacccggagtaccgcctctggctgaaagatccgctgctgctctacggcgtggaaacggcggtgctggcgcccggctaccgagcggcctga

SEQ ID NO: 331359 - DNA, 774 bp, Pseudomonas aeruginosa
atggcagaccattccatcaatggcaaagtcgccctcatcactggcggcgccaagaatctcggtggcctgatcgcccgcgacttggcccagcacggcgccaaggcagtggcgatccactacaacagcgcggccagccgggccgatgcggacgccacggtcgcggccatcaaggcgactggagcgcaagcggtggcgctccaggccgacctcaccacggctggggccgtcgagaagctgttcgccgacgccatcgccgccgtgggtcggcccgacatcgcgatcaacactgtgggcaaggtgctgaagaagccgatgatcgagatcagcgaggccgagtacgatgagatgtcggcggtcaacgccaagagcgcgttctttttcctcaaggaagccggcaagcacgtcaatgacaacggtaaggtgctgaccctggtaacctcgctgctcggcgccttcaccccgttctatgcctcgtatgccggcaccaaggcgccggtggagcacttcactcgtgcagcagccaaggagttcggcgcgcgaggaatttcggtgacggcggtcgggccgggcccgatggacacgcctttcttctacccggccgaaggtgccgatgcggtggcctaccacaagacggccgcagcgctttccccgtttagcaagaccggtctgaccgacatcgaggacgtcgtgcccttcattcgtcatctggtcagcgacggctggtggattaccggccagaccatcctgatcaacggaggttacacgacgaagtag

SEQ ID NO: 331360 - DNA, 264 bp, Pseudomonas aeruginosa
atgcacatgctgttggtcattgcgggaggcacggtgctgttgggcgtattcctgctgtttggcaaattatggggtggtgacgcggctgctttggccctgtcggcaaaggccttcatcccagtatggctggcgctctcaattgccaacctctgggttggcgtcattcatgccggttacaccgtacgcgaggagctgccgatcctgctgctcgtctttctggtgccggcggcgctggccggcctggtgatctggaagcagggatga

SEQ ID NO: 331361 - DNA, 309 bp, Pseudomonas aeruginosa
atgtatgcaacggatttcctcgccagaaacgtggcgcgggcggccgtgaatgcgggactggatgctcaggtcgatcccgcattgcggctattcttctatctgccgttcgcacattcggaagacccggccgaccagcgactgtcggtcatgctcaaccgccgcctaggccagccctggctggatcatgcgctgggccaccaggcgatcgtcgaacggttcggccggtttccacatcgcaacatcctgctggggcgctctaccacggcggcggagcaggcattcctggaccagggagggtttgccggctga

SEQ ID NO: 331362 - DNA, 909 bp, Pseudomonas aeruginosa
atggacagattcgatcagtaccgcatcttcgctcaggtcgcggagatgggcagcttcatcaaagcggcgcatgcactggagctgccgcgcgcctcagtgtcggcgggcatccagcaactggaaacgcaggtgggcacccgcctgctgcaccggaccacgcgccaggtgcatttgaccgccgatggcgtgcaactactcgagcacgtgcgcccgttgctggccgacgtggaaaacattgacacgatgttccaagccagccagcgccaggtatcaggccaattgcgggtcgatgtgcccagccgcattgcgcgcaggctgatcgcaccggcacttccgacactgttgcggcagcacccccggctgcggctcatcctggggtccagcgatcgcgccgttgatttggtgcgggagggcgtcgattgtgtggtgcgtgtcggcgcgttgcagagcaactctcttgccgttcggccgctgggaaaagtcggactgatcaactgcgccagcctcgcctacctgcaggcgcagggcatgcctgaacagcctagcgacctctgctgcgggcactggatggtgggttacgcatcgcccaccaccggacgcgagatgccgtgggactatctctccgacgacggtatcgaacacagtgtgcccgtgcccagccaggtggtgacgaacaacgccgagaactacatcgcttgctgcctcgcgggtttgggactgatccagatacctcgcttcgacgtgcaacacctgctcgacatgggaaaactggtggaggtcatgcccgcacactgcgcagcgccaatgccggtgtcgctactctatccacaccggcgccagcgttcacggcggctggcagtgttcatggactggttcgaggagctgatgaagccgcatctgcaagcatga

SEQ ID NO: 331363 - DNA, 474 bp, Pseudomonas aeruginosa
atgaccgagttgtccattgtcgatatctactgggccgaacggaccaagctcctatatgacgcgaaaaggcaggtatacatacctcccagtacccgcggaatggacggaaacgggttctattgcatctatggccgccatcccgtttatggccctgacgtcctgctgtacatcggcgaaacgaaagaagcggagagtgggcggtcctttcgggatcgtctgggagaacacctgaaagggcgattttggtaccacgccaacctgtctatcgcgcttggcatcccagacggcaaccagaagctcctgcctcaggacgtccgtctcgtagaatcaattctgattgcagcccacaagcctgccctgaaccgtgtgcacatcgactgcgcgatggaaggttccgagcgcttcctggtcaggaattgggactttccggacgcacttcagcacgagtgctcggggtattactggtggcagtga

SEQ ID NO: 331364 - DNA, 861 bp, Pseudomonas aeruginosa
atggacattgaccttactcgtaccttcctggaaatcgttcgttacggcagtttcgtctctgccgccgaacatctgcacctgactcagacggccatcaccgcgcgtatccagaaactggagagccagctcagcagcacgctgttcgtccgcaaccgggcgggcgcaagattgaccgccgatggcgaggcgttcgttccatacgccaaccagatcgtccagacctgggaggctgcgcaacgcgacctgccgttgccggacggctatcacaatgtcctgcacatcggcggtgaggtgagcctctgtaacccgttgatgctgcgctgggtgagtcgcattcgagaaaccataggcgaccacgcggtgcgtgctgaaatcggtgatggccaggccctgttgcgtcaactggagctcggtgcgctggatgcggtgctggtttaccagccgaactactggccaggcatgcaggtggagcagttgctggaggagaagctgatcctggtgcgggcgaagaaccctgagccctatgtctacatcgactggggcgagggatttcgtcgtcaacacgacagagccttacccgagagggccaaggcagcggtttccttcaaccttgggccgctggcgctacagtacatcctggagaacggcggctccggctacttccgtacgcgagtggtgcagagctacctcgacaagaaggtgttgaagcgggttcccaaggcgccggagttcagctatccgacctacctggtgtattcccggaatcgcgattcgacgacgctgcaacaggcgcttgcactgctccgcgatgtagtcagtcaggataccgactggtcccagcgttgggatccgatgatctag

SEQ ID NO: 331365 - DNA, 1137 bp, Pseudomonas aeruginosa
atgacgtttctagttcacctgccacgacggatcgtcgcgcttcttccggaagccccacatacccgtccgcgcgaatggctacgtgccgcgtttggcgcctctctggggttcctgttcagcacctggctgtgcgtccagtttttcgggccgcaaacggcgctccatttcgccggccctctggccgcttctgccatccttctgtttgccgtatcgtccggcgcactggcgcagccctggtcgatactcggcagctatctgtgcgcatcactcgtggcgctcccggtcagtcagctgcttggccacaacctgagcggggcggggctggccctcggcctgagcctgttgctgatgtacccgctacgctgcctccatccgcctggcggagccctcgctttctgcatggtgttcgccgcaccgcagccaggagatccggcctggttgtctgtgcttccggctctggcgggaagcactggcctgctgggctgcgcgctgctgtacaacaatctgacgcgggttcgttatcctcgccagcgcaccgttgcggcggacacgcaccacacccgcgatgccctgcccagcgaacggattggtatcagtacggccgacctcgatcaggcgctggatgagctgggagcgttcgtcgacgttacccgcgacgacctggaaaccatcatccgcagcaccgaaaagcatgcgctgcaacgcagcatgggtaatattcgtgcgcggcagatcatgtccaaagacgttgtttgtgcgtcgcccgaaaccccggtggagcaagggctgcacctgcttacccgacatcacttgaaagcgctgcccatcctcgatgaagaacgccggctcgtcggcatcgtcagcttgatcgatctggtcggcgcctcgccgccgacgcgttcgacgagcctgctcgacttgctgggctggcgccgggaccgggtcctcggacagctgatgagcagcccagtcagtacggtggatgcggacgcccacgccgtagagcttatcccgttgctctccgatcgcggcctacactgtctgccagtactagagcatggcgaactggtcggggtgatcacgcaaacggatttggtcgctgccctgcaccgtgacctgctggctcatgtgggctga

SEQ ID NO: 331366 - DNA, 231 bp, Pseudomonas aeruginosa
atgcccatcttccccatcctggctgttctcgccagcctcgtttgtatccttggttgctggtggtgctgcaggcagccacggggcctggaccaggcggcgctgctgccgtttgccgacgacccggaggccgccgcccggatgacggccgctaccggccggcgctgcgaacatgtgattacgccgatatccgaagcactcgaagagtcgccgctggaccgcttcgaggcctga

SEQ ID NO: 331367 - DNA, 1437 bp, Pseudomonas aeruginosa
atggccagtgcgattccccctgcaacttccgacctctacaactacgagatcgttcgccgctttacgctcaccaccctgttctggggcattttcggtatgggcatgggtgtattcatcgcagcccaactggtctggcccgaactgaactttggcgttccctggctcagtttcgggcatatccgccccgtgcataccaacctggtgatcttcgccttcggcggcggtgcgctgttcgccacctccttctacgtggtgcaacggacttgccgggtcagggtaatttcggacgggctggcgaacttcgtgttttgggggtggcaggcgagtgtggtggctatgatcgtcagctatccgctgggcatcaccacctcgaaagagtacgccgagatggagtggccaatcgccctctgggtgaccctggtttggctggtctactcctatctgttcttcggcaccatcgcccgacgcaaggtcaagcacatctacgtcggcaactggttctacggggccttcatcatcgtcaccgggatggttcacgtgatcaatcacgtctcggtcccggtcagcttgctcaagtcctactcggcatattccggcgccaccgacgccatgatccagtggtggtacggccacagtgtggtgggattcatcctctccgtgggctttctcgggatgatatattactacgtgcccaagcaggcggagaagcccatttactcctaccgcctgtccatcgtgcatttctgggccatcatcagtctctacatctgggccggtccgcaccatctgcactacaccgccctgccggactgggcccagtcgctcggtatggccatgtcggtcatcctcctggctccgagctggggcggcatgatcaacggcatgatgaccctgtccggcgcctggcataagctgcgctctgaccccatcctgcgctttctggtggtgtccctggccttctacggcatgtccaccttcgaaggtccgatgatggccatcaagacggtcaactcgctgtcgcactacaccgactggaccatcggtcatgttcatgccggcgcgctgggctgggtggcgatgatctccatcggagccctgtaccacatgattcccaagctgtatgggcgcagtcagatgcacagcgtcgggctgatcaacgcgcacttctggctggccaccatcggcacggtgctctacatcgctgccatgtgggtcaacggcattacccagggattgatgtggcgcgcggtgaacgaggacggcactctgacctactccttcgtcgaggcgctggaggccagtcacccgggctacctggtacgcctacttggcggcgcgaccttcgctttcggcatgctgttgatggcttggaatgcctggttgaccatccgtgccggtgagcgcgtcaacgaacttcacgtcgctgccgaggcctga

SEQ ID NO: 331368 - DNA, 1398 bp, Pseudomonas aeruginosa
atgcatgctgccctgcacactccactggtcgacctgctgggttgcagtgtcccgatcatctccgccggaatgggcggtgtcgcccgccatgaactggctgccgcggtaagcaacgctggcggcttcggttgcctgggaatggtgcgtgaaccggtggcgctgattcggcacgaggtgcaggcttaccgcgccttgagtgagcgaccgttcgcggtcaatctgattcccgctgccactccaaccgaattgctcaccgaacaggtgcgcgtctgcctggaactgcaggtaccggcaatagcgctgttctgggatgtgcagcaagatctcatccgtcgtctgaaggatgccggggtgcttgtcctgcagcaggtcggtcggcgcagccatgcggaggaagccctggaggctggagccgatgtactggttgcccagggcatcgaagcgggcggacatgtctggggcgaggtctcgacactgacgctggtcccagagctggtcgcgctatccgcggttccggtggtggcctgcggaggtatcgccagtggccaggcgctcgtggcggccctggccttgggcgcccagggcgtcgcctgtggctcggcgttcctcgcaacccacgagtcctatgcccacgactttcacaaggcacaggtggtcgcggcgcacgccgacgaccccgtgctgagcgtcgcgttcttccgcaactggccgatgacagctccggcacgcgtattacccaacgcggtaacacgcggcgaatacgccgagttgcaggcctcgcgcagcacccccgtgattggcgagcaggatggcgggccgatttacctgttctccactgactcgcccctgcgcgatgcgcacggcgcgctgggcgacatgccgatctatgccgggcaatcctgcggacagatcaacgacatctgtaccgcaggagaacgtgtcgcacagctggtcgacgaggcccaggagtgcctgcaacgcctgcagcgtgagacgcgcccctcgaccacaaccgcgcccggtctgatcgaatggctgcaagaactgctacgggccgagcgggccggcgctcgcctgatgctcgatagcgctcgccagacccttgatccaaccctgctgcagcgcttgaacgaattgcaccgtgacgaggcggaaagctgccggcgcttgcgcatttgcctgcagggcttgggcgcagagccaggcaacggggtgggagacttctaccaaaaggccatggccatcgatgatctcgccgaacgcctgcgctttatcgctcgcggccaacgctgggttgcacgccaactgaccgaacgcctgccgcacatccgtcaaccctggttgcgccaagagctgcagctcgtactgcgcctgcatcagggcaccgacgacgcctga

SEQ ID NO: 331369 - DNA, 1155 bp, Pseudomonas aeruginosa
atgccttccgaactttccacgccgtccggttttgcaatgggagtgagccgcgcgcaccgcttcgctgaaaccctgctcaatcaggccggcctcagcctagagggacaggcgcactgggacatgcgcctgaacaacccggatgttccgcagcgggccctagccgaaggcaacctcggcctgggcgaagcctacatggatggtgactgggattgcgatcaactcgacgaattcttctcccgcctgcttcgctcaggcgtagccgatcgggtcagccccgccgcgctgatcttccatgccctgcaggcgcgattgctcaaccgacaagccggacggcgggcctgggacgttggcacgcggcactacgatctgggcaacgacttctatgcagccatgctggatccgctcatgacctacacctgcggatactggaaagacgccgagaatcttgcccaggctcaggaggccaaactcgaccttatctgtcgcaagctgaatctgcagcccggaatgcgcgtgttggacatcggctgcggctggggcagtttcatggcctacgcggcgaagcattacggagtcgagtgcgtgggcgtgacgatctcgcgggagcaatgcgagtgggcgaagacacgccatgccggattaccgctggagttccgcctacaagactatcgcgagctcgacgagcgcttcgagcgaatcgtcagcatcggcatgttcgaacacgtcggacgcaagaatcaccgcgtctacatggaaactgtcgcgcgctgcctggatgacgagggcctgttcctgctccacaccattggcaagaacaaccggcacagcacacccgaccgctggatcgacaagtacattttccccaatggagacctgccgtccatcggccagatcggcgacgccgtagacggcctcttcgtggtcgaggatctgcacaatttcggcgccgactacgacaagacactgatggcctggcaccggcacttcgaagaagcctggccgcgcttcgcagtggaactgggtgagcgcttccgacgcatgtggcgctactacctgttgtcctgcgccggagccttccgtgcccgggatattcaactctggcagtgggtgttggccaagcaaggcgtaattggaggctatcagcgggtcagctga

SEQ ID NO: 331370 - DNA, 861 bp, Pseudomonas aeruginosa
atggatacggaacttgcccgaacctttctaacggtcattgcggcaggcaactttcgcaacgccgccgcgcggctgttcgtcacgcaatcgaccgttagtgccagaattgccgccctggaggagcagctcggctgccgcctgtttgtgcgcaataaggccggcactgtactgaccccggcaggtcgcaactttcaaccatacgcaaccacgctcgtactcaccgtcgaacgtgcccgccaggacattggcgtagccttgggttttcgggcatcggtgaccatcggcggacgtttcgggctgtgggatgaactgctgtctgcttgtctgccgcggattcgaagggcggtgcctgacattgccatccgcgccgagatgggttttgaagatgaactcatccaaggtctgatcgaggggcgcaccaccctcgcggtgatgtacacgccgcaaagccggccgggcctgataattgaggcgctgctcgaagagcaattggtttacgtgagcacgagcgacgagatgctcaccccgccaggtgagcgctatgtgtatgtcgactgggggccggagttcgccagcaggcacagtgccgcgttccccgacttcctcggggcggggttaagcgccaatatcggttggttgggtctgacgcatattctggcttatggtggctccgggtatttcccattgcgctcggtcaggcgtgagctggacgcaaggcgactgcatcggcaccccgatgcgccggacttccggttgccggcctatctggtgtatccagccgatccgccatcggaggagctgagcctggtactgcaagtcgtacgtgaggtcaccgcagaagttctgcgtcagcatgcgtaa

SEQ ID NO: 331371 - DNA, 1515 bp, Pseudomonas aeruginosa
atggctcaaagcgatattcgacccgccggccccgacctgacaaagggcgtgcccttgtcgagggtgccggccgacggcgtgcttgtcggccacgtcgaaggcagtcccgtcttgctagtgcgactggacgatggcctgcatgcagtcagcggactctgcactcattacggcgcgccattggccgatggcctggtggtcaatgacgagattcgctgcccgtggcaccacgcctgtttcagcctgcgtacgggggccgcgctgcgggcgcccgccttcgcggcactggcgaggtggcgagtggagatcgtcggcgaatctgccttcgtgcgagaggaggaaacgaccgtgcgccccgcgcggccccatgcagcatccaaccagcccgggcgcatcctgattatcggtggcggcgccgcagggtttgcggccgccgagcggctgcgcgaactgggctactgcggcgcattgtcgatgctgagcgccgacgcttcggcgccctatgaccggcccaatctgtctaaggactatttggcgggaacagccccggaagactggattccgctgagagatccgaagttctatgccgatcgtgagattgacctgcgcctcggctgcgacgtcagtgcgattgataccggcgcacgaagggtgctgacccgatcaggcgaacagttggcttatgacgctctgctcatcgccaccggcgcggagccgcggcggctgcccatccccggattcgagctgcccaacgtattcgtgctccgctcgctggccgatgcccggtcaatcatcgacgctagccagggcgcgacgtcggtggccctggtgggtgccggattcattggtatggaggtggcggcagccctgcgtgctcgtggtctccgggtgcatgtggtggcacccgaggaagtgccgctggagcgtgtgctgggtcgtgaagtggggggcttcatcaccggcctgcaccaagagcagggcgtgctgttccaccttcgcgcggcggccaaaggcttcgacggcaagacgctcaccctggccgacggggcgcggatatcagcggacctgctgatcgtcggcgcgggtgtcgtgccgcgtaccgagctcgccgctacagccggatttgcagtgcaggacggcatcctcgtcgacacctacctgcagacctcggttgccggccacttcgccgcgggcgatgtcgcgcgctatcggtacggcgccgacctgatccgggtcgagcactgggtccatgcccagcgccagggccaggctgccgcagccaacatgctgggagccgcacaggcgttcacggatgtgccgtacttctggactcaccactacggactggaccttcgttacagcggatacgcgcacggctgggacgaagtccgcatcgacggtacgctgacgcagcgggatttcaccgcccgctacttccgtgcaggagtactagtcgcggcagcctcggttggacgggatctggaaaacctgaccatcgaggcggcgttgcaggcttga

SEQ ID NO: 331372 - DNA, 1371 bp, Pseudomonas aeruginosa
atgcccagcacttctgatctcccgtcgcgctacttcgccccagcctatggcctgggcagtttcggcccggccatcttcatcctgacgccccaggtactgctgctgttcttcatgaccgaaaccctgggcattcccgccggcatggcgggcggggggctgttgatacccaagctgtgggagctgctcagcgatccgctgatcggtcgctggtccgatcgcctgcatactcgctgggggcgccgccggccgctgatggccgtcggcagcctgatgttcctggccgcctttgcccttacgtttgccccgccgagtttcaatgactggcggtattcgctggcctgggtgatcgccttctataccctgacctccaccgcctactcgctgttcaccgtgccctatgcgacgctgctggccgaggcaaccgaagacccgcacgccagaacccgggtcgccgcctggcgcagtggcttcctggccgtcggcttcgtgctcgcggggagcctggcgccctggctggtgggagcgagcggaggcggggagcagggctatgcacagatgggagtcctgatcggcctgatcgcgttcgccggcatggccggggcggtcgccggcaccggcggcgtccccactcatcgcccagtcgcccatccgccgaggaacatgctggcgccgtttcgcaaccgggcattcacctggctgtggctgggcttcatcgtccagatggtctccgtgagtattgccacggcgatgttgccgttctacgacaagtactggctgggcaataaggacagcaccattcccagcatcttcgccggcatggccctgctcacggtcgccaccacctggtgctggaccctgctgtccaggcgcgtaggcaagcatcgcgccttcgtcctggcgaccgtgctctacgcggtggccaccgcctccctgtggctggtgatgtacggccccctcggcctggccgtcgccatcatcctgttcggcatcgccaatgccggccagcaactgttctgcttcgccatagtccccgacatcatcgccctgcaacgcgcggagaccgggatcgccgaggaaggtgccttcaccgggctgtggatctggggcgaaaagatcggcctggctatcggtgccgggctcagcggcctcgtcctgcatctggccgggttccgccagggggcgggcacccaactgctggagcaaagcgatagcgcgctgcagagcgtgctgctgatggcgacactggtgcccgcgctggtctgcctcctgtcgattccggcgctgctgcgctcggccagggccatggccagacggagccagcccgggcaccctttgggggcggcaacgaacacctcggtggtgaatagctaa

SEQ ID NO: 331373 - DNA, 2472 bp, Pseudomonas aeruginosa
atgaccacgccaagcgacacctcgagaatgccgggcctggtcgtgcgcactcgtctgctggaacggctcgagcccgaacgttgtcggcgtatccgcctgctacatgcgccggccggcttcggcaagagcgaactggcccgccagttcgccgagagggcccggcagccgctactgtggctggacctgcacagttcggcgggcgggctcgggcacctctgcagtcggctcgccgagctgctcggcctcgccgccggggcctcccccggccaggtggaggaggccctgcaacggcatgccgatgccctcgtcgtgctggacggttacagcgccgaggccgctgcggacaaatggctcgaacgcctggtcgagacctccccgctcaacctgcagtggctggtctgcgcccgccgccgacccgcctggcggatcggccgctggctgctggccgacgacctgctcatgctggatggcgatgacctggcttttaccggcggcgagaccgaattgctgctgtcgcggttgaacatgacccgcagcatttccgccgagggcctgcagcggcagagcgacggctgggttgccggtatccgtctgcacctgctctcgttgcaatcggccggccagcgtgccagcggcctgctgcaccgaaatgcgctgattcaggactacctcgaccacgaagtgctggacggcctgtcggcgcgggcgctcgacctgctgcgggtcatcgcccaggcacccttcgtcgacggcccgctctgcgccttcctcgccgacgacccgctggcgctcaaccggctgctcgaacagcagctgttcctgcgccgcctgcccggctccgaggaccgcttcacgctgtacgcgccactcaggcggatcctccgggagcgctacccggaccaggccgctcaattgctcgccgccagccactggctgcatcttgccggcgctcacgtcgaggccttccgctatgcgctggccgctgcggacaccgcgcgggcgctgatttccctggggcaggccgccccgcgcgagttgtatatcgggcagaacctcaactacctcctggagggcatcgatcaactgggcccggactggctcgaacaacacccgcaggccctggagatcatcgccaggtccctgctgctgggggggcgcctggatcaggccggagccgtcgtcgaactgctcgggcagcgagacggcgacctatgcctggccctgggcgccgagctggcgctgcaacgtggccaggcgcagaaggcctgcagcctgggcttgcagacgctcgacgggctggcccaggacggccgctgggcgcagatgatcctctgcctgtcatgtctggtccgcgccagccttgccctcggcgacatcgtcacggccaggcggctgcagcagcaggggctcgaattgtcgcggcgcaagggcgaggcgttgttcgagtgcctgctgatgctcgaccaggcgcagatcgacgaactcgccggcgacctgccccaggcgctcagggtgctcgaccagatcgacctgctgctggcccagaacccgggttccgcgctgctcaagggcggcaagtcgatccgccacggttggctgctgatcctcaccggtcaggagcagcaggcacgcctggtgctcgaggagggactgctgctgacccaggcctgccgcagcccggtgagcctctacggtcatgccctgctggcccagctcgatggcaacgccggcgacttcgttgcggcgcagcagcgcctggccagcgcgcagcgccagatgcatgcgtggaacgtcgccgaagtcatctaccgtggcgtcctgagcatgagcactgccaggctctggctgcgcagcaaccattccggcccggcaggccagctgctgtcgcggctgcgcgagcagtacgagggcgagcgggccctcacgccgcccagctcgttccccgagctgcacgccctgctgggcttcctgcaggccgaggtgctgtgctccaggggctccttcggggatgcggggagcctgctcgatgcggttctgaagtgggccgagggaaatgctttcgacattcttgtctgccaggcccgctacgccctgggagaggtgcgccggatgaagggcgacatgctccaggcggagcgtctgctcgcctcggcggcggccatggccctgcatcaggggcagcacagcctgctcacgggcattcagtccgcagcggccgagcccagggctgaaaccgaccccgacagcgcacctgccggcatgccggcacaggaaggggagttgctcagtcagcgcgaaatggtggtactcggcctgatagccaagggttactccaacagcgagattgcctcaatcctttcgctgtccctgcacaccgtgaaaacccacgccaagcacatcaacgcgaagctgaaggtcggcaaccggacgatggcggcggctcgagccaaagcccttggcttgctgttgtga

SEQ ID NO: 331374 - DNA, 1164 bp, Pseudomonas aeruginosa
atgaaagttttgtccatcggtggcggcggcggcatgggaagaaccacggcccgcaccgcactgggattcccgttcgtcgaggagatcgtcctggccggcatcgaccatgagcgtgccgagcgtttcgcccggtcgctgaacgacccgcgcatccgcgccatctacctggacatcaccgacgagaacgccctgcggcaggcgatcagccagtgcgacgtggtgctcaactccgccggcccgttcttccgcttcggcctgccagtgctgcgcgccgccatcgccgaaggcaagcactactgcgacatctgcgacgactgggaaccgactctggacatgctcgccctcgacgaggaggccaggcgccagggtgtcactgcgattatcgggctcggtgccagccccggcattgccaacctgctggcggtcaaggccgccgagcaactggacgaagtgcacgaattgtactcggcctggcgcctgtccaatgcccacaacgaggacgatggtttcttcgacgagaacgaggccaataccgacgcggcggcagtacacctggtgcactgcctgagcgagaagattccactggtgcgtgacggtcacgtcgaggaccgcctgccgctggagcattgcgacttcgactacccgggcgtcggcaagctggatatctggaccatcggccacccggaggccgtcaccctgccgcgtcactacactggtctgcgcaactgcctgaacggcatgctcggtgtcgaaaccatcatcgacgacctgcgccaactggcggaacaagtacgcgccggcgcgatgagcctggagcaggccgctgccctgctgaccagcgacggtggccgcgagaagcgccgacagcgcctacaggagcatgaaggtccggacgcgccgggcatcctggcttttgccagcggccacaaagacggccggccggcgcgagctggcgcgcgcctgaagcatgtgccgaacggaggtatgagcgcggtcaccggcatcccccatgcgttgttcctgccgctgctgcatcagggagcggtgaagggcgctggggtattctcccccgaacaggtcgtcgatgccgatgccttcttcgccctgctggacggctttgtcgaagggcaggactgcggcctgaccgtgacattcgcccactga

SEQ ID NO: 331375 - DNA, 1344 bp, Pseudomonas aeruginosa
atgagaatgcatttgtggttacctttcgcctggctggtcataggcggctccagcctgccagtgctcgcggctgatttcactggcctcacccccttgggggccgagaaggccggcaacaaggaggggactattcccgcctggaccggcggtttgccaatcgacgcagccagtgtcgacggcaagggttttctctccaaccctttcgccggtgagaagccgctgttcgtgatcactgcacagaacgccgaacagtacagcgagcacctcagtgaggggcaactggcgatgttgcgccgctatccggaaacctatcgcctgcccgtgtatccgacccatcgcacgctggccttgcctgagcgcctttatcaggctgccgccaccaatgccgaggtcaccaagctcggttcgaacggactgagcatcgaaaacttcaccaccagctactaccccttcccgttgccaaaaacgggtaccgaagtgatctggaaccaccaggcccgctaccacggcggcaatttccggcgatggatcacccaggtaacgccccaggtgaatggcgatttcaccaccgtgcatttcgaggaggaaattgtcgaacctgcacaggccgaaggcatcgagcccgcgcgggcgcagaacctgctgcagctgttcaagcagaaggtgacggccccggcgcgcttggccggaaatgtgctgctggtatacgagacactcgaccagttgaaggagccgcgtctggcctgggtctacaactctggccagcgccgcgtccggcgagccccgcaggtggcgtacgacggccccggcaccgcctcggacgggctgcgcaccaccgataacttcgacatgttcggcggggcgatggatcgttacgactggaagctgctgggcaagcgcgaggtttacattccgtacaacagctatgagctggattctcccgcgctcaagtacgagcaggtcatccaggccggccacatcaaccaggatctggcgcgctacgagctgcaccgggtctgggtggtcgaggccactctcaaggaaggccagcgcaatatctacgccaagcgtgtgttctacgtcgacgaggacagctggcagatcgccctggccgatcacttcgacggacggggacaactgtggcgcgtaggggaagggcacgctcagcagtacttcgaccatcagcatatgggctacaccctcgaagccctctacgacctgcaggcaggccgctatctggcgctgggcatgaagaacgaggaggcgcgcagcttcgaatatggcttcaaggcgcggatgagcgactacaccccgtcggcgctgcgcaagagcggcgtgcgctga

SEQ ID NO: 331376 - DNA, 1812 bp, Pseudomonas aeruginosa
atgagattaagaacaataaagacaatacggcgacaacccatattgctgtcgctgatttctctgaccctgggcactcaggcacaggctctgaactttgatgtcggggcgatccaggggagcttcgacagcaccctttccgtcggtgcgagctgggccctgcgtgatccggatcgggacttcgttggcgtcggtaacggcgggacggcatcgaccctgtcgtccgacgacggtcgcttgaacttcaagaaacgcgacctgatctccaacaccttcaagggcgttcacgatctggagctgaagtacggtgattccggcgtgttcctgcgcggcaagtactggtacgactttgagctgaaggatggtcaccagcggctctacgacattgacgacagcggtcgggcccgcagtgccaaggcctcgggggcggagattctcgacgccttcgcctataccggctacgaaatcaacgagctggccggcacggtgcgcctcggcaagcaggtggtcagctggggcgagaacctgttcatccgcggcgtcaaccagatcaaccccatcgacgtggctgccttccgccgccccggagccgagatcaaggaaggcctgatcccggtcaacatgttctatatcggccaggacctggccaccaacctgtccgtggaggccttctatcagctcgaatgggacaagacggtggtcgacaactgcggcaccttcttctcgggtaccgatgtggtggccgatggctgcaatgatcgcaatctgatcttcggcagcgactataacccgaacaataccggcaacctgttcatcccgcggctgcaggaccgtgatgctcgcgatggtgggcagtacggcgtagcgctgcgctggttcgtgcctcagctgaacgacaccgaaatcggcctctatgccatgaacctgcatagccggatgcccgtttacagcgtcgcgagcagttcggtgctggatgtgatggatccgggcttcgaccccaacctggtcggtaactcgcccaaggccggttaccttatcgagtaccccgaggacatgcgcctgtatggcctgagcttccagaccaccctcggcagcacctcggttagcggcgagttcagctaccggccgaacatgccgctgcagctcaatagcaccgacctgaccttcgccgccctcggcctcgactcggtgaccggcctgccgccggcctggggcggggtagggcagccgatcagcccctcggtaatccagaacggccccctgcgtcccggcgcctacctggccggctacaagcgcatgccggtcagccaggtgcaactggccgcgatccacttcatcgaccaggtcgcgggcgcggagcgcatgtcgctgctgggtgaggtggcttacaaccacatcaatggcctgaagagcgggcctggagaactgcgttttggccgcgactccatttacggctacggggaagtgggtgtcccgggtctgtgcgaagggctgctgaataccgacaaccccgacaactgtaatggccatggtttctataccagtggctcttggggctaccgcctggccagcagcctggaatacagcaacgtcttcgccggcatcaacctcagcccggagattgcctggtcccacgacgtcgatggctatggccccaacttcaacgagggcgccaagtcggtgtacctggcgctcaacgccagctaccagaaccgctacagcgccacgctttcctacaccgatttctttggtggcgacttcaacccgactactgaccgcgactatgtcgcagccagcgtcagtgtcagtttttaa

SEQ ID NO: 331377 - DNA, 333 bp, Pseudomonas aeruginosa
atgacagtttgctgcccttcttgtggttcccttcgcatcgcaacccgcaaccatgcccgcaagattggaggcgtcgtcggggccgtcggcggaacggccagcggtgctgccagcgccatggctggcgcgcaaagtggcgccgcgttgggggccttcgcgggtccagttggaatgacactcggcggcctcgccggtgcgatcttgggtggcctggccggcggagtagccggtggcctggctggcgccaaaatgggtgaagagtttgatacccgtgtgctcgacaactacgagtgccaggactgcggattagcgttttcgcacaaccgcgactga

SEQ ID NO: 331378 - DNA, 969 bp, Pseudomonas aeruginosa
atggctcatttcatcgaaactatggcctacgccggcgccaccccctggcacggcctgggcaaccagctcactcagaaacagcccatcgaggtctggcaacacgaagccggcatggattggcaaattttggagagccccgtccatttcaaatccgatgccgtcggccacctgggcgcgattcattccttccccgagcaaaaggtgctattccgttcggacaccaaggccccgctgtcggtggtctcgcagcgctaccacaccgtacagccaagggaagtgctggagttttaccgagaccttaccgaggtgtccggctacgagctggaaaccgccggcgtactcaagggtggccgcaagttctgggcgctggcgcgtaccgggcaaggcgcagcgctcaagggcaacgaccaggtcaacggctacctgctgctggcgacctcctgcgacggcaccctggccaccacggcaacgccgaccacggtgcgcgtggtctgcaacaacaccctgaccatcgccctggacggcaccagccgggcgatcaaggtgccgcacaacacccgcttcgatcccaaggtggtgaagaagcaactcggtatcgcggtatcccagtgggatgagtttatgtaccgcatgcgtgcgctggccgaacgcaaggtgcaatggcatgaggcgctgggcttcttcatgaacgtgatgtgcgagaccagcccgaccggcgctctacccgagcaactacccaacgagcgcgccctacgtaaggtccaggagctgtacgaaggtcgtggtcgcggtagccagctggactcggcacgcggcaccgcctggggcctgctcaatgccgtgaccgagtacgtcgaccacgagcgccgtgcgcgcagcaacgagtaccgcatggactcggcctggttcggccagggtgcgcagatcaagcaacgcgccctggatgccgcgctgcaactcgcagcttaa

SEQ ID NO: 331379 - DNA, 1005 bp, Pseudomonas aeruginosa
atgaaagcaacgtcattggacggcagcaccagcaagaaccgccctgccctgcgcctggtcagcaccaaggagctgccgcgcgaggactggctgcagatccgcaagcaaggcatcggtagttcagatgcagcagctgccgtcggcctcaacccctataagtcgcaattggaactgtggctggagaagaccggtcgtgatgccgggcttccgaaggccgatccacacgatgaggaaagcccgatgtactggggcaatgttctggaacccatcgtggcctggcactacagcaagcgcaccaagagcaaggtgcgccgcatcaacgccgtgctgcagcatccggatcctgagctgccctggatgctcgccaacatcgaccgcgaagtgatcggggccgacgatgtgcagatcctcgagtgcaaaaccgccggcatcaacggcgcacgcctgtggaaagaaggcgtgccagagtatgtgcagctgcaggtgatgcaccagctcgccgtcaccggcaagcaggccgcggatgtggccgtgctgctcggcggccagacgctggagatccaccgcatcgaacgggacgagcagataatcgctcgcctgatcgagttggaacgcaagttctggcactacgtggaggccgatacgccaccgccggccgatggcaccgcttccgccgaaacggccctgcgttgcctctatccggaggacaacggccaggtcgtcgacttcagccaccacgccggactgaccgctgccttcattgagctcaaggccgttcgccagtcgattgccgacaaggaaaagcgcgaggccgagctcaagcagatgctgcaacaggccatgggcgatgccagccgggcagagttctccagcggctacgtcagttggcgcaaagccaaggacagcgtcggcctcgatgtcgctcagctgctccaggacaagccttacctgcaggccaagtacccactgctgaaacccggtgtgcggcgcttcctggtcggctga

SEQ ID NO: 331380 - DNA, 951 bp, Pseudomonas aeruginosa
atgctcaaaggtttggctatcaccccgccggtgctcgggcgcatctccatcggcaaggtcatcgagaaaaacggcaagcgtctgccggagaaggatgaccagttcaccatcacctcccaggtacaaggcaaggacggctggctgctgcacccactcaacgacgaattgcgccagggcaaggacgacaagctgcgcagcatcccggtacgtctgctgttcaacgagccagagctgaattttcgcgccgactacaccctattcgaccggcagtccggacgcccgctttgcgtgggcaatggcgagacctgcaaacgcatcacccaggacggcatgcagtcgctgtcctgcccttcgccggacgcctgctcgttggccaaaggcaatgcctgcaagccctacggccgactgaatgtggtcattggcgacgacgatccgctgggcagcttcgtgttccgcaccaccggtttcaacagcatccgcaccctggcggctcgcctgcattacttccaggccatctccggcaaccgcctggcgtgcctgccgctggagctgcgcctgcgcggaaagtcgactcgccagagtcatgggacgccgatcttctacgtcgatctgacggtacgcgccggtatggacatgacggaggctctgttatcggccaatgagctcgatgtgcagcgacaggccgcaggcttcgaccagaccgccttggatgaagcggcgcagcgtggctttggcaatggcgccttcgaggacagcgaggaagatgctggtgccgtcgccgaggagttctaccccgccgaggaaagcccatcggcattcccccagacacgccagcactcatccacagccagcctggccgagaagctggaagcgcgagcccagcgcagcatcccaccgacaaatgacgcccaaggagcccagcatgcgcctgcacaagctgaaggccggtga

SEQ ID NO: 331381 - DNA, 498 bp, Pseudomonas aeruginosa
atgcgcctgcacaagctgaaggccggtgaatcgaccggcacctacctggtcgagtcaccggtcaccgaaaccgacatcctgttgatggcccgccagttggccaatttgcgtctgcgccgaggacgagcactgacctcaccgaaggaggtgttcggccacctgcaggcgctgctcgccgaccatgagcatgaggtattcgccctgcttctgctcgacagccggcatcgggtgattaccttccaggagatgttccgaggcacgctcgatggcgccagcgtctatccccgagaaatcgtcaaggtcgcgctggaacacaacaccgcagcagccgtgttggttcataaccacccatccggtgatccagaacccagccaagcggatctcaacctgacgcacaaagtgcgagaggccctgaatctggtcggtgtgcgaaccctggaccatatcgtggtgggccacgagagctgcgtgtcgctggcagaacaaggctacctgtga

SEQ ID NO: 331382 - DNA, 183 bp, Pseudomonas aeruginosa
atgaaaaagctactgcggaccttggctgccgtgttcatgttcgccggcatcctcgcgggctgcctgggccttctgctgctggtgattatgatggtccgttttccaccgctgctgattgccgtgctgctgacctgctggatcttcagccgattacaacagactgcagacgaaccaccccactga

SEQ ID NO: 331383 - DNA, 252 bp, Pseudomonas aeruginosa
gtggtgttcacccgcgaggtgcaggccgcgctcaaacgcctgaaccccggtttgccggaagatgcgtacagccaggcgctgaggcaggtggtgcaggacgacatcaccaagacgctgctgcagctggccgtgacttgctgggacgacaaaaaaataaggagaggacatgaccagcgtgagcagcttggcgtgctgctcacgctggtccatgccattttgtcagtggggtggttcgtctgcagtctgttgtaa

SEQ ID NO: 331384 - DNA, 657 bp, Pseudomonas aeruginosa
atgcagcgtcatcctcaaaacaaaaatctgatgattcatgatgcaagcagctattgtggaatgcctattcaggtcgataaagggccttttattcggcagtatctagaaagactccgcagcactacggagcgggctgttcagcagtattctcgtgtgttcgcatttagggttgatctgaggttccctacgggcgtcgatctacctgaaagccattgcacgaatcaggtaattgatcgatttgtcgagtcgttcaaggccaagatacggcacaatcgtcgaatggcgcgcatgcagaacaagaatgcgcatgacagtaacgtccggtgcgtctgggctagggagacagggcagcatggaaggcctcactatcacgtggctttcctgctgaacttcgacgccttcaatgcccttggcaagttcgaggccggaagggacaacatgttcaaccgtcttgagggggcatgggccagtgccttggggctgtcagtcgaagcggtcagggggctggtcgagataccgaccaattcagcctactgtctgcgtcgcaatgacccgcagagtcaggccgactttttctacagggccagctacctctgcaaggcagccaccaaggtttatggggatggccagcatggcttcggtgcgagccggctctga

SEQ ID NO: 331385 - DNA, 849 bp, Pseudomonas aeruginosa
atggcaatccacataaacgacaaactccaaagaacatttcgcggcttaaatgccgacagccgattcaccacctggctatggttctttataaagttccactccccgcaagcctacttaggagaattcagaagccccggcatgcgtgaccgaatggcagaggtaatcaaccaggacccccatcgcgccgactttatagaagcgcaaagtgctatttccctcctacccgcgcaaagcctgcagtggataacaaatgacaaaagacaaaatatttttctaatcaggaagcttgccgagaagaatggaaataactacttagtcagccccgccaatctaaccggaagagatctaaccattgcgacaattgacacctggcaaacggatcagactcaaaagtcagcgctagtaagccagataaaatgggaatgggagctccatacaagctcagaccatatgttcaaatggttcgatgatgcagatgagcgcgaaaaactgaataccgcatgggaaatagccaaaaacaaatattcacccttgcttttccagcaaaccccatttcaagaaaaaaacgactttattattttttttgactcgcaattcctcacggcatcagacaaaaccctgcttatggaatccatcaagaaacgatggagccaaaacaaataccgcgccaaaatgacaggcaagaagcaatacaatttcatcctatccgacaagaccatcaagcgccttgacaatctagccgataaacataacctgaagcgaactcaagtcctagatatattgctacaaatggaggaagaaaaaggaatttacatcccagaaagactaaaaccgctgatcgacagctaa

SEQ ID NO: 331386 - DNA, 1203 bp, Pseudomonas aeruginosa
atgcccctgacagatgccaaggttcgcaacgccaagcctgccgagaaaccgctcaagctgaccgacggtggcgggttgtatcttgaggtgcgtcctaccggtgccaaactctggcgactccgctatcgcatagatggcaaggagaatgtgtttgccattggcagctacccggagttcggactggctgatgcgcgcagcgagagggataagaccaggccactgattcgccagggtatccatccgtcacacaacaggcaggccgaacggctggctatcagcgctgcgaacgcgaacaccttcgaggcggttgcacgcgagtggatcaaaaagaaggcgccaggctggacgccttactacttgcgccaggttgagcgattcatggcggcagatgttttccccttcgtggggaggctgccgatacgcaatgtatctgccgcgcatctgttggagattctcgatcgaattgaagcccgaggcgcttcaacggtggcgctgctcgtaaggcagtggtcgtcggcggtctttcgatacgccgtcgcgacattacgcgccgacgccgatccggcggcagccctgaaaggcgctatccaccggcccaaggtgcagcatcacaagccgctcagtcgtgagcaggtagtcgacttctccagggcattggaacaatacggcggctacaggactacagtgatcgcgctgcgccttatgctgctcacctttgttcgcaccgtagagctccgcaaggcggagtggagtgaattcgatctggatcgggctgagtggcgtattcctgcggagcgcatgaagatgcgagagccgcacatcgttccgctatccaggcaggcggtcgatctgctgcgtgaactgcacacccacacgggcggtcgtcggcttctatttcccaactatcgcaggccgaacgagtgcatgactaccacgacgctgaaccgggcgcttgagcgcatgggattcaatggcaaggacagcatcggcttttcggcgcatggctttcgtgcgacagcctcgaccatgctgaacgaaatgggatatcgctcagacgtgatcgagcgtcagttggcacatgccgagagaaacaaggtgcgcgcaagctacaaccaggctgagtatctggaagaacgacgccagatgatgcaggcgtgggccgacgaagttgatgctcaagttgtggcgaaggggtgctcctga

SEQ ID NO: 331387 - DNA, 738 bp, Pseudomonas aeruginosa
ttggacgaagccaagtgtgaatattccgctaacaatacagtacggtatctactgatggggcgcgtgatcgtcaggaatccaggcggagtggtggtaattgatgacacttatgtgaactcggcagttgcggccagaggaaccgttaccccatcggcctctactacctttatctacccagccgcgacgatatcctacatacctaggaggtcagattctctaccgaagatagccgtatcgatgacgggcgctttttacgtagccaagacggaggttgctagtggtcgtgtgtcgtggacagtggtgtctgtatcaggtactccgatcagctatttcatctttgatgaccctctggatggggccgctacaggtagccttgtgctgagaaataagacaacggggcgagttacttttgatagtgatctcgactacttgagagtggtcggtacttacactatgcaacgtagtgagaataacaagcgttttccgctattgccggggagagagtatgctttaatttccttggtgacaacataccacagttatcagagccaagttaatccgccgaatggagggctttgggtctgggggatgagttcgagtacggcagaaatcagatcaaatacactatatatagaattagttgctatcgccggcggaactagaacggggccgacaaatacattttcatatagaggtggagatgctgtggtgatggtaattgatgtaacaggattctag

SEQ ID NO: 331388 - DNA, 1275 bp, Pseudomonas aeruginosa
atgcatgagcccactattgcccttattgactgcaatagcttctatgcaagctgtgagcgtgtgttcagaccagacctgcgccgcacgcccatcgtggtactgagcaacaacgatggctgtgtgattgcccgctctgcagatgccaagccctatgtgaaaatgggtgcgccctggttcgagataaagaacgatgtaaggcgctggggcatagtccctttctcaagtaactacgcgctgtatggcgacatcagcgaacgagtgatgacagttatcgaaagtctcgttccggcgctggaggtgtacagcattgatgaggcctttgccgacttgaccggcatgcctggctcaatggaggcgctcggccgagagatccgagcccaagttctgcagcgcacaggtatcccaactggcgttggcattgcgcataccaagaccctagcaaagctggctaactatgccgctaaaaagtggcaggcgcagaccggaggtgtggttgatctgcgcgacccggagcggcgcgacaaggtgctcaaggtaacgccggttgaggaagtgtggggcgttggccgtcgcatgactgcgcatctacagggcatgagcattaagacagcttgggagttatcgcgtgccgatccctgggccctgcgtaagcaattcagcgtagtgatcgagaaaacagctcgcgagttacgcggcactgcctgcctcgcgctggaggaagtcgcgcagcctaagcaggaaatctgctgcagccgcgcatttggtaagcgcctgcgcgagatcggaccgatccgtgaggcggtcgccacctacgccgcccgagcctgtgaaaagctgcgtgctcagcagtccctcactaagcgggtgcgcgtgagtatccgcaccggcatgttcaaatcggatgaagtgaagtacgcgaagggcattatttgcgagctcccatacccaacagacgacacgcgtgtgattacccgcgccgccatggctgggattgatcatctgttcagggatggattcgcatatgccaaggccgagatcctgctgctggatctacgccagcgtggcgagttcactgacgatctgtttgcagagactcagccggtgatcgcagagcaagtgatgggtgtgctcgatgagatcaacgccaagtgggggcgcggaacgttgcggccgggcagagtaaccatagcgccgggctggggaatgaagcgcgacatgatgagtccgagctataccactcggtgggatcagctgtggacggtgaaggcagtgtag

SEQ ID NO: 331389 - DNA, 438 bp, Pseudomonas aeruginosa
atggcaaccgcagtatttgtcggtcccctgagcagttcggctatagagctgccctttttttctttccgcattccggccggcttcccgagccctgcgcaggaccatcttgagcagaagctatccctagatgagctgctggatatcgacgcgcctcacacatacctggtgcgcgtgatcggcgacagtatgaccggcgtggggatctttgagggtgacatcctcatagtcagcaaggcactgcccgtgcagcacggcgatattgttgtggctgagctgaacggggaaacctttgtcaaacgcctttcgcgccaaggcctgcagtacgtgctgtgctccgaaaatcccaagtacccaccgcgctttgtgatagagggcgatgagctggtgatctggggtgtagtaacagacagtctgcggcgacatcggcgccatgcatga

SEQ ID NO: 331390 - DNA, 2340 bp, Pseudomonas aeruginosa
atgaccagactattggcccatctgtcagcgtggcgcgcccgtcgccgagcaaagctttacaacgatgccgctcccaccaatcaaccgattggcgaaatcggatcggaggcaccgattcgaaagagctccgaggatcgcctcaggagagctgatttcgcggaccgtatagccggcgtactctcggagcttagtccgctcgaaggcagagtgttcgcaatccgcggcggatggggctttggcaaatcatccctaaagaacctaatcactgaacgacttgaagttagaaacgatgacacggcctggcttgacttcaatccctggcagtggggtgatagcagcgcaatatctcgtgcgctcttcggtcaaatcgctgatcgactggggggcgagcactccaaggcggagctcgctcgtgccgaagcgctgcgacgatacgggaagatccttaccggagttagcgctccccttaaaaaggccagtggttccaatcacatcatttcgtcagtactgacgagcgcttcagtactcttcgtcgcgtcagccataggctttgatcttccgacagctgcgaaagtcgcggccgctcttgccgccctttccgttggcacgtcccttctcggacgcacgctgttgcatctcggaagggacagaagtgaagagccgctcgacaaggtacgcgaagcactggacgcacgacttcgcgaactccatcgtccattaatcgtttttgttgacgatattgacaggctcgaacccgagcaaattcgggttctcctccggcaggtaaaagcaaacgccaatttacccaatatcgtctttgtgctgctgtttcagcccagcatcatagaacgagcgcttgatccggtcgctgacggcgatggtcgcgccttcctcgaaaaaatcgtgcaagccaactttgatctgcctgccgtaccagtgtcggtcgtgcatcgcatttttttggaggagctatcccagttggtaggccgctatgcgacggagtcgaacggtttttcgcaaacacgctggggtaatgccttgatcgggtgcatccaaccccgcctacgcaacatgcgagatgctcgcagattgctctcgtccatcgcagttcacttgccgctacatgtatccggcgacgttttcgaagtgaatattgtggacttcttagttctggaagctctacgagtcttcgagtcagatctacacgaggcgctgtttagagaaagggcgctggttctccaggaagggcgtttccgccttgacggccgacaggatgcagaaaaagaggcagccgagcgatttcttgaggtcgtgccggaggcgcgtcgcgccctcgcccgagacacgatcaaagagctttttccgcctatcgagtgggcattcggtggcacgaactatggtgacggttttcatctcaattggctggcggcaaaacgagtttgctcgccgcgctacttcccacggtacttcgaacttcaaactgcactcggcgagttgtcggagcgtcgcttcaccgaattcctagacgcgactgcgacacatgacgggctggctgagatgatcgcagcggtcgaagctgatgggttgttatcctcactcgttgcaagattcgatgagtccgttgatcgccttcctgtagagaacgcggccgtgttactgccaggaatgttcagcattgctcagaaactcgtaggcctgcgaggtggcggcctcagctccccgtggatttccgcatggcgagcgacttcgtggtacctgaagcggattccggcagagttacgaggtggtctaataattgaggcgcttcgccagactcaagcgctatcggttgctgcgatactaattcacctgagtgatccctccgatcaaaaagaaggcaaggccgatacctttgatccagcgctcgatctcgagaccgtcgaagcgatgaaggcactatggttggagttgataagggcgcgcgctgctggaggtcacgctttaattgctgagccggatcttgtgtccctactttaccaatggaaggattatacggggtcctttgatgagcctcgtaactggctgttgggcgctatcagcaccgacgagggctttgcaggtatggcaactagtatgatgagcactggtacaagccattcatggggtgatcgagtctccacattgcataactacttcaacagaaaagcgattgaggacttcattggtatcgacgtggccaaggctaggtccgacgcgatcaatcccgcagacttctcggaacatgaattgtccttgagtactttgcataatcatctcgaggtctggctcggaataaaagaaggcgaccttttcggcatatag

SEQ ID NO: 331391 - DNA, 594 bp, Pseudomonas aeruginosa
gtgaaaaagctgcgcattgagtgtccgctggatcagcagtatgcagacctgtacgaggcggcgttgagcattgctgatgcatatctcgttagtatgaatcgggcgattgaggccaatgaagccaatggcgggcgacagctgcgcacccacctcgtcatttcagtacgcatcagaagccacgcgtcctggacagccatgtggtgtaagaaagtcacagtcagggacaccgaaatttcgcgttctctgaagggcgtgcgcaaaacaaaaccctccgtagccccggtcccaggtgagtcgttaacgatagagttacctaaaggcgataaagctgcctacccggccaagacatttagatcgctcccgacagaagtccgcgacatcgcgcgacatcacgagttgctgcttgctgcgatcaggaaggcggcgcttgaaaaccgacagttcaagaagtctactcactacatggttcgtcggaccaaccttgtgattgacgacacttatgaggccctcgctttagcagatgagctcgatcagggctatcagctctatcagcgcgagtatctcgagtggctgagctcggatgattctagttaa

SEQ ID NO: 331392 - DNA, 462 bp, Pseudomonas aeruginosa
atgagcctgatcgctaacctcgccagcctatttgcgaaatttgtacagcctgccaaaccggcatacaccacgattatttacccagccaggggtaaggcattcgtgctgcatgacgacctgggaatacgccatgagcagcgttggcaacaaatcctggagccgctgctgcaagaggttgctgatgtcacttcgcctttggatagccttatcgcggataacctcgtctggagcgattccgctattcatttagaggtcggtgattcactgtcgaatttgtcctccgccgacacctccatggctgactcaacccagtgggttaatcctgccaatggattgccctcgttggatggctgcatcgacgtgatgggcaatctgatgggaatggattcaacgtttagcgatagctggggtgatttttccactgggttttcagacatctgctcaggttttgatttcggctga

SEQ ID NO: 331393 - DNA, 174 bp, Pseudomonas aeruginosa
atggccgaacagtttttgacgaacgcagagctctgcaatctgctgcgctgcagcatgaccaccatgtggcgtatgcgccgcgaaatgccaggtttcccacaacctcgtcgcctaggccgccggctgctatggaccactgagcaggtcgcagaaatcttagcgctcacccgctga

SEQ ID NO: 331394 - DNA, 1095 bp, Pseudomonas aeruginosa
atgccgaaaaaaagcaataccgccctcaatacgcagcaaaatcagggggaaacaacggctatgttccgcttcgtcgcggcaagcagcatgcttttaaagcctatcgcgtggttggtcgataaatacctcgagaaggatgcactggcagtcatctatggccagccaggtaagggaaagtcattcctagcgctcgatctttcctgcagcattgccagcggagttgagttccacgaccacgcggtaaaaccaggtgtcgtgatctatattgcgggtgagggccataacggcctcgcccggcgcatacatgcatgggcaaagcacaacgccgtcgccgtaccggaattgatgttcatctcggaagctcccaccgacctttccaacgctaccaatgccgttcgggtagctgaggctgtccaggaaattgcagataacacagggaaaaaacctgccctgattgtgatcgacacaatggcccgaaattttggtggcgatgagaacagcgctaccgatgtaggccggttcgttcgcaacgtggacgatttgcgtcggcactggaaagcaaccgtgttaatcgttcaccacagcggtaaggacggcgaccgtggccctcgaggatcatctgcgctgaagggggcggtcgacgccgagtacgaagtgaaccgcaacgaagacgacaaaatcatccgcctcataccacacaaaatgaaggatgccgaaaaacccactccccttgcatttgagctgatcggggtggagattgcagacagcatgggcaaccctattagcggtgctgcgcttacgttagtcgaatatagcgccccatctacaaccaaaaaaatcacgcttggcaaacatcaagaaacggcactgaaggttctcgagcaaatggaacaggagatgatggaacaacttaccgagcagggtcgtgaagaacagccggcgctcattccgttcgaggcttggaaagcaaaatgcattgaaaaagacgtctcgagcaaacgcttctctgaccttaaaagcagcctacttaatcgcaactgcatcgagatcgatgggcagcatgttgcgcttgtccgtccggcacggccctactaa

SEQ ID NO: 331395 - DNA, 912 bp, Pseudomonas aeruginosa
atggcaattccggattttcaaagtgtaatgcggccggtgctggccaccgtgcaaaacggcgcaccactgccgctgaatgagttgcgcgagcgcgtggctgatcagttccaattgaccgatgacgagcgcaaggagcgccttccctcaggccatcagacggtgattaacaaccgtgtgggctgggcgcggacgtatctgaataaagctgggctgctgactattccggccaagggcatggtgcagatcactgcgcggggccgtgatgctttgatcagtggcccggagcgcatcaccgtgagctggttgaagcagtttcccgagtttgccgacttccacactgctaagccgcaggcggctgatgcgccggcagtggtagagctggatgccgccgaaacgaccccagacgagcagttggcagaggcgcatcaggctctggtgcagtcgctggccgatgagctgctcgcacaggtgcgggcggcaacgccgagtttcttcgaacaactggtggtcgatctgatgctcgccatgggttacggcggttcgcgcaaggaggccggcaaggcgacccaggccaccaacgacgacggtatcgacggcatcatcaaggaggacaaactcggcctcgacgtgatctacctgcaggccaagcgctggagcaacaccgtgcaccgcccggagatcgacaagttcatcggtgcgctgacccgccagcgcgcgcgcaaaggcgtgtttatcaccacctcggacttctccgccggcgcccgcgaggcagcgctggggctagatatcaaagtggtgctgattgacggcgttgagctggcgcggctgatggtggagaacaacctgggggtgagcgttaagcaggtgtacgaggtgaagcagctggacagtgattacttcagcgaggactga

SEQ ID NO: 331396 - DNA, 3186 bp, Pseudomonas aeruginosa
atggcggacagcaaggaagcccaattccagcaggacatcatcaccgcgatggtcgcccagggttggctcaccggcccggccagcggctacgaccgttccacggccctgtataccgaggactttcttggttacttgaaggaggcttggcccgagcgctgggacaagttcgccaaggccaaccccaacaacccggaaggcgtgctggtgcagaagctggtgcgcgagctggagcaggacggcaccctggatgtgctgcgccatggcttcaagctgccgggggtgaagatcgaggtgtgcagcttcaagcccgaccacggcatgaacccggacaccctcaaacgctaccagtgcaaccgcctgcgcgtggtgccggaggtgtcttattcccctcacttccgcgagggggaatacaacccccgtctggatctggtgctgttcgtcaacggcattcctgtcgccacgctggagctgaaaagcgagttcaagcagagcgtggaaaacgccaaacgccagtaccgctacgaccgcccggtgaaagacccgctcacgcgcaagcccgagccgctcttgagcttcaagcgcggcgcgctggtgcactttgccgtgagccaggatgaagtggcgatgaccacccagctggccggcaaggacaccttctttttgccgttcaacctcggcagcctcgacggcggtgccggcaacccgcctgcgccggatgacagccagtacgccaccggctacctgtggcagcgcctgttccaaccggatgcctggctgaaggtgctgggccgcttcctgcatctgcagaagagcgtgaaggaagatgcagacggcaagcgcgtcaccaaggaaaccctgatcttcccgcgctaccaccagtgggaagtggtcaacacgctgatcgagaccacccgcgccgaagggccgggcaagcgttacctgatccagcacagcgcaggctcgggcaagtccaactcgattgcctggacggcgcatcaactggcctcgctctacgatgccgagggccagcgcctgttcaactcggtgatcgtgattaccgaccgcaccgtgctggacaagcagctgcaggacaccatctaccagttcgagcacgcccagggcgtggtcaagtgcatcacccgcgatatcggcagccagagcaaatccgagcaactggccgaggcgctggccgagcagacgcgcatcatcatcgtcaccatccagacctttccggcattgttcgatgccctggacaagtaccccaagctggccagcggccgctatgcggtgatcgctgacgaggcgcactcctcgcagaccggctcatcggccagcaagctcaagcagattctcggcagcgatgcgccggatgccgaagagatcagcgccgaagaactgctggacgccgccgtggccgcccgtgcgcccaacgagcgcatcagctactacgcctttaccgccacgcccaaggccaagaccctggagctgtttggtcgcccggccaacccggcgctgccggcaagtgccgacaacaagcccgaggcattccacctgtactccatgcgccaggccatcgaggaaggtttcatcctcgacgtgctgcagaactacaccacctacagcaccgcctggaagatcgcccacccggacggcgacgacgaggaagtggactcgaagaaggcgcgcatgaagctggcgcgctgggtgcgcctgcacccgtacaacatcagccagaaggtcgaggtgatcgtcgagcacttccgcgccaatatccgccacctgctgggcggccaggccaaggccatggtggtcaccagcagccggcaggaagcagtgcgttaccagttggcagtgcaggcctatgtgcagcagatgggctacaccgatgtgcacccgctggtggccttctccggcagtgtgctgccggatggggtgatccccgaagaggtgacggaaagcagcagcctgctcaaccccggcctgaacgggcgcgacctggcggaagccttcgacacccaggacttcaacgtgatgatcgccgccaacaagtaccagaccggcttcgatcagcccaagctgtgcgcgatgtacgtggacaagaagctgcagggcgtggactgcgtgcaaaccctgtcgcggctgaaccgcaccttcggcgacagcaaacccaccttcatcctcgacttcttcaacgacgcccaggacattctcgacgccttcctgccgtactacaccaaggccgagctgaccgacgtgaccgacccgcagctcatctatgacctgcagaagaagctggatgccgagggcatttaccactgggaggaagtggcggcgtttgcgctggccttcttcgaccccaaggccgctgccagcaagctcagctactactgcgcgccggccaaggagcgcttctccaagcgctacaagctggcccaggaatcacgccagcatgcgctggagttcaagcgtgtcgccgagcagaacggcgacagcgctggcctgaaaaaggccgaggcggcaatgaaggaagccggcgagcaggtggatcagctcgacctgttcaagaagaacctgcagagctttgtgcgcctgtacgagttcctctcgcagatcattccctatgaggatcccgagctggagcagctctgtgtgttcgccaagcacctgcacccgctgctgcgcgtggatcgcctcgatcaggaagacgtggacgtgggcgagctgcaactgactcactaccgcctgacaaagcgcgccgagcaccaactgcgcctgagcgaggagcaaggcgactacggccttgagccggccacgggactgggcagcggcaaaccccacgacccggagaagaaacggctgtcggaaatcatcgaggcgctgaacgatatcttcggtgccgaggtgagcgatgaggatcagctgcagttcctcaccggcatcgccaatcgcatcagccgccaggaagatgtgatggctcaggtgaacaaccactcggtggagcaagtgatgcacggcctgttccccaagcgcgtactcgacaccgtgctggacgccatgaccgaccacgaaaaaatgtcgctggaagtgctggataacgagaccaagagccgggcgtttgcgttggtgattttgaagatgcttacgcagcaggcggggctggatcagagcggcgaacgccgcatctaa

SEQ ID NO: 331397 - DNA, 1458 bp, Pseudomonas aeruginosa
atgacaaatttgtcgggagcaaatttgaacaacggcgcagccgttggcccgcagggcgagagcagggaaagcccgagtagttttccggcatatccggcttataaggattccggtgtggaatggctgggagagattcccgggcactgggctgtgttcattgctaagcgaatgttcggcaatgttagagagtcggccagcgcagatgctgagcagctagctgctacccaagcatacggtgttattcctcaaaaagatttcatggaaaggaatgacacaaaagttgttttggcgctttctggtactgagaatttccgagccgtaaagtctaacgactttgttattagcctcagatcctttcaagggggtattgagcattcagcatatgatggatgtgttagtccagcatataccgttctccggcgaaaagatgagagaaatctaaatcctggctatctcagatatctattcaaagacgcctcttacatctccgctttgcagtctgtaacaactgggattagagaggggaggacaattacatatgagcagttcggctctttatcgatgccagttgcgccagttgccgaacaaacccaaatcgcccgcttcctcgaccacgaaaccgcccgcatcgacgcactgatcgaagagcagcagcgcctgatcgagctgctcaaggaaaagcgccaggccgtaatctcccgcgccgtaaccaaaggcctcgacccgacggtgccgatgaaagactccggcgtagagtggctgggcgaggtgccggcgcattgggatgtttgttctgtccgacgggtaattagtgccatcgagcaaggctggagccccgaatgcgaggcaaaccctgctgatgaggatgcctggggagtactaaaagctggttgtgtcaatcgaggggtattcgacccttccgagaacaagacattgcctgcttggctggagccggtagctgaatacgaagttcgtgctggcgatatattgatgtcccgggcaagcggttcacctgaattagtaggttccactgcgctgcttggagaggttcgcgagaagctgatgctttctgacaagatctttcgcctccacttggaggcaaagatcagcagttccttttttgtttgggtgatgaatgctcagtttatgcgggcccagatagaacaagcgctgagtggcggaaatggattggccaataatttgccacagtcatccttgctcgccttttggctagctgtgcccccgagccacgagcaagttgccatcgccgagtacatcaacaagctggtaggagaaattgatgcgttgatctccgaaggtggctctgcagtcgagcttctccaagagcgtcgctccgccctgatctccgccgccgttaccggcaaaatcgatgttcgcggttggcagccgccggccatcaaccaagccccaaaattagaagtaacagaggccaactaa

SEQ ID NO: 331398 - DNA, 1977 bp, Pseudomonas aeruginosa
gtgaacacggaaaaccattcccagacggccgcctttctctggtcgattgccgacctgttgcgcggtgacttcaagcagtcgcagtacggtcgcatcatcctgccgttcaccctgctgcggcgcatggaatgtgtgctggagccgaccaaggaagcggtgatccgtgagtcctacgcgcaggaaggccggcctgatctggtgcgcgagcgcctgctgctgcgcgcggccgggcagcagttcttcaatgcctccaagctgactctgggtacgctgtccgacacccagaccgccgccgacctgatgagctatgtgcagtccttcagcaaggatgcccgcgagatcttcgagcactttcactttgaagacttcgtgcagcagctctctgccgccaacctgctgtatcaggtggtgcagcgcttcgccgccaccgacctgagccccgagcgcatcagcaacttcggcatgggcatcatcttcgaagagctgatccgcaagttcgcggaaagctccaacgaaaccgctggggagcacttcaccccgcgagatatcgtacacctgaccacctcgctggtaatcaccgggcaggacgacaagctcaagcccaacagcatcgtcaccatctacgatccgactgccgggaccggcggattcctttccgagggcgacgagtacatccagtccatcagccagcaggtcaccgtgtcgctgcatggccaggagctcaaccccgagtcctacgccatctgcaaggcggacatgctgatcaagggccaggacgtatccaacatcaagctgggcaacaccctgtccgacgaccaactggccgacaaccgcttcgacttcatgctcagcaacccgccgttcggcgtggagtggaagaaggtacaaaagcagatcaccgacgagcacagcgaaaaaggcttcaacggccgcttcggccccggcctgccgcgtgtgtccgatggctcgctgctgttcctgttgcacctggtcagcaagatgcgtgacccgcgtgaaggcggttcgcgcatcggcatcatcctcaacggctcgccgctgtttaccggcggtgccggttcgggtgagtcggagattcgccgctacctgctgcagaacgatctggtcgaagccatcatcgccctgcccaccgacatgttctacaacaccggcatcgccacctatgtatgggtgctgagcaaccacaaggccgccgtgcgccagggcaaggtgcagctgatcgacggcagccagcacttcgccaagatgcgcaagtcgctgggcagcaagcgccagtacctcaccgaggagcagatcgacgaactggtgcgcctgtatggccgcttcgaggaaactgcgcagagcaaaatcttccccgttgaagccttcggctaccggcgtatcaccgtcgagcgtccgctgcgcctgaacttccaggtaagcccggagcgcatcgccaaggtgctggaagaaaaagccatcgagaaactggaagccccggcgcgccagcgcctgaccgaagccctgcaggccatggatgccagcctgctgcaccgcaaccgcgagcagttcagcaagctgctgaaaaaatcgctcaacgcccacgacgtatcgcccagcacacccgagctgaaggccatcctcaacgcactgagcgagcgcgacccggaagcggatatctgcatggtcaaaggccagccggaagccgatgccggcctgcgcgacaacgagaacgtgccgctgggcgagtcggtatacgactacttcgagcgcgaagtaaaactccatgtgccggatgcctggatcgacgagagcaagcgtgatgaaaaggatggcgaagtcggtgtggtcggcttcgagattcctttcaaccgccacttctatgtattccagccgccgcgcccgctggaagagatcgaccgcgacctgaaagcctgcaccgaccgcatcaagcagatgatcgaggggctgtcggcatga

SEQ ID NO: 331399 - DNA, 954 bp, Pseudomonas aeruginosa
atgcgcagcaatttcgagctgtcccgggaaaccgcgatgaataccgagagcatgctgcaattgctcggcgcttcggcctacctggctgcccaggggctctggccgatcctgctgatgctgctggtggcggcgatcgtcgggccgatcgccctcggcggctggctgttctcgatggacgccctgcaacccaagttcagccggctcaacccgctgtcggggctgaagcggatgttttccgccaagtcgctgctcgaactgagcaaggcgctgatcaagttcctggtggtgctggcggtggccctgctggtgctctccgccgaccgcgacgccctcctggcgctggcgcaccagccgctcgagcaggcgatcctgcacagcgtgcgggtggtcggctggagcgccttctggatggcctgcagcctgctgctgatcgccgcggtggacgtgccctaccagatctgggacaaccgccagaagctgctgatgaccaagcaggaagtccgcgacgaatacaaggactccgagggcaagcccgaggtcaagtcgaagatccgccagatgcagcgcgagatggcgcagagacggatgatggcggcggtgccggaggccgacgtggtgatcaccaacccgacccacttcgccgtagccctgaagtacgacccggcgggcggcggggcgccgctgctgctggccaaaggcaacgatttcctggccctgaagatccgcgaggtggcccaggagcacaaggtgatggtcatggagtcgccggcgctggcgcgagcggtgtactactccaccgagctggaccaggagattcccgccgggctctatctcgccgtggcccaggtgctggcctatgtctaccagctcaagcagtaccaggccggcaagggcaagcggccgagcccgttgaaggacctgccgatcccgccggacctgcgtcgcgacgagtga

SEQ ID NO: 331400 - DNA, 1260 bp, Pseudomonas aeruginosa
atggatcgaaccttgtctgatcgtattttcccgcctgtcctcctgttgctcgccctggcctggctgctgccctggatgcctgcgcacgccgaagcgccggcggaatgggtcgccttgcccctgtcggagcgggtggtggatgccacccacacgctggacgaggcgacgcgccaacgcctggtggagaagctcgaggcgctggagcggcgacgcggtgcgcagatcgcggtggtgatgctgccgactaccggtaccctcgatatcgaagccttctccgacaagttgttccaggcctggaagctcggccgcaaggcggtcgacgacggtctgctgctggtggtggccaaggatgaccggcgcatgcgcatcgaggtcggctacggcctggagggtgcggtgcccgatgtggtcgccggacggatcattcgcgagcggatggccccggcatttcgcgagggcgactacgccggcgggatcgaggccgcggtggacgagctgatccgcctggtcgacggcgaaacgctgtcgtcggccgcgtcgtcgggtgcgccgaaagtctcgctggggcaattgccggcggaagcctgggcgctgctggtcgccttcatctacggatcgttggccggagtgctgttgagtgcctgggcgctgcgctggccctggctgctcggcggggcgctgctctgctggctgctgggcacgctggccggcgcttccggcgaatggatgagcgtgctgctggtcgctccgctgtgcatgctggtcggcggcgcgaccttcggcgcgctgtggacggtgcgcccggccttctacctggtgatcggcgtactggtctatgtagccctgctcgggctggcggcgcattggttcagcgcggtgtccttcatctacggcctgctgtggccggccggggtgctgatgctggcggttctctgctggtcgaactaccgcctgatgcgctcgctatggcgcgagcggcggaaaagtttccaccgccgactgtgggcgttgctggcggcctacctgctgctcggattgctgtccggtggcctggacgcaccgctggtctggctggccctgctaccgttccagctcatgctcgggctgctggtgttcggccaggtacgcctgagtggggggggtggaggctcgtcgggaagctccggcggcggttcctcctcctcttcctcctcgtcgtccggcggcttttccgggggcggtggttccagcggcggaggcggtgcctcgggcagttggtaa

SEQ ID NO: 331401 - DNA, 2124 bp, Pseudomonas aeruginosa
gtggatcgcacgcaactgatcagcaatgtgcgcagcaacctggcgggactggggcgcggcagcctcggcgtgccggtcctgctgctggccatgctggcgatgatgaccctgccgatcccgccattcctgctggacgtgctgttcaccttcaacatcgccctgtccatcgtcgtcctgctggtctgcgtgtacgccctgcggccgctggacttcgccgtgttcccgactatcctgctggtggcgaccctgttgcgcctggcgctgaacgttgcctcgacccgcgtggtgctgctccacggccacgacggccatggcgccgcaggcaaggtgatccaggccttcggcgaagtggtgatcggcggcaactacgtggtcggggtggtggtgttcgcgatcctcatgatcatcaacttcgtggtggtgaccaagggcgccgggcggatttccgaagtcagcgcgcgcttcaccctggatgccatgcccggcaagcagatggccatcgacgccgacctcaacgccggcctgatcgagcaggaggaagccaagaagcgccgcagcgaggtggcccaggaggccgacttctacggttcgatggacggtgccagcaagttcgtccgcggcgacgccatcgccggcctgctgattctcttcatcaacctgatcggcggcgtcgccatcggcatgatccagcattcgatgtccttcggcgatgccggcaaggtctacgccctgctgaccatcggtgacggcctggtggcacaactgccgtcgctgctgctgtcgaccgcggcggcgatcatggtgacgcgggtctccagttccgaggacatgggccagcaggtcaaccggcagatgttcgcctcgcccaaggcgctggcgatttccgcggcgatcctgatcgccatgggcgccgtgccgggcatgccgcacgtttccttcatcggcctcggcgccctggccggtgctgccgcctactggatctggcaccggcagaacaaggccaagcaggtcgccgagcaggaggtgcagcgccagcaggagctgctgccggcgcagcgcgcccaggaggtcaaggaactgggttgggacgacgtcaccccggtggacatggtcggcctggaagtcggctaccggttgatcccgctggtcgaccgcaaccagggcgggcaactgctggcgcggatcaagggcgtacgcaagaagctgtcccaggagctgggcttcctgatgccctcggtgcacatccgcgacaacctcgacctgctgcccaacgcctaccgtctgaccctgatgggggtcagcgtggccgaagcggagatctatcccgatcgcgagctggcgatcaaccccggccaggtattcggcagcctcaacggcatcgccggcaaggacccggccttcggcctggaggcggtatggatcgagcccggccagcgcgaccaggcgcagtcgctgggctacaccgtggtggatgcgagcaccgtggtcgccactcacctgaaccaggtgctgcacaagcacgcccacgagctgctgggccatgaagaagtgcaacagctcctgcaattgctcgcgcgcagctcgccgaagctggcggaagagctggtgccggggctgatttccctgtccaccctgctcaaggtcctgcaggcgctgctccaggagcaggtgccggtgcgcgacatccgtaccatcgccgaggccatcgccaacgtcgctccacggagtcaagatcccggcgcgatggtcgccgcggttcgcgtcgcgttgtcccgcgcaatcgtgcaaagcattgtcgggcttgagccggagctgcctgtgatcacgctcgagccgaggttggaacagattttgctgaacagcatgcagaaggccggacaaggctccgaggacggcatgttgctggagccggggatggccgagaagctgcaacgctcgctgatcgagagcgcgcaacgccaggagatgctcggtaagccggcgatcctgctggttgccggaccgatccgctcgatgatgtcgcgcttcgcgcggatggcggtgcccagcatgcatgtgctggcctaccaggaaatcccggacaacaagcaagtcaccatcgtcgcgacggtgggacagaactga

SEQ ID NO: 331402 - DNA, 1050 bp, Pseudomonas aeruginosa
atggccgaaaaagagaaccaacactatgtaccccaatattattttagattttttaacggcggagaacaatcaatctgcttactcctacgcaagacaggaataattaggagtccagccccaattagaggacaagcatcaaagagttatttctatggcgacaaagaaatcgagaaccagatagaggaaatcgaaaaaatactccgccccgcccaaataaaattcagagaatgtaaaagccctaacgacctaaccttagacgataggaacaaattactccaaggcgtgatgttccagagatctagaaccatgacaacccgcttagatcgagcggaggcattcacacgaatgatgcagcttcaacttgaagtctccataaacaacgaccccactaaaacagataaagaaaaagaagaactacgatcagtccttggtcttgttcaagcgttaccagaaccacaccaaggtatgatcatggctatatctttaaccttagccgaacacctgcaagatctaacactaataaaaatccaaaacagaaccaatagaccatttatatttggagactcaccagtaatcctatctaatcccgctcaaaaaaagattttaaacagaggagttctaggggctcaaaccccaggaatcctagtcttcttcccgctagggaccgatcaagcactcatgctaattgatgaaagcacctacacaattaaaggcagcataagaaacggcataattaagttgagaaacctctcagacttaagacagctcaacaagctacagatacacaacgccacatcagccgtctatttccacgacataaaatatgccgactacgtaaaatcattatggcaagaaaccaagccaaaattaacaaatatccgtggaaaaatatacgaagggccaatgagagtagatgggcgagaagcagaggttatacacacttacgaccagcagctaccactaataccaaacctaacttttttaaaatatgaagagttccccgccgacagcaacttcattgctcgacgcaatccatatacgttattttaa

SEQ ID NO: 331403 - DNA, 1278 bp, Pseudomonas aeruginosa
gtggcggcctatttacttcaccttgatgaatctataataaagagaactcttaaactggcgagggagcatattttcgccggggaaggagatcgattacacaagaagagtttaactttacgatatgatgagagtcatcgtttatctgagcccagtgggctagggttgctaaagtatattgaagacaaccattatagtaggtggagagggtatcttggtgagaagcaagaaactcttcattctgccggttttgaagatggaggcggagatatatgcttcactatcaagggagctgagcagagagaaaattttattctcggctctctaggctacgccaataaaatagccgttagtgatttctcattctggtataagcgctttggaattaaagatccaaagccggccgttgctatggcgaatgctgtgatgacaatgacaagggctgactttatccaaactagagtgatgattaccagtccgactatcgagacgttagtattgccggctaaggtttacttgagtccttttatcaatagtttggacagggccatatttcgtgtctcaactgagttcgtagatatacatgctaatgctggtacgggaaaaataaaggtgactcccgcttttgtggatgacaaagcctactctctgaacttgcttcgcaaggcgctcatattttttgaaaaaatcatagcttctcgacacgatgtttctgttttttttgagcatcaaggtaattttcttaggatttttaatgcctataccaatcctttggataagtcaattgaacgcttaagtgatgtggcgagttatttgtctgatatttttaaagattcatttgattgctcgtctttatcagtaagtttgaattggcttcgtgaaaatgggcgggctgtgcaggatttgctaggtttgaaaaaaggccttgggagatttaagatcactttcgaacaagaggaaaactctgattgtatttgcccatcgagagctcatttctttcattatagaacgctagtgttggactcgatttgttatgttttcatttttgccgctcaatgcgttagatttcatgatgatgaaggtcggcatggatttttcggggacttcaagctggttaaggagatggagggacctaattcggaatcatggataagtgagattttggcttctgaagtgtcacgattaggtgatgaacttattaaagtgggggatgtatattgtgatgattattggtctgacctttctaatgcccctactaatttaatgattaggataaagtaa

SEQ ID NO: 331404 - DNA, 666 bp, Pseudomonas aeruginosa
atgagttacggtgtgaagtttgtaggtgattacggtcaggtaataatcgatcaagatcacccatgcatgcatgtcgttgcagaaggaacatacagcggagggagtgtcacgtatcccgcacctatagctagcgtagttcctccgtttgtattcttctcgccaaacggttcccatctaatatctttttttaagcatgtgggagttcccggtagctggaccgggttcacgttctctcaacttgtgttctcggcaatgactggagttgcgtatggcggtaagtggaaagcctgtgccgtgtatttgcctagaacctctggatggggaatgcaggtattcgataatgagtcacgagttgtatttgatagcaatcgtcaaattgctcgatatttaggtggaagccagaattggaactacgctggcagggatacaggcgcgctgcctggttatacgttgaacacttgggctactccgtggacgtggggtggggcatattttttagtgagtcatttcaatgcgcaaacaggccatacgcctgatccttctgacgtgggcatagggtttgtattctcagggaattcacacatatacgtgacagcctacatgccgggtggtagtcaacctgctttccaggtttcgtttaacactccgcttttagttatggcgtga

SEQ ID NO: 331405 - DNA, 771 bp, Pseudomonas aeruginosa
atggcttggtattccagtggcacagtagcggtgaccgcaaatagcccgaccgttaccggtgccggcacacagttctcgtccaatgcccgagtcggcgatgcatttcgcggacccgatggacgttggtacgaggtcacaaacgtggccagttcgacggtcatctcgatcaagcccaactaccagggcagcacggccagcggccagtcctatgcagtggcgccgatcctgggctacgacaaggacctgtcggatcgattcaacttgatcgccaaccagtggggggcaaccctggcggggatcaagccctgggcgctctctgcaaatgcggcggcagcgcggggggatctcggcctcggcagtgcggctgtccgcgaagcgcttggtagttcgggcgcgctgtattcgcgagacagtattctcggcgctgtttcgcagtcgagcggagcgcctaccggggcagtaatccaacgcggcagcaacgcgaatggtgagttcgtgaggttcgctgatggaacgcaaatatgcatagtcacgttgttgggtgatggtagtcagcagccaaatacgtctatatcactgcccctgccggctgcatttctgggtaattggagcaccggtgtcagcgtgagttgggcgtcgcatgtgagcaacccttctgtggcaaacgggctgaaagttgcctatgcaaacggctcgacattgttcttcatccttcaggacgcactggccaccaatcgtttgattttcactttggtagggagatggttctga

SEQ ID NO: 331406 - DNA, 303 bp, Pseudomonas aeruginosa
atgatcatcaagttgtcaccgtacgcaccactgccaggcagcgacgagcacctgtcgctggtcaggattggcgatgtgctcactgtgaacggccagtcgttcgacttcacaccgctaccggagggtggtgaactgcgggctgaggcgattggatcagagtggttcgctggtcccgcagtgcgacgtgccgaccggctggaactgagcctgcggttcccgctggccgctgatgccagtgccgctgctcgcttccctgaaccgttgctgatcgaggccgacggcccggtggagttaccgcgatga

SEQ ID NO: 331407 - DNA, 369 bp, Pseudomonas aeruginosa
gtgatctcggcccgcgtaatttcgatcgcgctggcctgcttgcttctggtcggcctcggcgccgccggcggtgtctggctcggcgcgcgacactaccggccgcagttggatgccgcgagcgcggatctggtcgcctgccgtgccgcccggggcagcctggaggcctcggtggtggagcagggcaggcaggtcgcagcgctgcgactggccggcgaacagcgggccagggaggcagcccatgcgctggagcagggacgactgcaggccgccgagcagtatgcagcagccaatcgcctgctgagtcagcgaaccgccggcgaggagtgtgcggccgccgaggcggtcgttgatcaggagttgggcctatga

SEQ ID NO: 331408 - DNA, 759 bp, Pseudomonas aeruginosa; identical to SEQ ID NO: 321186

SEQ ID NO: 331409 - DNA, 123 bp, Pseudomonas aeruginosa
atgaccatgcgcaaagcactgaccgctatcgcactcgtcgcgctgcttggcctggccactgttgccgccggtgcagcgctccagccgttcaagaatctgttcatctgggaggtatgtcagtga

SEQ ID NO: 331410 - DNA, 492 bp, Pseudomonas aeruginosa; identical to SEQ ID NO: 328607

SEQ ID NO: 331411 - DNA, 1059 bp, Pseudomonas aeruginosa
atggctcgcgcccgcaacatcaagccctcgttcttcaagaacgaggatctggccgacctgaatccattcgaccgcctgctgttcatcggtctgtggtgtctggctgatagggaggggcggctggaataccggccgcgtcggatcaagatcgaactgttccccggggataactatgacgtggagatcggcctggccaatctcttggacaagggattcatcgagcggtacgaggttgctggtttctcggtgatctcgctaccgaacttcactcgtcaccagtctccgcatagcaccgagaaggacagcgaactacctgactgcaatggttatctaaccgtgaatgagcgtgcccgggggaaggttgttcccggtaagcaacggttggtgcatgcggataccggcgcctgtgtgggcgccaataacagtgttttaacagttaaaacaccagagcagccgcagtcggacactgtggatgcaccaacccataacgccctgattcctgattctctgaatcctgattacctgaatcctgaagaagatcaagagactcttgtcgactctgacgaatcgacgacagcgagcgacgaccttgccagtggggagaaaccacccgccgaggaacgatccgagtacagcgaggacttcaaccgtttctggtcggagtaccctcgccggcaccggtccggcgcgaagaaaccggcgtggaaggcgtggaaggctcggctgcgtgctggcgccacggtcgaagacctgatccaggcggcgaagaactatcacgccgagatggccggcaagggcaacgtcgggacggagttcgtcaagctgccggagacgttcattggcccgaacgatcactggcgggagtacgtcggtgagcatggcgctcccagggggccttccggctctggcggcaagcgctacccgttcaccccgccacggggctaccagctcgaggatcacgagttctggcatccgcagatgacggacacggtgctgtccactcggacccacgacttcagcacccttgagcgtttgccggacggggagggcgcatgctga

SEQ ID NO: 331412 - DNA, 531 bp, Pseudomonas aeruginosa; identical to SEQ ID NO: 328906

SEQ ID NO: 331413 - DNA, 588 bp, Pseudomonas aeruginosa
atgacgccggcctgtgtacccctgcgcattgaaaaaggggcgacgttccgcgacacgatgcggatcatgcaaccgagccttgtctaccggccgatcacccagatcgcgtcgaccgctcccgtccggctgaccatccccggccacgggttgcccgacacctggttagcatggatcgatggcgtccagggcatgcccgaactgaaccgcgctcggcttcggcaactgcctcaccgggtcgcgtccatcgacgacgacacgatcgagatcaacttgctgtcagccgttgggctggcgcctgttggcgggcaactgatctaccagccacctgttgacctggctggcgccgaggtacggatgcagatccgcgatgcgccaggtgggacggtgctgatgacgctggcgctcggctccggccttgagatcgctggcgccggaacgatctcgcgcgagatatcggcctccgataccgcggcgttggcatgggcgtcggcggtctacgacgtggacgtgacctacccggatggaacggtccatcgctactacagcgggccgatcactgtgagccgtgggggagggtgcgatggatga

SEQ ID NO: 331414 - DNA, 192 bp, Pseudomonas aeruginosa
atggatgacgccgccgagccatgggcgctggcgatcgaggtcgatagcgagccgctggtgctcagcgagatgcaggaatacgcggtcaccgtgacgccgccggccgatgtgctggtcgttgtggctggtgatcaggggccgcccggcagggacggcgtagacggtgcccaatggggcgcgactgattggtga

SEQ ID NO: 331415 - DNA, 933 bp, Pseudomonas aeruginosa
atggctgatgtacgaccgacgaagttgcagaacgacggcaacggctatggctcgcttcgagagttcggggacggcgacacggtgccggttgcgcttggcggaacaggagcagcaaccgctgccggcgcgcgcttgagcctgttcgacgccaggctgcagaacttcagccttctgctcggtggcgctgaccagctcccgttccagactgggccgaatagctggtcgcaaaccccgctgacaagcgtagggcgcgctatgatcgcggcatctacgcaggcaaatgccctgaactacctcggcggcgttcccaagagcctgtcgtccaaccggaccgtctcggacccgaacacggtaccggacgagtgcgggttctacggcatcggcgtcggtccttactcgaacttgccgccaggcatcgatgctctgaaccccatcggatcgatgctctatcaccatccatacgacgtcgcgaccgcagtgcaactattcgtgccgcggacctcgaatatcctgtatttccgcaggagggtagccggggcgtggcagtcgtgggttcgcgtgctatccgatgcgcagttgctgggtacagtggctcagtctggaggagtcccgcttgggtcgatattggagcgaggcagtaacgcgaacgggcaatacgcccgattcgccgacggcacgcagatttgcacggttagcctgcttggcgccaacgaccgcatggcgaacacaggctacacactcacattgccggcggcgttcactccagactggaccacgggggtatcggtatcctgggtgtcgcacgcaacgaaccccgcaacgtacaacggtgtgaaggtggcatatgcgaacggcaccgcgctgacgttcatcctggctgagaacctcacgacaaaccgtttgatcttttcctgcatagggaggtggttctga

SEQ ID NO: 331416 - DNA, 1047 bp, Pseudomonas aeruginosa
atggcaaaaaagaaggcacttcagagaaccctgcaattaaaaccagtccaattctctaaacctgtggacggcatttctctgtataacctgatggtttcgctaaatgacagatgccctatcatcaggaataggctgcatgtaaaaagccttacacttcaagatggaacggtaattcctcagatttgttatttctataacaactttgaaattcttgacgatacgacctgcaagtttgaagtatggtcgtacgaacctggagtaatgccacaccttttagagccgaatcccgacctgcccaatgccgtaattcctgaagagcttcaacaagaggcagaaggtaacgcagaggttcaggatggcgagaaggacaatcgagaactaatacacatttcgcatgtattagtctttgggaaatccgccattattgagtgcacccgaggaacggggggcgttcatcatattcagtcctatttgaacagaataatgcgcgacctaaacataccgcgcccctctaacttctactttacagacgcagtgtctggaagtctcaaagctgagattgacagagcaggcggggcgataggatttacgcttgggatgagcacagccgtggccaatgctgagaatccgttagtcggaatgctcagctctgcaaagcagcatatggcaaactcaagcatggtcacggttggctggtcctcgaagacgaaactcgacactaatgctgttgtccaaacctatgaacaagctcagcagcaagacgaaattgaaagtgtaattattcacctaaaagacaagtcaaccattaatagcttgtctaaattcaaaattaagcgtgatgttgaggtcgctgacatcggcggaaagaatccgtcccgtccagagctttggcggaaaatgctagagtatctagagtaccttacgactccggatgacgacggcaataggattcttgatgagacgggagcgctggcaggaaatgaaactttcatccctctttcccgaagaaataataaacgcgctcaaggccaagacagagctgaatga

SEQ ID NO: 331417 - DNA, 405 bp, Pseudomonas aeruginosa
atgcttaaactcgctgtgctcgctgtttcctccatgcttctggcgtcggtcgctcaggccgaagttaaggaagattgcagcgcgaaaatgaacggagaaatccgctgtgagttcaccaacaccggcaagaagaaggacagcgcgtgcgtggtggtggaggttgtccgtctgtatgactcggacgtgtacagccgctctagctacgggggaaagggggcagcgctgcgctccgataaggtctgttcgggactcattgagcctcaagacgtccgggagcgtgcgccttcctcgtcctgggcggtgaacggcaccccgatgactccctatgagttttgtgactcggataacccttggttcaaggcgccagagaactgcctgatgaaaaccacagcagttccgaactga

SEQ ID NO: 331418 - DNA, 390 bp, Pseudomonas aeruginosa
atgggcgcgattgaccttcaagaggcgagcgaaatgcttgctgagcttgaacgcatgcattcggagattgagttcctgatgtctgctggcgaaaacgttaagtatgcttcgcccagtgacgtcgccgctctacaggagcgcttgaaagccatcaaggctgacatccagtccgcggctaagtacgagaccctcgctcgacgcaagcaaacgaaaacggagctggagcaagcatttttcggccctgcggtccgctcagcgtcagccaacttcaggcttccgagcaactccaaccctagaagccctaactggatcagcggcctgtacgaggtgtcagttgacctttcgtactacgcacatggtctcagggcacatatagacgacgctgcctga

SEQ ID NO: 331419 - DNA, 894 bp, Pseudomonas aeruginosa
atgacaaacagcaccagcaccgcagcagagcaaccgcttcagtcgacacagcagcggccaatccttccggaagaagtcgggctgtttgcctccgatgaaccgcagcagcacgtcggaggtcgtggagtaaatgcaaaaaacagcccccgcaggtcgcctcgcaaaatcctctcaactccacagcaggcggggcgtatagctagctttcacgcaagccatgaacagcgcgtagcagctattagtgaattacacccagacctagacaacgaacaggtaaccaagctccgttctatcgacagcttcatcagtaagttagccaagtcatacaaaggcaccggcaagctggctgactggtcgaagcatgtgcctccccacatcaagcagttcttccggttgctttggttagctcggcagcctgacgccaaggcttttacgatccggcttgatcacgatacagctacggcagcattggcagcgaagcgcagcccggccaatcatctcgcaggaatcatccagcggacgcttaccaagctcggcatcaccactgagcaagccttcaacctggagtttgtccacggcaccagcagggaaaatcatccgctgcacgttcatgggattttctgcatcccggctgatcgatctgaagaggtcagcaaggcccttagaatcgcgctagcgaaggattaccggcaacgcttcggtaacctagccgttcacatcgaaagcatccagaacgagcgctggtgggctgcgtactgcatcaaagagcacgacatcacggcaggccaactcagggacatcagaaaccgggaaaccgatccggactatgcaagtcatgcagccaggcgaggcgggaagttgatctatgagcgcgtaagcgactggctcgactag

SEQ ID NO: 331420 - DNA, 627 bp, Pseudomonas aeruginosa
atgactggtaagcaggcaactccggatcaaggggctcaagctgtcattctccgagaggctggctatacgttgtcggcgattgccgaacgcctcggaatcagcctaagcactgttcagcgtctgctgaagaagcacaaggcggttgctggcgccgcgacgcatgcgctgattgagaaggctagggaagagatgcttgcctcagccttctcgttggaaagcgttcagcaaacagctgccgcgctggtattggatgacttagccctcagccagcagatcaggcagaaactgttcagcgcactcgacctgctcgaaccagatagccccattgtcttcaggtcactcgctgcctctgccaccacgctcaagctgacccaggacgtaggccggcgtgcactccctctcgacaagctggagcaggcacaggccgttgaagagcttccggaactccagattcacgtaatgacaccttgggatgtcgaagagatgcgggctcaacagcggctcgacgaggccgaactgagaggcgacgcagaagcggtcaaggcagagctcgaaaacctgcaatggattgcggagaagaaggcacctcgttatgagagtgacgacatcgtgatcatcgaaggctga

SEQ ID NO: 331421 - DNA, 576 bp, Pseudomonas aeruginosa
atgacgactctcgcttacgtccgcgttagtacggaagatcaaagcacagaggctcagcgtcattcgatttcacagcttcacaatgtcgagcactggttcgctgatgaagccaccagcggcgctatcaaggcgctacagcgccccggctttgcagaactgttcaaattcgcccggaagggcgacaccctcatcgtcactgctatcgaccgccttggccgagacaccatcgacgtgctcgaaacggtggaagctctcaaagccaagggcgtcgccgttgtttcgatgcgagagggctttgacctctccagcccagtcggaaaagccatgctgacgatgctggcagccgttgcggaattggaacgctccaatatcaaagcccggcagatggccggcattgagcgtgccagggcgcaagggaagaagctgggggcccctaagagaatcgacgatcaagctgtcgccaactggcgtgcggctaatcaggcaacgattcaagaaaccgcagccgagttcggcatttcagtcgcagcagtgaaacgagcctgcgccagcaagcccgcagtagaggagcaatga

SEQ ID NO: 331422 - DNA, 1848 bp, Pseudomonas aeruginosa
atgccagcccagcccgcttacctcaccctcaatcgtcacggcacgtactactttcgcgtagtgatcccactccccttgcgcgccgcatttggcctgcaacgagagattcgccgctcactgaaaaccgacagcctacggctagcgcttcgtcgtgcccggcaatacgctgctcgctttgaggcggtgttcgacaaggcattacacgtgattgacgacgacttcatccccacagaggaagacctccggcttttcaacgaagaactggagcgggcaggcaagcccgaacaatggggtaactggacaagcagcccagcagagcaagaggacacctctccatctgcactctcggatgaagatcggaaagagatcttcgatcagcagcgccgacagctgatcgccatggagatgacaggaagcctcaaaggaagcattccttcgagccagcaagagctggccgagcgcctctttgatgaatacctcgatgtgccgctttcgcgcttcaggaagctattgccccagattctggatcagttagcgctagcgaaactcggagcaaagcctgcggccaacggggcgcccagcacaaaacctgagcccccacccgagccagagggtcctaccctgttcgaaatttgggagcagcaatgggatacagaacacaagctagcgattgcatcgaaacgcaaggtgaaatcgccgcgcacacggaaagcagagtgcggttatgcctcccgactgaacattctgagtgggaacaaaccgatcaaccagctgagccttgaggatttcaaccgcatctatctgcaaatcttcgatctcaaggcaagccgaggcactaagatcccacctcccaactcgccaatggactccatcctggcagatccggggattgcgcgaatcgactcagcgactgccgacaagctaatcattcgcctaggggttctacacaagttcgcctacaagaagggcatgacttccgttccaccggaccgcacggacaaacccagcattccaaagccaacgcaggatgcattggagcccgagaagtcatttgaaacggaagacctggagaagatcttcaatgggtggctcttcaccggtacggagcgaaaccatcgtcaaaaagtcttcccttaccagttctggttgccggtgctcgcctactacacaggcggacgcctcaatgaactgagccaactcgacaccgaagacgttaggcaaatcaagggaatctggacgatcactatcgtcgatgatccagaggaccgcccatgcccgaaatcagtgaaaaacaactccagccggagagtcttgccccttcacagcgaactgctacgaatgggcttccttgagttttgtgagcaagcagttcaggaagggagagaaaagctcttctcagacggcctcgtctacaacgtcaacaagggatggggtggcatcgctacacagttcttctgccgcatgccaagcgccagcacgccggtgggagggtacttccatggtgtcggcattcgaactcgcgatgagcacggcaagaccgaccgtaagaactttcacagcttccgccataccttcaccgacctagcaagagaggccggagcggaagcgtacttggtcctgcctgacctaacaggccattcgcgaacccatgagggtcagcatgcaagctatggcaacggcttctcgctggctaagaagcgggagattctcgaagccctgccaatgccagtcagcctgcaaaacgtcacctatcaggacttcgagcaccggcttggtacgtacctcaaaacatggaccaagcgccatcgcgacgcccacggcatgaaccaatcagagccgcccgcctaa

SEQ ID NO: 331423 - DNA, 750 bp, Pseudomonas aeruginosa; identical to SEQ ID NO: 327818

SEQ ID NO: 331424 - DNA, 1218 bp, Pseudomonas aeruginosa
atgagcctcgcacacgctacgcgcgacaatcccacggccgctgcccatcgcatcggcagcgacgacgaagccctggaaacggcccgcgagctggccgccctgttcgcccgcgaaagcatccagcgcgaccgcgagcggcgcctgccgctggaagaactggaactgttctcccgctccggcctgtggggcatcgcggtgccccgcgaatacggcggggccggcgtctcgcgggtgaccctggcgaaggtggtggcgatcgtcagcgccgccgacagttccctggggcagattccgcagaaccatttctacgccctcgaagtgctgcgggtgaacggctcgccggcgcagaaagatcgcctgttcggcgccgccctggccggcgagcgtttcggcaacgccctggccgagatcggcacgcgtaccgccagcgagcgccgtacccgcctgcgcgccgacggcgacggctaccgcctggacgggcgcaagttctactgcaccggcgcactctacgcgcagcgggtgccgaccctggcggtggacgacgagggccgccagcaactggccttcgtcccgcgcgacagcgccgggctggaaatcgtcgacgactggtccggcttcggtcaacgcaccaccggcagcggttcggcgctgttcgaccgggtagcggtggccgccgaggacgtggtctcgttccaggacgccttcgagcgcccgaccaccgtcggcccgctggcacagatcctccacgcggcgatcgacgccgggatcgcccgcggcgccttcgaggacaccctgcgtttcgtccgcgagcgcgcccggccctgggtcgactccggcgtcgacaaggccagcgccgacccactgaccatccacgagatcggccgcctggcgatccgcctgcacgccgccgaagcgctgctggagcgtgccgggcgggtgctcgaccgggccaccgccgagccggacgcggaaagcgtggcggccgcctcgatcgccgtcgccgaagcccgcgcgctgaccaccgaggtcgccctgctggccggcagcaagctgatcgagcttggcggcagccgcgcctgtctcgccgaactcggtctcgaccgccactggcgcaacgcccgcgtacacaccctgcacgacccggtgcgctggaagtaccacgcggtcggcgactactacctcaacggccgcctgccgccacgccgcggcacgctctga

SEQ ID NO: 331425 - DNA, 1311 bp, Pseudomonas aeruginosa
atgaacgactcgatcaaggcctgcctggccgccgcctgcctcgccctgcccctgctggcccagggcgccgagaccctgaccatcgccacggtcaacaacaacgacatgatccgcatgcaacgcctgtccaaggtgttcgaggaaagccacccggacatcgcgctgaaatgggtggtgctcgaagagaacgtcctgcgccagcgcctgaccaccgacatcgccacccagggcggacagttcgacctgctcaccatcggcatgtacgaagccgcgctttggggcgccaagggctggctggagccgatgagcgggctgcccgccgactacgccctggacgacctgttgccctcggtgcgcgacggtctctccgtcaagggcacgctgtacgccctgccgttctacgccgaagcctcgatcacctactaccgcaaggacctgttccagcaggccgggctgcggatgcccgagcaaccgacctggacccagctcggcgagttcgccgccaggctcaaccgcccggaccagggccagtacggtatctgcctgcgcggcaaggccggctggggcgagaacatggcgttgatcggcaccctggccaacgccttcggcgcacgctggttcgacgagcgatggcagcccgaattcagcggcggcgaatggaagaaggctctcgacttctatgtctccaccctcaagcggtacggcccgcccggcgcctccagcaacggattcaacgagaacctggcgctgttcaacagcggcaagtgcgcgatctgggtggacgccagcgtcgccggttcgttcgtcaccgacaagagccagagcaaggtcgccgacgccaccggcttcgccttcgccccccgggaagtcaccgacaagggcgcctcctggctgtattcctgggccctggcgattcccgccagctcgcgcgccaaggacgcggcgaaggccttcgccacctgggccacctcgcaggcgtacggcaaactggtggcggacagggaaggcgtagccaacgtgccgcccggcacccgcgcctcgacctacagcgaggcctacctggccgccgcgccgttcgcgcgggtcaccctggaatcgctgaagcgcgtcgatcccaaccatccgacgctgaagccggtgccctatgtcggcatccagttggtcaccatccccgagttccaggccatcggcacccaggtcggcaagctgttctccgccgccctcaccgggcagatgagcagcgaccaggcgctcgccgccgcgcagcagagcaccgcccgcgagatgaagcgcgccggctatccgaagtag

SEQ ID NO: 331426 - DNA, 219 bp, Pseudomonas aeruginosa
atggctagcaatctcgaagtagtcacccaactgatggagtactcgcgctcaggtccattgatgcaggtgatgattctccaagccctggaccagttcagcagtggcgttctggccagcccgaagggttccttgcgcaatgccattgtctcggaagaggcttggagagcttgcgcgaaggaaatccagcagacactttccaagcacttgctggagcaatga

SEQ ID NO: 331427 - DNA, 468 bp, Pseudomonas aeruginosa
atggagcgctatcactcaacggccggcgatccgccgcggcgcgatgctgacgtaaagcggcaggaggcccaggaactggacgaactggttcagcagttcctggccggcggcgggcagatcgagaaagtcgggtacaagatgcgcgagttgccagacactttcgtcatcaaccccatgaagacgccggtatacaacggcgccctggccgagaattcgtcgctcaaagcgaagcctgccgcgccacgtacgcaatccaagaccgagccccaacgctcaccagcgcccgtgccggctttacagccggctcctggcgtgaacccgaaggtctggttgagccggatgatcgccgccaaggcgctgctggccgcgcagacggccaggctcgctcgcgaactgggcgtcagcgatgctgagctgcgccggctgggtcgtcggcatggcatggaggtgttccatggcactcgctag

SEQ ID NO: 331428 - DNA, 3822 bp, Pseudomonas aeruginosa
atgagcgtagtagatgcgcggtatgacaggctcttcccacggagagtcatcctccaagatgaagttgtccttgcgcaagcttggaagaaaacacatacattcatacggcagcataactggtatgcagatactctggagctagatgcgtctgcggtttgcttagcaagcaatttatccgcttggtcccaagctatagccgacggaacctataagacggcgccagcgtggctagtgcccgcaccaaaaaatgggctctggacttttaaacccacaagtgatggtggttgggctccccggatttctgaaggagaggactcacccgtccttcgaccgctcgctcacattggtatccgcgagcaaacagtcgccaccgccgtcatgttgtgccttgcagactgcatcgagtcggcgcaaggtgacacgtccctgccagccttggaagcatctgccagtggagttttcagctacggtaatcgtctcttttgcacatggtcgaacgaccatgctgttgcaaatttttcttggggaaactccaacacctacagcagatactttcaggactatcagcgttttgtggagcgacctatagccgttgctacagcagctgaagatagtggtgcggcgaacgtctttattgtcagtctcgatataagtgcgtttttcgataatatcgatgtcgagcttcttgttaaacatatgcgaggtgcatatgaggcgtttgctgccaaaggcgaggagcggaagccgtcaagcgagtcgttttggaaggctgcgagaagcgccctaacatttcagtggcgcactcaggataagagtcttgcaggcctgtttcgagacggtgtgcttcctgctggacttcctcagggacttgtttccagtgggttcttcgcaaacgcatacctgttggaatttgatcgagctgtcggcaacttcataggaaagcgtgctccacgaaaaggctttcatatccatgattactgccggtatgtcgatgatttgcgcttagttatttcgactgatcagaacgacggggctataggcgaagcggagctcaatggggtagtcagtgagtggattcagggcctgttgaagaagcacacaacgcctgaagggaagctcacgacttggctgcgactcaatatcgcgaagacacagatcgagcgacttggagaggttggcggcgactctcgtacagccgctaggatgaaagcgctccaacaacagctaagtgggccgttcgatctagactcattgcgccaaacagaggcaggtctcaatgggctactgtcgctagcagagttgggactgattgaagagagtgcctcgcctcggcaacacgattatctgcggctggcctctgtagcaaagaccaagctagaggtgcgtgatgacaccttgacacgattctcggcatatcgactcgtacgttccctgcgtatgcgccgaagtatgaccgacctgacagaaaccaatgaagatgaagcgactaaagatggcctgatacacgactttcaggcagccgcacgacgtcttgtctccgcttgggctgtgaatccatcactggttcaggtcctacgatatgccctcgatttgtaccctagtaccgagctgctggagcctgtctcgcaggcactgttgagcaaagtccaaacttcactcactacaacagattacgaaaggcgagttgcctactacgtattcgctgacctcttcaaagcaggggcgaccgagacggggtggtgggcagagcaggacatgagcttcagcgtggcggacgttgatgcctatagggaggcccttgccgcactggcagcgcaggtgctggagctttccgatgttccgtggtatgtgcagcaacagggcagcttgctgctggctgcgctacggaagccaaccattgctagccttcggggatctgaactacgtttccaccgcgtattgcagagctttgtcagctcaccctcatccggacaggagatgtctacggaagaggatcttgtgatctcgttggttgggcatcagctgctacgagatgtaccccactatataagttggttccagcgcttctgtgtagggaaagaaaaaccctttatttctcacgcttggaaggtcatagctgaaacatctcccgatctatttgctgaaatcagcgtatctaaacgcgctggcatgccaaacctagctgcatgtgcaccgaagtatctggccaaatattccgctgcgaagtgggtagatggctttacccctcttcctgcgcggaaatggctgcctttgatagctgtcaccacgcatcctactgggccattcagccaagaaaatgcactacttaaactggcgctcgcgctaggtcaggcaaggagtgtaaaagagttcgatccagagttgctgacaccgctgaacgtccaagtgagaagcgataactgggaaaagctcaacgaccctagatttacagaaatagaggtgcgcgcagttccgacatccaaggctcgggatagggcttatgaaacgccgtcgtggtgtatggagaacgatgcctggatgtacgcgtttggacggctgctgcggtctgcggcgacaggcgaagccgatttcacggcacgtcactggcttgcccgggaagatgtaggttggtatcgggggctacggagcacttggcataagcgccgtacgggcatgttgcatacggccgaggcgctccgtggcactgctgccgccatcacgccatggttttcttctctactcttattgctgctccgatggcccggtatcgcagaagacgagagctccgcagtggcggaaataagaactcgccgtgactttaaaagagtggtcagggcgcgactagaagcccaggcacagatatatggcagcagcagtaatctaccgatttaccgataccctatcgaatggccactgaagtcggagcgaggacttcgtgttgcaatggtgcaaggcctaatgcctctgcacgatcatttctcccttgggctagatggatttgaagctccggggtatagggaaaagcaccgtaaccacacggcagcgcttttgcatttagcaatcaagcatttggctgcaagagactatgtcttaggactctcagaaaaaccgcattttgacttggtagtatttcccgagctaaccatacatgtggatgaccaagacctcatgcgagcattctcggacgcaactggtgcgatgctcttctatggtcttctcggggcgagggagcctggcactaataaccccatcaacacggcccgttggttagttccccaaagacgctctgggcggagatcatgggtagaggtcgatcagggtaaatatcacctcacgcctgaggagcaggggcttggtattagctcttggcgtccataccaagtggtgattgagttgttagatcctgcagatgcgtctgcgatgccctataggctgacgggctcgatctgttttgatgctacagatctcgcacttgctgctgatctcagagatgagagtcatatgtacgttgttgcagcgatgaacaaagacgtgaaaacgttcgacggaatggttgccgcgttgcgttaccacatgtaccagcacgtcctcattgcgaatatcggcgagtttggcggctcgactgctcaagcaccgtatgacaaggaacaccgacggctgatttcccattcccacggctccgagcagctagcgatctcagtttttgatgtgcgtatggaggatttcgggcccgagctcgaagcagccaagcctggttcgtcggtgaccaagacggtgagcgagcggattggcaaagcccccccagctggcttgaagcggtga

SEQ ID NO: 331429 - DNA, 1878 bp, Pseudomonas aeruginosa
atgactccggaattttcaggtttccatctgtgcttcctaggattctttgggccgaacaaggagcccgcttgcgtttcattcggtgctggcctgaatgtcatctatggcgcttcgaatacgggcaaatcattcattgtcgaagccattgacttcatgcttggtggcaaacccccgctgcgggacataccggagcgagtcggttatgaccgcgtgttattgggtctacaggcgatgaccggtgaacaattcacgctgtggcgcagcatggatggtggaggctttcggctctatgaagggttgcacgagagcccaccagagatggaggtcgagtacaagcaactggacgagcaacatagcgaccgacatgacgcaaacctttcagcatttttgcttagcctctgtagcctgcagggtaaacgagtacggaaaaattcccgtaacgaaaccaatagcctgagctttcgcaacatggctcggttgatgatcgtcaacgagaccgagatcacccagcaaagctctcctctttttgatggcaatccaatctccaatacaccgaacttagcaacattcaagttgctcctgacgggaacggacgattcggccttggtttctagcagcaagcgggagcctgaggagctgtcgcgcgaggcacagctgcaactgcttgatcagcttctcgatgagtatcgtgggcagttgaaggagctgaccagtagcccgaaagagcttgaggagcaactggacaaaatcgatatctcactccgccagcatgctgcccaggtagacacgtccgaggccgagtttcaggaagctgccaggaaccggcgtgcgctacgcaaaaaattggaagatattcgcgagcgtcaggcagaagtcacggcaatgcttgagcgcttcaggcttctcgatcagcactatgcctctgatatcgagaggctgcgggctattgaagaagtaggaacgctgttcagcgtaatgggcgtcaagcattgccccctttgcggcgcaatgcctgagagccagcatgtggatagtcaatgcgatggcaacataggcgcagtagtacaggcggcccatcaggaaattaataagatagaagtgctacgagccgaactatcgactacggtgcgggatcttcagcgagaaaccaatggttttgagcgtaggattcaaggggccattgatgagctgaatgctgtatcggtggcagtggacgatctgatctcaccgaggctatcgactgtccgaaagtcgtattctgagtttgcagataagcgtgctgaagtgcgtgaagcacttagtctgtatgccactgtgcaggatatggagcgtcgtcgaaaagtattagagcaggacgtgggtaatgaaaaagcagacgctgcggcaagctctgatatccctacaaccattgctcacaatttctccaagattgtcgagggcattctgaaggactggcatttcccagaggccggagatgtacatttcgaccccaagacacgcgacctagttattgcagggaagtcgcgtagtgcattcgggaaagggttacgcgccattacccatgctgcgttcacactggggcttctagctttctgtcgcggtcggaaaacaccgcacacgggatttgtcgtcttagactcccctttgctggcctaccgggagcctgatggtaatgaagatgatttgaccggcaccgatcttcaagagcagttctactcctacttagtgtcgctgcctgaagatagccagatcattgtggttgagaacaccaatccacccgattcaataatgaaacgcgagcagtctcaaatgttcggaaaaaatccgcatcacggaagatatgggcttttcccatacacgcccgagcccacggtataa

SEQ ID NO: 331430 - DNA, 312 bp, Pseudomonas aeruginosa
atgcattccgctgagcttctggtacgtcggaagctcgtcgagcaagcgctgctgttgatgatgacccgtgacttggtagatcgagagattagctccgacgggatcaagtatgtggcaggggaaaacgccgccacctttctttctgccctttcatcgaactatttgtgcaacctgaaagagcgtgcctcttggctaattgatatgtacggcgactattcggacgaggcattcaaaagggtaatgcgacgcttcttcgacaagtgggttgaagagtttcaacagcatgagcgaagcctagggggcgaggtatga

SEQ ID NO: 331431 - DNA, 1083 bp, Pseudomonas aeruginosa
gtgaactggacggatctcgatgtaccgagcgcgcctgcggctgaggttactgcttcccaagtggttcatgggcctgccattccacctcagcaacgcatccttacctattcaccccaccagtgggaagactttgtccaagagtgggggcaccactgcctgaagcgaatctacgcccaggtacagcggttttctggcgctggcgacatgggtattgatgtcgtcggctttgtaggtgaaaagcgcctgcaaggcgcttgggacaactatcaatgtaaacactacgatcatgcgctctggcccggtgatgtatggggcgagttcgggaagatcatttggtattccttcaagggcgaatacacacctccacgccactactatttcgtctctccatggggggcaggcactaagctgagtcgcttgcttgggaactccgagcgactgcgagaggagctgattgcgaactgggacaagtccatcaaagactcaattacaagtacccaggcggttcacctcgatgcggagctaagcgcctatctggagtcattcgacttaacgatctttgaagcaaagacagggcttcaacttgtcgaagatcaccgatccactccggcattctctgctcgttttggtggaggattgccacctcggccggtagcgggcaagcccccggctgctctggcgtcggtcgaaagccgttatgtaacggagctacttggcgcttattcagagcacaccagcacacaggtgactgatcctgcagatctcacgcagccgaagctcaaggatcattttcgccgtcagagggaagcgttttatgaggcggaggcactacgcgtgttcgcacgtgacacggttccgccaggcattttcgagtcattgcaggatgacatctacgacggcgtcattgatacccatgacgccactcatgccgacgggtatgaaaaggtccgcgcggtgacaaaagccgcacgtgatatgcaaatcacagcaaatgcattgatcaattgcaccaacccgaaggaccgagatggcatttgccaccagctcgtcaacgaggagcgcttgcggtggacgcaatcatga

SEQ ID NO: 331432 - DNA, 252 bp, Pseudomonas aeruginosa
atgagtgagcctgtaattacggacatcaacaatgctgtcagccaaataaacaatactcttctagccttggcccgcatcgctgctgagacaaacccggaggtagcccaaaaacatcttgcgattgctgtactggcatgcagacagcaaggtgtaggagacaacttcgtgttagagattttccaaaaggcatttccggacggagtgataccaagcacttacactcttgatatccaaaatatcaaccgcgaataa

SEQ ID NO: 331433 - DNA, 612 bp, Pseudomonas aeruginosa
atgaccaccgcagcgcaccacactccgatgaccaccatcaaactctacggcgcgctccggcagttcggccggcagtaccgtgtgctcgtcgggtcgactgctgaagcgatcaaggccctgtgcgtgcagattcctggcctcgagcgcttcctcgccaatgcccacctgcgaggtatggagttcgctgtgttccgcgggaaacggaacatttcccaagatgagctgcagttcgggggcgccgaggaaattcgcattgctccggtcatgcgtggccggaagcgtggcgggttggtgcagacgattgtgggtgttgtccttatcgtggcggcgaccatcatggccggcccaggtggtttcgccgctgctggtggtctgactggggctatggggacagccggtgtggcgatggcgatcggcggcgtcatccaaatgctcagcccccaagcccagggcctgaagcagagcgcggcgccggagaacctgcccagctacgccttcggcagcgccagaaataccaccgccagcgggaacccggtaccgatctgctacgggaagcgccggtggggtggggcgattatttcggcgtcgatctacgccgaagacaaggtgtaa

SEQ ID NO: 331434 - DNA, 459 bp, Pseudomonas aeruginosa
atggctgaagtgacgaagtacccggtgcacaagcaggctgtcgaagacttcctcaaggagttcaaatatggggacctggtcggacacgactggcttgaagcgcgcttcggcatgccttcgatgagtgattccaaggcgctcacggtagagcagttccgcgatcggcagttcgagtggcttgccaacgtcgaggcgttcaaagccgaactgcttcgagaccaccaggtctgcctgcagtcggttcgcgggcgcggataccgatgggtgccgcctcatgaacagaccggcgtcgcgatggatgaactggggcgcaacgtccgcaaggtcttccgcagcaccggtcagaagcttcggtatctacggatcaccgagttgacggacgagcagcgccgcgacaatctggaccagctcgcgaagttttccgctttgcgcggaatgacgaggaaggctctgacctga

SEQ ID NO: 331435 - DNA, 576 bp, Pseudomonas aeruginosa
atgagcatggaactgctgacccttcgcataaaaggggtatcccccctcatgatgcatagcgacaagttggccaacccgctgcacccggcaacgaaggcgcatcgtgaactgaccagcaagcgcaagaaagtcgatgacgaccatgttgcgatcgccagatcggagttcatcgccggcgtgtacttcgatgagacctcgggcatccacattccgggcgcgaacttcgacgcgacgttcctggccggcgccaagctgcagaagctcggcacccactggaagcgtggagcgctggtgatgaccgacaaggcttcgctggacttcgacgggccgacgacgccggaggcgctctgggacgaccagcggttcgtggattgccgcggagtgaaggtcggccaggccaaggtcatgcggtacaggccgatcttcctggactgggcatgcgaacttgaggtcgccatcaacaccgacgtgctggacctgcaggaggtcaagaaggctatcgacgactccggcaagctgatcggcgtgtgcgagtaccgtccccgcttcgggcgtttcgaggtgatctatggctga

SEQ ID NO: 331436 - DNA, 963 bp, Pseudomonas aeruginosa
gtgaccaacagcaggcctgaaaagaagaagccccaggtgctgcaacacccagggcttcggggaaacgtcgaaatctacgaggaaaccaacgtcatgcacgatcatagcacaacgactgctcaggtcatcccgttccgccagaaggaactcctgctggtgggcaatgcaggagagcccttcgtgccgatgaagccggtggtggagggtatggggctggcctggcagagccagcaccgcaagctgcaatcaggtcgattcgccacctgcatcaccgaaatggtgattcagctaccgggggacacccagcgtcgtccagtttcctgcctcccgctccgcaagctcaccggctggctgatgtcgatccacccgaataaggtccgtccggaactgcgcgagggcatcatcgcctaccagaacgagtgcgacgacgtgctctgggcctactggaacgagggcgccgctgttcggcgcgatgaccggactgtggccagcgtactcgccaccacgatcggaaccgatggcttccactgcctggctgccgtcgtcgatggcaaggtgcggcacctgccgtcggcgattcgccgaggcgccaagaaccacatctggagccaggtacacaaggcgttcagcgtcgtgaccgccgaggacatcccggccgaccagctcgacagcgcgcggaacttcatcgccgcctacgccttggaaggcgagtggctgccgaaggataaagctgcgtcggcagtcgacacctgctcgtggtcgaacattgcgtttctggtcgactgtgtggagaagtgctggaagatcgttgagagccgtcgtctggccactcacctcagcgggctcggttgtaatgctggtgtcgagttagcgagcttcctctgggatggcctgggttccgcagcgcacgtgaggaagtactgtgccaacgagctgaactggcataagggggcttcggcatga

SEQ ID NO: 331437 - DNA, 156 bp, Pseudomonas aeruginosa
atgaaagtccgagagatgccgcaggtcgcttttcggctgaagccgcaccagaaggattggctggagcgcaaggctgagcaggaagagcggagccaagcttgggtgatgatgaggatcgtcgaggaggccatgcagcgtgaccaacagcaggcctga

SEQ ID NO: 331438 - DNA, 330 bp, Pseudomonas aeruginosa
atgcacaaggtcttgctcgcggtcagagtcgtccagaagggcgaactggtcggatatagcagtcatcaactgacccttcccttcgtgcccttccctggcctgcatcttgaacaaggaaccagttgcaagctctgggagacaatgaccgggccagagcttgatccagttgttgaacgcgtcatttacgacctggatgaagagcagtttgtctgcctgttcaacattgacactccactgcgctcttccttttggtacgacgagaaagccccggcgccaggaaccatcagctctataggcgactacttccgccatatgccaatctctaagtaa

SEQ ID NO: 331439 - DNA, 756 bp, Pseudomonas aeruginosa
atgctcaagcacatcctgtctgccgtgcagaagcacgccgcggcagagtatccgcgcgagtgctgcggactgatcatccgttctggccggagccagagatatgttccctgcgaaaacaccgctgccgacgccggcgaggagttccgcatcgcgccggaggcgtatgcagaggcagaggaccagggagagatcgtcgccgtggtgcacagccaccccgatgccaccagccgaccgagtgccgcagatgtcgcgatgtgcaacgcctcgggcctgacttggcacatcctgagctggccggagggcgacctgcgtaccatcgagcccgtcgatcaggtgccgctgctcgggcgcgccttcgtgcatggggtgcaggactgctggcaggtctgctcggactggtaccagagggagtggggcatcgagttcccgcacttcgagcgtgccgatggctggtgggagcgggcagacggtccaagcctctacgagcagcggttcgagggggccggcttcatccgggtggaccggccgcagcgcggcgacatgatcgtgatggcggtgggacgtaccgcgcacccgaaccacgccgggatctacctggcggacgatccatcactacctggcgaggatgcgcagcacttcggcgccgggccgttcctgttgcaccacctgtacggcaagcccagcgaaatcatcgtgttcggtgggccgtggctcgaccggatgcgactggtgctgcggcaccgcgggggaagctga

SEQ ID NO: 331440 - DNA, 150 bp, Pseudomonas aeruginosa
atgcagatcctcgttcagttgatcgacagcctgctgatggtcgccttgctcatcgatcgccttgatcgcctgatattgctcgtaactcagcagccgatactgctcgctaactcgtgccgctgccctagtcgcatcatcccccagctctga

SEQ ID NO: 331441 - DNA, 630 bp, Pseudomonas aeruginosa
atgaagggtaagcgatggatattgcaagccttggcatcgccgtgcattcggagagcgccgaccaggcggctcaggatctggatcgcctggtcggatccgccgtccgagctgaaaatgcggtcgactcggtcggagaaacctctgcccaagcatccgcgcgcatctccaacatggttcgcgcctcgctggaggccagtgattaccatcagaggcttgcgaaggcggctaccagcagtagcgcagccctcgagaaggcgaatgcctcgaccatcgaccggaccaagtaccaggaggagatcaacgctcgcgggcaagccatcatccagtcgcagcagcgcattgccgaacaggccaagaagtccgctactgcagcccaggagcaatctaccagtctcgatgccggcagccggaaccttgccaggttcaacgatcagttgggtcggaccggtcttaccgccaggcaaacccaggccgctatgcgggggcttcccgcgcagatcagtgatgtcgtcgtcagcatccagggcggccagtcccccatgcaggtccttctgcagcaaggcgcacaggttcgcgatatgttcggcggacttggcccagcgctgcgggcggttggtggttatgcgctga

SEQ ID NO: 331442 - DNA, 675 bp, Pseudomonas aeruginosa
atggcccgtggctctcgcatgcgtcaacgctactcggggcgccagggcagcttcgctgcagcggtggcgcaattccgcgaccaagccttggctgccggcgatgcgatctaccagcggatcatgttggacctgtcggtcaaggtgatcgagaaatctccagtcggtgacccggagcggtgggccgcgaacgtcgcctaccgccagcgagcgagtgctgtggcggaccgctacgacgagaacgttgcgattcgcaacaccctgatcaacctgaatccgagcaacttcaccaggaacgggaagcttcgtcgaggcgtgaagcacgcgaagccgctgaccaaggcggagcgtgaccagaacttcgacgtcaacgggatggtggccgggcgcgggtatgttggcgggcgctttcgggccaactggcagttcagcatcggcacggccgcacagggggagattgatgacgtcgacccgactggcagcaaggcaatttctgcagtgaccgccggggtccagccgctgaagctcggtgataccgcctacctggtgaacaacctgccgtatgcggtaccgctcgagtacgggcactccagccaggcaccggctggcatggtccgggtgaccatcgccgaattccagcagattgtggaggccgccgtcagggcgaaccaggtgtag

SEQ ID NO: 331443 - DNA, 1326 bp, Pseudomonas aeruginosa
atgagcactggaaacctgttgctcgatcggcagcttgcgcgctggtacaagctcaaggaccaccctgtacagctgagcctggtcgaggcggttcgagagggaattcgattccctctggtgcccgccggccgccgtagcggaaaaacagaacggttcaagcgattcctcgtgaagcaggcttatgtagttgttgggcagtacttcgctgcagcgccgacgcacgcccaggccaagaagatattctgggatgacctgaaggccttcacgctgtcatgcctgcacccgcgcaagccgagcgagtccgacctgattatctacctgcccaacggcagcgagattcatgtccttggtctggacaagccgcaacgtattgaaggtattccctggaagggcggcggtattgacgagttcgcggacgtcaagcctgatgcctgggaagccaacatccttccggctcttaacaccgtgaaccctttggaacctgactaccgggcctggtgctggttgctcggggtgccggatggcctgaaccactactacgacctttgcatgaaggccgaggccggtggcgacccgaactttcgtgtcttccactggaagtctgccgagatcttgccactcgatgtcatcgctgcgatgaagcactcgatgtcggccaagcagttcaagcaggagttcgaggcctcgttcgagacggccggcggccgcatctacgaggactacagcaaggccaatcacacggatgcgcggatcgaaccgcacgagcagctgctgtggatgcatgaccagaacttcacaccgctatcctcggccatcggtgtgcggcgcaacaacggccaggacctgtacttgttggatgagatcgtcctcaccagtgcagtctccaagcagtccgccctggagttcgtcgataagttcagagcccaccagaacaagcacgtgctgatctacggtgacccggccggccaggcaggggagaagcacggccacgcctccgactacaccgacatcgagggcgtgctgaaggcgcacggttggaccttcacccgcaaggtgaaaccgtcgcacccggccatcaaggaccgccagaacgcagttcgggccaaggtcaggaccgccgacgggaccatcagcctcttcgtcaatccgcacaccgcgaagtggtgcgataagggcttggccactgttcaacttcaggagggatcgaccttccaggaagatcagaagaacaagtaccagcacatcaccactgctatcggctattgcgtcgatgtcgagtggcctgtcgtcaagcagtccgcaactgttaccaccctgaggttctga

SEQ ID NO: 331444 - DNA, 189 bp, Pseudomonas aeruginosa
atgaacgaagagcccctcgatttctcgcttgcgcgcgaggcagcttccctggctgagatggaggcattgcgcgaagttctggcgaaggttctgcccggtagcgatcgatacagtctgacggacgttgcagtggagtgcgcgcgggccgtcagaactgcatatcgtgagctggagaaggttgacgattag

SEQ ID NO: 331445 - DNA, 708 bp, Pseudomonas aeruginosa
atgctggccgccggcctggtgcaggctgccatccgttcgctgccgaagccgctgcagcacttcgggcatacgctgtactcgccgctggccaacggtgacgatgtggcgattgctcacggcctggtctggatcggcgccggcctcggacagctcacacagcgccagggcgagcgggcttactggatggcgctggcggcaatcaactcgcacaagcgcgccgtcaatggccgcgacacgctgcgcccgggcgaggtctgcctgttcatcgaggagcgcctgggctgccggatcgaccccagccactgggctcgggactacgccagcacctgggagcggctggcgcgccacgtcgacaagctggatgcccaggcgctgaggccggtcgccgaggtggtggcgaagcagtgcggcctgcggaaggggccgggctggcgctggcaccaggtcgaccgcgatgtggtggcggtgcagcgggccgatgcctacgccgagcgccgggagcatcaccagcagcgcctggctgaacgtctgcgggggatgtcggaccaggagctggcgcggtgggcggcgaggatgaagcggtacggggatgcataccgggaggagtggggcgaggacatcctggaatgccccagtgtccatcagcgctaccatgaccgcgtggcggcctactgggcccagcgggagcgcctgaaacgggtcgcttga

SEQ ID NO: 331446 - DNA, 3852 bp, Pseudomonas aeruginosa
atggcaacgggcaaagaacttgatctggcactacgcatccgcgctgacgggaatcagggcgcccaggccctggataacatcaacagccaggtcgagcagatcggtaccagtgccaccgccaccagcagtcagctgagtgcgatcggcgagagcgccgatcaacaggcggcacggctcaaggccatggtggcggccagccttcagcagcaggccgcgttcgacgccctggccaacagttccgacaagctcaacacctcaacccgcgccgcaactgccggttggcaggagagcgcacgcgcccaatcggcgtcgatgaacgcctaccacaacgccgagcgtgccaggcagcagcagatcgcgaccgagcagcgagccgccgaagccgccgccaaggcctcggccgagttcgacaagcagcagtcggagctggccaagttgctgggagcgatcgatccggttacgcgtgagctggagaagctcgacaacctggaaaaacgcctggggcaggccaggaactcccaactgattgatcccgagggctttgcgacctacagcgcgcggctccaggaacaacgtgaacggctgctcggaacgtctgatgcgatgaaagtcgccggactgtccgcggggcagtacaagcaggcgatgcggcagttgccggcacagatcactgacgttgttaccagtctggccagcggcatgccggtctggatggtcgctatccagcagggcggccagatcaccgatagtttcggtggcgtcggggaaaccttcagggcgctcggtgaaaagatcaagtcgttcttcggcctgaccagttccgtaaatgctggcggcattcttgccgtgggcgaaggccttgcggccgttgcaaaggagcaatcggcggttgccgatggggccgacaatgtcagcgacggcttcaccgacatggccgatacggcaaacaccacggctgaagcggcggaaaacgccaagggagcgctttcagggctggggagtgctggcggcgcatttgccatcgttgcagcggcggccgcagcggcggctgtcgcattggcctatgcctacaagaaaggcagcgacgaagccagcgaactcaacgaatcaatcatcctgaccggcaactatgccggcaccagcgctgggcagctggcagcgatggccgcatcgcttgccaaagtgaacggtacacggtacgaagctgtggccgcgctgtcggagatcacttccacaggtaagttcacggtcgagcagatcgaacaggtcggaaccactgcgattgctatgcaggaggcgactggtaaggccgtttctgaaaccgtggccgagttctccaagctggccgatgatccggtcaaggcgtcgcagcagctcaatgaccgctatcactacctgacggcctcggtgtacgagcagatcactgccctggagaggcagggggacacgctgggtgctgcccagttcgccatggacgcctatagccaggctatggacgagcgggcgaatcagatcgtcgagaacctgggcacgatggagcgcgcgtggaggactgttggcgacatcgcaaaaggtgcatgggacgagatgctcggcgtgggccgcacggaaacgcctgaagagcgtctggagcaactgagcggtccggcgttcaagccaggccaggcagctgccagtgccgcagttttcgggccgctcggctggctcaacgaggtgcgcaaggctttccagcgcaactcaatgtcggacgaggaacgcgggaagcaattcaccgatgcccttcaggaaattcaagatgaaggcgagaaagcccaggcggcgcggctcaaggcttatttggatagtgaagccacgcgcggtcagcagagtatggaccggctgctggagactgttcgcaccaataaagagaaacgggacaagttgaaccgggaattggatcgcagcatcgccgcgattcaagccacgaacccgaacgacgagcgcctgcggccggaaaacatcgccgctgctcgcaaggccattgatcagaagtacaaagacccgaagactccgaaggggccgagtactccactcgatcagtccaccgtcaccgaagcgaagaaccagctggaccagttgcaggccgactacaggaacgccgagcagaagctccaggcgcagcagcgcgccggcctgctgagctatgcggactatgtcgcgcagcgcggcgaactgatcagccagaacaaggaccaggtcaccgcagcctatgagggggaaatccaggcgctggaggcgctgcgcgacaaaagttccaccacggcggcccagcgcatcagcctggaccagaagatcgccgaggccaggaacaacatggtcaaggcgcagaagaaggcagacgccgacctggaagtcctccagctcaacgaacaggggcgcctgaagaaacaggcccaggcagtcaaggcctacagcgatgcgctccagcaacaacaggatgcgctggccctccagggtcaacgtgccgccgctgccgtgggcatgggcgcgcaacagcgccgcttgttcgatcagcgtggcagccttgacgaccgattcgcacagcagcgcctggacctggcgagccagtacggcgacggctcgcgtggcatgagcctcgacgagtacaacgacaagctgcagaagctgcaggcgaaccacgcggcgatgaccgagcagctccaacgcaactacgcggccttgcagatcgcgcaggcagactggaccaacggtgcccgctcggcgttcgccgactatctcgactcggccaggaacgtcgcgggccagacctacgacctgttcagcaacgcgatgtctggcctggagaacagcgtcgtttccgccgtaacaacgggtaaggccagcctggatgactttctccgtacgctcgcggccgactccgctcgtatggcgaccaggcagctcggagcatcgttgctcagtagcttcggactcggcgagaccaaagacgctggcagcaaagacctggccgtaggtgcctcggcggtctcggcatcggccggcgccctggcaaccgcgggaggcactctcgtgaccggcgccgcggcgattcaggctgcagccgcatcgctagcggcagcgaacggtggccaggtgctgggcggcgcagcctctgcagccggacaagccggtccagcggctgctattgctgccgcgtcgaccgaaggcgcagccgcaatgggcagcgcgatcagcgaagcaaccacgtcgggcggtggcactctggcgagcgcgctggctggagtgtttggtcagggtgccagtttgttcggcaacctgttcagcagcctattcggtggcggtgctgctggcggcactggcggtggggggggctggttgcaactgggcatgagtgccgccagtgcgtatttcggaggtggctttgccgatggcggccgtatccaaggaccgggcaccggcaccagcgacagcatcccgatcctggcctcaaacgacgagttcatgacccgtgccgccgtggtacggcagcccggcgcactcgcgtttctggagcagttcaaccggtatggcatggctgccctgggcgcctgggcgaacccggtccgccacgctacgggcggcctgatggggactcctgctccggccatgcccgctccgggcttggctggttcgcgtctacaagagcccgcaaagaatctcagcgcgacgctgaagaacaaccagaacttctacctggtcgacgaccccagccgcatcggtgatgtgatggcgggtcgttacggcgacgaagcaatggttctgcacatcagccgcgacccgcagaaattccgtcaactactgggaatcaactga

SEQ ID NO: 331447 - DNA, 753 bp, Pseudomonas aeruginosa; identical to SEQ ID NO: 326702

SEQ ID NO: 331448 - DNA, 1248 bp, Pseudomonas aeruginosa
atgaaaaagccaaccgccactctgccaatcctccccgccggccggcacgtcgctctcgatggtcgcccggtggagttcaccgaggccatcctgcaggagatcgccgcgacctacgatccggcgctcagcgaggcccctctcgtcatcggtcatcccaagctcaatgcaccggcctacggctgggccaagggcctagaggtgcgcgagggcatgctctatgccgagccgcaccaggtggtccccgagttcgcagaagccgcgaaccgcaagatgtacaagaagcgcagcgcttcggtgtacctgccggactcaccaggcaacccggttccgggcaagcactacttgcgccatatcggcttcctcggtgccgtgccgccggccatcaaaggcattcctgatgctccctttaacttcgccgaggatgacggcgccctggccatcgagttcgcggaagccccctacgcggtcaccgggctgaccgacatcctgcgccgcctgcgcgatttcttcgtcgagcgcgaaggcgccgagcgggccgaccagctcatcccgcagtggcagttgtcctcgatcgaggaagacgcgcggcgagcctccgtccaggacactgctccgcaggcctcggccttgttctccgaacccgtaatagaaggcgtcgacgccgcagcagcctctgccgccgctgcggaggagccgcagggcaccgtcaccccatccgacggtgcttccgcgtcagcggcagaggctgaccggacctctcacccatcacagcaggacacgaccatgcctgacgaagctgcgctccaggagcgccaacgccagctcgacgagcgcgagcaactgctggccacccgcgaagcacaggtggcccagcaaaaagcccaggaacatcgcaacgaggtcaccgagttcgccgaagccctggtccaggccggccgactgctgccgcgccagaaggctccggtgatcgagctgctggtgagtctgcctaccgacaccccgctggaattcgccgagggcgacggccaggtcaccaagccggcggccgaggtgctgcgcagcttgctggccgaactgcccaagcaggtggacttttccgagaaatccggcgacggcggcgacctgagcttcggcagtgctcacgccattgcagcgcgagcgcagagctatcaggaagaacagcggcaggctggacgccatatcagcacgaccgaggccgttacccacatcaccaagggagccaagtag

SEQ ID NO: 331449 - DNA, 612 bp, Pseudomonas aeruginosa
atgggcatccttagtctcctgcgctccaactggttctggatcgcgctgatcgcggtgctgtacagcgcagccgtagtgatccacggctccgcaagctacgaccgtgggtacgccaccggccgcgccgagggtgacgctgcgctgctcaacctgcagctgcggcacaccaacgaacgcgcccaggcccttcaggacagcctggtccagtacaagcagcaggtcgcgcgcgccaaccaggccgaggaacaactgctgcaagtacagcagcaactgaccgacacccgacaccaactccaggagcgaattgcccatgtatcgaccgcctaccgagcggcacctggtgctgcgcctactgctatccctcgctgtgtcttcactcgcggctgggtgcgcgacttcaacaccgccctcggcgccggtttgcccgccacaggagcgcgcaccgcttcccccggcactcaaacagcgacctggcccgccgccggttctgacgccgagctactggaaagcggcgtcactccggcggacatcctggcctttgcccaggactacggggcctggtctcttcgcaatctcgctcagctcaacgcactactggaacaaggggaatag

SEQ ID NO: 331450 - DNA, 630 bp, Pseudomonas aeruginosa
atgaagcgcctgctcaccctcggcctgctgggcctgctgaccgcctgccagccggccttcgcggcggatcgcatccccactgccgccgagcaataccggcgcaccctggtgcgcagcgcccatgccggatggggcctgtcggcgccgatcgccacctttgccgcacaggttcaccaggaaagccgttggcgtgctgatgcccgctcgccggttggtgcccagggcctggcgcagttcatgcccggaaccgctgagtggatcgccggcctgtatccggccgtcctcggcaccaatcagccgttcaatccaggctgggcactgcgtgcgctggtcacctacgaccgttggctctacgaccgaaaccaggcctccagcgagtgtgatcgctgggcattcgtactgtccgcttacaacggcggccaggggtgggtaaatcgcgaccgtaggctggcctcggcatccggcgccgaccagctggcctggttcgattccgtcgagcgcttcaacgccgggcgctcggccgccaacttccgcgagaaccgcaactacccgcgcctcatcctgctgcgctacgagcggatctatctgcagtggggcgacggtgtgtgcggccagaggtatcagctatga

SEQ ID NO: 331451 - DNA, 159 bp, Pseudomonas aeruginosa
atgggcgccccgcaaatcatctggatcgtgctggccgctgtggtcctggttacgtcctatgcgtgcgatggcctcactaacgtgatcagcttcaagcagcgcgtgttcgacgtgatcgcgatgacggccctggtgtggtggggaggcttcttcggatga

SEQ ID NO: 331452 - DNA, 504 bp, Pseudomonas aeruginosa; identical to SEQ ID NO: 326737

SEQ ID NO: 331453 - DNA, 372 bp, Pseudomonas aeruginosa
atgggtaaaaatctacccattggtgaacgtttgtctgatgaaaggaagcggctcggatacaaccagagcgatttttcagcactggcaggaatcacccgaaaaacactatttggctatgaaagcggggagagggccccggatgccctggctctggctgcttgggcgaaaagcggactggatgttctctatgtcgtgacaggtcagcgccaaggagtgcccgcgccggctcctgcccaagagcaggaggcccctttagcccccgacgaacgcatcctgttggacaactaccggcacagcccgcccgacgctcaggccgcactcaaggcgacgagcgatgcgttcgcgcaacgttcgaagaagaaaacgggatga

SEQ ID NO: 331454 - DNA, 231 bp, Pseudomonas aeruginosa; identical to SEQ ID NO: 326738

SEQ ID NO: 331455 - DNA, 225 bp, Pseudomonas aeruginosa
atgactatccccgatcacctggttcttgatgcgtcgatgcgctcggcgtttgttgccctggcccgtcgcctggcgcttgatcacggcctggacctggacggccttgctgatgacctggatacgctggctgatgcgcaacctggtgaggtgtggcaggagtcgcatcgagacttggccgacgtgctgcgatacgtctctgggcgcgctcaagcaggcgagagctga

SEQ ID NO: 331456 - DNA, 489 bp, Pseudomonas aeruginosa
atgaagcgccggaattggaaacactgggtgccgcgctcgccagccgacgcactggacggctgtgcgcagctggccatgcagcgctacaaccgcgggatcgagcggcttgccacagaccatctgtgccagaacaacgccagcaccctctacaaatggatgggtaatggccgcctgccgctgaccatggtgctgtcattggagaaagcctgcggcctgccgctgatcactcgctacctggccgccgctcacggcaagctcctggtcgacatcccggttggcaaggcttgcaacgccagcgaccttcagcagctgcagggcgtgctgcacagcgctaccggcgcgttgatggccttctacgacggcaagcaatccgccgaacagaccctggacgccatccgcgctggccttgaatccctcgcctggcaccacggcaacgtcgcccaggcagaaacccctcaactggactttggagtggctgacgatgagtga

SEQ ID NO: 331457 - DNA, 315 bp, Pseudomonas aeruginosa; identical to SEQ ID NO: 326731

SEQ ID NO: 331458 - DNA, 645 bp, Pseudomonas aeruginosa; identical to SEQ ID NO: 329243

SEQ ID NO: 331459 - DNA, 267 bp, Pseudomonas aeruginosa
atgataaaagaccgccttataaccttgtttaacaaggagcggacgagtgtctggtttgaaaagcagaccgggattgatcgctatcgatggggtaatgtccgaaacgggaaagccagaatcaccgacgccgagatcgaggctgtgatacagatttttccgcagtacgcactttggctagtgaccggcaacatcgctcctgaaagcgggcagaccagccccgaatatgacgaggccaatcaaaacttgagcagtcccaacgcgggatag

SEQ ID NO: 331460 - DNA, 1092 bp, Pseudomonas aeruginosa
atggctgaattgaaagatgcaaaggaaggcttcttctcttccacaaaagtcaaacaaaccctcagaaattctatatcaaaaatatcatccgaggacatatcaccaaatccacaggccgacttcgttaaagattttataataaaaagcttacaactcatgctgaatcacgaagaagagttcaactctttctgcccattcaatataaagatgataggcgatggactaataagcactttaactctagcctcaatagatccaagcagaaatgtattcacttcattattctccatatgctacagattcctagtagagttcgagttcaaccttaacaccgaaaataatgacataacatcgacactaaactccattcgttttggggagcaaaagctgccagcagaatttgaaaactctgtcagatacgcggagctcttcatgcccgcaaaaattctaaaagacgcgcaaaaagacccctccctatcatctattaaagaattcaacgagaacattcaaaaacttccagaattacagaaagaaatcaagaaagacctcgacagtcgagaaaagcgcataacagacttacgcaccactcttcaagaatataaatatgcctataactttataggactctacgacgggttcaattcactagcagaacaaaagcgcaggatggcatgggcacacgtcgtcggactagtaataattggaatcttaatgcttctcccagcctcaattaaactatactcactgatagcctcagaagaacacttaaataccaacctatcaataaacattcagcttataatatccgtcgccgccattgaacttttacttctttatttttttcgagtaatcctacaaagcctaagatcaatcagaggtcaattattgcagctagacctaagacgttcaatctgtcgcttcatacaatcatatgcagaatatgccgccgacataaataaaaacaacgcccctttactagaccgttttgaagctctaattttcagcggaattgttgcccaagaagacaacatcccctctacattcgacggaatggaacatctaacaaaattaatagagagcgctcgaaagtag

SEQ ID NO: 331461 - DNA, 1023 bp, Pseudomonas aeruginosa; identical to SEQ ID NO: 318952

SEQ ID NO: 331462 - DNA, 792 bp, Pseudomonas aeruginosa
atgagcctttcccccgccgatctcaagcaactccaggccgccaagaacctgctggagaaccctggactcaccgcgcaactcaccagcctgctgggcacgccgatcgaatacggcctgaagaagctgccgcggaaggtcaacgagaagctcggttcggtgatcgagggagcgctgctgaaagtcgcccgctcggccaccgccactctccaggaaaacgccagcggtcaaccggcgaaccgcctgcataccctcggcgccgccgtttccggtggcgtcggcggcttcttcgggccgctggcgatgctggtcgaggtgccggtcaccaccggcatcatcttccgttccatcgccgacatcgcgcgcagcgagggcgagtcgatcagggacatggacaccctgatggcctgtatcgaagtcttcgccctcggcggcaaatccgcctcggacgacgcgtcggagtccggctactacgcggtgcgtacggcgctggcccagcaggtcaaggcggccgccgacttcctcggcaaggacgccggcagcaagaaggccgcgccgatgctcctggccctggtgcgcaaggtcgccgagcgcctgggcgtgcagtattcggaaaagcttgcggcgcagatcgtgcccatcgtcggtgccctcggcggcgcggcgatcaacacggtgttcatgaaccatttccaggccatggcgcgcggtcacttcgtcgtccgccgcctggaacgccactacggcaaggatgtggttcgcgacgcctacgccctgctgccccggcgcggctga

SEQ ID NO: 331463 - DNA, 504 bp, Pseudomonas aeruginosa; identical to SEQ ID NO: 324250

SEQ ID NO: 331464 - DNA, 231 bp, Pseudomonas aeruginosa; identical to SEQ ID NO: 324249

SEQ ID NO: 331465 - DNA, 573 bp, Pseudomonas aeruginosa
atgcgaagcgaatcgcacaccctgatctccacgctgctcggcgtggtgaaccaatggcgccgccgagaggggtggagccgagagaccgtcgtccagcacatcgtggaggcgcacgaacgcatccagggagcgctggtcaccggtatcatcttcgacccgccgacgcgcgatacaaccgagcggatgaaggtcaacgccgaccgtgtgttccgttggctcgacgacggaaccaaggacaccaacctggtgccggcgaacttcgtacccagcatcctcgccgcgctgccgactgacctgaaggtccaggctctgggcgacatcctgacgccgctgggcgtgtcggtgcgcttgatcggcggcgatgccggccagcggccggaggtgctctgcatgctccgaacactcatcaaggagaacggtgaggcgcagcaggctgttgccaacctcgtcgacggcgccgatgaccaggaactgcaggaggcccaccgagagctctccgaatctagggcggcgaccgatgaggcgctgcggatgatcgaccagatgcgccggccgcgccttgttcaggggtag

SEQ ID NO: 331466 - DNA, 213 bp, Pseudomonas aeruginosa
atgacccccatcgaaaagcttgtttcttacttcggcgaccagacgaagacggccaaggccttgggggtttcccaggctgcggtttcgtactggttggcgggtatctacgtaatgcgcgccgatctggccttcaaagcagaagagctgactggtggcgccgtgaccgccaaggaactctgtgctcgtcccgttgcaaatagcgtcgttgcttga

SEQ ID NO: 331467 - DNA, 315 bp, Pseudomonas aeruginosa
atgtcgacgagcaagttaacccccgagcaagagtcaagatcacgcgatttcgaggcgctgttcttgagccagcttctgtcggtgggccagaaggtcgtcgccgattcagtcggcttgagcgagtcggctatcaccggatggaagaaggacggcctcatcgagcgcttctgcaaggccgcctcggtgcttgagcttcagatcgttccccagcatgcggtggtcgtcagcgcggactatctccgttcgctggagacgttggccgagctggggctcaaggccgagaagaagcggccgggaccgctgggttgggactga

SEQ ID NO: 331468 - DNA, 312 bp, Pseudomonas aeruginosa
atgcgagcaatcgctattgcggtactgatgattactctgtccgcctgtgccagcaacgggacaccaatcgatcaggcggacgttcgacagatcgttcaggggcagaccacctacgaccagatgctggagagattcggtaatccgctttcccaatccttcgactccgatggaaatcttcaggctatctggttctacgtctacgtcggccccttcgggaccggcatggagcagcagagcctgacggtactcttcgacaaggacaacaaggtcaagcggtacgtgatgaccaatggtcagcctgggaagaactga

SEQ ID NO: 331469 - DNA, 348 bp, Pseudomonas aeruginosa
atgacgaatcagaccgttgatgtcagcttgctccaaattcagtatgcttccttggagcgggagctagaatccctgaagcagaagagcggacttccacctgggggtgatggcgtggatactcggatcatcaacctggaacgagatatgaccgacgttaaagtcgcgcttggcaaggtcgagacgcggcttgaaggtatcgaagcgcgcatggttaccaagggtcagatggccatttgggcattgagttcgctgctggttgttggtggctcgttcttcgctgccgtctggtgggtagtccagcaatacctggcccccatactggcggccataggaaagattccagcctga

SEQ ID NO: 331470 - DNA, 573 bp, Pseudomonas aeruginosa
atgtcaagacgacttgtgttcggagccggcatcaaggacatccgaacccatcatggatgcccctactacgagcgctggaagggggttctccgtcgttgttacagcaagtccggcgagataccggcttcctacgacggctgccgaatcgccgatgagtggctgactttcagcaacttcaagcggtggatggaaagccggccatggaagggaaatcacctcgataaggacattctgaggccctgggaaaagctctactgcccggaaacgtcggtcttcgttccgcaatacatcaacaccctgatgagcgagaagccgcgaggtgcagcgaaccttcctgtcggcgtgtcgagatcgaagcgcggacgcccattcgtggcgatgatccgaaaccttggaaccgaaaagacctgcctcggaaccttcaataccgcagaggaagcccatagagcctgggccactgcaaaagctcaggtcatcgagtcagcagttgatctctaccgaaagacagaccgattcgatatgcgcatctgcgacgcgctgcttacccgcgcaaaccatctcagaacccgatag

SEQ ID NO: 331471 - DNA, 138 bp, Pseudomonas aeruginosa
atgaacagaagaactttgaaacccgttggcgagggtgtcctgctcggcctgggactggccgtcttcatgatcggcctcgtgaccaccgcccgcgtgatcttccaattcgtcggcgcactggccggctgccaaccgtga

SEQ ID NO: 331472 - DNA, 1278 bp, Pseudomonas aeruginosa
atgcgcgggcgcaggcagtacgcgcgcaagggacggcggcatgggaagggagccatctggctcctttccctgggtctgccgatgttcgcgtcggccatgcccctcgaccaggcggtcagggcagggctggcgatccacccggaagtacgatccgcgatggccgaagcggaccgtgcaggtaccgaggtggagatggccaaaggggggtactacccctccgtgacgatgtccggggggccgcaggagttcgacttcggcgagatcgtctacgatctcaccgcgtcgcagatgctgtacgactggggtcgggtgacgagcaaggtcgacagcgccagcgcgacccagcgcaagctgtccgaggcggtgctggtggcgcgcgacgatgcggcgctggatatcgtcgagacctacctcgacgtgcttgcctcggagcgccgggtggaggcggtgcgcgaacacatccagcgcctcgacggcatccgcgagatgacccaggcgcgcggcggcgacggctacgccgaccgcagcgagctggatcgcgccaatctggaactgtcgcgggcccaggagcagttgtcgctggagaagggcaacctgcaggacgcgcgcaaccagtacgcgatcctggtcggccaggagcccgccgacctggtggagcccgagccgatgtcgctgcaacgctacctggcggccagcgatatggcgcgggtgatccgcgaatcgcctttgcagcgcaaggccctggaggacgccaatgtcgccgaggccgaggtccgcgaggccaaggcgtcgctgctgccgcaactgaacctggaggccagcgcgctgcgccgggagatcggcgggcatccggaaagcgactcggtggtatccctgcgcttccgcatggacaccttccaggggctttccaacttccgccggccgaccgccgcgcagcagcgcctggagtcggcgcaatggaccgccgacgcgatgcagcgcgacatccgccggcaactgcagaacctcttcgacaacggcgacacgctgcgctggcgggaacagtcgctgacccagcaggtgaccgagtcggagcaggtcggcgagttgtatcgcgaacagttcgaggttggccggcgcgacgtgatcgacctgctcaacgtgcagcgcgagcggttcgaggcagagcggcaactgatcaacctgcggatcgaacgcaagcgcatcgagtatcgggcggccgcgcaagtcggcctgttgggtccgctattggagaaccggctgaatcatggaagctga

SEQ ID NO: 331473 - DNA, 4494 bp, Pseudomonas aeruginosa
gtggtcaacgccacggccagcgacccgaccggcaataccagcgctccggccagcaccaccgtggactcggtggcgccggccgcgccggtggtcaatccgagcaacggcgcggagatcagcggcaccgccgaaccgggcgccaccgtgaccctgaccgatggcagcggcaatccgatcgggcaggtcaccgccgacggcagcggcaactggagctttaccccgtccacgccgctggcggatggaaccgtggtcaacgccaccgctaccgacccggccggcaataccggcggccagggcagcaccaccgtggacgccatcgcgccggccacgccgaccgtcaacctgagcaatggcagcagcctcagcggcactgcggaaccgggtagcacggtgatcctcaccgacggcaacggcaatccgatcgccgaggtcaccgccgacggcagcggcaactggacctacaccccgtccacgccgatcgccaacggtactgtggtcaacgtggtggccgaggacgccgccggtaacagcagcccgccggcgacggtgaccgtcgattccagcgcgccgccggcgccggtgatcaacccgagcaacggcgtcgtcatcagcggcaccgccgaggccggtgccaccgtgaccctcaccgatgccggcggcaacccgatagggcaggtcaccgccgacggcagcggcaactggagcttcacgccgggcacgccgctggccaacggcacggtgatcgtcgccacggccaccgacccgaccggcaataccggcccgcaggccgccaccacggtggacgcggtggcgccgccggcgccggtgatcgatccgagcaacggcacgaccatcagcggcaccgcggaggccggggccaaggtgatcctcaccgacggcaacggcaacccgatcggcgaaaccaccgccgacggcagcggcaactggaccttcacgcccgccacgccgctggccaacggcacggtggtcaacgccgtggcccaggaccctgcgggcaacaccggcccgcagggcagcactaccgtggacgcggtggcgccgaacacgcctgtggtcaatccgagcaacggcaacctgctcaacggtaccgccgagccgggcagcaccgtgaccttgaccgacggcaacggcaacccgatcggccagaccaccgccgatggcagcggcaactggagcttcacgcccggctcgcaactacccaacggcaccgtggtcaacgtgaccgcgagcgacgccgccggcaataccagcgctcccgctaccacgacggtggattcctcgctgccgtcgatcccgcaggtggatccgagcaacggttcggtgatcagcggcaccgcggacgccggcaacaccatcatcatcaccgatggcaacggcaacccgattggccaggtcaccgccgacggcagcggcaactggtccttcactccaggcatcccgctgccggatggcacggtggtcaacgtggtggcgcgcagcccaagcaatgtcgacagtgcgccggcggtgatcacggtggatggcgtggccccggcggcgccggtgatcgatccgagcaacggcaccgagataagcggtaccgcggaggctggtgcgacggtgatcctcaccgatggcggcggcaacccgatcggccaggccaccgccgacggcagcggcaactggacgttcaccccgagcaccccgctggccaacggcaccgtgatcaacgccgtggcccaggacccggccggcaacaccagcggtccggccagcgtcaccgtcgatgccatcgccccgccggcgccggtgatcgatccgagcaacggagtcgtcatcagcggtacggcggaagccggggccacggtgatcctcaccgacggcaacggcaacccgatcggccaggtcaccgccgacggcagcggcaactgggccttcacgcccggcacgccgctggccaatggcacggtgatcaatgcgctagcccaggacgccgccggcaacgccagcggcccggccagcaccacggtggactcggtagccccggccaccccggtgctcgatccaagcaacggtacggtgatcagcggtaccgccgaagccggggccacggtgatcctcaccgacggcggcggcaacccgatagggcaggccaccgccgatggcagcggcaactggagcttcactccgggcacaccgctgaccaacggcacggtgatcaatgcggtggcccaggacgccgccggcaacaccagcggtccggtcagcaccacggtggacgcggtggccccggccaccccggtgatcgacccgagcaatggtgtcgaactcagcggcaccgccgaacccggcgtccgggtgatcctcaccgatggcaatggcaacccgatcggccagaccctcgccgacggtagcggcaactggaccttcacaccgggcacgccgctggccaacggcacggtggtcaacgccgtggcccaggacccggccggcaataccagcggtccggccagcaccacggtggatacggtggcgccggccacgccggtgatcaatgccagcaacggcagcgtgatcaccggcaccgccgaggtcggcgccaaagtgatcctcaccgacggcaacggcaacccgatcggcgagaccaccgccgacggcagtggcaactggaccttcacccccggcacgccgctggccaacggtacggtgatcaacgccgtcgccgaagacgccgcgggcaacgccagcggtccggccagcaccacggtggactcggtggcgccgtccgctccgctgctgagcatcagcgccgacggcgcgctgctgaccggcaccgccgagccgaacagtcaggtgcgtatcgtggtcaacggcgacaccgccaacccgatcacggtcaccgtcgacggcgccggcaacttcagcctgccgttcgcgccgccgctgatcaccggcgaactgatcgccggggttgccgtggacgccgccggcaacgtcagcgggccggccaccatcaacgcgccggacctggcgccgccgaccatcagcgtgccggaagccgccgatacctggatcaacgccgcggagatcggcgacggcatccaggtcgatgtgacggtccgtccgaccatgcaggtcggccaggtggtcacggtcaagttcgccgggcagaacggctacgaggccgaggtcagccataccctcaccgccggcgacatcgccgccggcaacctgaccctgaccctgacgcctcccggcggcatgggcccgttcccggagggcgcctcgaccgtcaccgccgacatcaacggcggcaccgcgtcgaccccggtgccgttcaccatcgacaccattccgccggcgaccccggtgctgtccctggtcggcaacatcctgaccatctcggcggagccagggaccgagttgacggtgaccgtcgacgtcggcggggtgaccgccaccgccacggtgaccgccgacaacagcgggctggcgtcgctgaacctgctcaccgacctggacatcgacttcagttgggaccagttgctcaatgcccaggtgtcggtggtcggacgcgacccggccggcaacccgagcaacacggcgagcatcggcgtcggcaccagcatcgagcaaccggtgaccatcggcaacttcggcctcgacgtcagcctcaacccgctgaacccgcgtttcggtttcagcggaaccaccgagcctgactccagcgtggtgatccgggtcatcaccccggcgttgaacgtcgaattgctgccgatccaggcggattcgtccggaaacttctcgctgaacctgctgagcccgaccatcctcacccagttggggctgaacatcaccgacatcctcaacctcggctcgcagatctcgttcaacctggtgtccaccgactccaatggcaacgacagcgccgcctacgggatcaccctgacccccaacggactgtcgctcaatatcggccagatcgatgtcaacggtacttccggcgacgacgtgctgtccggcgccaacggcagttcggagcacatcaacggcggcgacggtagcgacctgatcttcaacgtgggcaccggcgatcacgtggtggccggcaacggcaacgacaccatccagatcaccgcgaccgatttcgtcagcatcgatggcggcgccgggttcgacaccctggtcctggccaacggcatcgacctcgactacaacgccgtcggcgtcggcacgctcagcaacctcgagcgcatcgacctcggcaagggcgattcgggtagcgtgctgaccctgaccgcggcggaggtggatgccatcaccgatgccaacaacacgttgcagatcaccggcgagaacaacgacaccctgaacgtggtgggcgcggtgaataccggtaccacgcaactgatcaacggcattacctacgacgtctacaccttcggcagtaccaccctgctgatcgaggacaacacggtacaggtcgtggtctga

SEQ ID NO: 331474 - DNA, 399 bp, Pseudomonas aeruginosa
atgatggcttgtttgtcttggcttgaaaagctcaaggaatcattcgcttccactggtctggactatgaagacctatacgagctaatagaggcatctataacgaggaagaggactaacttccctgcgtttataaatgaggcttcgaagggggttggcttctctgtgggtgagggacatttctactctcttgatcaggactgggatgatcctgaagagtttaatgaggtcagtttctttttgggggaagtggagacctcaagtattccagtgctcgactatgtttttttgatgaagattgcagccgatgtttattctgatttcttccccgaggagagggatagtgttctaagttcggctaaaaaattggaggagcgttactcaaagagattcccggtctag

SEQ ID NO: 331475 - DNA, 3729 bp, Pseudomonas aeruginosa
gtgcccagcaatgccacaccgagcaacagccacaagtatctgatcgagaccaacccggcgctcaccgagctgaagcagttcctcaactcggactacctgctcggtggcctgggtatcaatccggatgacagcaagaagcgcctgggtgacggtctatacgagcagcgcctggtacgcgaagcgatcgtccagcgtacggggcagcgcttcatcgccggattgaacagcgacgaagcgatgttccgctatctgatggacaacgccatcgccagcaaggacgtattgggactgacccctggcgtcaccctcagcgccgcccaggtggcggcgctgacccacgacatcgtttggctggaagaagtcgaggtgaatggcgaaaaggtcctcgcccccgtggtctacctggcccaggccgaggggcggttgggcccgaacggcgcgctgatccaggggcgcgacgtgaacctgatcaccggtggggacctgaggaacgccggtaccctgcgcgcgcagaacgacctcagcgcgacagccggcaacatcgacaacagcggcctgatcgaggccggcaaccgcctcgacctgctggccagcggctccatccgcaatgaccagggcggcatcattgccgggcgcgaggtaagcctctccgcccttaccggagacgtcatcaatgaacggacggtgacccagcaccagtcttcctacaggggaaccggtaccactgaggcatttgccgatagcgccgcgcgtatcgaggctgcgcagaagctgaccgtttcggcaggacgcgatgtagccaatattggcggtgtcatcgacagcaagggtgacctcgctttgcaaggcggcagggatgtcctggtttcggctgcggtagcggagcggggctggacggcaggaagccaggcataccagacccagacgacccagatgggcgccgaggtcgtggcgggacgcgacatcagcgtcagcgccggacgcgatatcagcgtcgtgggcagccgcatcgacgctcgtcgcgacgtgacattcgaggcgggtcgcgatgtgggcctggtcgcggctgccaacgaagagcatgcctatggcaagaccaagaaggtcactttccaggacgacaagatcacccagcaggccactcgcgtagacgctggcggcgacctggcgatcaatgccggacaggacctgcggctggtcgcgagccaggccagcgccggcgacgaagcctacctggtggccggcgacaagctggagctgctggccgcgaacgacagcagttactacctctacgacaagaagagcaaaggcagcttcggtagcaagaagacccggcgcgacgaaatcaccgatgtgacggcagtgggcagccaaatatccagcggcggcgacctcaccctgctcagtggcggcgaccagacttaccagggcgcgaagctggaatcgggcaacgacctggccatcgtcagcggcggcgcggtgaccttcgaggcggtaaaggacctgcaccaggaaagccacgagaagagcaagggcgacctggcgtggcagtcgtcgaagggcaagggccagaccgacgaaaccgtgcgccagagccagatcgtggcccaggggaatctggcgatcaaggccgtggaagggctgaagatcgacctcaagcacatcgaccagaagaccgtgagccagaccatcgacgcgatggtgcaggcggatccgcaactggcctggctgaagcagatggagcagcgcggcgatgtggattggcggcgcgtgcaggaactgcatgacagctggaagtacagcaactccgggctgggcgtcggcgcgcagttggcgatagcgatcgtcgtgacttacttcacggcgggcgcagccagtggggcgattgcaacggccggggccggaacctccatggcaggcgcgaccgcagccgctaccgctacgacttcggcgggctggttgaacgcggcaggtaccgcagcgctcagcggcgtggccagcaatggagcgatcagcaccatcaacaaccggggaaacctgggggatgtcgtcaaggacgtgacctccagcgatgcgctgaggggctatgtagtcgctggcacgactgcggggctgactgccggcgtctacgacaaatggacctcgacccagaccggcacctcgaccgctctaccgaacaccggggccgtggcgcccgccgcagggttgggcacctggcaaggcgtgggccagttcacctcgaaccagttgctgcagaatggtacttcggtgctgttggaccgggcgctgggcggcaagggcagcctgggcgatgcgttgcaaaacagcctggcaaatgcctttgcggcctacggcttcaagctgattggcgacaccacccatggcgtactggacgacggcagcctcggcaagatcggcttgcacgccctgatgggaggtctggccgccgaagcggtcggtggcgatttccgtaccggagccctggctgcgggagtcaacgaggcgctggtgaatagcctcgccaagcaatacgccagcctgcccatcgatgacaagaagggcctgctgatcatgagttcgcagttgatcggcgtgctggcggcttcgacgcagggcgatgcggacgccaagagcttgcagacgggagcctgggtggcggggaatgccacccaacacaactacctcagtcattggcaggaggagaagaagcggcaggaggtcgatggctgcaaggacaaacagctctgcaaaaccggaatagaagccaaatgggcaattatttcggcccagcaggatgtcggtatcgtcgtaggtgttggaggaggcattggtctttcgacagctgaaaccgcagtgggtgtttatgagctggtcaagaactggagggaaacctatgcagctctggagcagttggccacttcgccagagttccggcagcagtttggcgataactacctgaaggggctggaggagcgcgccgcattcttgacccaggcttacgaggatgccggctggcaaggttcggtcacagctggtgtcgagggcggtaggttcgctgcggaacttgttggcgttctgacggcagtgaaaggtggcgcgcagataaccgccaagctgccaacagcagccaagaacctggtcaacgcgattgcggagtcacctgtttccggtagtatgagttcgcagctcggggcagtgggggacttgggtcggctgggtggggggacaaaagcaactgcctcagctggaggacaaacagcctctacattgccgaagaattttggcgagtcagttctaggtcataacacccaaatcggtgtgcgaaacagtaaggcgggtacgatttctggtgcacacaacaacgatgcattcctagagtcggttgaaataaccggtgcgaaggtttccaataaaatcacagatgctcgtttccctgggattgttgagtacagctatcagttgcctagaactaacactaagggcgaatttattggtgggtataagtctgtatccacgaaaacgacttacgatccaaaaattctgccagatagtaaagtggctgatatgtctagtcgcgcggcagtccaggcggaatctgtattcaaagccaatccggccttgagggaaactagtatcaaggttgatggctattacttccaggtgacacgtaacagcaagactggcgaaataacaaattccttcatcactatgcctccgaggataaaatga

SEQ ID NO: 331476 - DNA, 309 bp, Pseudomonas aeruginosa
ttgaccgtccagcgcaagagccgccgcttcgcgtattccctccaagtccaggaggcgggcttcgacctcccccagctcgatgcggaagccgcggaccttcacctgatggtcggcacgccccatgtactcgatcacgccgtcaccgcgtcggcgcgccaggtcgccggtccggtagagcctcgtgcccggttcgccgaaggggtcgggcaagaagcgctcggcggtcaagccgggccgatcgtggtaggcacgggccagcccggcacggctggcaatataaagctcgcctaccgcccctacgggcagtag

SEQ ID NO: 331477 - DNA, 366 bp, Pseudomonas aeruginosa
atgaaggcgcgcatcgagaagaaattgagcaagaggctggtagagctgtacccagcgctctaccgcagcgcctggcgcgacgaagaaccatctgaactcgcatatgagcaaggctcccgagtccggcatgttctttccgtcggcggcggtgtcgactattggggcgaaggacaggacgtctacaccgtctggcaagactggctgatgagttgggaatggcacggaccgttccagacgtacccggagggccatcgtcacgagtaccttccggatacggaaggcttcaagccgactactcgtaacctgctccaactggctagccggtgccagttgctggaagcagcatcaacgagggcggtcccatga

SEQ ID NO: 331478 - DNA, 765 bp, Pseudomonas aeruginosa
atgagcaacaacccgcacttcatgaacatgaccgccgacacgctcggcaagagcttgctgcagggactgatccaggaaatccggatcatgccggactgctggcagaagcttcccgaggccaagcagcaggacatcatcgaccgcctggagcgccaggtacggaatgccgccaccatcgcggtccacaccattgccggcggcgaccgcgacacggtctacggcaagctggagtcgatgaccgcgaaggacaagatgaaggccgtattcgtggtgaatccgagcagccctcacaaggaggacctgctgttcgcggtgaacaaggattgcctgctcatcatcggcggcgccaacgagttcaccgaaggcatggaccaggtcaagcctgacccggaccagaacccgctggacctgaatggcggcgaccacgacatggaagacgccggcgcctggggcggtatgcaaccagcagacgacagcgacgtcgtcgatgccgagttccaagagctgccgcaactcaccgtcgagcgcttcgccggccacaccctgggcgagatcgccatcggcgtcgccaccaagaaggacgtgttcgacgcggcctggctgcaatcgcgcttcgctctcaccaccgaggaagccgagcgcgtcgttctccaactgctggaccagggagtcatcgtgctcgagcaggaaaacgaggagtcccgcgagttgaacacttaccgcgtcgtcaagaagccgggggatatcgccctcgacctggagtga

SEQ ID NO: 331479 - DNA, 648 bp, Pseudomonas aeruginosa
atgacgacgaaccagaaccaccccgacgatcaccttgccattgaagcgctccacagccgctatctggacgtcctgaccggacgcaccagcgatcacctcctgatgttcaaggatgaggcctacgcgcttggccgcgcccgcgggcggctggacgtgttccgtctcgacctgcacctggagcgccagcgccggttcagcgaacgcacgttcgggcctgggtcgcgtgccgctggcgtcgtcgaccacatccgtaaggagttgcgcgagatcgaggaagcccctggcgacctggccgagtggatcgacgttgtgattctcgctctggacggggcttggcgtaccggcgccactccggcgcagataatcgacgccctggtcgcaaagcagacgaagaacgaggcgcgcacctggccggactggcgcacggcgccggccgacaaagcgatcgaacacgtccgagcggacgagccggtcgacgacaacacctacttcgtcatgcgcaacgccggcaaaaaggtgttcgtgaagcacgggccgttcttccgggatcagggcggcctgacggaggactggggcaagaactggacgcgcatcagggccggcagcctcaagcatgcccgccagatcggggaggggttgctgccgtaa

SEQ ID NO: 331480 - DNA, 444 bp, Pseudomonas aeruginosa
gtgaacaccgaacagttcatccgtgactcggccgcgcgcgggctttcccggcgcgccacccggctggccttgggcatcggcccctgggtgttccgcgaaatgctgaccctgatgccggacatcgagtggccagcacgcggatgctcagccgaccaccagcgtgcgaacgagcagaagcgcgggcgctgcacaccggcgcaggccgcggcgctggagcgcgcacacgaacgctggagcgagagtcgacgcttcaccgtcgacggcgtgaccgggactatcgccgagctggtggagcacttccagagccaggtccacgcaacaaccgtccgccgccgcgtcgccgccggcatgagcctgcgcgacgcactcctcaccccgcgccagcagcccaagcccgggcgccggcacccctggaaccgctcacagcagcaggtgcagccatga

SEQ ID NO: 331481 - DNA, 567 bp, Pseudomonas aeruginosa
atgctgatgaccagcttcacccggatcatcatcgtcttctccatcctgcgccaggcgctgggcctgcaatcgacgccgtcgaaccaggtgctggtggggctggcgctgttcctgaccatgttcgtcatggccccggtgttcgacaagatcaacagccaggccctgcagccctacctgaacgagcagattcccgcccaggaagccctgcaaaaggccgaggtaccgctgaaggcgttcatgctggcgcagactcgcacatccgacctggagctgttcgtccgcctgtccaagcgcaccgacatcggcagcccggaggcgacgccgctggccatcctggccccggccttcgtcacgtccgagctgaagaccgcgttccagatcggcttcatgatcttcatcccgttcctgatcatcgacctggtggtgtccagcgtgctgatggcgatgggcatgatgatgctgtcgccgctgatcatttccctgccgttcaagatcatgctgttcgtcctggtggatggctgggcgctgatcatcgggacgctggcgggcagtttcggcaccgtctag

SEQ ID NO: 331482 - DNA, 270 bp, Pseudomonas aeruginosa
atgacccctgaggtggcactcgacctgttccgcgaggcgttgtggctgacggcgatgatcgtcggcgtgctggtggttccgagtctgctggtcggtctcgtggtggcgatgttccaggtcgccacccagatcaacgaacagaccctgagcttcctgccgcgcctgatggtgatcctgctcaccctgatcgtgctgggcccctggctgctgcggcagctgatggagtacacccagacgctgatcggcaacatcccgctgctgatcggctga

SEQ ID NO: 331483 - DNA, 777 bp, Pseudomonas aeruginosa
atgctggagctgaccaacgcgcagatcggcggctggatcgccagcttcgtgctgccgctgttccgggtcgcggcgctgctgatgaccatgccggtgatcggcacccagctggtgccggtgcggatgcgcctctacctggcgctgggcgtctgcgtggtgctggtgccgaacctgccgccgatgccgcaggtggacgcgctgagcatgaaggccatgctgctgatcggcgagcagatcctggtcggcgccttgctcggcttttccctgcagttgctgttccacgccttcgtgatcgccgggcagatcatctcgatgcagatgggcctgggcttcgcttccatggttgacccggccaacggcgtctcggtgccggtgctcggccagttcttcaccatgctggtgacgctgctgttcctggcgatgaacgggcacctggtagtgttcgaggtaatcgccgagagcttcgtcaccctgccggtgggcgagggcctgagcggcaaccatttctggatcatcgccggcaagctcggctgggtgatgggcgcggcactgctgctggcgctgccggcgatcaccgcgctgctggtggtgaacctcgccttcggcgccatgacccgcgcggcgccgcaactgaacatcttctccatcggctttccgttgaccctggtgctgggcctggtgatcctctggatcggcaccgccgacctgctcagccagtaccaggtgctggccggcgaggccctgcaattcctccgtgaactggtgcgggcgaaatag

SEQ ID NO: 331484 - DNA, 801 bp, Pseudomonas aeruginosa; identical to SEQ ID NO: 329068

SEQ ID NO: 331485 - DNA, 951 bp, Pseudomonas aeruginosa
gtggctggacgatgccggcgaggtgcaggcctgcggggtcgcgctgcccagcggcaaaggctccccgctcgccgactcgccgttcctgccgttcgtgctcgacgccagccgcttcgccgctctggacgccaaagatcgccgccgggtgctgttcgacctgaccggcgccagcgccagcccggccgaggtcggcaagcgcctgaaggccaagggcatcgacctagcgctgttcgagaaggtgaagcccctgctccgttccgggttctccgccatggtcggccaggcaaaggactacgccagcgaagcgcgcggcgcctggaaagcggtcaccggcgagaactacggcagcgagaaggcgaacgggtgggagccggaggcgccgccggtcatcgtcagcgaggaggaactggaatcggcgcgcgcggaactgcgagccaccgcccaggacctggacgaggcccagcagaccctgggctccagcaagcgcgcccacgccgacgcccaggcgcgggccagccgcatcaccgctctgcgcgaaaccgcagcgctggccgaccgccggcgcaacaagctggccaccgacgaggccaatcaggacgagtggtcggagaaggtcatggcagccgaggccgcagccagcggcgagcccgcccaccagccgctgacctgccctcattgccagggcgccgtggacctgcaggccggccagttggtcgcgcaccagccgccggcgaaggttgccgatcccgaggcggcgaaacgcctggaggagttccgcggctaccttgccagtgctcagcgggccgtcgccaacagccagcgggacctgaaggagagcgaggacgccgccgcgcaggccgccgccctggaagccgaaaccgcccaggcgcccagcgccgaagcgatcgccaacggcgaacaggcgatcaacgaactgcgtcaggcgcgtga

SEQ ID NO: 331486 - DNA, 561 bp, Pseudomonas aeruginosa
atgcacggacaacgaattggttacatacgggtcagtacgctcgaccagaacccggatcgacaactggaaagcgttcaggtgggcaaggtgttcatcgacaaagcttctggtaaagacactcagcgcccccaactcgatgctttgcttggctatgtccgcgagggtgacaccttggtggtgcacagtatggatcgcctggctcgaaatctggatgacttacgccgtatggtgcagcagctcactgggaggggagtgcggatcgagttcgtgaaggagtcgctgaccttcaccggggaggattcgccgatggccaacctgctgctgtcggtcatgggcgctttcgcagagttcgagcgagcattgattcgagaacgccaacgagagggaatttctctggcgaaacagcgcggagtgtatcgggggagaaaaaaagcgctgagcgacagtcgaatcgaagaactgcggcgccgtgtggaagcccgtgagccgaaagccgcgttggctcgcgagttcggtatcagccgagccaccctctatgagtacctgagaactcccacgtag

SEQ ID NO: 331487 - DNA, 192 bp, Pseudomonas aeruginosa
atgaccacccgccccgttcgctcgatcatcgacgaccaactcgacgacctggtgatgccggccggcgccgacatcgccgcagtgctcggcctgccccgcgagaccctggtggtgaatctcccgcgccgcatggcactgaccatcaagaaaggccggaagtgcctgggggtgcgtcgtgaacgcgaagcgtaa

SEQ ID NO: 331488 - DNA, 603 bp, Pseudomonas aeruginosa
atgaagaagctgacggaagaacacaagcggagaatcggcgaggcgaatcgctcgcgctccaaatcccggcgagacctccagcttgaggcgaaggtattcgagctgtacgcgtccgggagaagcatgagcgaggtcagccacgaaaccagcgtaccagtggcaaccatccacagatggctgcgccgcgagggcgtggagattcgaaagccgggtgactggcaccgaggacgcacatggagcgaatccaggcggcagcaccacccggccaagcaaggtcctgctgaaggttcgccaaccggctacgacatcctcacccagcgagccataggcaatcgatccatcaagaaatccggatatgtggttgtgcatgttggccgcaagcagcggcgctacgagcatgtccttgtcgccgaaaaggctctcgggcgaaggctccgcgatggcgaagtcgtccaccacatcaactgcatccgctccgacaacaggccagaaaacctcctggtctgcacccgcgaataccaccagcaacttcatgcacgcatgcgccgtcacccctactggtccgacgtcgagcgtcgcgccaaagccaaccgacacgaatga

SEQ ID NO: 331489 - DNA, 282 bp, Pseudomonas aeruginosa
atgaccgtcatcacccatgcctacaccccgctgatggatgttgacgccatgagcgagcaggactgccgggaagccctgaaggacgttttgcgcgatggtttcgcgaaggaccaagagctagtggagctgaagaccatcagccacaagctggacagcatgttggtcaaactcatcgacctcttcatcgcaggccacttctccaagctgcatgcggagttgcagtgcatggcggtctacctgcaggagcggcgcgctcagcaatcagcaaggagggcgcactga

SEQ ID NO: 331490 - DNA, 375 bp, Pseudomonas aeruginosa
atgaacaatggcgccacgcaaagcctatgcggcctcagcttgagccccttcgctcgggacgtactgatagaacggcagcgacagatcctccaggaaggcttcagccccaaccatgacgccgagcaccggggcggtgaactggcgctggccgctacctgctacgccgacgaagccgttacgcagatctgccagccagagcgagagccgtgcctgacgcaactggtgccgggctggtggccgttcgagccatcctggtggaaacccagcctggacgctcgaaagaacctagtgaaggccacggcgctgctcctcgcacagggtgacgcgatcgacctgcagattgatatcgagctggagggtcgtccccatggctga

SEQ ID NO: 331491 - DNA, 555 bp, Pseudomonas aeruginosa
atgtctgacaccctcctccaacccagccgtttcacccaccaccatcgggtcctgcacgccgtgctgctggatgaggaaggctggttcgtgctctccgacctggtacggctgctgggcctttacctgggcggtcgggcgccggcggcgttgtgtgacgaggcgccgtggccgctggcgacggcggaacagcgcgagcgcttgttcgccctctgccatgcgctggagcggcatctggacaccgatcagtggcggctcgcctggctccatgacgaacgccacgggccacgccaggactgcctggtcagcgagtccgggctctacgctctgctctggctcgcagtgcctggcgcggcacggggtttgcgccgttgggtcagcggctcggtgcagccacgcctgcgcagccagtcccgccccaacgccacgccccagcgcgccgtgctgcactggaaaaccgccgagatcgacaccctgcactggcaaggcaagacctggatccccctctccgactgcccccaactcctcgacagtccacgcccgctgatccgggcctga

SEQ ID NO: 331492 - DNA, 825 bp, Pseudomonas aeruginosa
gtgaaagagtacggcaaggtcaccggctacaccccgaacggcgccgggctgccgaactgcatcgtcgctctgaacatggcgcagcgtatgggcgccgatccgctgatggtgatgcagaacctgtacgtgatcgagggccggccgagctggtccagccagttcatcatcgcctcgatcaacagttgcggccgtttcaacccgctccgctacgacctcagccagccgggcaaagagcaggaggtttcctataaggcgactacctggaagaacaagcagaaggttgaggagaccaagaccatcaaggttcgccatcagacctgcacggcctggaccaccgagaggggcgttcaaatcccgaccttcagccccgaggagcttcgcaaaaagtcgatgctccagttgtgccgcgagtacggagtgcccgtgatcgaaagccccgaagtgtcgattcaaatggcgctcgacgagggctggctcaccaagaacggcagcaagtggcagaccatgcccgaggtgatgttgcgctaccgcgctgccagcctactgggccgcctgtatgcgcctgagctgctgatgggcctgcagaccgtcgaagaggtcaacgacttcatcgaaccgcgggacaccgatatccagggtgaaaccgtgacggtgcatgtcgatgatctccgagacaaagaaccggcgccgccggctgtcgccgccgaagacgatggagacgagccctctccgccggacggcgtgaacaccgagacgggcgaaatcaccgaacccgccccgggccagcagccggacaccggcaccgacgagctcaatctcgagtaa

SEQ ID NO: 331493 - DNA, 183 bp, Pseudomonas aeruginosa
atgaccacccgccccgttcgctcgatcatcgacgaccagctcgacgacctggtgatgcctgccggcgccgacatcgccgcggtactcggcctgcctcgcgagaccctggtggtgaatctcccgcgccgcatggccgtgaccatcaagaaaggccggaagtgcctgggggtgcgtcgtgattga

SEQ ID NO: 331494 - DNA, 372 bp, Pseudomonas aeruginosa
atgctgatcctgaccagaagacccggcgaaaccctgcatatcggcgacaacatcaccgtcacggtcctcggcagccagggcgaccaggtgcgcctcggcatcaccgccccggacgacgtcgccattcaccgctccgagatctaccagcagatcggcaacgtccgaccggtgccgccggcggaactggtcgaggcctggaaccgcgagcacccggcgccagcgctaatcgagtaccgcccgtaccgcggggccgaaccacagcgcacccgcaccgtcggccgggccagcgtgtcgcttggcggggcggcggttatctggatcgaaggccagtcggcgccggtggcgttgcgggcctgcaccgcgatctcctga

SEQ ID NO: 331495 - DNA, 189 bp, Pseudomonas aeruginosa
gtgttggacctgccgagtcgtagccaggccctgacactgctgcgtgccgtgacgatggacaaggaaatcgattcggtgatcgtcgccggcacgctcaaggaaccgatggcgaagacgcctgcctggttacaggcagtctggatcgacgccgggcaactcgccgaccagcagcaacaggctgcggcctga

SEQ ID NO: 331496 - DNA, 183 bp, Pseudomonas aeruginosa
gtgttcgacgcggcctggctgcaatcgcgcttcgctctcaccaccgaggaagccgagcgcgtcgttctccaactgctggaccagggagtcatcgtgctcgagcaggaaaacgaggagtcccgcgagttgaacacttaccgcgtcgtcaagaagccgggggatatcgccctcgacctggagtga

SEQ ID NO: 331497 - DNA, 171 bp, Pseudomonas aeruginosa
gtgctgcacaacgccaccggcgcgctgatggccttctacgacggcaagcaaaccgccgaacagaccctggacgccatccgcgccggcctcgaatccctcgcttggcaccacggcaacgtcgcccaggcagaaaccccgcaactggactttggagtggctgacgatgagtga

SEQ ID NO: 331498 - DNA, 1254 bp, Pseudomonas aeruginosa
atgaaaatccgtcgtaaaaccgcagtcccgcgcaatgcaggggcggtcctgccgatgctcgcctgtcttgccgcgcaagctgccgagggcggcttcctggaggatgcgaagaccgacctggtcctgcgcaactattacttcaaccgcgatttccgcgaccacgatgccggcaagagcctggtggacgagtgggcgcagggcttcatcctcaagttcagttccggctataccccgggcacggtcggcgtcggcctcgacgccatcggcctgttcggcgtgaagctgaacagcggacgtggcaccagcaattccgagcttcttccgttgcacgatgacggtcgcgcggcggacaactatgggcgtgtcggcgtggccgccaagctgcgcgtttcggccagcgaactgaagatcggcgagatgctcccggacattccgctgttgcgctacgacgacggacgcctgctgccgcagacgttccgcggcttcgccgtggtttcccgcgagctgccgggcctggctctgcaggccggacgcttcgacgcggtgagcctgcgcaattcggcggacatgcaggacctgtcggcctggagcgcgccgacgcagaaatcggacggtttcaactacgccggcgccgagtaccgcttcaaccgcgagcgcacccaactgggcctgtggcacgggcaactggaggacgtctaccggcagagctacgccaacctgctgcacaagcagcgtgtcggcgactggaccctgggcgccaacctcggcctgttcgtcgaccgcgacgacggcgccgcgcgcgccggagagatcgacagccataccgtctacggcctgttttccgccggcatcggcctgcacaccttctaccttggcctgcagaaggtcggcggcgacagcggctggcaatcggtctacggcagcagtgggcggagcatgggcaacgacatgttcaacggcaacttcaccaacgccgacgaacgctcctggcaggtgcgctacgactacgatttcgtcggcctcggctggcccggcctgatcggcatggtccgctacggccatggctcgaacgccaccaccaaggccggtagcggcggcaaggaatgggagcgcgatgtcgagctcggctacaccgtgcagagcggtccgctggcgcggctcaacgtgcgcctcaaccacgccagcaaccgacgcagcttcaacagcgacttcgaccagacgcggctggtggtgagttatccgttgtcgtggtga

SEQ ID NO: 331499 - DNA, 1587 bp, Pseudomonas aeruginosa
atgaaaaccgtccattccgcgtcttacgagatcctccgtcgccacggcctgaccaccgtcttcggcaaccccggctccaacgagctgccgttcctcaaggacttccccgaggatttccgctacatcctcggcctgcacgagggcgtggtggtcggcatggccgatggcttcgccctggccagcggccgcccggccttcgtcaacctgcatgcggcggctggcaccggcaacggtatgggtgccctgaccaacgcctggtactcccatagccccctggtcatcaccgccgggcagcaggtgcgctcgatgatcggggtcgaggcgatgctcgccaacgtcgatgccggacaactgcccaagccgctggtgaaatggagccacgagccggcctgcgcccaggatgtaccgcgcgcgctgagccaggcgatccagaccgccagcctgccgccgcgggcgccggtgtacctgtcgattccctacgacgactgggcgcaaccggcgccggccggcgtcgaacacttggccgcgcgccaggtcagcggcgccgcgctgcccgcgccggcattgctggccgaactcggcgagcgcctgtcgcgctcgcgcaacccggtgctggtgctcggtccggacgtcgacggggcgaatgccaacggcctggccgtggaactggcggagaagctgcggatgccggcctgggtcgcgccgtcggcctcgcgttgtccgttccccacccgccatgcctgcttccgcggcgtgctgccggcggccatcgccgggatcagccggctgctggacggccacgacctgatcctggtggtcggcgcgccggtgttccgctatcaccagttcgcccccggcgattacctgccggccggcgccgagctggtgcaggtcacctgcgatcccggcgaagcggcacgggcgccgatgggcgacgcgttggtcggcgacatcgcgctgaccctcgaggcactgctcgaacaggtccgccccagtgcgcggccgttgcccgaggcgctgccgcgaccgccggcgctggccgaggagggcggaccgctgcgtccggaaaccgtgttcgacgtgatcgatgcgctggcgccgcgcgacgccatcttcgtcaaggagtcgacttccaccgtgaccgccttctggcagcgcgtggagatgcgcgagccgggcagctacttcttcccggccgccggcggcctcggcttcggcctgccggcggcggttggcgcgcaactggcgcagccgcggcggcaggtgatcgggatcatcggcgacggctcggccaactacggcatcaccgcgctctggagtgccgcgcaataccgcgtgccggcggtgttcatcatcctcaagaacggtacctacggcgccctgcgctggttcgccggggtgctcgaggtgcccgatgcgccggggctcgacgtgcccggcctggacttctgcgcgatcgcccgcggctatggcgtcgaggcgctccacgcagccacccgcgaagagctggaaggtgccttgaagcatgccctggccgctgatcgcccggttttgatcgaggtgccgacgcaaaccatcgaaccctga

SEQ ID NO: 331500 - DNA, 897 bp, Pseudomonas aeruginosa
atgagtccgatcgatctcaacctgatccgcaccttcgtcaccctctacgaagccggcagcgtgaccctcgccgcggagcgcctgttcgtcacccagccatcggtgagctacgccctggcgcgcctgcgcgaactgttcgacgacgcgttgttcacccgcacccgcgacggcatccagccgaccttcgtcgccgagcagctctacggcaccttccgcgagtcgctgacgcgcatcgagggcgcggtacagagcgttcgccacttcgatccggcgaccaccgagcgacgtttccgcatcgccctcaccgatctcggcgaagtgggtttcctctcgctgatcctcgaacgcctgacccgcgacgcgccgttcgccgaagtggaagtgctgccgctgcaggtggacgaggtcggcgcctggctgagcagcgccaaggtcgacgcggcgatctgccgccagccggtgcccggcgcgcgcagccagcgggtcctgcacgagcgctacgtgtgcctgctcagcgaccgccacccgcggatcggcgacagcctgagcctggagcagtacctggccgagcggcacatcgtggtgacccgtacctccggccacggcatcgccgaggacgtgctcgaggccatgcaggtgcagcgccgcatcagcctgcgggtgccgcacttctcggtgctgccaaagatcattcccggtaccgagctgctgaccatcctgccggcgcagatcgcctatcgcttcgtcgccgaaggcggcatgcgcatgctcgaactgcccttcaccctgccgccgttcgacgtctccctgcactggcacgagagcagcgaacgctcggcggcgctgaactggttccgcaccaccatcgccgaggcgatcatcgccgcccaacgctga

SEQ ID NO: 331501 - DNA, 1074 bp, Pseudomonas aeruginosa
atgacaaaggctaacgagatcgaaaccgcgaaggtcaagcagttttcagcacggatcatggaggactacggcaataccctgcgcggcgcgatgctctacatcggcgaccgcctggggctgttcaaggcgctcgcccatggccaatgggtgaccctggaagagctggcgcagcagaccagctacaccacccgctacctgcgcgaatggctgggcagcatggtcaccggcaactacctggcctacgatccgcagagcaggagctatcggttgccggccgagttcgtcccggtgctcgccgacgaggactcgccttatttcgccggcgggatcatccagttgagcgtgcccttcgtgagcatggcgccgaagatcatcgaggccttccgctgcggcggcggttgccccgaggaatccttcccgctggaaacctgggaaggcatggagcgcatgaccatgccctggtacaagcacttcctcgtgcagcactggattccttcgctggatggcgtcaaggaaaagctccaggcgggtggcagcgtgctcgatttcggatgcggcagcgggctggccgcgatcatgatggccaaggcgttccccgaagcccaggtctatggctgtgacttccacgcgccgtccatcgaacgcgcgcgggcgaacgccgaggccgcgggggtcggcgaccgggtgcgcttcgaggtcagcgattccgatgcgctggcgggcaagaagttcgacttcgtcacgaccttcgtggtcatccacgacgcgaccgacccgcagcagatgatgaaggacctgcgcgagtcgaccgccgacgatgggacctacctgatggtggaactcaacctgtcgcaggaactgcacgagaacatgaacctgttcggtcgcgtgatgtacccgcagagcacgctgtattgcatgacctgttcgctgtcccacggcggcgagggtctcggcgccttcatgggcgaggaccgcgcgcggcagatggccgaggccgccggcttcagtcgcttccgcaaggtgccttcggagtggccgccgctgccggcgctgttcgaactgcgaccctga

SEQ ID NO: 331502 - DNA, 261 bp, Pseudomonas aeruginosa
atgctcttcaatataatgaagtatcaacgaaggagatgcaaaatatgctcctttctcaactccaggaatccatatttcagtaaaacccaaaccaacatctcccacgaacaaatcccgacatccagcgactacacactcatgtgcgctcattactctattaacgtggaaatcaaccgctccctccgacataattatcaacttcaatttatcaagcaatccagaacttacccgccccctggagtactgctgccctcttcctaa

SEQ ID NO: 331503 - DNA, 1371 bp, Pseudomonas aeruginosa
atggcattaacagatgcagtcgtccggcaggccaagaccaccggaaaagcctacaccctcaacgatactgacggcctggtgctgttcgtcaccggcaagggggccaagaagtggcacttccgcttcacctggatgagcaagcaacagcgcgttgccatcggcagctacccggaaatgtccctcaaggaagcacgcgagcagcgtgacgacctgcgtgcgcaggtcgcccgtggcgtcgatccgcgcatccatcggctgcaggtcaaggcggcagagttggccgctcccctgaacacctttgcaacggtcttcaagacctggcgcgacttcaaggcgctgagcctgaaaaccggccgccagagcacgctgtcgcagatcgaccgaattttcgccaaagacgtgctgccctggctgggcaagctgtccatcttcgacatcgacaatccgcacctgctggacgtgctgcgtcgtatcgagcggcgcaaggcgttcaccaccgccgagaaggtgcgcacctggctcaatcaactgttccgctatgcgatggtcgaaaaggggctgcgctacaacccggccagcgacctcgatattgtggccgcgcccaggccgcccgtgtcgcacaacccgtttctgcgtatggaagagctgccggccctcctgcaggccctgcgtggctatggcggccaggcgctgaccaaaatgggactacgcctgttgttgctgaccggcgttcgtaccggagagctgcgccaggcggtgcctgagcagttcgacctagagcgcggcttgtggatcattcccccggtcatcgtcaagcagttgcagctcaagctgcgccgcgagggcaagaccatcccgccctacatcgtgcccttgcccgaacaggccatcacaatcgtgcgcgagctgctggcagagcatgcccgtcgcccggcgcagcactatctgctgcccaatcgcagccgtctcaaggagcgcatcagcgagaacaccctgaatggggcgctaaagcgcatgggctacaaaaacctgctgaccgggcatggtatccgggcgacgatttccaccgccctcaacgagctgggctacccgaaggagtggatcgaggtgcaactgtcgcatgccgatcccaacaagatccgcgcggcctacaaccatgcggattacgtagagcagcgtcggatgatgatgcaggagtgggctgaccggctggatggctgggagcgtggcgagccggtcgtgcggccggtcatggcgcaggcgttgccgcatagcctggcggggattgaaagctatctgcaactgttggcacaggggcgtttgccgcaacccgggcatggggtaatcgcagggatgcacggggcaggctga

SEQ ID NO: 331504 - DNA, 252 bp, Pseudomonas aeruginosa
atgcgcacgatcagttacaccgaagcccggcagaacctgtcggccaccatgatgaagaccgtggaggatcgcgccccgatcctgattacccggcagaacggcgaagcctgcgtgttgatgtccctggaagagttcaacgcgctggaggaaacggcttatctgctgcgctccccggccaatgcccgccgcctgatggattcgattgacagcctcaagcaaggccagggcgtcgagcgggatttggccgagtga

SEQ ID NO: 331505 - DNA, 255 bp, Pseudomonas aeruginosa
gtgaagctgatctggtcggaacaagcctgggacgattatctgtactggcaggacacggataagcgtatggtgaaaaaggtcaacgagttgatcaaggatgcctgccgtaccccgttcgagggcaagggcaagccggagccgcttcgccacaacctggcgggcttctggtcgagacggatcacggccgagcatcggtttgtgtattcggtgacggatgacgcgctgctgattgcagcctgccgttaccactattga

SEQ ID NO: 331506 - DNA, 396 bp, Pseudomonas aeruginosa
atgcgtcgtgatacggcaggaaaacccagcgccgcctgggaactcggtcgctggtgcggggatcgctaccgggcgttcctgcgccaggaggcgcgctttgtcggctggctggccggacggggtatgccggtgaagctggcccgcgtactgccctggatattcaggattgtcgctgttctggcgttgctctatctcgccttctggatggctctggtgctgctgggcgtcgcagtgttggcgcatgcatccagcaccagcgacacgaccaacgaacacaatcaggactgggtgactcccgatcctgacgaacatatgaagaatccgggataccacccaagcctctatgacgatccacccgatccgagttactacgacccccggtatgacaaagactag

SEQ ID NO: 331507 - DNA, 1521 bp, Pseudomonas aeruginosa
atgacgctgctgacgaccgattatctggagtattacctgacgctggtcgcctggctcgtgcacaacggcatctgggccatcgtggtgaccagcggggtgattgcgctgccgtttctggccatcgtcatcggcgagtggctgaacgtacgcgccgagggcgctgacgagggcaacaaaggcgtgctgtcgtctcagcgcatcgagaaccgtatctgggtggccatcgtcgtggtcatgttcgcctgcgtcccggccatcgacgtgaatctggcgaccatccagttcgacaccagccgttccaggcaatgccaggtgaatgtgccgttgcccaacgagaccggctggagccagtccttcaccaccctgaacaaccagtcggcgaaagtaccggtctggtgggtgttcatgcacaccctgtcgcgggcagtgaccggcgcagcagtcgccgccattccgtgcggcaccgacctgcggcagatgcgtatggagatcaatgccacccgcatcgatgacccggtgctggcccaggaaatcgcagatttcacacacgattgctacggcccggcacgggccaaattgttcatgacccgcccggagctggattcgtcgcagatgcacgatgtcacctggatcggctcgcgcttctttcttgacaacgccggctactacgacacctatcgggcgaaaactccccgcgaaggctgggcctacgacagcaaccgcgatgctggcctggcccaggtgcccagcggtgcgggctaccctacctgcaaccagtggtggaacgatgccggcaccggcctgcgcgcgcgtctgctgcagcaggtcgagccgagcctgctcaaccgcatcgccggctgggcgggctttctgagccgcaccgaggtggatgattccgtggtgcgcgccatcgcagcaccgcgccagcagaaaatgaacctgggcaacgtctacgccgactacggcgggcaaatcgacaagacgctgcccaacatcgtcacccgcgtcgctggcgacgtgggcatggctgtgggcagcctggcctatttcccggcgatggacgtggtgcgccaggcattgccgatggtgatgtcgctgctgaaaatggcgctgatcatcagctcgccgctgctgttcgtgctggcgaccttcgacatccgcgctttcgtcacggtcagttgcgtgtacttcgcactgtacttcgtcgacttctggttcgagctggcccgctggattgattcgaccatcctcgatgcgctgtatggctggggcatggggttcaaccggccacacatgaacttcaacatcatgatgggactggacaacgccacgggcgacatgctgctgaatttcgtcatggcgacgatgtttatcgtgctgccgacgttttgggtcacagcactcggttgggccggcttgcatgccggaggcgcactgaaaggcttgagcgaaggaagcagtggtgcctcaaaggcaggcgcgcagggtgcatccacaatgtcaggtggcaaactgaggtag

SEQ ID NO: 331508 - DNA, 351 bp, Pseudomonas aeruginosa
atgtccgcaccgtttgcacccactcaatcagaccggccattgcgccgcctgttcatcgtcatggcgctactggtcgccggcctcttcgtcctggcgttcgtcgtgacgtttgtcggcatccacctgctaggcggcatcgagcactggcagcaatggctggacgatcacgccgggcatttctttgtctggcgcctgtgcctgtatgccgtggttcttgccgcctggccgtgggcgcgccgccgtcgcctggcccgcgatccgcaatcccgccagtcactgcgcctgattgaggtgttcggcgtgctgagcatcgtcctgttcgaagccagcaactggctgcggttgtactga

SEQ ID NO: 331509 - DNA, 864 bp, Pseudomonas aeruginosa
gtggacgatttgacctggacgctgaaacagctatgccggcgcaaccgtgacggcagctttgccacgcaggccgaccggcagcgctctctggcgctgatggcccgccagttgcgcgaggccggctttcgccaaatgcaggccagttcgctcaagggccggcacgtcgatgcattgctcagccagtggcaggcacaggggctgtcgaccggcaccctgaaaaaccgcctgagccatttgcgctggtgggcggaaaagattggcaaggggggactgctgccagccgacaaccgccagctcggcatcgccgagcgccagtacagcaccaaccagagcaaggcacagaccctggacgaacgcctggacgcgatccgcgatccgcacgtgcagatgagcctgcgcctgcaggccgccttcggattgcgccgccaggagtgcgtcaagttccagccggcctgggccgaccggggcgatcacattgcactcaagggttcatggacgaaaggcggcaaaccccgcactgtgcccatcacaacgtcgcagcaacgggtagtgctcgatgccgcccgggcactggcgggtgccggttcgctgatcccggcgcacatgtcctatatccagcagcagcatgtgtatgacggccagtgcaaggcggcgggactgagcaacatgcacggcctgcgccatcagtacgcacaggcccgctatgcagcactgacaggctggcaggcaccggctgcgggcgggccaggcgcgcgggcgctgaccccggcccagcgccagatcgatgcgcaggctcgccagatcatcagccatgaactgggccatgagcgaacgcagatcacgacgctgtacctggggcgttag

SEQ ID NO: 331510 - DNA, 1146 bp, Pseudomonas aeruginosa
atgacgatcccgcaaacgccagaacacacgcacaacacccagttcaccaccccgaccgccctgatgctcgatgcccgcctgacgccgctggagcgcaacggctggcaggtgctgcgcatgctgcgggcccctgatggcatcagctcgctagccagcctcggccagctgcgccgctacctcacgtccattccgctgggccagaaagccggccatgaaaccacctggcgcgtgctggtggtactgcgtctgaccggctggattagcctggtcggccagcagcgcgatccgctgaccggccatgtcctgagcgagcagtaccaggtgcatgaccaggcgcagcgctttgcccgggcctgcgtccttgacccgatgctgccgcagctgctgcaggaggccacggggcacgacaacaaccaggtggcgcgcgtggcggcacatattcaggcggagctggcaaaggcctcgtccggcgatgacgacaccgacgatgcaggcccgacgcctccggggatgtcggatgaatcagcagccacatcatcaccggacacgccggacaatacctcgcctgtccagtgcgcttccgttctgccgcagaacacggcgatgactgccgtaacggacgatgctgaccctacgtatagtttgtataagtataaaaaacatacgtaccgcgcgcgcgaagcaggcgctgtggataacccggcagtggcgtccctgccaccctgcctgcaatgcgccgaggccaggcagcagcgggatatccaggcggcactgcgccggttgcccgggccacagcgcctggatgtgctcgatgagctggaagcccgcagtcagagcggcaccgtgcacaatgtcattgcctacttcttcgggctgatcaagcgggtgctggccggggagttccggttgtgggccgggcgcaaactgcgccagcctgccagccccgcaacaccgacagcgcctgcccacccggccacttcacgtcagccggccacagcacccgctcccaccttcaaaccggccgctcccgaggtcgccagggcccatatcgccaacatccgcagcctgctgaaccggccggccagtgccggcgagctggctccctgctacgtgcagaacaagggctggcagccggggccggcatga

SEQ ID NO: 331511 - DNA, 849 bp, Pseudomonas aeruginosa
gtgctgacagttgatacgattggcgggcttcgcgcgcttgtggcccgcgctcgtggtaaaaacaagaaagtcgctctagtaccaacaatgggtaacttgcatgacggccatatcgccctgattcatggcgcaatgcagcgagtcgacttcgtggttgcgagtatcttcgtcaacccgctccagttcggagcaaatgaagatttggctagctatccccggactcccgacgctgaccgcgagaagttggccaatgccggatgtgatgtgctatttgttcccgctgttgaagagatctatccgaatggaatgctcaaccaaactaccgtcagcgttccgaatgtgtctgagggcctttgcggtgcggtacgccctggtcactttgagggtatggccaccatcgtcctcaaactgttaaacatcgtgcagccagatgcggcgttttttggggaaaaggactatcagcagttggccgtcattcgttcgatggtcagggatctcaatatgacaatagacatcatcggcactccgacagtccgagctgcggacggtttggcgttatcgtctcgcaatggatatctgaatgaccacgaacgcacggtagcccccatcctctacgcatgcttgcagaaaatggcgggggcaattcaggacaagaagctggtagatgaccttcatttacagacatgtcgtcagcgcataacggatgccggtttccagttggagtaccttgaagtccgaaatgcacaggatctgagtcctgcgacgagtatcgatacgcacttggtgattctggtggctgcccgcattggtaaaacacggcttattgataatttgactgttgacatttaa

SEQ ID NO: 331512 - DNA, 633 bp, Pseudomonas aeruginosa
atgaatatgcctacagcgacttgcagcctgttgccgatgacaggaaaagtgccctctagcgtggatcatgcctccccacatcagttggtgaggcaggttgccctgacgctgttcagcgaactaggctttcataatgtcagcttacggaaactggctagcgcactggggatgcagcccgggtcactttaccaccatatagagggcaagcaagagttgctattcgagctaatcgacgaatacgaaacagacttgctcgacgccattaaaattgatctacctacaggcggttcccccgaccacaagctctctgcttacatccattcatatttcagcttcaatgcttcgaacctacaacgttgctccattgcacaactcgaattcagaaacttaaaccaaaaccaacaaaaggtaattgaagccacccgagcggagtatgcatccctacttgacggaataattcagtacggcatacgaactcaatcattcagccccatcttcccccaagcaatcacacacctgattctgtcaatgctgacggagatgagcaaacaagcaaaaagcagtgccgccctaacatttgaagatgctacggccctactccaagaggctgcgcttagaatcctgcacacctga

SEQ ID NO: 331513 - DNA, 1182 bp, Pseudomonas aeruginosa
atgcaagacgtcgtcatcgtagccgcaacccgcaccgccatcggctcctttcagggtagcctggcatctgtcagtgccgtcgaactgggcagcgtcgtgattcgcgccctcctggaaaaaaccggcctggacccggccagcgtcgatgaagtgatccttggccaggtgctcaccgcaggctgcggacagaacccggccaggcagtcggccatcaacgccggcctccccaatagcgtccccgcgctcaccgtcaacaaactctgcggctcaggcttgaagagcgtcaccatggcagcccaggcgatacgctgcggcgacgccgatatcgtgatcgccggcggtatggaaagcatgagcctggccccctatgtactggccagggcccgtaccggtttgcgcatggggcacgcccagctcgccgactcgctgctgcaggacggcctgatcgatgcctttaacgattatcacatgggcatcaccgcggagaacctggtcgagcgttaccagttgacccgcgaagaacaggatgcctacgccgcccgttcccaacgcctggccaacgcggccatcgaggccggtcgcttcgtcgatgaaattaccccggtggccattccccagcgcaaaggcgagccgctgctgttcagtacggatgagcagcctcgcgccgaaacctctgccgaatccctggccaagctgaaacccgcattcaggaaggatggcagcgtcaccgctggcaatgcctcaaccctcaacgatggcgctgccgcagtactgctgatgagtgcagaaaaagccaagactctcggcctcccggtgctggcaaccattcaggcctacgccagtgccggtgttgatccgcagatcatgggcatcggtcccgtttccgccagcaaaacgtgcctggagaaagctcgctggtctctggacgaccttgaccttatagaagccaacgaggcgtttgccgctcaggctctttcagtcggcaaggagctgaattgggatatcgacaaggtcaatgtcaatggcggcgctatcgctctcggtcacccaataggtgcatctggctgtcgtgtattggtcagcctcgtccacgagatgatccgatgcgacgccaagaaaggcttggccaccctgtgtatcggtggggggcaaggtatcgcattggcgcttgcaaggtcttaa

SEQ ID NO: 331514 - DNA, 633 bp, Pseudomonas aeruginosa
atggcttggacacgtgaacaaatggcgcagcgcgccgctcaggaactgcaggacggcttctacgtcaacctcggtatcggcctgccgaccctggtcgccaactgcatcccgcccggcatggatgtctggttgcaaagcgagaacggcctgctcggcatcggcccgttccccaccgagaacgaggttgacccggatctgatcaacgcgggcaaacagaccatcaccaccctggccggcagcgccttcttcgacagcgcggcgagcttcgcaatgattcgcggcggccatatcaacctgtcgatcctcggtgccatgcaggtctccgagcagggcgacctggccaactggatgatcccgggcaagatggtcaagggcatgggtggtgccatggatctcgtggcaggagtcaagcgcgtggttgtgctgatggaacataccgccaaaggtggcacgcacaagattctcgaacgctgcgatctgcccctgaccggtgtcggcgtggtggaccggatcatcaccgacctggcggtgctcgacgtcacggcgcagggactgcgcctggtcgaactggccgaaggggtcagccttgaagagttgaacaacgccactggctgccgggtgctggtcgactga

SEQ ID NO: 331515 - DNA, 699 bp, Pseudomonas aeruginosa
atgaacaaaatctatccaagtgcgcagcatgccctcgaagggctggtggaggacggcatgaccctggccgtcggtggcttcggcctatgcggcatccccgaagccctgatcgcggccctgcgtgacagcggcaaacgcgaactgacggtaatcagcaacaatgccggcgtcgacggcttcggcctcggccaactgctggaaacccgccagatccgcaagatgatttcttcctacgtcggcgagaacaaggagttcgagcgccagtacctggccggtgaactggagctggaattcaccccccagggcaccctggccgaaaaactgcgtgccggtggtgccggtgtcccggccttcttcaccaagaccggctacggcaccctcgtcgccgaaggcaaggaaacacgccagttcgacgaccaatggtacgtgatggaacgctcgctgaccgccgacgtggccctggtcaaagcctggaaggcggacaaagccggcaacctgctcttcagcaagaccgcacgcaacttcaatccgctggccgccatggccggcaaggtctgtgtggccgaggtggaacagattgtcgaaaccggtgaactggaggccgatcagatccacctgccgggcgtctacgtacagcgcctggtactcaacgccaacccggaaaaacgtatcgaacaacgaaccctacggagtgtttga

SEQ ID NO: 331516 - DNA, 906 bp, Pseudomonas aeruginosa
gtgaaccttccagaatcagtcaggatcgtcgaagtcggccctcgcgacggcctgcagaacgagaaacaccccatcagcgtcgccgacaaggtgcgcctggtggacgacctgtccgccgccggcctgggctatatcgaggtcggcagcttcgtctcgcccaagtgggtgccgcagatggccggctctgccgaagtattcgccggtatccggcgcctgccgggcgtcacctatgcggccctgacaccgaacctcaagggcttcgaagccgcactggaagccaaggtggaagaagtcgcggtattcgccgccgccagccaggccttctcgcagaagaacatcaactgctccatcgcggacagtctggagcgtttcgtgccgctgctggaggccgccaaggcggcgaacgtgcgcgtgcgcggctatgtctcctgcgtgctcggctgcccctacgacggcgaggtcgatgccgcccaggtcgccagcgtcgcacgcgagctgtacgccatgggctgctacgaggtatcgctgggcgacaccatcggcaccggcacgccgggcaggacccgccagctgatcgaggcggtcgcccgcgaggtgccgcgcgacaagttggccgggcatttccacgacacctacggccaggccctggccaacatctacgccagcctgctggaaggcatcgcagtgttcgacagctcggtcgccggcctcggcggctgcccctacgccaagggcgccaccggcaatgtcgccagcgaggatgtggtttacctactcgacggcctgggcatcgagacgggcatcgacctgtccgccctggccgccgccggccgacgcatcagcgccgcgctcgggcgcgaaagcgcctcgcgcgtggcccgggcgctggccagtcgcgacacataa

SEQ ID NO: 331517 - DNA, 1950 bp, Pseudomonas aeruginosa
atgagcctcaagcatatcgataccctgctggtcgccaaccgtggcgagatcgcctgccgggtgatgcgcaccgccaaggccctgggcctgaagaccgtggccgtacacagcgccatagacgcggccgcgcgccatgtgcgcgaggccgacctggccatcgacctgggcggcgccaagccggccgacagctacctgctggtggacaagctgatcgccgcggccaaggccagcggtgcccaggcaatccaccccggctacggcttcctctcggagaacgccggcttcgcccgcgccatcgaagaggccggcctgctgttcctcggcccgccggccagcgccatcgacgccatgggcagcaagtccgcggccaaggcgctgatggagcaagccggcgtgcccctggtgcccggctaccatggcgaggcccaggacctggaaaccttccgcgccgccgccgaacgcatcggctacccggtgctgctcaaggccaccgccggtggcggcggcaagggcatgaaggtggtcgagcgcgaaagcgaactggccgagaccctggcctcggcccagcgtgaagcccaggccgccttcggcgacgcgcgcatgctggtggagaaatacgtgctgcagccgcgccacgtggagatccaggtgttcgccgaccagcgcggcaactgcctgtacctcaacgagcgcgactgctcgatccagcgccgccaccagaaggtggtggaggaagccccggcgccgggcctcagccccgaactacgccgagccatgggcgaggcggcggtcaaggccgcgcaggccatcggctacgtcggcgccggtaccgtggagttcctgctcgacgcccgtggcgatttcttcttcatggaaatgaacacccgcctgcaggtggagcacccggtcaccgaggccatcaccggcctcgacctggtggcctggcaggtccgcgtagcccgtggcgaggcgctgccgatcacccaggagcaggtgccgctcaacggccacgccatcgaggtgcgcctgtacgcggaagacccggacaacgacttcctgcccgccaccggcaccctggcgctataccgcgaagccgccgccggccccggccgccgtaccgacagcggcgtggcccagggcgatactgtgtcgcccttctacgaccccatgctgggcaagctgatcacctggggcgagaaccgcgaagaagcgcgcctgcgcctgctggccatgctcgacgagaccctggtcggcggagtgcgtaccaacctggccttcctccgccgcgtgctggcccacccggccttcgctgccgccgaactggacaccggtttcatcccgcgccaccaggacgtgctgctgccggctcccggcgaactgccggatgacttctggcaagcagccgccgaagccttcgcccaaagcgagccactgcgtcagcgcgatgatgacgctcattcgccctgggccagcaacagcggctggcgcgccggcggcccggtggagatcgagctgcacctgtcctgcaacggccacgcgcgcaaggtgcgcgccaacggcagcgcccacctgcagagcgacagcctgagccatgtcgacgagcagggcttgcaacgccgcctgcacgccatccgccagggcaacaccctgcacctggaatggcatggcgagttgcacgcggtcagccgcttcgaccccatcgccgaggccgaggccagtcaccagcatcatggcggcctgaccgcgccgatgaacggcagcatcgttcgcgtgctggtcgagcccgggcagagcgtcgaggccggcagcgccctggtggtgctggaggcgatgaagatggagcacagtatccgcgcaccccatgccggtacggtcaaggcgctgtactgcggcgaaggcgagatggtcagcgaaggtacggtactggtggaactggagagcgtcgagtga

SEQ ID NO: 331518 - DNA, 801 bp, Pseudomonas aeruginosa
atgcccacctacgaaaacattcagcttgatatcgacccgcgcggtttcgccaacctgtggctgaaccgcgcggaaaagaacaacgccttcaacgccgagatgatccgcgagctgaccctcgccctcgacgcggtggcggcggacggttcgctgcgcttcttgctgctgcgcgggcgcggcaagcatttctccgccggcgccgacctggcctggatgcagcaggccgccggcctcgactacgaggctaacctcggcgacgcccgcgagctggccgagctgatgtacaacctgcacggcctgaagatccccaccctggccgtggtgcagggtgcggccttcggcggcgcggtgggcctggtcggttgctgcgacatggccatcggcagcgaggacgcgctgttctccctgtccgaagtgcgcatcggcctggctccggcggtgatcagccccttcgtggtacaggccatcggcgagcgcgcggcacgccgctacgccctcaccgccgagcgtttcgacggccgccaggcccgtgaactgggcctgctcgccgagtgctacccgaccgccgagttggacgcccaggtcgaagcctggatcgccaacctgctgctgaacagcccgcaggccatacgcgccagcaaggacctactgcgcgaagtcggcagcggcgtgctgaccccggccctgcgccgctacaccgaaagcgccatcgcccgcatccgcgtcagcgccgagggccaggaaggcctgcgcgctttcctcgacaaacgcaaaccgagctggcaggagcaccaagcatga

SEQ ID NO: 331519 - DNA, 1605 bp, Pseudomonas aeruginosa
atgatcctgcacacccagctcaacccccgttcccccgagttcgccggcaaccgcgcggccatgctcgtgcaggtgaacgaactgcacgccctgctcgcccgcctccacgaaggtggcggcgaaaaggcccaggcgcgccacacatcacgtggcaagctgctgccgcgcgaacgcatcaaccgcctgcttgataccggttctccctttctcgagatcggccagctcgccgcccatgaggtatacggcgaagacgtagccgccgccggcgtgatcgccggcatcggccgcgtcgagggcgtcgaatgcatgatcgtggccaacgacgccacggtaaaaggcggcagctactacccactgacagtgaaaaaacacctgcgcgcgcaggccatcgccctggagaaccgcctgccctgcatctacctggtggactccggcggcgccaacctgccgcgccaggacgaggtgtttcccgaccgcgagcacttcggccggatcttcttcaaccaggccaatatgagcgcccagggcatcccgcagatcgctgtggtcatgggctcctgcaccgccggcggcgcctacgtgccggccatgagcgacgagaccatcatggtgcgcaaccaggccaccatcttcctcgccggcccgccgctggtgaaagccgccacgggtgaagtggtcagcgccgaagacctcggcggcgcagacgtacactgcaaggtttccggcgtggccgaccactacgctgacagcgacgaacacgccctggccctggcccggcgcagcgtcgccaacctcaactggcgcaaactgggcgagctgcaatgccgcgcaccgattgcgccgcgctatccagctgacgagctgtacggggtgattccgagcgatgccaagcagccgttcgatgtgcgcgaggtgattgcgcgcatcgtcgacgactcgcagctcgatgagttcaaggcactgttcggcaccaccctggtgtgcggcttcgcccatatccagggctacccggtggcgatcctggccaacaacggcatcctcttcgccgaggccgcgcagaaaggcgcgcacttcatcgaactggcctgccagcgcggcatcccgctgctgttcctgcagaacatcaccggtttcatggtgggcaagaagtacgaggaaggtggcatcgccaagcacggcgccaagctggtcactgccgtggcctgcgcccaagtgccgaagttcaccgtgatcattggcggcagcttcggcgccggcaactacggcatgtgcggtcgcgcctatgacccgcgctttctgtggatgtggcccaacgccaggatcggcgtgatgggcgcgcaacaggccgcaggcgtcttggtgcaggtcaagcgcgagcaggccgaacgggccggccagcactacagcgacgaggaagaggaacgcctcaagcggcccatcgtcgagcagtacgaacgccaggcccacgctttctactccagtgcacggctgtgggacgacggcgtcatcgacccggcgcagacccgcgaggtgctggccctggcgctgtcggccagcctcaacgcccccatcgagccgacccgcttcggcgtgttcagaatgtaa

SEQ ID NO: 331520 - DNA, 1182 bp, Pseudomonas aeruginosa
atgagcaacttgcccggcctgaacttcttcctcggtgaggaaatcgacatgctgcgtgattcggtcgccggcttcgccgccaaggagatcgccccacgtgcggaggaagccgaccgcaccgaccagttccccatggatctgtggcgcaagttcggtgacatgggcctgctcggcctgaccgttcccgagcaatacggcggctcggggatgggctacctggcgcacatggtcgccatggaggaaatctcccgcgcggcgggtggtatcggcctgtcctatggcgcccactccaacctctgcgtcaaccagatcaaccgcaacggcactgccgagcagaaggccaagtacctgcccaagctggtctccggcgagcatatcggcgccctggccatgagcgagccgaatgccggctccgacgtggtgtcgatgaagctgcgcgccgagaaacgcggcgaccgctacgtgctcaacggcaacaagatgtggatcaccaatggccctgactgcgacatcctggtggtctacgccaagaccgacctggccgctggcgccaagggcatgaccgccttcatcctcgaaaccaacacccctggcttctccgtggcgcagaagctcgacaagctgggcatgcgcggctcgcataccggcgaactggtgttccaggatgtcgaggttcccgcagagaacgtgctcggtcaggtcggtgagggtgtcaaggtactgatgagcggcctcgactacgaacgagccgtgctcagcggtggcccgctgggcctgatgcaggcggccatggacgtggtcgtgccctatatccacgaccgcaagcagttcggccagagcatcggcgagttccagctgatccagggcaaggtcgccgacatgtacaccaccctgcaggccagccgcgcctatctctactcggtcggcaagcacctcgacgcccagggcaccgatcatgtccgccaggtccgcaaggactgcgccggggtgatcctgtatgccgcggagaaggctacctggctggctggcgaagcgatccagatccttggtggcaacggctatatcaacgagttcgcggtggggcgcctgtggcgcgacgccaagctctacgagatcggtgccggcaccagcgaaatccgccgcatgctgatcggccgcgagctgttcaacgagaccaagtaa

SEQ ID NO: 331521 - DNA, 423 bp, Pseudomonas aeruginosa
atgttcggaaactaccgcatatcccagctcgcccgcgagctggaagtgaccacgcgcactatccgtttctatgaggaacagggactgctgacacctgctcggcgtggtctggagcgtgtctactcgccgcgcgaccgaaccgtcctgaagctgatcctgcgaggcaaacgcatcggtctctcactgtccgagtgcaaggaattgatcgatatgtatgccccctccggaggcaaccgcaggcagttgaaccacctccaggagaagatcgccggacgccgccagcaactcgagcggcaactgctcgacatccagcagatgctgcgagaactggacaaggccgagcaacactgccggaacacacttgtggcggtccgggatgacacccccaacatcgataatgacaacaggagattggaaccatga

SEQ ID NO: 331522 - DNA, 3558 bp, Pseudomonas aeruginosa
atgagtagcaccacgccctcgctggaagacaagtacgtccaacagaccgggaaagccctgatgaccggtgtccaggcgctggtgcgcctgcccctgatgcagcgccagcgcgacctcgccaacggtttcaatactgccggcttcatttccggctaccgcggctcaccgctgggcggtttcgaccaggcactgtggaaggctcgcgatcacctcaagcagcatcacacactgttccagcccggcgtgaacgaagacctcgccgccacctcgctgtggggtacccagcaggtcaacctgttccagggcgccaaatacgacggcgtgttcggcatgtggtacggcaagggtcccggcgtggaccgctgcggtgacgtgtttcgccatgccaacgctgccggcacctcgaagttcggcggtgtgctggccatcgccggtgacgatcacggcgcccgctcctcctcgctgccacaccagaccgaacacatcttcaaggcggtgatgatgccggtactggcgccgtccggggtgcaggagtacctcgactacggcctgcacggctgggccatgtcgcgctattccggttgctgggtggcgctcaaggcggtagccgacaccgtggaaagcgcggccatcgtcgatcttgacatcaatcgcgtgcagccgatcattcccgacttcgagctgccggagggcggcctcaacatccgctggcccgacccaccgctggcccaggaacagcgcctgctggaacacaaactgtatgcggcgctggcctatgcacgggccaaccgcctcgaccgcatcgtgctcgactcacccaaggcgcgcatcggcatcatcacctccggcaagtcctacctggacgtctgccaggcgctggacatcctcggtatcgacgacgagctggcacagcagatcggcctgcgcctgtacaaagtcggcatggtctggccgctggaggccgagggcgtgcgccagttcgccgaggggctggaggagatcgtggtggtcgaggaaaaacgccacatgatcgagtaccagctcaaggaagagctgtacaactggcgagaagacgtgcgcccgcgcatcgtcggcaagttcgacgacaagggcgaatggagcctgccgcacaccgactggctgctgccggcgatcaacgacctgaccccggcgcagatcgcccgagccatggccaggcgcatcctgcgcctgcatccacatggcccgttgcagatgcgcctggcggtgcttgaggcgcagctcgactgcaagcagcagttcggcaacctgatggagcgcgtgccgcactactgctccggctgcccgcacaatacctccaccaaggtgccggaaggcagtcgcgccctggctggcatcggttgccactacatggccgcctggatctacccgcagacccagaccttcagccaaatgggtggcgaaggcgtagcctggatcggccaggcaccattcacggaaacccgccacgtgttcgccaacctcggcgacggcacctacttccactccgggttgctggccatccgcgcctccgtggcggccaaggtgtcgatcacctacaagattctctacaacgacgcagtggctatgaccggcggccagccggtggacggcacgctgaccgtgccgcagatttcccgccagctcgccgctgaaggcgtgcaacggatcgtggtggtcagcgatgacccggacaagtaccgggatgtgaacgacctggctcccggcgtgccggtctatcgccgcgacaggatggacgaagtgcaagacgagctgcgccagttcgcaggagtctccgcgctgatctacgaccagacctgcgccgccgagaagcgtcgccggcgcaagcgcggcaagttccccgacccggcgcgccgggtggtgatcaacgaggcggtgtgcgagggctgcggcgattgcagcagcaagtccaactgcatgtcggtggtcgcggtggaaaccgaatacggccgcaagcgcgagatcgaccagtcctcctgcaataaggactttacctgcctctccggtttctgcccgagcttcgtcaccgtcgaaggcggcaagctgcgcaagcccaaggccctggcgcaaaacgccgaggacatctggaatctgcctgagccggtggcgccgagcctggaggaaccctatagcatcctggtcaccggcgttggcggcaccggcgtggtcaccatcggcgccctgctcggcatggccgccttcctcgaaggcaaaggggcgctgaacctggacatggccggcatggcgcagaaaggcggcgcggtgtggtcgcatatccgcatcgccgcccgccaggagcaactgttcgccccacgcatcgccgaaggcgaagccagcctgctactgggctgcgacctagtagtcagcgccaacagcgagaccctggccaagctgcgccagggcgtgacccacgttctggtcaacagcgaagaaagcatcaccagcgccttcgtccgcaccttcgcccggcaggcggaaagtggcgatctgcaggccaacccggatccgcagttccgtacccagggcatggccgcgcagatcggcgagacggttggcgagggtcaggcgaccttcatcgacgccagcaagatcgccactgcgctgatgggcgactccatcgccaccaacaccttcatgcttggttacgcctaccagaaaggctggctgccggtgggtgaagcctcgctgctgcaagccatcgagctgaacggcacagcggtcgaattcaaccgtgccgccttcgcctggggccgccgtgccgccgtcgacctgccacgggtgcaaggcaagctcgccgcgggcaaggtcgagagccgcgaccggcagctctcgcagaacctggacgaaatcgtcgcccgtcgcagcgagttcctcaccgactaccaggacgcggcctatgccgaacgctaccgcaagcgcgtcgagcgcttctgcgtcgcggaaagcgccctgaccggccagcccggcgcgctcaccgaggcggtagcgcgccattacttcaaggtcctggcgatcaaggacgaatacgaagtggcccgtctgttcagcaacggcgaattcctcgggaagatcgaggcgaccttcgagggtgactatcgcctgaacttccacctcgccccgccgctgctgaacaaggccgcatcaggcgcggaagcgaccaagcgcagtttcggcccgtggatgctcaagggcttcaagctcctggccaaagtgaggcgcatacgcaatacctggctcgaccccttcgcccatacccacgagcgcaaggtggagcgcgagtggttgctcggctacgaacagctcctcgacgaactgctggcgtcgctcagccaggacaagctcgaacttgccgtgaagctggccgagctgccggatgcggtgcgcggctacggcgcggtcaaggagcgctacctggcccacgcccacgagcagagggcacgcctgctggatcaatggcgcaatggccagcctttccaggatgccagccaggcggtacgcattcatgcgacccagctttga

SEQ ID NO: 331523 - DNA, 1665 bp, Pseudomonas aeruginosa
atgtcgagtgccaacctgatcggtagccatctggcgattggcgtggtggcggttctgtcctgtggcggcctgctccaggcgaaggagttcgagaccgccaacccggatctgagcctgcgctgggacaacacagtgcgttacaacctcgggttccgcgccgagggccgcgagaacgcattggccaacaacgccacctacgacgagtccgacaacaagttcgaccgcggcgacgtggtaaccaaccgcctcgacctgatgagcgagttcgaactggcctacaagcagtaccacggctttcgcgtgagcggctccgcctggtacgaccaggcctacgccgataccgacgtggagacggcctccggcaacgtctactaccccggcgcgggcgtcggtgcgagcacgcccagctacgccggcggccactattcgggtttcaccaagcgctaccaccgcggcttcagcggcgaactgctggacgcttttgccttcacccgcttcaacctcggagacgtgccggtcagcgtccgcgccggacggcacacggtgtactggggcagcggcctgctgatcgccggtcacgcggtgtcctactcccaggctcccctggacgggcgcaaagcggtgagcaaccccggcaccgagacccgcgagatattcctgccgctgggccagctctccgcccaggcccaggtgaccgatcagctgtccgtggccgcccagtatttcttagagtgggacaccactcgcgcaccggaaggcggcacctacctggcctcggccgacgtcgccctggaaggcccgaacaggatgcccgtggcgcccggcttcgccctgccgctgcgggatgccaagaccccgcgcaaccgtggcaactggggcgtgatgggcacctatgccatggatttcctgcattcggacatcagcctgttctatcgcgagttcgacgactacaacccctggggcctgcaggtgggcagcgattttgcgcgctacgtgtatgccgagaacgtcaaactctatggcctgagctggtcggcaggaccggtactgggcggtggctcggtaggtgtggacctgtcctaccggcgcaatacctcgctggtgtcgagcaacatcgacacgcgggacaaccagggcgcacgaggcgatacctggcatctggtggtcaatggcctgtggctgctgccgcgtacggcctacttcgacaccggcaacgtgatcgccgaaatggcctacagccgcgtgcagcgggtaaccgaacacaaggaactgttcaaggccgaaggctacgccggttgcccggcgggccaggacaaggcctggggctgcgccacgcgcgactacctgggcgtcgccttcagcttcgcgccgcagtggcttggcgtcttccccggctggaacatttccgcgccgatgagcttcgactatggcgtatcgggtaatgccgccaccggcggcggcagcgagggcaagtacagctacaaggtcggcatcaagggcacgctggacgagcgccacgacgtgaccctggcctacatcggctatggcagcccgcgcaagtacgccgacattcccggcgtgggcaagaccgtggtcggcggggccggcgacatcggcctgtccgaccgcaactgggtctcgctgaccctgagcaccgcgttctga

SEQ ID NO: 331524 - DNA, 1353 bp, Pseudomonas aeruginosa
atgcaaccgactattcccgcggcgggcctgctcgccctggccctggccatcccggcgctggccgacgagcagtattcacccgctgacctgggcggcacgctgacgcgcttcggtgccatcgccgccggcaacgcggagggcaccattcctccctacgacggcgggctgaaggtgccggccgggctggtacccggcgacggcttctggcccgaccccttcgcggacgagaagccgcgcctgcgcatcaccgcagccaatgccggccagtacgccgaccagttgtctgcggggcagatgcgcctgctcaagcagaatcccgacagctacttcatggatatctacccgacccaccgcaccgcggccttccccgaggcgtttctcgccgcgacccagcgcaacgccagcgatcccgagtgcaagccgttcaacgatggcctctccatcgccgaagcctgccgtggcggtctgccgttcccgttgccgcgcgatggccagcaggtgatgtggaactacatcctcaactatcagggcgtcaacggctgggactggaaccacagcgcctatgtagtcaaccagggccgcccgaccctgaccaataccaatcgctccacgggcgagaaaccgttctaccagctcgatgtgcctgggcgcgatgcgaagatcgcccagcgcatctggtcgcgcatcgtcgcgccggcgcgcaccgccgggcaggcgtccggctattgggactacctcgacccggtggcgaacgcgcgttatgcctggagctactccaccggccagcgccgcgtgcgcaaggcgccggagtttgcctacgacacacccaattcggcgttcggcggggtggccttctatgacgagatcttcctcttttccggaaagatggaccgcttcgactggaagctgctgggccgccaggaaatgttcattccctacagcagctacaagctgaaatggggctgcgatatggacaccaagctgatggccaggcacatcaacccggcttgcgagcgctgggagctgcaccgcgtctgggtggtcgaggccacgcgcaaggaaggcatgcgccacgcgcagaagacgcgccgctactacatcgacgaggacaccttcggcgccgcgctgtacgacgcctgggatgacagcggggaaatgttccgggccggcgcgcagtacaacatccaggcctacggcacgccgaacaacccgcagcaggatgcctactcgctgtacgacttcacccgtgaccagtacggcatgttcggcaacggtccgagccgctatcgcgcagccccggtcgccgagcgcgagaccaatccacagaccatcgccggcgggcagacccgctga

SEQ ID NO: 331525 - DNA, 798 bp, Pseudomonas aeruginosa
atgcagcgtctcgaagcaaaggtcgccgtactcaccggcgccggtagcggtatcggccgggcctcggccctgatgttcgccgcgcagggtgcccgggtggtggtgaccgacctgcaggaagaggcggccctggcggtcgctcaggagatcgccgaggccggcggcagcgctatcgcgctgcgggtcgacgtcggcgtggaagatgacttgcggcgcatggtcgctgacacgctgcaggcgttcgggcagatcgacgttctgttcaacaacgccgtcaacaagaacccggcaaccgtgcgcgacgtggatttcctcgcgttcaacgaggagctgttccaccgcaacatgcgggtcaacgtgctcggcggcgtgctggcctgcaagcacgccctgccgcacatgctggagcggggacagggctcgatcatcttcacctcgtcgaccagctcgatcgccggcgaggtcgcgcagttcagctacggcgcctcgaaggcggccttgaactggtatgtgcagagcattgccgcgaccttcggcaaacgcggggtgcgctgcaacgccatcctgccgggggtgatccgtaccccggcgatggagagctgggccaacgcggcgatgcagacggccttcctggacatccacaacgttccgcgtctcggcgaaccggaggacatcgccggcatggcgctgtacctggcttcggacgaatcgcgctatgtcaacggcgcgctgctgcgcgtcgatggcggcatgagctgcaccacgccaatggtgccgatcgtgcgcacttacctctga

SEQ ID NO: 331526 - DNA, 447 bp, Pseudomonas aeruginosa
atgggactgttacaggaaaacttcatccgtgaattctgcgccgcctggggcgacggcagcgccgagtcgcggccgcaggtcgacaaactcgtgtcgatgctggccgaagacgccgtctggcaactctgggtgccgggtggcccggtgattcgcgggcgtgccgcgctgcgccgggagatcgagcggcagatgcgctacaccagccacaacttctgcaccatcaggcacatggtttcctccgacaccctggtgatgaccgagcgcgacgactacgcgctgtccagcggcaagccgatgccgcactcgatggtggcggtctacgaactcgacgagcagggcctgatcaaggcctggcgcgagtacctggatactgccgacctggcgaagaaaaaaggcgtggcgctcgatcaggtcggcggccccggcctggacgaagcgaagcactga

SEQ ID NO: 331527 - DNA, 1377 bp, Pseudomonas aeruginosa
atgcaatcgctagacacgcaagaaagcgccggagcgctcatcgaacagaagctgcgaaccttcgttgaacggctgagtggcggccaggtgacagccatgcagcgcctgccgcgctggcggccagcctggaacctggacgtgcgccgtggggaggaagtcctccgcctgcacatccgcggcgagcgcggcggcgacgtcagcccgttcccggaactgcgccgcgaggcggacatcctcagcctgcttggcgagcagggtatcccggtgccgcatatccatggcttctgcgaggatccgccggctatcgtcatggagctggtgcccggtacccgcgacgttggtaccgccgccagcgatgaggagcgccgcgcactggcccgtcagtatgtgcgcgccatggccgccatgcaccgactgccgctggagcccttcgtggccaggggcataagcctgccgcagggcgcggacgaaatcaccctggccggattggacgcctattaccccttgtacctgcgcaacaagagccggccccagccgctggtcgagttcgccctcggctggctgcgccgcaacgtgccccggcatcgtacccgggcggcgttcgtgcagtacgactcgggccagtacctgttcgagaacggtcgggtcaatgccctctacgatttcgaattcgccatgatcggcgacccgctggcggacctggcctcggcgcgcatgcgcgacaactacgagccgctgggcgagaccttcagtgaactgtaccgctattaccaggaggtcagcggcgaggcggccgatgcggatgtggtgcgctaccacacggtgctgttttccaccgtcagcaccatgcagttttccgctaccgttgccacgccgcagcccggcgacccgcacgacacctacatcgagttcgacctggccctgcgtcgtgtcgtcgtgcacgccctggccgaggcgatgggcattgccatagaggcgccgtcactgacactcgtcgaggcgggcgccaatgcccagttgctgacgatgctcgtcgacgcggtcgggcagatcgaggtgggcgacgacttccaggcctcccggcgtaccgccgcgctcaagctggtcgagtacctgggtcgcgctgatgccatggaggtggaactgcggcgcctggaacgggaggacgccgaggcgctgctgggacggcgcttcgaggatcccgggcagatcgacctcgccctcgaggcattcgtgcgcgaagccggggccgagtacgacgagcgcctgctgcgcctgttcatggctcaggtcgaacggcgcgtgcaggtgtttggcggcacggccatcggtgcttcggccagccatatcgacctgcctgccatcgaggcacgctga

SEQ ID NO: 331528 - DNA, 843 bp, Pseudomonas aeruginosa
atgtcgcacgcacaagcacgggccggcgatacgctggcgttcaaacggcaatacgggccctgggccttgatcgccggggcatcgcacggggtaggcgcggcattcgcccggcaattggcggcactcggtctgaactgcgtgctggttgcgcggcgccaggaggccctggaaacgctgcgcagggaactgatagcggagcatggcgtcgaggtgctggtggtcaaccaggacctgtctcgggcggatgccgcggaccgcctgtgcgccgccgtggcgcagcgcgagatcggtctgctggtctacaacgccggcggcgacccgttcatcacgcgcttcctagccaccacgctggacaactgggactcgctgctgcacctcaacgcatctacgccaatggcgtgctgccacgtctttggcgggcggatgctgtcccgtggccgtggcggggtgatcctggtcggctcgcaggcggccctgggcggtatccgcaagctggccatgtacagcgccagcaaggcgttcgcgctgaacctcggcgagtcgctgtgggccgagtggcgggagcatggcgtggatgtcctgaacctgctgatcggcaccgtggataccccgaccatgcgcgaggcgatgctccggctgaatattcccgacgcctcgaacatgccgctgcctcaggccgaagacatcgttgccctggccctgcgtgagctgcccaacgggccgaccctgattcatcccgacgacctggagggcgccgagccgcggtcccgaccgggtagtgcgcggcgtacgcacaccctcgacaaaagcgccgaggcggcgctcttcatcggcgcggactga

SEQ ID NO: 331529 - DNA, 1251 bp, Pseudomonas aeruginosa
atgaggcatttcgacaatcgggagttcaagcgtggctggcatgtgctggtgctggccatcgtcggcgtggccaccagttccagttcgctgctgctgtacagcttcagttccatggtcattcccctggagcgggccatgggctgggcgcgcagtgacctgcaggcggcgatcaccgcgctgtcgctgggtaccatcgtcgccgcgcaactggccggctggctcaacctgcgttatggcctgcgtgccgtcaccctggtatcgctggtggtgttgagcctgagcctgttcgtgctgtcgcaggtcggcggctcgatctggatgctctacctgggtttctttctggtaccgctggctggcgtcggcacgttgcagatcacctggtcgcatctggtcaacctttggttcgaggaaaaccgtggcttcgccctggcgatcatcctcagtggctcggggctggcggcgatcatgctgccgctgatcaccaattgggccatcgaccgctggagctggcaggctgctttcgtggcgcttggcgtgttgccggtactgctggccctgccattggcgttgcgctggctggtgccgcagagcacgagcggtgacactggcgagcggcaggcgcgggccgaagcggcgccccaaccgggcatcctcctgcgtgacgcattgcgctcctggcgcttctggatctgcaacctgtccatgaccctggtggtcgcctgcgtggtcggcatggtcaccaatatcgtgccgctgctgcaggatcgcggcctgagtgccgcccaggcgagtcaggtgttcagcagtttcggcatttcgctgattctcggccgcctggtggtgggttacctgatcgaccgcctgtgggctcccggcgtggcggcggtggcgttgctgctcccggcgttcgcctgcctgattttcgcctacgcccaggccagcccgttgctgttcgtcatcgccaccctgctggtaggggtaggggccggtgccgaattcgatatcgccgcctttctcatagcccgctatttcggcatgcgcgattacggacggctgttcggcgtacacctggggctgatcaccgccggcgccgccgcttctcctctgttgttcggcgtcttgctcagggagaccggaaactactcggccatgctcggtttctgctttgtctgcttcctggtcggccccctgctgctgctgaccctgggcggttatccacagttcaggcgcgaggcattgtcagtgcaatga

SEQ ID NO: 331530 - DNA, 924 bp, Pseudomonas aeruginosa
atgcgtgccgcgatcatttccgagcgtaacgccccgccagtggtgggagatttccgtgagcccgagccgcaggagggtgcggtactgatcgatgtcgagaccgccggcctcggtggctgggatgtgctcggcgcctatcgcctgggcgtggagtatccctgcgtgatccgcggcgagggcgtgggccgcgcgcccgacggccggcgtgtgtacttcggtgagcgttcggtgaccccgttcggtgcctgggccgagcgcaccctggtgcctgccgccgaggtgtgggccgtgccggatgaggtggatgacaaaaccgccatcagcatgggtattgccgccaccggagccatcgtgccgctggagaaggccgcgatccagaaaggcgaaaaggtgctgatcctcggtgctaccggcaccctcggtcagatcgccctgcaactggcgcgcggcatgggcgccggcaaggtggtgggggcggcgcgttcggccgaggcgctggctggcctgaagtcacgcggcattgccgacgcggtggtgaccctggggggcgccgatgatgtggccgccctgaaggatgccgccgatggtggcttcgacgtcgtgcttgacctggtctgcgggcagccgatgctcagcgcgttgaaggccaccaactggggcgcgcggatcatgaccatcggcaccggcgcagggcgccaggtcaacctggacatcgccgacctgctgttccgttcgctgtcgtgcatcggtaccggccagcggccgccggccgagcgcgagcagatctggcggcggctgctgacgatcgccagggagcaggagatccaggtcgactacctcgactacagcctggagcaggcggcagaagcctgggccgcccagttgtccggcccgcacgcgaagattaccgcgcgtatccgctga

SEQ ID NO: 331531 - DNA, 624 bp, Pseudomonas aeruginosa
atgaaccaggcaatccctgtcccgttgcaacacccgcatgctgccgaccttggcggaaaccgccatgcgctcaggtcccagcgcacccgcgagctgctgctcgacaccatgtaccggctggccctggagaaggattttcgcgatatcaccgtgcaggagttgctggatcgcgccggtgtcgcgcgctcgaccttctatgcgcattttcgtgacaaggaagaccttctggtcgccggctacgaaagtatcggcaccccgcagacccgggtctacgaagtcttcggccaccgacgcgtcatcctcgacgtatcgtcctggctattcaacgcaaccgagcggcatgccgcgctgaccaccgcgtttctcaacagcccttcgcaaggggttatcctcgcccacctggaaaacatcctgctcatccaggtacgcgagcactaccgcaaacaggacctctatgacgccgatgaactgcgtggggaagtggccgtgcgctgcttcgtcggcgcgctgctcggcctgtatctctggtgggtgcggcatgactatccccactcggccatggcgatgaccgaagcgttcgatagcctgatgaacaacggcaactggcccccagacccggcgtga

SEQ ID NO: 331532 - DNA, 1248 bp, Pseudomonas aeruginosa
atgaatgccaatgacaccgccttcgcggcaccgccgcacgttcccacgcacctgatccgccagttcgacctgtgggccgaactcaccgcccagggcgagaacgcctacgcctgggccgccgaactgcaccgcagcaccccgccgatcttctggataccgcgcctgggtttcctgcccggcacctggataccgcgccgtgcggaagacctgcggcgcatcctgcaggatccggaaaccttcagcagcgcgggcctgaccccctatcccatattgctcggcgagagttggcggctgacgccgctggaggtcgacccgccggagcatggcaagtaccgcgcgctgctcaatccgctgttcaccccgaagaaggtcgaggccctggagcaggatatccgccaactggccagccagttggtcgagatgatcgcgccacggggccgctgcgacttcaacctggatttcgcccggcccttcccgaccctgatcttcctgcgcctgatgggctggccgctggaggagcatgtgcgtttccagcactggacgcagaccctgatcaagagtttcgagccgcaggtggtcatgcagaacgcccgcgagatcaccgactggattcgcgcgcagatcgccgagcgtcggaccaaccccaccgacgatttcgtcagctacctgctggccagtcgcgtcgacgagcgcccgctgaccgacgacgaggtgctgggtttctgctttctgattttcattggtggactggacaccgtcacctccaccatcggcctgttcttccgccacctggcgcgcaacccggagcagcagtcgcaactgcgcgccaaccccgagctgatccccgatgcggtggaagaaatgttgcgtgcctattccatcgtcaacatgcgccgcaccgtgacccgcgacgtacagatcggcgaggcgaccatgaagaagggcgacatcgtgctgatcagcactgaactggccaacctcgacccggaagtcttcgacgacccggccacggtcgatttcctgcgcagtgccggtaacgcgccgcacatggccttttcctacggggtgcaccgttgtgtcggttcgcacctggcgcgccgcgagctgcgcatcgccctggagttgtggctgaagaagttgccgccgtttcgcattgccgatggcagtcagccgcgcttcaacgcctacggcgtattcggcatggaagagctgcacctgcaatgggaccttcccggcagcggcaactga

SEQ ID NO: 331533 - DNA, 210 bp, Pseudomonas aeruginosa
atgaagatcatcgtgagacgccgggcctgtgccgggcatgcgcgctgcaaccatgtcgcgccggaactcttcccgctcgacgacaacggctatgtcgccaccgacggcttcacggtcgaacctggccaggaggagcgcgcccgccgcgcagcacgagcctgccccgaacggatcgtcgaggtcatcgaagagctgccggctggcccgtga

SEQ ID NO: 331534 - DNA, 1671 bp, Pseudomonas aeruginosa
atgaagcaaggttacgactacatcatcgtcggtgcgggctcggctggctgcgtaatggccaaccgcctgtccgccgacccgggcgtcgcagtgctgctgatcgagagcgggccggagcatgacagcccgctgatcaccatgccgcgcggcatcggcaagctgctcagccccggcaacccgcatgtctgggactaccaggctcagcgtggcgagggcatgcccagcgaacagtggctcaagggcaggaccctcggcggctccagctcgatcaatggcatggtctatgtgcgcggtgcgcccgccgactacgacgcctgggaggcccagggttgcactggctggggctggcaggacatgggccggcagttcgtcgccctggaggaccaccagctcggtggttcgcaatggcgcggtgccggcgggccgctgaaggtcagcgtgcacccgtccggcgacgccctgtgcgatgcggtcatccaggccgccgcaggcatgggggtggccagcgtggccgacaccaaccatgtcgatgcggtacgggaggggggcttcggctaccagccgcagactacctggaacggccagcgtttcagcgcggccagggcgtttctcgacccagtgcgcgaacggcccaacctgacggtgatgaccgctaccgacgtgcagcgcatcgagttccaggagcgccgcgcggtggcggtgcaggtacgtggcgcgggcggtgtgcagcgcttcgcggttcgccgcgaggtgctgttgtgcgcgggggccatcgagtcacccaagctgctccagctgtcgggcgtcgggccgggcgaattgctgcgctcgctgggcattgccccggtgcacgaggcccccgaggttggccgcaacctgcgtgagcatgtgtacgtggcggtgcagtaccgggtcactcgcggcagcttcaaccattgcttcaggggattcggcctgttgcgttcgttgctgcgctacttcctgttcagcaaagggccgatgacccatgccgcgcacgaggccggtggcttcgtgaagacccgcgccgggctggagcgccctgacgcgcagatcggggtgagcctgtactccatggatggcgacggcaagacggtaatgatcgacaagcagccgggcgtgaccctgggcggctacttcatgcacccacagagccgtggcgaggtgcgcatccagtccagcgaccctgcgcagccgccgctgatcgtcgccaactacctcagcgccgaggaggaccaggtcgcgggtatcgccttgctgcgctggatccgccgcctggcggcgcagccggcgctcaagccatacatcgtcgaggaactgacgcccggcctgcaggtgcagagcgatgcggacatcctcgcggccctgcgccgcttcggccagaccgccttccacgtggcgggcacctgtcgcatgggctgcgacccggatgcggtactggatccgcaactgcgcgtgcgtggcatcgaaggcgtgcgggtgatcgatacctcgatcatgcccgagctggtctccggcaacaccaatgccccggccatggctatcgccatgcgcgccgcggaaatcatcaccgggcactgtgccaggaacagtgccaacaacaccgccaacaacaacaccgccaacaacactgagggaggcgaggccgcatga

SEQ ID NO: 331535 - DNA, 1491 bp, Pseudomonas aeruginosa
atgagcattccattcacccatctggacaagctgtacatagacggcgcctggcaggctgccggcaatcacgaggcgatcctcaatccggccagcgaggccgtgatcggccaggctccggtcggcgacctggccagcgccgaggcggccatctgtgccgcccgagcggcgttcgatcatggcccctggccgttgctgggcatggctgagcgcgcggcgtgcatgcgccgcctgcacgccgccctggtggcacgccgcgagcgcatcgtcgcgttgatcgtggcggaggtcggctgttcgcaaggcgtcacgcaggccatgcaggtggatatgccgctggcccatgtactgaccgccatcgagcagtcgctgagcagcctggaagcacggcccatctccgtttccatgcagcccgatccgatgaatccgcaaggcccccacctgctcggcagtggcagcatcgagcgcgagccggtcggcgtggtggccggcatcaccggctataacttcccgttcctgctcaatctggccaaggtgttcccggcgctgctggcgggcaacaccctggtgctcaagccgtcgccgttcaccccctattcggcgctgctgttcggcgaggtcgccgaggaagccggcctgcccaggggcgtgctgaatatcgtcaccgggggcgccgaggtaggcaccctgctgagcagcgatccacgggtggacatggtctcgttcaccggctcggaggcggtgggtatcagcatcatgtcccaggcagcggcgaccctgaagcgcgtgcatctggagcttggaggcaagtcgccacttatcgtgcgcgccgatgccgatgtccaggccgccgctttcgcggcagtggccgggctgacggtgaatgccgggcagggctgtgcgctgctgacccgcttcctggtgcacaactcgctgcgcgcagcgttcgtgcagtgtgccaaggccattgccagccagtggaagatcggcgacccggccgaccccagcgtactgatgggcccgctgatccgcgagtcgcagcgcgccagggtcgagcatttcatcgccagcgggcgtgacgccggggctaccctagtctgcggtggcggtcgtccagcgggcctggatcagggcttcttcagcgagatcacgctgttcgacgacgtacgcaacgacatggccatcgcccaggaggaaatcttcggcccggtgggtgtgaccatcggcttcgatacggacgacgaagccatcgccatcgccaacgattcccgctatggcctgaacggcgggatcctcagcgccgatgccgccaccgcctaccggatggcccggcgcattcgcgccggcagcgtctacctcaatggcggcggtggcggcctgccctatgcgccgatcggcggctacaagcgctcggggattggccgcgagttcggccccgactggttgaaggagttcagccaggagaaatccatcatctatccgatcggccgctga

SEQ ID NO: 331536 - DNA, 1659 bp, Pseudomonas aeruginosa
atgaacgatgcaatcaagcaacgttggccgaggatcgtgcccgggacgctggtgctggtgctgatgagcagtagcggggcggtctgcgccgcctccatcgacctgcccaatcccgactatcgcctgcgctgggacaacaccgtccgctacaccctgggcatgcgtgccgagggccaggaccagcgcatcatgcgcaaccccagctacgacgagtccgacggcaagttcgaccggggcgatatcgtcaccaaccgcgtcgacctgctcagtgaaatcgacttctcctaccgcaaggattggggcgcccggctcagtgccgccgcctggtacgaccatgcctaccgcgacgacggggtaaaaagccgggtacccggcatggacaccagctatgacaacaaccgctacagcgccgaggtgaagcgttacgtccacgggccgtcgggcgagatcctcgatgctttcgtgtggggcaactttcgcctcggcaacgcgctgaccaacgtgaagctgggccggcataccaactactggggcgagggcctgctgttcggtgctcatgccatctcctactcccaggcaccgatcgatggcgtcaaggcggtgaccagccccggcatcgagaccaaggaagtgttcctgccgatcggccagttgtccgccagggcgcaggtcaccgacagtctgacgctcgccgggcagtacttctatgagtgggactactcgcgcatgccctatggcgggacctacttcggcgtcgccgatcctttcttcgagggaccggaccgcctgcccgtcatgccgggcttcgatctccagcgttcctcatcgcgctatggccgcgacaacgcaaactgggggctgatggccaagctgaacgtcgagcagatcgagtcgagcttcggcctctactaccgtcagtttgatgactaccagccctggttcgccccgcagacgcggcccttcaccgttggcgactaccgcctggtctacccgcgtgacgtgaaactcatgggtctgagtttctcgcgggtattcggctcggtggccgtgggcagcgaactgtcgtaccgcaagaacggtgcgctgaacgctgccggcgtctctgaactggacgacgaaggcccgcgtggcgacagcatccatttcgtgaccaatgccgtctacggcatcccgcgcaacttcctggcccccagcgccacgctggtcggcgagttcgcctatagccacctgcgcagggtcaccgggcacgaggagctgtatctgggcaagggcagggcggcctgcgtcgacccgcgggtgggcgcgccgggttccggtggcgtagcggatggctgctcgaccagggattactacgcggtggcggtcaacctcacgccgcagtacctgtccgtcatgccgtcctgggacatgagcgtgccgatgaccgtcaactacggcatcaagggcaacgccgcgacggcgggcggcggcaacgagggcgcgttgtcctggtccgttggcgtcaccatgacctatgcccagcgcttcgagttcggcctgcgttatgccgacaccgccgcccagtcgaagaccctgcccgatggcagtgtcgccggcaacggcagtgtgggtggcaccgacaggggctggctggcccttaccttcaagacctccatctaa

SEQ ID NO: 331537 - DNA, 1368 bp, Pseudomonas aeruginosa
atgcaacgacaaatcgccttgctgaccctcttgatagggttcgccaacggcagcctggccgcggtcccggctgaacaagctcaggagcttggcaagagcctgaccttgttcggtgctattcaagccggcaacgccgagggcagcattccaccctacgagggcggcctgcgtgagataccggcgggcttcaagccggacagcggcttctgggtcgaccccttcaaggatgagaaaccgctgtttcgcatcactgcggcgaatgccgggcagtacgcggacaagctgagtgaagggcagaaggaactgctcaagaagaaccccgagacctggtacatggacgtctacccgagccatcgcacggcggcctacccgcaggaggtgctcgatgccacggtgcgcaacgccaccgcctgccagaccctgaaggacggcctggcggtcgatccggcctgtcgcggtggcctgccgtttccgattccgcaaaacggcaacgaggtgatctggaaccagcagttgcgctacaagaccgggccgggcttcacttccacccgatcttccaacagctgggtcatcgatgcccggggccaggtgatcaagacggcggagtcggctaccttcgaggaaacctccttctaccaggtcaggcaggccgatcgcgatccgaacctgtactatcgcgcctgggcgctggacagctacccggcgcgcagtgccgggcaactgatcatcatggccgactacctcgacccgaccgtcaagcctcgccgggcctggagttatacgccaggcatgcgccggatcaaattggcgccggagttcgcctatgacaccccggtgccgaaccagggcggggtgaacctgttcgacgagttgcagatgttcgccggcagccaggaccgcttcgactacaagctggtgggccgtcaggaaatgttcatcccctacaacgcctacaagttctacttcgattgcaggcaggacgagcaattcctgccacgccatgccaacccgcagtgcgagcgctgggagctgcaccgcgtctgggtggtcgaggccacgctcaagcccggtaagcgccatgtgtacaacacgcggcgctactacctcgacgaagacaccttcggcgtcggcctgtacgacgcctgggaccagagcggggtactctatcgctcgatgttccagagtggcgtgcagttgtacgacaaggacattccctacaacgtcaagaacgtcagctacaacttcaacagcggcatgtggtcgttgctcaacgatgccctcaagggcggataccgagtcgtggacaccccccattcggagagcgacatgaacgcggaggcgatcgtttcccaggaaacccagcgctga

SEQ ID NO: 331538 - DNA, 735 bp, Pseudomonas aeruginosa
atgcgtgacctggttttgttgcatggtgggcagcatggttcctggtgctgggaaccgctgatcgaggttcttgccgagacgacgcccgccttcgagcgggtcatcaccctggatatgccgggttgcggtcgcaagcgctcgcgggatccgtcccgcctcgctctggctgacatcgctcgcgagctgaacgatgaactgcacgaccagggcgtgtcgcaggcggtgttgctcggtcactcgattgccggcgtcgtcctgccactgatggccgcgcaggcgccgtccctgttctcgcgtctgctctacctgagtaccgcgatccctctggaagggcagacgatcatgcagatgctgggcacgtcgcgacacggcgccgacccggagcacgttggctggccggtggatatcaccagcacctcgcccgaggcgctcgccgtggcgatgttcgggcgcgacctggatgagcgtcaactggcctggctcctgaaggaggccagccaggagcgaacgccgccagccacgcagttcgagccggcctcgcgcgcaggctatgccgaactggacatcccggcgaccttcatcctcaccctgcgtgacgacattctgccggtgccgtggcagcggcttttcgccgagcgcctgggctgcgccgagatcatcgagatcgatacgccacacgagccattcgtgtcccatccgcacatattggccgaggtactacggcacatccgttga

SEQ ID NO: 331539 - DNA, 906 bp, Pseudomonas aeruginosa
atgaacgcgatcagctatatggaacacgaatccgaccaggccggcgatttctggaccgaagcctcgttacgccagcagggtttcgacattcgtctcgagcatgcccgctggtcatcctcaggcacggcgctgatcaagctccagaagaactgcctgatacgcatgctgctgacgccatccggcctcgcctgcaacgccagtacgcataatttcggtagcttcggccaggtcgctgttcagcgtttcaagccacttggccagcttctgttcattcccaatggtaccgaattccatctcaagcatggcgcctatcggcagaagtcgctgatctgcatgttcgacccgggagacctgggcgcactggcggccttcgactgggactgggacagcggcgcctgcgaagaaatgctcaacctgcagagtctctacctgcaagccaccctgcaacgcctcgcggaagaagtcgccgcccccggtttcgccagcgaattgcacatcgaatgcctgctgaccagcatcgccctggagctgcaccgggagttccttggcaacccatgcgacgacgatgacggcaacaagctcagcccacgccaactcaagctgctgagggagctgtgggatgcgggcccgaccgaggacacctccctgcatcgcctggccacggcctgtggcctgccggtcaggacgctatcggcacgctttcgcaataccacgggtaaaacgttgcgccggtatgccgcggaggttcgcatcaagaaatccatggccttgctcacctcccctgatctgctgataaagcaggtcgcatatggtgccggctttcagaatgccgccgcctttaccgcggccttccgcaaggaagtcgggttgacgccggaagagttccgccgccagcgcatacgctga

SEQ ID NO: 331540 - DNA, 912 bp, Pseudomonas aeruginosa
atggcgaagggcaaagacatttccatgcggcagctgcgctacttcgtggcggcggcggatgccggccagttctcccaggccgcgctcaaggtgcacgtgtcacagtcggcgatcaccgcggcggtcctgcaactggaagagaccctgggcgtcagcctgttcgagcgcttgccctacggcgtggcgttgaccgcggaggggcacaagttcgcgcagcatgcccggcatatcctcgataccttgcaggatgccctgagtgaaccgctgttcctcagccatggcatgcagggcgaggtgcgcgtcggggcgtcgtatacggtactcggttatttcctgccggcactgctggcccgtttcaagcgcagctatccccaggtggaaatcgacctggtcgatatgggtcgtgagagcatcgaggcggccgttgccgagggtcggctcgatctggggctgacgatcatttccaatagccctgacctgtcgcgcttcgagcatcatgtactgatacgctcgcggcgccagctctggctggccagccagcatccgttgatggcgcagacctcggtcagcctggaggatgttgccaggcatgcctacatcctggcgacggtcgacgagggcgaggtgtccaccagccgctactgggagtcgcgcgagctgacgccagaggtggcattccgcacgtcctcgatggaagccctgcgggggctggtggcgcacggtttcggcgtcaccattctgtcggatatgctctatcgtgcctggtcgctggagggcaagaagatcgaggcgcgtcccctggcggatgccattccccccatggagcttggcctgatctggcatcccgaggccgatctgccgcaacccgtccaggcgttccggcagttcctgctcatggcctgcgcctcatga

SEQ ID NO: 331541 - DNA, 555 bp, Pseudomonas aeruginosa
atgacccagaccatttacgatatcccgctaaagaccatcgaaggcagctcacagaccctcgccgacttccagggcaaggtgctgctggtggtgaacgtcgcgtccaaatgcggactcaccccacaatacgcgggcctggaaaaactctacgaggagcaccgcgaagccggactggaagtgctgggcttcccggccaacgacttcagggaacaggagccgggcagcgacgaggaaatcaaggcgttctgcagccttaactacgccgtgcagttccccctgttctcgaagatcgcggtgacgggcgctgaccgtcacccgctctaccgcctgctgaccgaggcgcaaccccagacgaccggcgaaggcccgatgcgcgagcggctcaaaggctacggcatcgagcccggtccgcttccggaagtgctgtggaacttcgagaagttcctggtcagccgtgacggccaggtggtcgctcgctttgccccggacgtggcggcagatgatccacgcctgctgcaggccatcgagaccgagctgaacaagccccggccctga

SEQ ID NO: 331542 - DNA, 843 bp, Pseudomonas aeruginosa
atgaacatcgatctcagtggtaaacgcgtgatcgtcaccggtgcatcacgcggtatcggccgggcgattgccttggcattcgcggccgaaggcgcgcgggtagccatctgcgcccgtagcgaagaggccgtggtcacgaccggtcgggaactggaaacaaccgcccaggccgtcatcgcccgtgccgtcgatgtcaccgacaccgagggagtaaaggccttcgtcgccgaagtcgccgcgagctggggaggcgtggacgtactggtcaacaacgcaggccagggcaagggcggaaacctggacaccctgacaccggaagacattctcgaacatgccaacattctgcagatgggccatttccgcttcgtccaggcggtggtgccgcacatgcgcgcgcaatgctggggacgcatcatcgagatcaatgctctggccggcaccatccccacgccggacggcattccctcagtgatcaaccgggcttcctgcatcgccctgtcgcgctcgctgggcatgtccctggcgaaggacaacatcctggtcaacagcctgaacatgggctggatcgacaccggccaatgggaccgccattaccgggaaatgccagcgggcgtgagccgtgaagcgttcgacgaaatggtcttgaaggtggtgcccctcgggcgcttcggcaaaccccaggacgtggccggcatggcgctgttcctcgccagtgagtacgctggtttcatcagtgccgcctccatcgacatcagcggcggcatgggtgggcagatcgcctatttcccgaccctcaagcgggacttcgcgcaagcggctcgccagcataacgagcaatcctga

SEQ ID NO: 331543 - DNA, 1668 bp, Pseudomonas aeruginosa
atgaaagcgatcaagaagcttggccggaaaacagtctcgctcagcgctctggcagtggccatcatgggtgctgccggcggggcgacggcgatgtcgttcgatataggcaacccggatatcaacctgcgttgggataacaccctgaggtacaaccttggggtccgcatggaggggcaggatcgcaagatcatgaacaacccgaactatgacgagtcagacggcaagttcgacaagggcgatatcgttaccaatcgtctcgacctgctcagtgagatcgacctgtcataccgcaacgatttcggtgcccggatcagtgctgcaggctggtatgacaatgcctatcgcgataccgatgtgaaaactcatgtgccggggtatgcgggcagttacaggaacggacgctacagttccgaggccaagcgctacgtactcggcccgtcgggcgagatcctcgatgcatttgtctggaccaacttcagcatcgggcagacaccggtcaacctgaaggtcggtcggcatgccaactattggggtgaggggctgttgttcggtgcccacgcggtttcctactcgcaggcaccgagcgatggcatgaaggcggtgaccagccccggtatcgagaccaaggaagtattcctgccggtaggccaggtctctgccaaggcccaggtgacggacaatctgtcggtggccgggcagtacttctacgagtggaccaacacacgccttccctacggtggcacctacttcggcgcggcggatttcttcttcgaaggcacccatcagatggccgcggccccgggcttcaatctccagcacgcgacctccaaacgcgggcgcgatggtgagaactggggggtgatgctcaagtacaacgccgagccgatcgaaaccacctttggtgcctattaccgccagttcgacgactatcaggcgtggggttcgccgcagaccaatatggctgcggggacataccgcctggtctacccgcgtgacgtcaagctctatggtatcagcgcctcgcgcgcgattggttcggcggcggttggcgccgaattgtcctaccgcaaggatggcgcgctgaactcgaccggcatcagcctggtggatgacaatggtgcacgcggcgataccctgcacttcgtggccaacgccgtgtacggcatgccgcgcaacttcatcgccgacaacgcgaccctggtcgccgagttcgcctatagccgcttgcagaaggtgacggagcacaaggagctgttcaagggtgaaggctacacctgtaacgatctgcagggtccggctaacaatggtcggggcgacaaatccgatggctgctcgaccaaggattactacgccgttgcggtgaactataccccggagtacgcgcagatcctgccgtcctggagcctgaaggtgccgctgaccgtcaactatggcctgaaaggcaacgccgctacctctgcgggtggcagcgagggggcgttgtcctggtcggtcggcgccacgatgacctaccgcgaggagcatgagttcaccctgcgctacgccgacctttcggcccaggagaaaaatacgcgtaacgcctatggtcagcgccaggtcgacggtaacggcaacgtgggcggtaccgatcgcggctggttgaccttcacttacaaaacctccttttaa

SEQ ID NO: 331544 - DNA, 1368 bp, Pseudomonas aeruginosa
atgaaatttcaaatcgtattgggccttgccctgacggggctgtctgcttgtgcgctcgctgccgtcggccaggaagaggcggccgagctgggtaaatccctcaccccctggggtgccatccaggccggcaacgccgaaggcaccattcctgcctacgaaggcggcctgcgccaggctccagccgacttcaaaccgaacagcggcttctgggtcgacccgttcaaggatgagaaaccactgttccgtatcactgcggcgaatgccgagcagtatgctgacaagctgagcgatgggcagaaggagttgctcaagaagaatccggatacctggtacatggacatctacccgagccaccgtaccaccgcctatccgcaggaggtggtcgacgccaccctgcgcaatgccactgcctgtcagatccagaaggatggcctggcggtcgatccagcctgccgcggcggactgccgtttccgatcccgaagactggcaacgaggtgatgtggaaccagcagttgcgctacaagattggccccggctactccaccaccaagtcgtccaacagctgggtgatcgacagtaacgggcaggtaaccaaggtcgccgagcagcagactttcgaggaaaccccgtattaccaggtgacccagacggaccgtgacccgcagatgtatgcccgcgtttcgtcgcgcaacgactaccctgcgcgccgctccggcgaggtcatcgtactcaatgactacctcgatccggcagccaaaccgcgccgttctttcagctataccccggggcagcgtcgggtcaagctggctcccgagttcgcgttcgacacgccggtggccagccagggtggtgtgaccctgttcgacgagctgcagatgttctccggcgcacagactcgcttcgactacaaactggttggccgcaaggagatgtacatcccctataacgcctacaagttctatttcgattgcaaacaggatgagcaatttctcaagaaccacggcaacccggcctgcgagcgctgggagctgcaccgcgtctgggtggtggaggccacgctcaagcctggtcagcgccatgtctacagcaagcgtacctactacctcgatgaagacaccttcggcatcggcctgtacgacgcctgggacaagagcggtgcgctgtaccgcgcgatcttcctcagtggcgtgcagatctatgacaaaaccatcccctacaacgtgaagaacttcacctacgacttcaacaagggcaactacgccctgctcaacgatgcgttgaaaggtggctactggttcttcgacaaaccgttcacggagcgtgagatgaaccccgaggccgttgtgtcgagggtcacccagcgctga

SEQ ID NO: 331545 - DNA, 1119 bp, Pseudomonas aeruginosa
atgactagccccggccttgcagcaccagtttttacggctggctgtcgacgactgctcggcatggccatgctgcccttgctgctgagttcttttgcttgcgtggctgcagtgggcgtcgacccgctgcgcgaacccgccatgctgatggacacacaagtccaggcacccctggtcgacgtgacatacaccggcgaagccttgttgggcgtaggtctgcgcggactgatacagcgctccgaagacggcgggaagacctggaagcaggttccgagcccgatatccggcgacctggtctcggtacgtttcagcgatgcccgccatggctggattgccggtcatgattccgtgctgttgcacactcgcgatggaggaaacagctggcaggttcagctcgatggccgtcgcctgctgactctgttgcgcgattggtacgggcggctcgccaagtctggagatccggacgccgaggcgatgctgcgcgagatcgacatggcgatggagacgtcggcaacacccgatgtgctggcgtcccccttcctcgatgtgctgttcgacagcagaggcaatggtttcgtggtcggcgccttcggcatgatcctgcgcagccgcgattacggcgcgacatgggaaccttgggtagagcgcacgcccaatgaacgacgcatgcatctatacgggctggctgaacacaatggcgtgttctatgcgagcggtgagcagggcttgctgatgcgcctggagcctcacgcgcagcgtttcgtcgcattggataccggctatggcggcaccctgttcggcgtgcgggcgtatggcggtctgctgttggcgtatggcctgcgcggaaacctgtttgccagtcgcgacgacggccagcactggcagaagatcgagacgggtctgggctccagcctggtgggcatcgtcgagcgtaatcgccaattgatcgtggttggccaggacgggcggatgctggtgctcgattccgacagcctggtggtcactcccttgcagtccgtacagggcggtgaggtctacgcggccagttattccggtacaggccggctggtcatggcgcgtttctccggcgctcgacttgtcgagatagccaaggcggactga

SEQ ID NO: 331546 - DNA, 2499 bp, Pseudomonas aeruginosa
atggtagagcagaaatacaacagcggcatgccggtggtccccgacctgcgggacttcgacatggcatccggcgggctcttcgagcggatgatcttcaataaccgtgcgctggtggtggttgcctgtctgcttgccacattgatcctgggtttcttcgcttcccggctggaggttaatgccagtttcgagcggatgattccgagctccagcccgtacatcaagaactacctggcctacaaggatcaactgccggggctgggcaacagcattcgcgtggtggtatcgaacaagcagggcgatatctacgacccggagtacctgcagaccctgcaggaagtgaacgacaagctctatctgatccccggtgtcgaccgttcctggatgcgttcgctgtggatgcccatcgtgcgctggaaggaagtgaccgaggagggcattgatggtggcgccgtaatgcccgccgactacgacggcagccaggcatcgattgacgccttgcgccataacgtgtcgcgtgccgggatcatgggcagcctggtggccaacgatgcccgctccagcatgatcatgacaccgctgctcgacatcaacccgcagaccggcgggccgttgaactacggtgagttctcccggcagttggaagaacaactgcgctcgatggagagcgacaggatcggcatccatatcgtcggtttcagcaaactggtcggtgacctgatcgacggtctctacgccgtgatgctgtttttcggcgcctcggtagtcatcgccgggttgttcgtctacttctacacgcgctgcctgcgcagcaccctgctgctggtcggcatcgccgtggccggtgtggtgtggctgctcggcctgatggaattgctcggctatgagctggatccctactccattctggtgccgttcctgatcttcgccatcggggtctcccacggcacgcagaagatgaatggcatcctccaggacattggccgtggcacgcacaagtacgttgccgcccgttacacctttcgccgtctgttcctcaccgggctgaccgcactgctatgcaacatcgtcggctttgccgtactggtgatcatagacatcccggtgatccgcgacctggccatcaccaccagcatcggcgtcgccgtgctgatcttcaccaaactgctgctgatccccgtggcgctgtcctacatcggagtcagcaagaaggccgcacggattgctatcgagaaggatcgcgctggcgagcagaaccgcagtttcctcgggcatgtctggcagggccttgaccgcttcaccgagcgcccttgggcgatcggggtaattgccctgtcggtgggcgttaccgccgtgtgcagcgtcgtcatgctcgacctcaagatcggcgatctcgatcccggcgctccggagttgcgtccggattcgcgctacaaccgcgatagcgccttcatcacggccaactacgggctgtccagcgatcagttcgtggtgatcatgaagaccaatgaggacagctgccgcctttaccagccgctgcagaccatggaccggctggcctggcagttgcgccagactgaaggcgtgcaaactaccaattcgctggccgagaccgtacgtttcttcactgccggcatggccgagggcagtggcaagtggctgaccatcagtcgcgaccaggcgattaccaatgcctccgtcgatgcggcaatgatctcctcgcccggcattaccaaccagaagtgttcggtcacacccctgatcgcctatctggccgaccacaaggccgacacgctcaatcgcgtcctgcataccgtggagaattttgccgcccagcacagcgtcagcgacggcgaacattcggtggagttcctccttgctgcgggtaatgccggtatcgaagcggcgaccaacatcgaggtggagaagggcatcgttaccatgtacctagcggtgtatggcgccacggcgctgctttgcctgcttaccttccgcagttggagggcaaccctggtggcgctgatcccgctgctgatgaccacgatcatctgcaaggcgctgatggtctggctgggcatcggtctgaaggtggcgacattgccggtgatcgccgtcggggtgggggttggggtcgattacgccctgtacctgctgagtgtgcaactggctgtgcaggaacgagggggcagcctggccgtggcctatcgccgctcgctcgatttcaccggccgggtggtggcgctgatcggcctgaccatggccgccggggtggtgacctgggcgtggtcaccgatcaaattccaggccgacatgggcatcctgctgaccttcatgttcctctggaacatgcttggggcgctgatcctcattcccgccctgtcccacttcctgcttcgctccaagaccagtaccgaatcgccggaaaaggtatttggcgatgaaggatcgtcgtcatcgcaggccaaagaacaaaccaatgcgcaggcgattgccacgcattaa

SEQ ID NO: 331547 - DNA, 972 bp, Pseudomonas aeruginosa
atgttcgaattgttgatgagtgccgacatgatggtgccggatcccgatgggatgacggagaagctggtggacaagcttggtgtctacaaacatgagcgctggcgccaggcattcgacaaccacccttatatcgcgcacttcctgcgcgtgcacaaatccctggcggtggccccgacccggatcgaaccgcagtggcacctcgacaagcccaaccccggcgacccgctgttccacgattttctggaaagcctcaaggacttccaggggcaccaccgaccaatgatcacccactccatcgtgctggccctgcaccgcgagaagttcgccgtgctggtagacaagctgatgcgccgccgcctgccgttccgcatggcccagcgcacgccggagatgccattcgatcgtttgtggcttggcgcgacgcctgagcaaccctattaccagcccaccgtcgacggcggcctgtgcatcgagatcatggagaccgagccgctgcagatgccggcggaaacctacgccctgccgtcagcccagccacgcgagttggcgcgcggcggtatggtgcgggtgacggctcgcggctttttggtgcgcgatctggacgagaccttacgcaaggtctcggccaacctcgactgggagcccagcggcccggtggagcatctgcgcgaggaaggctatcgtcgtgcacgcatgggcttcaccgtggcgaacagtgcgaccctcgacgtgatcgaggcgacatcctggaataccgatgccggccattacctgaacaactgggggccgggcccgtattacatccgcattggcgtcaacgatctggctgccaaggccgaggacttgcgcgcacggggcaccgccttcgaatggatcgagtcgtccgaggcggtgggtggccgagcgttgatcaagatcgacccgaaagagctggatgggcaggtgttcgagttcgaagaggttcaggtatga

SEQ ID NO: 331548 - DNA, 819 bp, Pseudomonas aeruginosa
atgagcgccgaccaggggcagttggaatcgctggtgattaacgcgtcggtacgcgtcgaacgggatgccgctctgggctggatcgtcctgagccgccccggacagatcaacgccatcaacgatgagatccgccagggtgtgccccaggccctggaactgctggagcgtgacccgcgagtacgtgtcatcctgattcgcggggagggtgagcgaggtttctgcgccggtgcggacatcaaggaaaaacgtggcgaggaatcggccatccaggtacgccagcgcatggagcgctcgcgctggatcgaggcgctggacgccgtggccaagccggtgatcgccgccattcacggttactgcatgggcggcgggctggagctggcgctggcctgcgatatccgcttcgcggcaccaggcgcggtgttcgccctgccggaaaccggcctgggcctgatccccggcggtggcggcacccagcgcctggcccgggtggtggcaccagggctggcgatggatctgctgctcaccggcgagcggctgaatgccgaggaggcccgtcgggtgggcctggttacccggctggcgcgcgatgctgacagctggctcgacgaagtcaccaccctggcgcggcagatcgccgccaagccgccggctgcatcggcctatgccaagcaggccgctcgtgcggcactggaactggatctcaagcgcgggctcgatctggaactggatctattcgccctgctggcaccgaccaaggacagactcgaagccgcccaggctttcgccgaacgacgcgagccgcgcttcaccggcgaatag

SEQ ID NO: 331549 - DNA, 819 bp, Pseudomonas aeruginosa
atgagcacgggaaaacttgcgggacgagtggcgatcatcaccggtgccggtggtggcctgggcgccgagtgcgcgcgggtcctggcggaacatggcgccagcatcgcggtggccgacatcaacggtgccgccgccgaggcggtggccgagtcattgcgggcggcaggcagccaggccatgggcatccgtaccgacgtgtcgtcggaggatgaggtgtgcgacctgatcgcgcaggtcaaggagcgcttcggccgcatcgacgtattgcacaacaatgcggcggtgctcgatggcgagcagcgccagcgtgatcgcgacctggccaacctggacatggcggccttcgaccgggccattgccgtcaatctgcgtggtgcggtgctgtgcaccaagcatgtgatcccgttgatgctggagcaggggcgtggctcgatcatcttcgccacctccggtctcggcgtgcagggtgacatgtcgctctccggctacgccacctccaaggctgcgctgctgatgctgcccaagctggtggcggcgcagtacggcaagcacggcattcgcggcaacgccgtgcagatcggcctggcgcctcagcatccgctgccggaagtgctgctggatatcatgctcgacaaccattgcacgccggcgctcggtaccccgcggcagatcgccgacgtggtggccttcctggccagcgatgagtccgcgttcgtgaccggcagcacgctggtggccgatggcggcttcggtagccacaccccctcgctggtggcggtgcgcaagctgttcgagcagatgggccgcaacagcatgtga

SEQ ID NO: 331550 - DNA, 1224 bp, Pseudomonas aeruginosa
ttgatctcacccgccacggcaagactcttgccgatcctgctcgccggcctggcgatgctcggccccttcaccatcaacatctacatgccctccttcgagcagatgaagggggtgttcggcgtcacggacgtcgagttgcaaatcaccctgtccctgtatttcgccgcattcgccttcatgtcgctctggcatggcgctttctccgacagcttggggcggcggccagtggtgatcgccggcctgctggtattcgccctggcatccatcggcgccgcctgcgccacccgtatcgagcaggtatatgtctgccgagtattgcaggggctgtccgccggagccggcatcgtggtcggccgagcggtgatacgcgacctgtatgccggcgtcgccgcgcaacgtctctatgcactggtgatcatgctgttcgccctggcccccgccatcggcccggttctgggcggctggctgcaggtgcatgcgggctggcgtgcgaacttcgccctgctcggcgcgatggggatgacgctgctcgccatggtgctgttctgtcttccggaaacactgccatccgacaggcgccaaccgttctccgcaagcgccctgctggcgggctatcggcacgtgctgggcaacctgaccttcatgctctgggcagtgaccttcgccctgatgttcgccggcttcttcatctacgtgctttccgccccggtattcctgagccgccatttgggcctggaggaaaccgagttcatctggctgttcggccctgcgaccgccggcatgatgagcggttcctacctggccggccggttcgccttgcgctggtcgaccggccgcggcctggtcacgggcttcgggatcatgctgctggccagcctgtggaacctcgccatctgcctgtgggcaccgactgccttcggctggtatctgccctatctgttcatctacacactcggtatggcgctggtccagcccaccatcgtgttggcggggctggactgcgtgccggaccgacgcgggctcggctcgtcgctgcaactgtccatccagaccggcttcaacgccttgttggcggcgttcatcgcgccgttcttctgggatacccccctgctgctcgcctctggcgcggcgctggccatgctgctgtcgctggtcggggtggccctggcctggagccaagccaggagggccggcgctgtcgcgctgacgggcagagcgggttag

SEQ ID NO: 331551 - DNA, 1608 bp, Pseudomonas aeruginosa
atgaacaagaataatcacgacatgaacaacactgaattcgatgcgatcatcgtcggcggcggcaccaatgggctgtcggccggctgctatctgggtatggaaggcaagagggtgctggtgctcgaagcgctggacaaggtcggcggcatggcttcatcgggctacctgatccccgaggcgccacagcacctggtgcacccctgcgccatggacatgatgtccatgcgcgtgcatgcccacgtaccccgtgagctggaactcgaacggcacggtttcaagtcgatcgagctgtcgccgggctacgtctacctgcacccggatggcacctcgctggtgttctggcgtgatcgccagcagaccgctgcggaaattcgccgctacagtcccagagatgccgaggcgttcctcgaattcatgaaggtcatcgacctgtttctcgacatcgccctgccgatgatgcgagtcgatccggcacgcaccaacctgatgaccaagctgaagctggtgggaaccgcactcaagcggcgcaagctcaagcccgagctgatggcgctgatgaccggttccgcgcaccaggccgcgcgcgagcgcttcgagcacccggtgaccatttccgccatgtgcgcgctgaccggcctggccggcgacatcagtgccgacggtggcggcatctactatgccctgctggggttcctccatcgcttcggcgtcggccgggtcatcggtggcatgcaacagctcagcaatgccatgcgtgcgcgcctggaagaactgggcggccaggtcatgacctcggcccgcgtcgaagaaatccttgccagccagggcaaggttcgcggcgtccggctggccgacgggcgtgaattcacggcgcgcgcggtcattgccggttgtcaccccaaagtggcgctggagatggtcagcgccggtgaaatgccgagcaacctgctgacccgtatcgccatggcgccggccaacgccaggggctcggggccgctcaaggtcgacctggcactcgacgggcagatctccgtgccccgtttcgaggcggccaggggtgacggtgtcgacttgcgcaaggcctgcctgatgatcggcacggaagaggcggtgctggagaacttcgccgccagcgcccgtggcgaagtaccgcggctaccgtacatcaccatggttgcgcccaactcggtggatccctcgcagtcgccgccgggccaggacgtgctctacatctatccgccggtgatgccggtcgccccgcgcgaaggctgggacgcgcacagggagcgagtggccgatcaggtggtcgagcagctgtccgaatacgtggagggcatccaggggcatgtgatcggccgctggatcgaggcggcgccggatttcaccgcgcgcctgaacacggtgaacggttgcgtggtgcatatcgacaccacgtccatgcgttccagcgccatgcgtccggcctacgggctgggtggcgacacgctgccggtcgaagggctgtacctgggcagtgccggcattcacccgggcggcggcgtcaacggcatggctgggcggctggcggccggccgggtgaagcgctacctggcgaaagcaggtaagtaa

SEQ ID NO: 331552 - DNA, 654 bp, Pseudomonas aeruginosa
gtgaaccctgccgagcagaacgaacccggaaaacgcaacacactccgccgcctgatcgaggctgcacgcctggagttcgctgacaagggcctcgccggcgtgcgcatggaggagcttgcccgcgaagcggggatcaccaagcaactgatctatcactactacggttccaaggaaggactgttcgtcgccgtgctggacgaatgctccgaacgggtcatgtccgagctggtagcactggatgtcgacgcgctgcctcccgggccggccatgcgcgcgatgctcaaccacttcttcgaccagtaccgtcatgacccgctactcggcgccctggccctggaaggcatccactaccacgatacccaccagacgccgcgcaaccgcttcctcgaactgacgccgacgctgatcgacaagctcgacggcatcctgcgccgcggcgccgtggccggtgacttcaagaccgacatcaacccccggctgtttctcgccaccgccgctctgctcaccaccggctggttcaccaaccgctattcgatgtcggcattggccggcctggacactgtctcggaagaagggatgagcacctggcgccagtactcggtggatttcatcctggcgagcattgcgcagaaccagaacgaccacagcgactga

SEQ ID NO: 331553 - DNA, 1281 bp, Pseudomonas aeruginosa
atgagtaccagcaccgcctccgccctagatctcaagaacaactacaccgccgtttccgagacctaccgtggcaccgatctggacatccatgaggtgtgccgcgagcaactcctgaagtcaccgatctacgagggcgacttcatcacccagttcggcgtaccgaccaacgccggcatccagcagggaacccggccgaccttcgccctgttcaagtaccaggacgtgatggccgtgctgcgcgacggcaacacctacaccagcgggttcattgccgaaggcctcggtgccttcttcgacggcctggtgatcctggccatggacggcgaggcgcaccgcaaggtgcgcgcgctgctgcagccggccttcatgcccgagagcgtgaacaagtggcgcgggcagatcgacgaggcgatccgcgaggaatacctaaagccgctggtgccgcagaagaaagccgacctgatggagttcggcctggaactgccgattcgcatcatgtacgcgctgatgggcttccccaccgatgacccctccaagtacaagcaatacgccgcctgggcgctggccatggtcgggggcaaccagatcgacccggcgaagatggccgaggcgcgcaagcaggccggtatcgcggtcaagggcctgtacgacgccatccagggcgtggtggtgcaacgccgcgccgagggcagccatggcgacgacgtggttggccgcctgctgcgtgccgaatacgaagggcggaccctggacgaccatgaggtcatcaccttcacccgttcgctgctgcccgccgccggtgaaaccaccacacgtatgttcggctcggtgatggccatgctgctcaccaccccgggcctgttggagcgggtcaaggccgatcgctcgctgattcccaaactgatggacgaaaccacccgctacgagccggtggccaccttcaaggtgcgcgagacagccaaggacgtcgagttccatggcgtgaagattcccaagggctccttcgtgcagtgcatggtggtatctgccaaccgtgatccggatgccttcgagaaccccgatgtgtttgacatcgaccgcaagctcaagccgtccttcggcttcggtttcggcccgcatatgtgcatcggccagttcatcgccaaggtcgagatcagctgctcgatcaacgccatcctcgacctgttccccaatatccgtctggatccgtcgaagcccgctcccgtcatcgagggcgcgcagttgcgcggtgtctcctcgctcccggtgatctgggactaa

SEQ ID NO: 331554 - DNA, 1032 bp, Pseudomonas aeruginosa
atgagaattttcaagacgattcccgagcgtggcgacttcggtttccagcaactggtcggcccacacaaggtgaccggcgcggcgatggccggcagccgtggctttttcggcctgcgcctgagcaaaagctcgccattcggttcggtgcgcgacgaggacggcaacatctattccttcgtgcgctcgctgatggccccgggcggtacgcccaacccgaccaagttctactacctgaacaaccatgtggatggcgtcaacctgcgcatggaccacgagaagatggcccgccaggcgctgacgccactacctgtacagaccctggaaggcgacacggtgcgctggaccaaccagcccggcgaagcgggcaacggctgggaaatcaccgccaacagcgagcgtctgacctggcgcgaggatggcctgttccaactggaaggccgcctgcttggcccgggcctgcagtggtatctgcccggcgtggagtggggcaccttctacgtctcgcagctgtgggagctgtccggtgtctgcgaggggcggccggtgaagggcgcgatggcgctcgaccagttctacatggccgaggggggcgcgatccacttccagaaggacctggtggtcaacaacaacaagcacgtgatctggtggtcgttcgccaacctgtacgaggacggtagctgggaggcaggctccttcatggtcggccatgatcacctgggttacgcgatcttcagcaacgacaagggcgaagtgcgcgtgaccaccgatatcgaggggcaggccaggcacaaggagggcagctacttcctcgagtcggcgcggatcgtcatcgagggagaggaagagtgggaattcctgcccgaccccaagggcgagatgatcgacttcgttggcggcttccccgtcaccgcgcagcaggaagggcgctggcaacgggtcggcgacacccgcaagccgtcgcactggctggcctggggtgagtcggatcggcgcaacggctcggcgcgcaacgtgccgggcaccgatatctga

SEQ ID NO: 331555 - DNA, 789 bp, Pseudomonas aeruginosa
atgagattcgacaacaaggtggtattggtcaccggcgccggacgtggcatgggccgcgcaatcgctctggcctacgcccgcgaaggtgccagggtcgtggtgtcggcacgtacgccacggcatggcgaggaaaccatcgcacagatcaccgcgctgggcggtgaggcccatctggtcggcggcgatatcgccgatcgtgcggcagtcggggcgatggtcgacggtgccatcgaggcttttggggcactggatattctggtgcactgcgccgccgatacggcctcggggctgatcgccgagatggcggacgagaccttcgatcatctggtgcgcagcaatatccagtcgctgttctggctggccaaggacgcggcgccccatctttccaaggcgcaggacaagggccggatcattttcatctcctccggcgaggccaatcgcaaatacacgccgacgctgatcccctacagttccagcaaggcgttcatgaatgccttcgcccgtgggttggcggtggagttcggtgcgctgaacatcctggtcaatgtgatcgagccggggctgatcggcaccgaccatatgctcgaaaccctgggcgaggaactgccccatcgcctggccgagcgcttccccgtgccacgcctgggacagtcggccgatattgccgccgctgcgctgtttctcacctccagcgaggcttcctatatcaccggcacttcgttgctggtcgacggtggcgccaccatggtggcgatgcccagggtcgaagaaatcctcaaggggtattga

SEQ ID NO: 331556 - DNA, 1275 bp, Pseudomonas aeruginosa
atgtccgatacatccattccgccccagcgggcggccatcgacctcaccgagttcaagcgcggctggcgcatcctgctgcttggcctcgtcggtatctgcaccagtatcagcgcgggtctgctctacggcttcggcaccctggtgattcccctcgaacaggcttttggctggagccggggtgaactgcaggcgtcgatcaccttcctgttcgccggcgtggcgatctctacccaactggtcggcccgctgtaccgccgtttcggcctgcgccgggtggcgatcgtgtcgatcgtgctgcaggtgatcggatatgcggcgatcacccgcatcgagcattccatcggctggttgtacctggcgttcttcgccatgccgctggtgtgcgcgggaactatcgccatcacctggacgcaactggtcaacctgtggttcgagcgcaaccgtggcttggccctggcggtcattctttgcggtaccgggctgatggcggtgctgctgccgccactgctggccaggctgatcgcccagttcggctggcaggcgggtttcttcaccctggccgcgctgccgctgctgttcaccttgccgatggcattgctgtggatgcgcctgccgggcgaactggagccggcgttgccgggaggaagcgagacggtagcccggttggacggtctcagcttcagccaggcgctgcgctcgccggtctactggagtttcaacgttgccttgatcctctcggtgtgtctgaccgtcggcatggtcaccaatatggtgccgatgctacagggcaaggggctttccgcccaggtggcgagccaggtgttcagcagcttcggcatttccatcatcgccgggcgcttgctggtgggttatctgctggatcgctacccgccgatcctggtcgcggtgatcagtctggcactgccggccataggttgtgcgattttcctgttcggcggtgtgcaaagcatagcgctgctggtgctcgccaccctgtgcatcggcgccagcgctggcgcggagttcgacctggcggcgtttctcatggcgcgttatttcggcctgcgcgagtacgcgcggatcttcggcctgcacctggcgctgatcaccatcgtctcggggttgatgccggtgttctttggctacctctacgaggcttacgacggctattcggcagtgctgctttgctgcctggcctgttccatcatcggcccgtcgattctgctctggctacggccggcagcggtggtcacggtccaacaacagcacgcctga

SEQ ID NO: 331557 - DNA, 351 bp, Pseudomonas aeruginosa
atgagtgcgcaagaagccatcgagcatttcctgcatggccagatcgaatgctggaacaacggtgacaaggaggggttcttcgagcattaccggcggatgtcgcccgccagcctgagcatcgagtacgtcggccgtgccttgccgaccgatccgtggcagatcctcgaaggcatgtgggaaaaccagcagccgcgttttcgcatcgaggtcaaggaaaccatcatcaacggcgaggaagctgcctgccatcatcgcaacgcgttgcgcgacggcagcggcggtatcgagaccatcgagctgtaccgtttccaggacggcaggctgtgggtgcgttacttcatcaagacgtga

SEQ ID NO: 331558 - DNA, 240 bp, Pseudomonas aeruginosa
atgaagatgttcagcaaggaaggtgtggaaatggtggacatcaagtccatcacccgcgatgagcaacgactggtcatcaagggcaaggtgatgggcgccatgaccactaccatcctggtccacccacaagactgctggcaggccgcccgcctgctcggtatcggcgtgatcctgcgcttgcctctgatcctgttccagggttggctggccacgcgcagggcaacccgggtgaaacgctga

SEQ ID NO: 331559 - DNA, 1584 bp, Pseudomonas aeruginosa
atgagcaagacttatgacatcgtcatcgccggcggcggccacaacggcctggtcgccgcttgctacctggccaaggccgggcgcagcgtgtgcgtggtggagaagaacgacaaggtcggcggcggggtcatgacccgcgagctgaccattcccggcttcaagcacgacgtctgctcggtggcgcacacgctgttgcaggccaacccgctgctgcgcaacgacgaactggagctgaaggcgaagttcggcctgaagtacatcaaccccgacaagatgaccgcgatcttctacgacgacggcagcaccctggagttctacaccgacctggagcgcacctgccaggccatcgccaagttttccgagcgcgacgccgacgcctaccgccgcttcaaccaccaggtgttccagaacctcgacatgctggtcatgggcatgttcaacacgccgccgagcgcgtcacaccaggcgctgatgatggagcagagccaggtcggccaggaactgatgcgcacccaggcgatgagcgcctgggactacatcagcgaatggttcgagaacgacaaggtcaagatcgccctggcccgctacgcctccgaggcgatgatgaacccgttcgacaacggcaccggcttcggcttctacatcatcctgccgctgatgcaccgctacggcgtgggcatcccggtcggcggttccggggccttcgccgacgcgctgcgcgcctgcctggaacaccatggtggcgaggtgcgtaccgaggcgccaatcaaacagttcaagatcgacggcggcaaggtgagcggcgtgatcctcgacagcggcgaggaaatcctcgcccgtcagggcgtgatctccaccctgcacgccaaacaggtgttccccagcatggtccccggctgcgaattgcccgaaggcttcgagcagcgcatccgcaccctcaagcacagcagcttccagccgttcaacatgcatgtcgcgctgcgtgaggcaccgcgctacaaggtcggcccggcggtggacgacttcttctgggtggagcgctcgcattccgaccccgaggagttcgcccgcgccttccgcgacctggaatacggcatcccgcgccgcgacttcatcgcctacgtgacccaggacacctacgacaagacccgcgccccggaaggcaggcgcgtactcaacatgtatgccttctgcccctaccacctcaagggcggcgcccagcgctgggacgagatcggcgaagaggtggcccaggctttcctcgatgacctgcgcaagctcaccaccaacatggacgacgacaacatccttggcttctcgtggatgaccccgctggacatcgaacgccacaacaacgccatgatcggcgccgatattctgcacttcggctcctactcctggcagatcgccggcaaccgtccggcccccggctacgcccagtacaagtcgccagtggacggcctgtacctggctggcgccagcacccaccccggcggcggcgtcaccgccgcctccgggcgcaacgtggcgcgggtgctgctggaagaatccggcctggatttcgacgaactggtcggtgcctga

SEQ ID NO: 331560 - DNA, 921 bp, Pseudomonas aeruginosa
atggacatcatcggcattggctacctgggcttcgaaagcccgaacctggacgcctggcgcgagtacgcaccgcaggtgctcggcctgggcctgggcaacgccccggcgggcgaccccgactccctgtacctgcgcagcgacgaccgtcggcaccgcatcgcctttcaccccggccccgtcgaccgcatcgcctacatcggctgggaagcccgcgggcggcaggccttcgacgccgccgtggcgcgctttcgcgcagccggggtggccctggaggtcggcgacgcggcgctgtgcgagatccgcggggtgcgcgaactggtgcgcttgcgctgcccggcgggctaccggcacgaactgttctacgggcagaaatggacgccgcgctcgttcgttcccgggcgcccgcacggcggcttcgtcgccgacgaacgcggcgtcggccatatcgtcctgatgacgccggactacggccccgaactggaagccttcttcatcgagctgatgggcttccactggtacggcgcgggcgccggcaagggccgcaccggcttcttccgcgccaagctgaacgacaagaccagccatgacatcgccttcggccatgcccccggcatgaagggcgtgcagcatatcggcctgttcgtcaaaagcctgcgcgacctcggcgaaacctacgacatcgtgtgccagcgcggcctgccgctgcagatgaccctcggccagcacagccaggatccgcacgtttccttctaccacttcagcccgtccgggttcgccgtggagtgcatccacgaactgcagccctggcaccacgacggtttcgagctgaaccccgagcacctgagcgtctggggccacgagcgggtcggcccgatccttggcccgagcgtgatacccgtggagcgctacccccacgactga

SEQ ID NO: 331561 - DNA, 1308 bp, Pseudomonas aeruginosa
atgaaactcgaagacatgatcctcgtcagcgtggacgaccacgccatcgaaccggccggcgccttcgaccgccacatgccggcacgcttcaagggccgccagccacgcgtcgagcagcacggcggccgcgacgtctgggtattcgaaggccaggccaccggctacatgggcctcaactcggtggttggccggcccaaggaggagtacggcatggagccgctgggctacgagcacatgcgccgcggcacctgggacatcaaggcccgcgtcgatgacatgagcgccaacggcatcctcggctcgatctgtttcccgaccttccccggcttcgccggccagcgcttccagaaccacccggatcgcgccgtgtccctggcggcgatccaggcctacaacgactggcacctgcacgactggtgcaacgtcgcacccggacgtttcatcccgctgatgctggtgccctggtgggacatgcaggccgccgccgccgaggtcgagcgcctggccaagcagggcgtgcacgccctgtcgctgtccgacaacccggcgctgcacggcttcccgtcgatccacagcgactactgggatccgctgtggaaagcctgcgccgacaacaatgtggtgatctgctgccacatcggcaccggcatcaaggccgagcacgcctccgagctgtcgccgatcgatgcctggatcacctccatgccgatctccatcgccaactcggcggccgactggatctgggcgccaatgtggaagaagttccccgacctgcgcatggccctctccgaaggcggcatcggctggattccctacctgctggaacgcgccgacttcacccaccgccaccaccacgcctggaccaacgccgacttcggcggcaagaagcccagcgacatcttccgcaagcacatcatcacctgctttatcgaggacgatttcggcctgcgcaacctgccggacgtgggcgaggacatggtcacctgggaatgcgactacccgcactccgactgcacctggccgaattcgccggaagtggcctgggaaagcctgcgcaagctgcccgaggcgaccatcgacaaggtcacccacctcaacgccatgcgtgagttctcctacgacccgttcgccctgctcggccgcgacaactgcacggtcggcgccctgcgcgcccaggccacgcacgtcaatatcgagcccgcactgggcatgggcggagcagcgcccaagcgcgagaaaggcaagccggtgacctccggcgacatcaacgcgatgttcgctcaggcggacgcccagaccgcgttgtag

SEQ ID NO: 331562 - DNA, 576 bp, Pseudomonas aeruginosa
atgaacgacctacagaccctgctcgcccccacgcccctgccgccgaccgatcgcagcaagcgcatcgccagcggcagcccgctgcatagcgaaatcgtcgacttcctctacgacgaagcagagttgctggacaccctgcagctcaagcagtggagcgaaaccctgaccctggatatcgagtacaacgccccactgcgcctcacccgtcccaaccgccagcaacagcagaccgtggtgcgcaacgtccagcacctgcacgagagccatggctcgctgatggtgcgcatcatgcgcatcaccgacacccgcagcgcctggggcgaggatccgccctcgcgcacccggcgcctggtcagcaacgtccgcgtgttcggcaccgacaaggccgacgaatacaaggtgctgagctacctgctggtgacccgcagccgcttcgacttcgacgacttcgacctgatcccctgcgaacgccacgacatcctgcgccgcgagaacggccagctgaaactggcgcggcgcgaaatcctgctggaccaggcggtgatcggcaccccgaacctcggcattttcctttga

SEQ ID NO: 331563 - DNA, 1398 bp, Pseudomonas aeruginosa
atgagcagcactaccaacccggcgctgagcgacggcacgaggatttcggacctgattgatctggaaaaacatgaagtgaagatgcggacgctgtccgaccccgagctttatgccctggagatgaagaaaatcttcgccaggacctgggtcttccttggccacgagaccgagattccgaacaagggcgacttcatcgtccgcgacatgggctccgattcggtgatcgtcgcccgctccagcgacgagcagatctacgtatcgcttaacgtctgcccgcaccgtggcatgaagatctccaccaccgacggcggcaacgccgccgcccacgtgtgcatctaccatggctggacattccgccccaacggcgacttcatcgccgcgccggtggagaaggaatgcatgcacggcaagatgcgcaccaaggccgaactcggcctgcacaaggcccgcgtgaccgtctatggcggcctgatcttcgccacctggaacatcgacggcccgtccttcgaggacttcctcggcgatgccaagtggtatttcgacaccctctggtgccgcaccaccgccggcatggaagtgctcggcccgccgcagcgcttcatcatccgcgccaactggaagaccgcctgcgagcaatccgcctcggacggtttccacaccctgaccctgcaccgctggctgggcgaggtcggcccctatgcgaagaagccggatgccgaaggcaagggcggcgacctcagcccggaaatgtacggcgtcgaagtctggaccgaacacggccacaccatgcgctgcatcgaactggaccgcaagatccagcgcctcaccgggcgcgacccgtccaccatgagcgccgaggaaaaactcaccctgctgccgccgccgggcatcacccgggaaatggtccccgagctgctcaagcgcttcagcccggagcagttgcacgtcatgagctggcgtccaccgcaggtgggcaactttttccccaatggcctgttcgagttcatctacctgccgcagccggacggcaccgtgctcggtgccatggccttgcacgcctatatccccaaggggccggacaagctggaattcgtcaactggatcctcgccgagaaggacaccccgccggaaatcaaggcacgcatgctgcgccagtcgatccagttgctcggtacctccggcatggtcgaacaggacgactccgacacctggccgcacatgacgctggcggccaagggagcgatgagcgaggacatcaccctcaagtatcaggccttgtacgaagacgacgccaagcctgcggactggcccggccccggttacgtcggcgagggtttcaccaaggacgatacccagtggcaatggtggaaatactggcacgcgctgatgacggcctga

SEQ ID NO: 331564 - DNA, 1176 bp, Pseudomonas aeruginosa
atgaacgcccgcagccaatcgcttccctccggcctgtcgatcgtctcgatcgtctgcttcaatttcgcctcctacatcgccaatgggctccccctggccgtgttgcccggccatgtcctcaataccctgggattcagcagcgccatggttggcctggtgatcggcacgcaatacctgacgaccctgctgtcgcgtccactggccggcctgcttgccgacacccatggcgccaaacgcacggtcatgaccggactggccgtgctgaccggcagcggcctgctgacggccctggcgatcatcctgccgctgcccccgggggtcggcctggcgctgctgatcgccgggcgcatcctccagggcatctcttcggcgctgatctccacgccctgctgcacctgggccatcggcctgcatggcacgtcgcgcaccgcacaggtgatgtcctggaatggcatcgccgcctacggcggaaccgccctcggcgcgccgctcggcgttctggtacgggaccagttggggctcgccggcatcggcatcggcatcaccctgctcggcttgctgcccctgctgttcgcccagagccgaccgccggccccgttgctgccaggcatacgcctgccgttccacagcgtattcctcgcggtgctgcccaacggcctggccgtcgcctgcagctcggtgggcttcggcagcctgaccgccttcgtcgccctgtacttcgacagcctgggctggaacaacgcggcctattgcctgagcgccttcggcatcgccttcatctgtgccaggctggcctcgcccaatgtgctgtcgcgcttcggcggctatcgggtggtcgcgctctgcctgacagtacaaacccttgggctgctgctcgtgtggctcgcgcctacgcccctggtggctatcctcggctcggcgctgaccggcctgggcgtgtcctgggtctatccggggctgggggtggaaaccctggcgcgcacgccggagagcaaccgcaattcggccctgagcacgctgtcgctgttcttcgacctggccgtagggctggccggcccactgatgggcctggtggccgcgcatttcggcctgtcatggattttcttctgctcggccctgctctcgaccctcggccttaccctggtgctgtacctgcgccagcgccccggccagtga

SEQ ID NO: 331565 - DNA, 1236 bp, Pseudomonas aeruginosa
atgtcactcgcctcagtagtcatcatcggcgccggccaggccggtttccaggttgccgcctcgctgcgacaagaagggtatgacggcatcatcaccctgatcggtgatgagcccggcctgccgtaccagcgcccgccgctgtccaaggcctacctgctcggcaagatcagcgagaatgccctgctgttccgccccgccgatttcttcgtcaagcaacgcatagacctgcgccacgaccaggccactgccatcgaccggcagaaccgtcgcgtgctgctcgcatccggcgaggcggtcgcctacgatcacctggtgctggccaccggtgcgcacaaccgcccgctgccggtgcccggcgccgagctgcagggcgtttacggcgtcaagaccaaacaggatgccgacgccctcgcccccctggccaaggcagccagcagtgtggtggtagtcggcgccggcttcatcggcctggaattcgctgcggtagccgccgaactgggcgccagcgtgcacgtgctggagcttggcgatcggccgatggcgcgcgctgtttcgacggagatgtcccaactgttccgccaggcgcatgagtcctggggcgtaaagttcgacttccgccagggcctgacccgcatcgatggcaaggatggcaaggtcagcggcgtcgagacctcggacggacgcaaactgccagccgacctggtagttttcggcatcggcgtgattcccaacacccaattggccagcgaggcgggtctggccatcgagaacggcatccgcgtggacgccaatctgctgacctccgatccgcacatctccgctctcggcgacgtcgcctgcttcccctgcctgcagaacggcgagcaaccgactcgcctggaatccgtgcagaacgccgccgaccaggcacgcaacgtggccgctcggctgctcggcaagccggccccgtacagtgcgttaccctggttctggaccgaccagggcaacctcaagctgcagatcgccgggctctccaccggctacgacagcactgtcaccctcggctcgccggaaacccagcaactctcggtactgtgcttccgtgacgatcagttggtcgcggtggagtcctgcaaccgaccgggcgaccacatggccgcgcgcaagattctctcccgcccgccgcagctgagcgccgccgaggccgccgccgaaggcttcgaactcaaggtctgggaagccgccaaccgcgactga

SEQ ID NO: 331566 - DNA, 321 bp, Pseudomonas aeruginosa
atgcccacactgacgtttatcgaacacaacggtaccgaacaccaggtcaacgcagacgttggccaatcggccatgcaggctgccaccttcgcctccgtgcccggcctccccgccgactgtggcggtgcctgcgcctgcgccacctgccatgcctacatagacgaaacctggctggaacgcctaccaccgatggacagcaccgagaacgacatgctcgattgcgccgtcgagcgccgcgacaacagccgcctgacctgtcaggtattcatcagggaagagctcgacggcatggtactgcgcctgcccgcgtcgcaattctga

SEQ ID NO: 331567 - DNA, 1269 bp, Pseudomonas aeruginosa
atgccctcttccaaaaacgaagcggcaatcgacttcagcgagttccgacaaggctggagagtactgctgctatccgtcgtcggtatcgccatcagcatcaacgcatcactgctctacggcttcggcaccctggtcgtcccgctggaacaggcgttcggctggagcaagagcgaacagcaagtagcgatcaccttcctgttcggcggcgcggtggtttccctgcaactggtcggctggttcaacctgcgtttcggcatgaagcgcatcaccgtgatatcactggccctgctgtcgctggcctacctggctaccacccagttgcacggctcggtctggtcactgtacctggccttcgccatcctgcccctggttggcatgggcgcactcgccgtgacctggacccaattgctcagcctctggtacgaccgtaaccgcggcctggccctggcgattggcctgtccggcaccggcctgaccgccgcgatcatcccccgcctgatgtcctggggcatcgaacaatgggactggcgcgcggccttcgtcatcctcgccctgctcaatctgctggtcctgctgccgctgaccctgctgtggttcaggctctccgccagcacgacgcaaagcagccaggggcatgccagggaactgctggacctgcccggcatgagctttcgcgaaggcatgcgctcgaggaaattctggacctgcaacctggctctgggcctggtgatctcgtcgatcgtcggcatggtcaccagcaccgtgccgatgctgcagagcaagggtctgtcagccagcgatgccaacctgatcttcagcggcttcggcatcgccctgatcttcggccgcctgctcatcggctacctgatcgatcgcatgtggccgccgctggtatccgccgtcagcctggccctgccagccatcggctgcctgatctacctcagcggcaccgtcgagttcacaccattgctgctggcggcgatcctggtcggcttcggcgccggcgccgagttcgacatcgccgccttcctgatcgcgcgctacttcggtgtacgcgagtacggacggctgttcggcgtgcatcaaggcctgaataccgtggcctctgcccttgccccgctgctgttcgccttcctgctcagccgcaccggctcctactcggccatgctgacctacaccctggcctgcagcctcgtcggccccctgctcttgctgaccctaggccgcgttccgcgctttgtcgtaacaccgctcgcggcccatccctga

SEQ ID NO: 331568 - DNA, 1659 bp, Pseudomonas aeruginosa
atgccattcctgagaagcctgtccattggcgccaaactcctgatactgcccacttcgttcgtattggccctgctgatcatctcggcggtggcctatcgggggttgtccacgcagcaggcggtgatcgaagagatcgaccaggtgcgcttccagcagtacaagaccgtgctcgagacctccaccgcgtcacaggcggcaatggtcggtgcctatgccatgggggtgcgcatcctcgagtccaacggcgaggcttacgccgaggaactggagtcctatttcgaggatatgcaggacagcctcgacgacatgaatgccgggctggatcggctggcccgcgagacgcggctgggcgaggaagaacaggagctgatacgcgcggtgatggatcaggccggggtatttcgcgagggtttggtcgacttcaagcgcgccgctctgcaggagcagatgcaggcggcttcgttgctgggcagggtacgtgccgagtacaacggcctgcaggggcagttcaatcgattgctggggttgcaggcggagttgaccgcccatgctttcgccgatgcgggcgatatggtgcagcaggtgtcgcgagtgctgatcggcgtgctgctggtcgccgtggttctggcgttactggtcagcctgatgctgcgcagccagatcgtccgctcgatccgggagatcgaacaggcgtcgataaagatgcgtgacggcgacctgacccagcgcgtgcgggtcatcgggcgcgacgagattgcccatacggcgcaggcgttcaacgacctgatcgacagtttccagcaggccatgcgccaggttgccggtgtggcggcttcggtcagcgcctcggccgaggaactggtgggcgcgtcgaccagggtggcggagaactcaacggttcaggccggcgcagtgggcgaggtgtcgatgacgatggagcagatgagcctgggaatcgcctcgatatccagccatgcggaaagcctgcgcagttccgccgaggccagcctgcgcggtgcccgggatgggcacctggcactctcgcacctgctggagaagatcgacagcgtgcgccatgcgttctccgccattcgcggttcggtgggggatttcgtcgagagcaccacggcgatcaccaccagcatcactcaggtcaaggagttgtccgcgcaaaccaacctgctggcgctgaatgcggcgatcgaggcggcgcgcgccggcgagagcggccgggggttcagcgttgtggccgacgaagtgcgcaacctggcgcaacgttcggcgctgtcggccaactcgatcaacgacctgaccgtgaagctggaaagccagtccgaggtcgtcgacgaagccttgcgtggcggggtggtggcgctggacgacagtagccgcttgctgagcgagctggaaagcaccctgcagcaggcggcggttctggtcggcgactccacgcgtggcgtggatcagatcgccgatgcggtgcgggtgcagagcgagggaggacgaggtatcgctgcgaacgtcgagcacatcgcgcgcatggccggggaaggcgatgcgatcacccatcaggtgtccagtgccgtggcgtccctgcgcgagctgtccgaggacctgaacctggcggtagggcgctttcgcttcgaggcgggtatctga

SEQ ID NO: 331569 - DNA, 231 bp, Pseudomonas aeruginosa
atgagttcggaaaaagcccgtttcgaggtggttgtcgaccgtgggcgctgctgtggctacggtctttgcgcggccatctgccccagtatctacaaactggacgacgatggtctggtctacgtggatagcaagatcgtgcctgtggagctggaagaggaagcgcgcgaaggcgcggcagcctgcccggccgaggcgatctggctcgaagacctcaagcccgatactgaatga

SEQ ID NO: 331570 - DNA, 762 bp, Pseudomonas aeruginosa
atgacggctcgtcttgctggcaaggtggcgctgatcacggggactggaggcggccagggccgtgctgcggcattgcgcttcgcccgcgagggcgccatcgtcgtgggctgtgacttcaatgcggcggctcatgaggaaaccgtcgccctgctgcggacgcaagggctgaacctgtacggtcatgccccggtggatctgggcgaccacgagcaggccagggcctgggtcgagcaggccgttgccgagcatggcggtatcgatatcctctacaacaatgcctcggccgcacgcttcggcaatatcagcgagttctccatcgaggactggcattacaccatccgcaacgaagtcgatctgctgttctacaccaccaaatatgcctggaaccacctggccgagcgccgcggggtgattatcaacgtctcctccacggcggcttggggtggctcgaaggtggctggcatcggtgcgcatgccgcggccaagggcgcagtggtttccttcactcgccagttggcggtggaaggcgcgccgctcggtatccgtgccgtcagcctcagccccggcttcgtggctacgccgggcaccgaagagttcctgaagaatccgcagatgcgggccgcgttgctcgacggcgtgctgatggaccgcccgggcgagccggaagaagtggtggccctggcgctgttcctggcgtccagcgaggcctccttcgtcacgggctccgatttcgtcatcgatggtggcctgctggccatctag

SEQ ID NO: 331571 - DNA, 945 bp, Pseudomonas aeruginosa
atggatatcatcggcatcggttatatgggcttcgagaccgcgaatctcgatgtgtggcgcgaatacggcccgcaggtcatgggctttggtatcggcaagtcgccggagagcgacccgcagtcgctgtattttcgtatcgatgaccgccgtcatcgctttgcctttcatcccggtaaggtcgaccgcctggcctatatcggctgggaggcgctcggacgcatggcgttcgaggatggcctgagaaagctcgaagccgcgggtgtcgaattcacccggggcgacgcggcattctgcgagttgcgcggggtgcgcgaagtggtgcgtttccgcgatccggtgggttaccagtatgagctgttctacgggcagaagtggacgccgcgctcgttcattcccggtcgcccgcataccggcttcctggccgacgagcggggtgccgggcacgtggtggtgatcaccccggaatatggaccggagctggagcgcttcctgctcgaggtgatgggcttccactggtatggcgcgggcgctggcaagggccgtaccggcttcttccgcgccaagctcaacaaccacaccagtcacgacatagcatacggccacggcccggggcgcatgggtgtgcagcacgttggcctgttcgtgcgcaatgtgcgcgacgtcggcgaaacctatgacatcgtcagaaaacgcgaactgccgatgatgatgaccctcggccagcacagccaggacccgcacctgtccttctatcacttcaccccgtccggcttcgccttcgagaccatcgccgaaatcgagccctggcagggcgaccccttcgaactcaacccggagaccctgagcctgtggggccatgagatggtcgggccgatcctcgggccgagcgtccgcacgcccgaagaagtgctggacgccgagtacttggccgcgaagaagcgctga

SEQ ID NO: 331572 - DNA, 885 bp, Pseudomonas aeruginosa
gtgcgcctggcaagggtcgccgcggctggcgaggctttctgggcgctgctcgccccggacctgcgccacctgcagcgtattcgcgagccgttctctgtctgggcaccagctctgggccaggccggcaaggcctgtctggggctggatgacgagtttctcgcactgtcggcctgccgcctgctgccacccctggagccgggtgcgcgcgccttcggcgtgggcctgaactatcgcagccatctcgagcgcctgggcagtgccgcgccagcccatccgctcgcctacctgaagccggattcggctctggtcggggcggatgacgagatcgcctacccggccatgaccgagcagctcgactacgaggtcgaactggtcgccgtgctggcccgccccctgggcgatgagctgcgagccgctagctgtgtgcttggctacacggtgggcaacgatatcagtgcgcgggacgccgggcggcgtatcgctcgcctcgacctgctgacccagaaggccatggatcggaccacgccggtcggcccctggatcgtgactcccgacgaattgggcgtcgaggggcagccggagctggatatgcgcctgaaggtgaatggccagttgcgccagcaggacaatagccgcgagatgatctttcccgtcgacgaactgctcaattacctcgatgcccgcatcagcctgcgtccgggcgacctggtattcaccggctcgacccatggcgtggggctggaggacggccgtttcctgatgccgggtgatcgggtcgaagcgcatatcgatgggctcggtacgctaggcaaccgtatcggtccccgacgggtcctgagtccggcgcgggcgcgcgggcggctggggcggccgactggcgaatga

SEQ ID NO: 331573 - DNA, 1623 bp, Pseudomonas aeruginosa
atgagcaggcatcggcaggtcgcttcgaccacccccgcgcaaacctcgtcgttctgggcaccgctgcgccaccggttgttcgtcgggttgtggctcgcctgtgccatcgccaacatggcgatctggatgcagacggtggctgcggcctggatcatgacccaactgtcggcatcaccgctgatggtttccctggtgcagaccgcaatcacgttgccggttttcctgctcggcctgccgggtggcgtgctggccgatcgcatggatccgcggcgcctgctgctgctcacgcaagcggccatgctgggggcttccgcagcgctcagcctgctggcctggcatgggctgctgcagacctggtcgctgctgttgttcaccttcatcctgggcggcggcagcgccctgggcatggcggcctggatggtcaccctggttggtgtcattccccgcgaacaggtgccgtcggcggtatccctgagcggtatttccatcaacgcgacccgcgccctggggccggccctggccggggccatgctcgcctggtggagcagcgcttcggtcttcctggccatcagcctgtgcatgattgccgtgatcgcctttatcttcctgcgcctgccgcccggcgcgcgtccggaagggctgccgccggaaaccttggccggtggcatgcgcagcggtctgcgctatatccgccattcgacggtattgtccagcgcgctcaggcaggtgttcgttttcaccagttgcgccagtgccttgtgggcactgttgccgttggtggccaaggacgaactgcatatggatgcgggcggctacggtttgctgatggcattcatgggggcgggggccgttctggccgctttcggcctgaccagcgcataccgccgcctttccctgcgcaggttgatcgtcatgggtgccgttgccttcgccggtgccaccctgaccgccgctgtggcccgcgatcaatggctggtctgcgccatgctcctattggccggaatgggctggatggcggtgaacgccaccatctcgaccgtggtacagacctacgcggcgaactgggtgcgtgctcgcgtcgcgtcggtatacctgttggtgctgatgggttcgatggccctcggaggagccttgtggggcatgctggcgcagtacctgggagtgggcaatagcctgctgctgtcggcgtcgagcatcctgctcggcctgttcttgacacgccggggcgagatcgtcatggggcgtgaggtggactttgccagtgcgcagcagaccgacaagctggtgctggcggaggcggtcgcccatgacgatggcccggtctgcatcgagctcggctaccgggtggcgcccgaagagcgcgatatcttcctgggtgccgtctatgcggtggggcaggcacgtcgccgcaatggtgcgcggaactggcgcctgtaccgcgatctggaggaggccgatcactacatcgagcgtttcatcgtcgaatcatggctggattacctgcgccagcgtgagcgactgacccagagcgatgcggttcaggagcggctcctgctgcgcttctgtgatgagggacgggaaatcaaacgttacatctaccaggccccgctgccgcaggtctga

SEQ ID NO: 331574 - DNA, 795 bp, Pseudomonas aeruginosa
atggatactctagagacagtggacgtcggcagcgagcgcaaggccgccggggcggtcactgtgaaacctgtcgccaacgcgatccgcatccttcgccatctgagccagaacggcgcaccggagcgctcggtggacattgcccgccggctctcgatcaaccccagtacctgtttcaacatcctgcgcaccctggtgatggaggatgtcgtcgatttcaatccgatgtcgaagcgctattcggcggggctgggcttggcccgcctggtcgggcaactggttacccaggggcagcgtgtgcaactggtcaagccgctgctgcaggagttcgccgcgcgcatgcgggtgaccatcaccctgtggcggcgcatgagcgcagaccgtatcgtgatcgtcagctcggcggccagtcctgccgatgttcgcatcgacatggccgagggacagcgcttccccatgccgatgggggccagcggtcgcttgttctcgacgcaactggacctggatgctccggagttcgaggctgtctaccaggggattcgctgggcgcgcccactacccatagaaacctaccgcgaggaagtccggctggcagcgaagcagggctgggcggtggatgatggttatttctcgatgggcatcctggccgtcgccgcccccgtccattctcccgagggggcgatcgatttcaccgtttccgccgtgatgttccgtggccagcgcgatgatgaagggatcaaggaactggctggcgcgctcaccgagttctgctccgagctggccgacctcctgttctga

SEQ ID NO: 331575 - DNA, 1194 bp, Pseudomonas aeruginosa
atgatgattgagcagcgctacgagaaagatgtcgccatcaccggcatcggccagtccgaggtagcccgcccgtccagcaagtcggccatgcgcctgaccctcgatgcctgcctggaagccatcgccgacgcggggctggagcgccacgacatcgatggtgtggcctgctggccaggggacaacaacaatggcgaccccttctccccggtcggccccagcgccctgaaaagcgccctgggcctgaacctcaactggttcggtgccggctacgaaggccccggcccgctggccggcatgatcaatggcgccatggccatcgccgccggcctgtgccggcacgtcctggtttttcgcaccattaccgaagcctcggcacgtctgcacaacaaacaggccggcgccctgagcaacaagacccaggggcgcgacagcagctatgcctggcagtggttcacacccttcaatgtgctgtccggcatcaacctgatggcactgtacgcgcagcgtcatttccacgaatacggcacccggcccgaacagctcgcacagatcgcgctgacctgccgacagaacgccatgcgcaatcccaaggccatctaccgtacccccatgtcgctggacgactacatgcagtcgcggatgatttccacgccgctgcgcatgttcgactgcgacgtgcattgcgatgcctccactgcgatcgtcctgtctcgccgcgatgccgcacgcgatggccgccatgcaccgatacgcatcgagtcgattggcgccgcgctgaaccagccctggtcctgggatcagatctccctgaccgagatggcggccttcgatgttggccggatgatgtggcagcgtaccgactacaccccggacgacgtcgactcggcgcagctctacgacggcttctcgatcctcaccatgatctggctggaagcactgggcctgtgtccggtgggcgagagcggcgcctttgtcgaaggtggccagcgcatcgccctggatggcagcttgccgatcaataccaatggcggccagttatccggcggacgcacccatggcctgggttacgtccacgaggcctgcctgcaactatgggggcgcgccgaagggcgtcagaccacggagaatcgtgtatccgtggttgccgcaggcggaggaccactgggcggcagtctgctgctggtccgcgagtga

SEQ ID NO: 331576 - DNA, 399 bp, Pseudomonas aeruginosa
atgtccagaaaactgcccgccctcaacgccgacaaccgtgccttctggcagggtggcgagcacggcctactgcagatccacaagtgcaacgattgcacccgcttcttccacccacccggcccgatctgtccgcactgcgcgagtctcgaggttgccccatgcacggtatcgggcaagggcaaggtgctgagctacaccctcaactaccagccatggaacagcgagctggaagtcccctatgtcatcgccatcatcgaactggccgaacaggaagggctgcgcttcctcagcaatgtcgtcgacctggatcccttgcaggtgcatatcggcatgcccgtgcgggtccgcttcctgaacgtcgaggatgtctggctgcccctgttcgagaaggatcaatga

SEQ ID NO: 331577 - DNA, 702 bp, Pseudomonas aeruginosa
atgtcccggcctttgcaagacaagacaatcatagtcaccggtggtttcggcgctctgggtagcgccgtgggtcgcctgctgctggagcgcggcgcgcaggtcgcactgctcgaccgcgccgaggtgcccgccagcctgggcgatgctccaggcctgctgtcgctgggaggcgttgatctgacctccgccgactcggcgcaggcggctgtggccaaggtggctgggcatttcgggcggatcgacgggctggtcaacgtggccggcggcttcgcctgggagaccctggagggtggaagcctggaaacctgggaccgcctgtaccagatcaacctgcgcaccgcactggtgagcagccaggcggctctgacccacctgctcgaagcgccggccggacgtatcgtcaacgtcggcgcactggcgtcgctgaaggctgggctgggcatgggcgcctatgctgcctccaaatccgccgtggcgcgcctgaccgaagccttggccgaggagctgaaggaccgtggcgtcaccgtcaacgccgtgctgccgagcatcatcgacacccaggcgaaccgtaccgacatgccggatgccgatgccagtcgctgggtcacgccgcaggccctggcgaaggtgatcgccttcctgctgtcggacgacgccgcgcctatcaccggcgcctgcctgcccgtgggtggccgggtatga

SEQ ID NO: 331578 - DNA, 1002 bp, Pseudomonas aeruginosa
atgagattggtcacctttaccgatggcagcggctttgagcgtgccggggcgctgctggagaacgaccagatcgtcctcgacctgcaggccgcctgccgggagctgcaagggcgcgagcgagccgaactggtcagcgtgctggcgctggtcgaggctggcgaggacggcctggccctggcccgctcgctggtggagcgggtgcctgcccaggcggtgcacgagcgcgctctggtgaagctgcgcgcgcctatccagccgccgccgcagatgcgcgactgctcctgcttcgagctgcacctgcgacagagcttcgccgccgcgcgccgtgcccgggcgttgcgcacgccggacccggaagccacgctcaaggcgatgaatacgcgtgccgatgaccgggttatcgacaccttcaaccgccagcccatctactacaagtgcaaccgcttcgccgtcatcggcatcgacgacgagttccagtggccgagtttcacccaggcgctggacttcgagctggagttcggctgctacatcggcaggcgcggcaaggacatcagccgcgaagcggcccgttcgcacatcgtcggctacaccatcttcaacgacatgagcgcgcgcgatgcccaggctgcggagatgcccggcatgctcggcccggccaagagcaaggacttcgacacggcgaacatcatggggccgtgcctggtgacgagcgacgagctgggcgatccctatgacctgaacatggttgcgcgagtcaatggcgaggagtgggggcgtggcaacacccgcgacatgcgttggtccttcgaggacgtgatcgcccacgtatcgcgttcggaaaccctccatcccggcgagttcctcggttccggcacggtgggcaatggctgcggcctggagcagctgcgctacctgcgtccgggcgacctggtcgagctggaagtggacggcattggcgtgctgcgcacacgtgtcggcaacgccgggcaagttgttacctaa

SEQ ID NO: 331579 - DNA, 1401 bp, Pseudomonas aeruginosa
atgctaacaagaacaagtcctgtcttgtctgacggaaccaaggtatccgatctcatctaccccgctacccgtgaagtgcagatgcgcgtgctctcggatcgggagatctacgagctggagatggaaaaaatcttcggcaagatctgggtgttcctcggccacgagtccgagatccccaattccggcgacttcattgtccgcgacatgggctccgattcggtgatcgttgcccgaggcaagggtggcgaggtctacgtcaacctcaacgtctgcccgcaccgtggcatgcgcatcagtaccgccgactgcggcaacacgcagatccacaagtgcatctaccacggctgggcgttccgtcccaacggcgacttcatcggttcgccggtcgagcgcgagtgcatgcacggcaagatgctgccgaaagaggaactgggcctgaagaaagcccgggtgaccctctacggcgggcttatcttcgctacctggaatgtcgatggcccctccttcgacgaattcctcggcgatgccaagtggtactacgacatgctgttctgccgctccgacaagggcatggaggtgctcggtccaccccagcgcttcatcgtcaatgccaactggaagactgcgggtgagcagtcggcggccgatggtttccacaccctgaccctgcaccgctggctgggcgaggtgggcaactacgcgaagaagggggaaggtgaaggcgagggcgccgacctcagtcccgagatgatcggcgtcgaagtcagctcgccgcatggccatgccctgcgctgcatcgacctggcacgcaagatcaagcgtctgaccggcctggatcccgagaccttgtccgtgcaggagaagctggatgcgctgccgccggcgggcatgaccgctgacatggtcgagcagttggcgcgcaatctgagcgaggatcagctcaaagtcctgaccagcatgccgccgcaggtgggtggcatgttcccgaacatcctctttggcttcgtctacattccgcagccggatggtggcgtggtgggttccatgaccatgcatgcctatgtgccccagggcccggacaagctcgagttcgtcaactggatcttcgccgagaaggatgcgccggctgaattgcgcgagaagatgctgaagcagaccatccagctgttcggtacctccggcatggtggagcaggatgactccgatacctggccgcacatgaccctggccgccaagggcgcgatgggccgtcagatgaccttgaaataccaggcctgctacgagaccggtgctccagagggctggccgggaccgggcatcgtcaacgaggggttcaccaaggacgatacccagtggcactggtggcagtactggcacgagctgatgacggcggaagactga

SEQ ID NO: 331580 - DNA, 576 bp, Pseudomonas aeruginosa
atgggccaagtacaagaacgtggcaccgaccagatccagcctggatcgcctgtcgggatcaagcgtatcccggtcggttccgagacctataaccaggtggtgaccttcctctatgaggaagccacattgctggatcagatccgtctgcaggagtggggcgcgcgcctggctaccgacctggtgtacaccgtcccgctgcggcatacccgcttgcagtcggaactgtccactaccatcgtgcgtagtgtgcagcattaccatgacgactaccgttcgatcatggggcggatcctgcgcctttccggcaagagcgcctgggcggaagatccgccctcgcgtactcgtcgcctggtgaccaacgtcttcgtcgaggagaccgagaaggccgacgagttcgtggtgaccagctacctgctgctgacccgcaaccgcttcaaggaccatcacgtcgatatcatcagtggcgagcgtcgcgacgtattgcgcctgaccgaagatggtttcaagctggcccgacgcgaggtgatcctcgatcaggctgtgctgggcacgccgaacctcgccgtgttcctctga

SEQ ID NO: 331581 - DNA, 774 bp, Pseudomonas aeruginosa
atggccagtatgttccgacgtcgagtggaaatcgtttcgacggcacaggatgccacaagggaagtacgcgcgagcctggaggacgacttccatcacttccgtgtctggctgcgccactgcgacggtatcgtgagcgagatcggcggcgaggccgtacgctacccctactccgcctgcccacaggccgccgagcaactacaacagctgatcggcatgccgctcagccagatcgcccactcggtgacccggcagaccgatgcccagcaccaatgcacgcatctgctcgacctggctggcctggccatcgccaacgcggcgcggggaacgacgcagcgccgctatgacatccaggttccggaccgcatcgacgagcgcaccaacccggtcctgcagcgcgacggcgcgactctgctcagttggaacgtgcatggctcgaccatcgaggggccgccgccttactgcggggtcaatctgcgagaaggaatggctcgctgggcgctcaaccatctgtccgaagaggaagctgaagccgcgctgctgctgcgccgctgcaccctgatctcgctaggccgtatgaacaacctggacgcccaggtacatgcctccagcaccggccgctgctacagtcagcaaccggtacatgccccgcaggcgttgcggatcaagggttccacctgggacttcagcgaaacggcaggcatgctgtgccaggatgaccaggcatggctggccgggaagccggagcctacctctgatgctgctcgcctaagctaa

SEQ ID NO: 331582 - DNA, 801 bp, Pseudomonas aeruginosa
atgaatctattgcaagggcaggtggcgctgataaccggtgcgggcggcgggatcggcaggggcgtggcgctgagttttgcccgggcgggggctgcggtgctggtcgccgaactcgacgaggccagcggcaaggcggtggagcaggagctgcaggcgctgggcgcgcgtgccctgttcgtcaggaccgacgtgacccgcaaggcggatatcgaggcctccatccagttggcggtcgagcgcttcggtggcctggacatcctggtcaacaatgccttcgccccgacacccaacgtgttgctggaggacaagaccgacgagatgctgacccgtaccctggattccaccctgtgggccgcgtggtggtcgatgaaggctgccttgccgcatatgcgtgcacgcggcgcgggcaagatcatcaacttctactcgatcgataccgaggtgggcgcctggctgcacggcgactacaacgcggccaaggccggcgtcgtcggcctgacccgcagcgcggcttccgaatggggccgattcaatatccgggtgaatgccatcgcgccgaccgccatgggggcgacgttccacaagctcgctgatgagaatcctgggttcgccgagcgttccgccgccttgcgtccactggggcgctgtggtgagccggaggatgacattgggccggtggtggtattcctggcctcggaaatgtcgcgttttgtcaccggcgagaccatccatgtcgatggggggctgcacttgccgggctacaattcccgtccggcggacgttccggttcgcgaatactga

SEQ ID NO: 331583 - DNA, 1632 bp, Pseudomonas aeruginosa
atgagtggcatcggtcatccggacacctggtccgtaggcgaaagagacaccgtaatcgcagcactggagcgagcagttacaaggcatccagacagggtactgctggatttcagcggaaatctgtacacatatgcagaaattgactctctatccaccagaatggctcatgcactggcctccctcggcgtgaagcagggagagaccgttctgaccatgctggacaacaatatcgacgcggtcgtctgctggctggccatcaacaagctgcgcgccgtcagcgtgccgatcaacaccgcgctcaagggagaattcctgcgccatcagatcgccgacaccggcacccacctggtcatttgcgaagcggactacctgcagcgcatcgtcccgctagcaagccagctcagcgaggtcacccgtatcctgtatcgtggcgacctggccgcaccggtcgactgcggcatcccggtcgccgcgctggatgaacaccgcggcgataacgaaagcccattcgatatcaagccggagccctccgacctggcctgcctgatttacacctccggcaccacgggcccttcgaagggatgcatgatcagctacaacttcatgtgcaacctggcccgcctgcaactgcgcgccggcccggccaatgaaaacgacgtgaccatcacgccattgccgctgttccacatgaacgccctgtgcgtcagcatcatagccagcatcatggtcggcgcccgggccgccatcctgccgcgcttctcggtctccaatttctggcaggaagtcgagcgctccggcgcgaccatcgcctcgatcctcggcggcatgggcggcctcctcgcccaggcccccgacaacgaggccatgaagcgctgccacggccagatccataccgcacgcggcaacccctacaccgaggagaccaagaagatctggcgcgagcgcttcggcaccaaactggtcggtggcaatggttacggcctgaccgaagcctgcgtgatcacctccctggccgccggcgaacacgcagccccaggatcttccggcaaacgcatagccgacttcgatgtgcgcatcgtcgacgacaacgaccacgaactgccgaccaacacccctggcgaaatcgtggtccggccattgcgcccggacatcatgttccagggctactggaaccgtcccgccgacaccttgaagttgatgcgcaacatgtggttccacacgggtgacatcggcaagttcgatgaaaacggcttcttttactttgtcgaccgcaaaaaggattacctgcgccgacgtggcgagaacatctccagcttcgagatggaagcagccttcgccgtgcaccccgccctcgccgaggttgccgtgcatgccgtgccgtccgacaagggtgaggatgatgtaaaggtcaccgccatcctgcaccaggacgtgaacctgagccccgaggagctgttccactgggcaaccgaatcagtgccttactacgccctgccgcgctatatcgagtttcgtgacagcctgccgaagaacccgcagggtcgcgtgctgaaataccagttgcgcgacgagggcaagacggccgacacctgggacctggaagacaccgatatcaaggtcgcgaagaaatga

SEQ ID NO: 331584 - DNA, 735 bp, Pseudomonas aeruginosa
atgccgaggaacgccacgaaagccagtcaaattgccgcttcaacccctaaaaaaggaaagcaggcacctgtcgcgcagccttccgtagccgataaacagactgttcagaaaaatagtcgcgccgcatcggttccgggggccaaggtcaaaccgaaccggcgctccgaggagaccatcggcaatatccttgccgccaccgaagaagtggtgttgcgctccggtgcggacaggatatcgatcctggatgtctgtcaggtggccggggtatcgcgcgggacgttctatcgttacttctcgtcccaggaagatctcctggacaccttctcccgacacaagcgcgatagtttccacggttcgctgtccctggcgctggaggggatagaagaccctgatgcaaggctgaacgcactgatcgcctatctcgacagctatctcgagcagagccgcgcgcggcgtttgctgatggtggcgcctgagtatgcgctgggtttctttcggcgcatcttccatgactccatcgtgcgctttcaggacctgctggacatcgtcttcgaggagtgggatacgcggctcggggtcaggctcgaccgtgagctgatctgcgaaatgatcatccgttatgtactgagtgaagtcctcgtgccggaaggcagtggccggcgtctcctgcctgtgcgtgtcagaaagctggccgccgcgctgaccatcggttccacctcccgcacccgccgctaa

SEQ ID NO: 331585 - DNA, 1077 bp, Pseudomonas aeruginosa
atgcttatcgaccttcacgcccatgccccccatcccgactattacgaccagcacccctattgggggccggccttcgagtcccagcccgatggtgatatcaagctgcgcgtgggtgactggatcctgaccctgggcgcgccggagcggaagaaggcgctgcgcgaagcgcatgcccgcggcgagacgctgaatgtcgcggagtacatggccaaatggcgcgacccgagtcaccgcctggcgtcgatggatgccgcgggtcaggatgcccaggttctgtcggtgccgagtcactgctacatgtactgggccgaggccgagttcgccgtcccctttgcccgcaccgtcaatgacgcgctggccagctactgcgcggtcgctcccaatcgcctgatgttctgggctcatgcgccgttgaacgtgccgcacgaggctgccaaggaaatccgtcgcgcctgcaccgagctgggggccaagggcctggttgccggtggttccaacttcggcgggatggaatacgactcgccggagctggaccctgtctgggaagcgttgtgtgacctcgacctgccgatcttcgtgcacggctacaaccagtccgtgacctggggtaagcaggccaacaccgaccgctatgaaaccactgccatcgtcggcatgaactacgacgaaaccaagtgtttctggtacctgatcaacggcggtgtgctggatcgcttcccgaacctgaagatctacatcacccacggcggtggcttcgtgccttaccaactggggcgcatggcgcagaccaatcccaacctcgacacgtaccacaacaagaagccatttcttgattatctgtccaatttctatttcgacgtggagctgcacgagctgccaatgcgccaggcgatgatcgacgtcatcggcgcggaccggattctctacggctccaactttggcggcagcgatgcggttcgccatgacctgaccgatggcttgcgcctgtccgacgacgatctgcagaaaattcgctggaagaatgcctgcgaactgctgcacctcgatccgtcgaaactgggcaaggtaattgcctga

SEQ ID NO: 331586 - DNA, 855 bp, Pseudomonas aeruginosa
atgaagctggcgcgttgctcctacttcgaaaccggtcctttctgggcggtggtcgaccctgagcgagacgaggcccataccatcgatggagagttttccgtgtgggcgccggctttggccaggggcgcgggtatcagtgccctgcggctgtcgggaccctcgctgccgctgtctaagttgcgcctgctgccccccatcgaaccggtgaaccgggtggtggtggccggtgccaactatgccaagcacctgtccgaggacttcggtcttgccagtcccgtgcaaccggttgccttcctgaaggcctacggggcactgatcggcgcgcacgatccgatccgctatccgccgctgaccgcagaactcgaccacgaagtcgagctcgtggcggtcatcggcagcgctgaaatcgacctggaagatccgttggccagtgtgctgggctacacggtcggtaacgacgttagcgcccgcgatctgcagcgcagcgggccagccggtattggcatggatctgttcgcggccaagagccaggatcgtacaaccgggctgggcccctggatcgtcaccaaagacgagtttccacacggttctccccggttgcgtctggttctcaaggtaaacggcgaggtgcgccaggatggcacgaccgaagatatgacctgggatgtcgggcaactggtccgtttcgttcagcagcgttccagtttcgccgccggtgacgtgctgttcacgggatctccggcgggggtcgggatgggcacggggttgttcctcaatccaggggatgtggtcgaagcgaccatcgagggcataggcacattgcgcaacgtggtgggcgagaagtcccgcgtctaa

SEQ ID NO: 331587 - DNA, 906 bp, Pseudomonas aeruginosa
atgagcattgataaacaagaaagaatcgtcgtagtgggtgccgggctgatgggcaccgggattgcgcatggcttcgccagctccggctatcccaccgtgctggtggataccaatgcggattcgctgtcccgcgccagggacaatatcgacaagatcctcagcggcggggtggcgcttggcaaggtgtccgccgagtcggcgcaggcatcgctggcgcgcctggctaccagtggtgacctcggtgaggcagcgcgtggcgccaactggctggtggaaacggtttccgagcggttggaggtgaagaaggcagtggtcacgcaggccgagcccctgttggcggatgacgcgatcatcgccaccaacacctccgcgctcagcgtgaccgagatcgcagcctcgctggcggcccccgagcgggtgatcggcatgcacttcttcaaccccgtgcacaagatgaagctggtggagctggtgcgtggtctggcgaccagcgatgaggtgctggtacgcacccgcgcgctgtgcgacgcgatgggcaagacctcgatcgtggtcaacgagtctcccggtctgactaccagccgcatgtctgcgttgctcggcaatgaggcgatgtacatgctgcaagagggcacggccaccgccgaagacatcgacactgctctgcgcctgggcttcaaccaccccatggggcctctggagctgggtgatctgaccggctgggatacacgcttgtcggtgctgcgctacctgcaccagaccctgggcgagaagttccgtccctgcccgctgatcatcaagatggttgctgccggacgccttgggcgtaagaccgggcatggcgtctatcgctacgaagagggcaagcgggtaccgaactccgggctcaaggcgagtgcgcaatga

SEQ ID NO: 331588 - DNA, 1176 bp, Pseudomonas aeruginosa
atgaaggacatcgtgatcgttgatgcggtacggaccccgatcggccgtttccgcggcagcctggccggcgtgcgcgccgaccatctgggcgcgctagtgatcggtaggctgctggagcgcgtcgatctgtcccctgcacaggtcgatgacgtgatcttcggctgcgtcacccagatcggcgaacagtcggccaacatcgcccgcaccgccttgctcggtgccggctggccggtgaccattcccggcctgaccgtcgaccgcaaatgcggctctggcgaggtggcggtgcaccttgccgccggcctgatagctgcgggttccgccgatatcgtggtcgccggcggcgcggagaacatgagtcgggtgccgatgggcagtaaccgcgagatccacggtgaagccttcggctggatggcgagcgagcgctacgagctgaccagccagggcgaggcggccgaacgcatggccgacaaatggtcactcagccgtgacgagctggatgactatgccttcgccagccatagccgcgcggcggcggcggcggatgccgggcacttcgccaacgaaatcgttgaggtgccggtcgaaaccctgcgcgagcacggcctgagcgaagctgtggcgccactgcggggcgatgagaccattcgccgtgacacgtcgcgggaaaagctggcgaccctgaagaccagctttcgcccggaaaccgggcgcatcacggccggcaactcctcgcagatttccgacggtgcggcagcgctgctgctgatgtcggcggaaaccgcgcaacgcttggggctcaagccgcgcgctcgcgttcgcgccttcaccaccgtgggtgccgacccgacgctgatgctcacgggaccgattgccgctacccataaggtgttgaagcaggccggcctggatatcggcgacatcgacctgttcgaggtcaatgaggcgttcgcctcggtgccgctggcctggatgcgcgaaaccggcgtgtcgcacgagcggctcaacgtcaacggcggcgccatcgccctgggccatccgctcggcgccagcggcgcgcggctgatgaccacgctgctcaatgagctggagcgtcgtggcgcccgttacggcctgcaggcgatctgctgcgccggcggaatggggacggcgaccatcatcgagcgtctcgactga

SEQ ID NO: 331589 - DNA, 504 bp, Pseudomonas aeruginosa
atgtcgcggattcccatggtagcgctggaggaaatgtcagccgaactacgtgatgccattgctcgggggcgggcaagcggcatgctcagctccagcaggccgatccaggtctgggcgcatcgcccggccttggcgcaggcctggctggaactgatgaccggcttctatcgggacagcctgcttgacgaacggctacgcgagctggtgcgcctgaagatcgccagtatcaccacctgtcaggcctgccaactggcgcgcaagtccgacacggtcagcgaagaggatatcgcctgcctggagacgtacagcgatcatttcacgccggccgagcaggcgtccctgcgtttcgctgaactgttcgccgctgactacatggccatcgatgatgagcactatgccagcctgtcggagttcttcacttgcgagcaggtggtcgaactcaatatgtactgcgccctgatgttggccggaggccgcatgacttatgtccagcgggcctattga

SEQ ID NO: 331590 - DNA, 1275 bp, Pseudomonas aeruginosa
atgtccggcccagcccaaagcaatctggagcaggtcttcgccgacgtcgcgagcaattaccgtggtgccgatatcgatctgcacgcggtatatcgcgagatgcgcgagaaatccccggttctcccggagaacttcatggcccgcctgggggtgccgtcgattgccgggctcgatccggatcgcccggtcttcaccctgttcaagtacgacgacgtcatggcggtgatgcgggatgcgagcaactacaccagcggtttcatcgccgagggactgggtgcgttcttcgatggcctgatcctcacggcgatggacggcgatgcgcacaagagcatgcgtaccctgctgcagccggtgttcatgcccgagacggtcaaccgttggaaggaaaccaagatcgaccgggtcatccgcgaggaatacctgcaacccatggtggccagcaagaaggccgacatcatggagttcgccctgtattttcccatccgcgtgatctactcgctgatcggctttcccgaggatcgccccgaggaaatcgagcagtacgccgcctgggcgctggccatcctggccggtccccaggtcgatccggaaaaggccgcggccgcgcgcggcgcggcgatggaggccgcgcaggcactctacgacgtggtcaaagtggtggtggcgcaacgccgcgccgagggcgcgacgggcgatgacctgatcagccggctgatcagcgccgagtacgaggggcgctcgcttgacgaccacgagatcgccaccttcgtccgctcgctgctgccggcggccagcgagaccaccacgcgcacgttcggtacgctgctgacactgctgctggagcgcccggagttgctggcgcgcattcgtgccgaccgcagcctggtgaacaaggccatcgacgaagcggtgcgctacgagccggttgccaccttcaaggtgcgccagactgccaaggacgtggtaatccgtggcgtgagcattcccaagggggcgatggtctcgtgcattgtctcctcggccaaccgcgacgaggacgctttcgagaatgccgacaccttcgacatcgaccgccgcgccaagccgtcgttcggtttcggttttggtccgcacatgtgcatcggccagttcgtcgccaagaccgagatcaactgcgcgctcaatgccgtcctcgacctgatgccgaacattcggctcgatccggacaaaccggcaccggaaatcatcggtgcgcagctgcgtggcccgcaccaggtgcatgtgatctgggattga

SEQ ID NO: 331591 - DNA, 1308 bp, Pseudomonas aeruginosa
atgaaaattgaagatctgattctcgtcagtgtcgatgaccacgcgatcgagccgccaaatgccttcgctcgccacatgccggagcgcttcaaggggcgcgagcctcatgtcgtcaagcgcggcgagcgtgacgtctgggtgttcgaggagcaggccacgggctacatgggtctcaattccgtagtcggccggcccaaggaagagtacggaatggagccgctgggctacgagcagatgcgccgcggtacctggagcatcaaggatcgtgtcgatgacatgaacgccaacggtgtcctcggctcgctatgcttcccgacgttccccggtttcgccggccagcgcttccagaatcactcggaccgcgccgtgtccctggcggcgatccaggcctacaacgactggcacctgcacgactggtgcaacgccgcgccgggtcgtttcattccgctgatgctggtgccctggtgggacatgcaggccgccgccgccgaagtcgagcgtctggccaggcagggcgtgcacgccgtgtcgttgtccgacaatccggcgatccatggcttcccgtcgatccacagcgactactgggatccactgtggaaagcctgcgccgacaacaacgtggtgatctgctgccacatcggcaccggggtcaaggccgaacacgcttccgacctgtcgccgatcgacgcctggatcacctcgatgccgatttccatcgccaactcggcggccgactggatctgggcgccgatgtggaagaaattccccaacctgcgcatggccctgtccgaaggcagcatcggctggattccctacctgctggagcgcgccgacttcacccaccgtcaccacaacgcgtggaccaactcgaacttcggcggcaagatgcccagcgacatcttccacaagcacttcatcacctgcttcatcgaagacaacttcggtctgcagaatctgaggttcatgaacgaagacatggtcacctgggaaagcgattacccgcactccgactgcacctggccgcattcgccggagacggcctgggaaggcctgcagaacctacccagagagaccatcgacaaggtcacccacctcaacgccatgcgcgagttttcctacgacccgttcgccatcctcggtcgcgagaactgcacggtcggcgccctgcgcgcccaggccgctcacgtgaagaccgaaccggccctgggcctcggcggcgccgatcatggcggtgtcgctggcaaaccggtgacttccggcgacatcaacgcgatgttcgagaaggcggatgccggcactgcgctctga

SEQ ID NO: 331592 - DNA, 1149 bp, Pseudomonas aeruginosa
atgtctatcgctcaatttacgtatagcaggatccctgccgaggcggagctgctacgccgcgaggtgcgggaattcctcaagaaccatctcgccacctacccgtcgctctcccgggcgcagtcctggatgggcttcgatgcggagttcagccgcaagctcggcagccgaggctgggtcggcatggcattgccgaaacagtacggtggtagcgaggctggccctttttcgcgctacgtgatcatcgaggagttgctggccgcgggagcgccggtatccgctcactggatcgctgatcggcagagtgggccgctgatcaatcgatttggcagtgaagcgcagaaagagcgctatctgccgccgatctgccggggcgaaagctacttctgcatcggcatgagcgagccgaactccggttccgacctcgcctcgatcaagacctcggcgcaacgcaacgaggccggctggctgctgaacgggcagaaggtgtggaccaccaacgcgcagcactcgcagttcatgatcgcgctcgtgcgcaccggcgagaaacaggcggcgcgccacgagggcatgtcgcagttcatcgtcgatctcagcctgccaggcgtcaccattcgcccgattcgagacctggccggtggcgagcatttcaacgaagtattcttcgacaacgtccaactgtccgccgatgcgctgatcggcaccgagggcaaggggtgggaccaggtaaccgccgaactggctttcgagcgtagcggccctgagcgtttcctgagctgcatggccttgctgaagaccttgatcgaagccctggggcatagccctgatgccttgcagaaccgcgaaatcggtcgccttacggcgaagctggtgaccttgcgcaacatgtcgttgtcggtcaccgcgcaactggccgtcggcgaacatccgacctgggccgcttcctgcgtcaaggacctgggcaatctgttcgagcaggaaattcccgaggtcgcccaactgctggtggacaccgagccgcgcctgatcggcggcagcgagtatgctcgggttctggcctatctgatgcagatggcgccgtccttctctctgcgcggtggtacccgcgaaatcctgcgtggcatcatcgcgcgcggtctggggttgcgataa

SEQ ID NO: 331593 - DNA, 1071 bp, Pseudomonas aeruginosa
atgcgagaattattcgaatcgaccatagagcgtctgctcggtgacttggccacgtcggagtacgtgctcggatgcgagggcggaacgtggccggcggaactctgggctgccgttgaagaatccgggtttaccctcgccgctatcccggagcccctgggtggggccgacgccggctggtccgacctgtacgtgctggcacgtgctgccgggcgctttgccgcgccgataccgttgggcgaagccctgttgggcaactggctgctgggccaggtcgggctcgaggggcacggcggtgttctcagcattgccgccgatgctcgtctcagcttgcgcggtggcacggtggaaggggtcttacatgacgtcccctggggtcggcatagcgaggccgtggtagccatcgccgaggaagatggcataccgagcgtggtgctccttgcccgtgccgaggcggtcgagcagagcctcggcctgaacgtggccggtgagccgcgtgacgacctgcacttcagttcggcgccggtgctggcctgcgcgcccttgccattgggcattccggccgaggcgctgttgctgggcggcgcgttgctgcgcagcgcgcaaatcgcaggcgcctcgctggcgttgctggagatgacctcctcatacgccagcgagcgctcacagttcgggcgcccgattggcgcttttcaggccatccagcagcagctcgcggttttcgccgagcaggccgtcgctgcgaccatcgccgcagaggctgcctttgtcgagtcggacaagtccctggcctccctcaccattgccgttgccaaggtcagcaccgccgaggcggccagcagtgccgcaagcattgcccactcggtacacggcgccatcggctttacccaggagtattcgttgcacttgctgtcgcggcgcctgtggtcctggcgtagcgaattcggctcggccagcttctggagccagcgtatcggccaactggtttccgctcgcggtggcgagggctattggccgctgctcaccgaacatgccgggcaaactctactgagaatcgagaggcagatgccatga

SEQ ID NO: 331594 - DNA, 801 bp, Pseudomonas aeruginosa
atgagttcctttctgcagatcgggcgcgatggcgccattgtcaccgtacgcatgaaccaccccgaaacacgtaacgccctgacctcgccggagcagatccaggagttcgtcgatctctgtgccgagctgcgccgcgatccgtcggcgcgggtcatggtgctgaccggtaacggcagcgccttctgcgccggtggcaacgtcaaggacatgcgtagccgcgagggcatcttcgccggctcaccctttgagctgcgcaatacctaccgcgatggcatccagcgtattccgctggcgctgtacgagctggacatcccggtgatcgccgcggtcaacggtccggcgatcggcgctggactggacctggcctgcatgtgcgacatccgcctggcttccagctcggccctgttcgccgaaagcttcgtgcgcctgggcatcgttcctggcgatggtggcgcctggctgctgccacgcatcatcggcatccccaaggccagcctgatggcgttcaccggcgacacgatcgatgccgccaaggcactggagtgggggctggtggagcaggtttgcacccatgaaaccctgcagtccgaagcacagtccctggcgcagcgtatcgccagtaacccggggcatgccctgcgtctgtgcaagcgccttctgcgcgagggccagcacatgcgtctcgattcattgctcgagctatccgccgcctaccagtccctggcccatcacaccgaggatcaccaggaagcggttgcggcgttcatggacaagcgcaagccggattatctggatcgttga

SEQ ID NO: 331595 - DNA, 1125 bp, Pseudomonas aeruginosa
atgcgtggcgttttccgtgaagaccacaatatgttccgcgagctggcgcggcgtttcgtcgaccgcgagatcgtaccctacctgcatgagtgggaaaagaacggcatcgtgcccaaggacgtctggctgaaggccggcgagctgggtctgctgtgctccgccgtgccggaagagtatggcggctccggtggcgattatggtcactcggcggtgatgatcgaggaactggcgcgggccaacgccaccgccgtgggtttcaccacccactcggaaatcgtcgcgcactacatcctcgcctacggcagtgaggagcagaaacagaagtggctgccgcgcatggtcagcggcgagctgatcgcggtgattgccatgagcgagccgggcatcggcagcgacctgcgttcgatgcgcaccctggcgcgtcgcgatggcgacgactacatcgtttccgggcagaagaccttcatcaccaatggcggtaacgccgggttgatggtcaccgctaccaagctcgatccggcggccaaggaactgacgctgatctgtatcgaagaagagcgccaaggcttctccaagggacgcctgctggaaaagatcggcctcaaggggcaggacaccgccgagctgttcttcgacgaggtgcgggttccggccagcaaccgcctgggcgaggaggggcagggcttcaagtacctgacccaccagttggcctgggagcgcctgatcatcgccatccgtgcggcgcagtcgatccataccctgctggaggaaaccatcgagtacacccgcgagcgcaaggtgttcggcaagccggtgctggattttcagaacacccgcttcaaactggccgaggccaaggcccaggcgaccatgctgcgggtattcgtcgacgattgcttggccaaggtgatgcgcggcgagctgtcggcggatgtagcggcgatggccaaactgctcggttcggaaatgcagggcaagctgctcgacgagttcctccagttgcatggcggctacggtttcatgagcgagtacaagatcagtcgcgcctgggtcgatgcgcgggtcgcacgcatctatggcgggacctcggaaatcatgaaggaaatcatcggtcggacgctttga

SEQ ID NO: 331596 - DNA, 936 bp, Pseudomonas aeruginosa
atgcagagcttgcgcaatctcctgcttttgggtggcctgccattcgcggcagccaccctccgggccgtcgttgggcgacgtgaaaaatcgctcgtggcggttttctgtaccctgctgtccttcagcgccctggcccaggatgacgagtacgcgagggaggccgagcgcgccgccaacctgctggacaaggccgtggcctattaccgggaaaagggcgaggccgccctggcggccttcagccggcagggcgagttcgtcgataacgagctttacgtctatgtcgtggatacccacggcgtgatgctggccagtggcggttcgtcggtcagcctgatcggtcacaacgtcagcaacgtgctgggtgacgagttgaacaggttcttcaccgaggccctggcgcagccggaaaccgatgagatgcgtcagggtgaataccgctggctgaactggagcgatggcaaggtccagcgcaagcgggtgttctaccggcgggtgggcgagcggatctttgccgtcgggttctatatgccgcgctccagcaaggaggaagccgttgccctgctggatcgagtcagtgcggcggttcgcgtcgatccggagggtactttcgagcggatcaacagccagcgtccggatttcgcccaggatgacctgtatgtgttcgtcgtcgacctggccagggagaagttcattgcccatggctacaaccggcgcctggtcgggtctgccttcggcacgacgctttcgctcgatcaacaaccgaccggccggcagatgctggaggcgttgaacagcggcgggaaccagggggaccggctgttccgctaccagtggagcaacccggccaccggtcgtgtcgagctgaagaacacgctggttcgcaaggtcggtgactatggggtggcagtcggttactacctgcgtcccacgccttga

SEQ ID NO: 331597 - DNA, 915 bp, Pseudomonas aeruginosa
atgtcgcgacgtatcgcgatctacctgctgcccattctggccgccctgatctgggcaggcagcaccgtagtcaaccgtctggcggtcggtgtcatcgagcctgcggcgatttccttctaccgctggctactggccttgctcgtgctcacgccctggctgttgcccaggatctggcgacagcggcggctgatccgccggcatttctggcaattgttcgtcctgggcgtactgggcatggccctgtaccagtcgctggcctattttgccgcgcacacggtttccgccacctcgatggggctgattctcggcaccatgcccctgctgaccacgctgctggcgttgccgttgatgggagtgcagccgagccgttccgtctggctgggctgcctgctgtcgttctgcggcctgatcctgctgatcagtgccgggcatccgagtcgtctgtggcgtgaaggggtggggctgggccagttcctcatgctcatggcgtcgctgtcctatgcgatctactgcctgctgctcaagcgctggcaactgccgatagcgacctgggagtcgctctacatgcagatattatgtggcctgctggtgctgttaccggccttcctgctgagcccttcgcagcaactgaccgcgcagaacctgccgctggtgatctacgccggcctgttcgcctcggcgctggctcccgggctgtggaaccatgccctggcggtgatcggcgccgagagggtcgccgtgttcatgaacctcacgccgctgttcaccggcctgttggcagtcgtgctgctgggggaggcgctgcatggctatcacgccatcggcggcggcctgatcctggtcgggatcgccgtggtgcaggggttgctgccgctatcgcgcagagcgatcaggggcgccggtctcaggggctga

SEQ ID NO: 331598 - DNA, 1020 bp, Pseudomonas aeruginosa
gtgctgatcgatattcatgcccatctggtgacgaaaggaatgttgaaccgtcacgaattctggggaccgttcatgaagaccagcgggtttaccgtcggccacttttccctgggcaccaagcagccatccaaggcacgcaacgacgcggaggccgaggccaacctgctggcccgcatgacccacgaaagccgacgccaactgatggccgagcgtggcgtggacaagctggtgctgtccgccccctcgcatgccttcatgtactgggccggtgagttcggcagcgaatacgcgcgcatctgcaacgacgaaatgtccgcctactgccgccaggacccacagcacttcgacttctggtgccatgccaacctggccgagccagaggccgcggtgcaggagatcgagcgcgccgtcacgcagttgggcgccaagggcgtatgcgtcggcggcaccaatttcaacggtatcgagacccatgacgaacgcctgtttccggtctgggagaagatcgagaaactggacgtaccgatcatggtacacggcttcaaccagtccatttactggggtgagaagcacaccgacgacaagttcgagaccacctcgatcgtcggcgactgcgtcgatgaaacactgttcttctggtacctgatctgcggcggcgcgctggacgcgttccccaggctcaaggcctacatcacccatgctggcggcatggcggtattccagctaggccgcctcagcgagctgaaccaggccatggcaccggacgcccgcaaccgcaagccgctgatggactacttggagaatttctacttcgacctcgacgttcatgcccccggcctgcgccgtggcgtggtggaagtggtcggggtggaccgactggtctacggcaccaacttcggcggtgcctacgcccatggcgacctcaccgagaacctgggcctgaacgacgaagaccgggaaaagatccgcagcggcaacgccatccgcctactcaagctggatacccctggcatgcactga

SEQ ID NO: 331599 - DNA, 840 bp, Pseudomonas aeruginosa
atgagcaagacatggttcgttacgggggcttcccgtggcatcggcgcggaaatcgtcaaggccgcgttggcggctggcgacaacgtggtcgcgacaggacgtgacctggcccgcctcgaacggttgttcgcgccgtatggcgatcgcgtgctgtcgctgcaactggacgtcgccaaggaaaatcaggcattcgcagcggtcgaggctgcggtgcggcatttcgggcgcatcgacgttgcggtgaacaacgcgggctatgggcaactgggccccttcgaggagaacgacgccgaggcggccgagcggcagttcgcaaccaacgtattcggtgtattccacgtgtgccgcgcggtgctgccggtaatgcgccggcagcgtgccgggcacatcttcaatgtctcgtcgatcgccggtgtggccggtatgggcggcgccgcgttgtattgctcggcgaagttcgcagtggaaggtttctcggaatcgctcgcccaggaggtagcgcagtttggcatccacgtcaccatcgtcgagccaggggcgttccgtaccgatttcctcgacggtagctcggccgcccaaggcggcaggggcctggaggattacgcggagttcagcaagaaaatcaaggcttcctcgcaagccaacaaccacaagcaactcggcgatcccaccagactgggtgcggtgctggtgcgtttggccgctgaaggcaagccgccgctgcgttatctggccggttccgacgccctgcaggtagtgaccggcaagctggcggccatgagccgggagatcgaacagtggcgcgatcaatcggtattgaccgacggggactttagctga

SEQ ID NO: 331600 - DNA, 786 bp, Pseudomonas aeruginosa
ttggcgcacgacaataataagaaaagccgcttgctggactgcctgttgatcctgatgatattggcctgctccaggggagaagcgctggctgcgctgagccgtcaggaactccaggaaacgcgaactctggcgacaatgacgacggtcaatgcgctgctctactacaacctcaacggcatcccctatgaggccgagaatctagaagccttcacctacaacctgaaccggctgcacgagctgtccgcacgagctggtgataccgtgctcgccgaacaggtcagactgctcggcgacgcggttgcccagcttgagcaactgccgcagagcaccgccgatgcgcgctcggtgtggcccgcctacacacgctggttgccaggtgtcatcgaagcgcatttccgcctggagaaatcgctgagtgaccgctatgacgcgacacccggggtagcgcaacagagcgggctgcatgggctcagccacgatatagggcggatgctgctgtcctatcagatggcgtccttcccgaatttcggcggtgatctctggattctcgacgatcgggtgctcatcgcgctgaatgccgatatagagcggcgctttgccgagttggctgagcgaaatggcactgaggcgctgaaagccccactcaggaactatcgtttcgtgcgccatcacctgctcgatcctgccggtaattgggctccgaatgcggtagcgctctatctggcgaaagccatgcgcgccctggatagcgaggcactcgccatgggcgacagtgcgcaggagtga

SEQ ID NO: 331601 - DNA, 375 bp, Pseudomonas aeruginosa
atgttcagccacgtcactctgggcaccaatgacctggaaaaaacccgtgctttctacaatgcagtattgcccccgctggggtacggcaacgtagccaataaggacaatgcctcggtctggagtggcgcgggggctcgtttcgtcgtgctgacgcctgccgatggcgatgcagccactgtcggtaatggcgtgactataggttttgtggcgccgagccgtgccgcggtgaatgagttccacaggctggccctgctggccgggggaaccgatgccggcgcccctgggctccgtgattatgggcctaatgtctatgcggcgtatgtacgcgacctcgaaggacacaagatcgtcgttagctgcatgagtgtcgagtga

SEQ ID NO: 331602 - DNA, 171 bp, Pseudomonas aeruginosa
atgcccacagaaaacaaaatcgactacccggcactgcagaagcgcagcgccggctatgcatgggtcaacgatgaaaataccctccggtctgcaggcagcaaatccgatccctacgccgtattcgagaagatactgggccgcggcaaccctcctgatgactggatgcgctga

SEQ ID NO: 331603 - DNA, 195 bp, Pseudomonas aeruginosa
atgaagatcatcgatggaaagttcatattcgaagttggcgaccctgtgatcgaccatgccgacactaagcggcgggtaggtctgatcatcgttatcgaagaggatgagagcggcgagaaggttcttgttgttgaggctgaaggtcatcctgggcagatatggcgcatcctggataaggacgcgaccctgccctaa

SEQ ID NO: 331604 - DNA, 204 bp, Pseudomonas aeruginosa
atgcccacagaaaaccgatccggcaacacctaccgacacacattcgccgcgacctgccccagcgacggggatgtgatcatgtacagcctggagatccgcagccagacgatgatccgcgtcgagcacatcaagaccgccaccgcgctgatcaagcatgggaagaaaggtggccaggtcgatgtggacggctatacccgctgctga

SEQ ID NO: 331605 - DNA, 717 bp, Pseudomonas aeruginosa
gtgtttgaagtaatgttcaaagcaaaagttgatgagttaaggtctcttttttctgcaacgaaggacgttagtcataatggggagaaaggaggtttcagggaggcgtttgtggtcagcttgttacaacaatttcttcctgcacactatgggctgggctctggtgttgtagtggataaatgggggcggcaaagcccacaagtggatatcgtgatttttgataggcgaacgcttcctccaatatttgagagaggttcgagaggcatatatccaatggattcggtgcttcgggtggtggaagttaagagtgtcgtaaatggagcgtcacttgatcagttcgctaaactggtgtctgcccttgatccaaaaaatcctgagggcttaaaaatggcgagcaaaggcaagcttgatgatggtctcagctattatccggtttgcgctctatttggatttgaatcagttcttggtgatttggctaaaaaaatttctgagcacgaaattctgaagcataagaataaccccatttacttggatgatgggcaggtgtgtggggtaaaatttgaggaggggcactttttgcatggttatcgctgcctaaatataaagggtgataattatgctttgcgaatatttatcggagttctattcgatgaaattgaggctacggcaaactctagaagtgactataagccgatggattggctgataggcgcctcctga

SEQ ID NO: 331606 - DNA, 2412 bp, Pseudomonas aeruginosa
atgatcacattgagcaaggtgacgctaaaaaacttcaagatctacggaggtgagcctttcacggtcaacttcgaaaacaatcgcttggttctgctggacggcccgaatgggtatggaaaaacaacagtattcgacgccattgaactggccattactggtagccttcgcaggctgattgtgctcgaaagtcggcaaaatcctgctgacattgttgtagcccataatgggcagagcgacgttgagatcaccatcgaatttcttgatgaagacggcgaaagacgaacctttctgcgaaagctcaagcgagacatcgcaaactcagcgaggcgtatcggcaatttttctgctctatgggaaatccatgagattgttaaatctcaagcgaaacctgtggacaacaaggagttcgaccaactcttcaatagcaaggattttgcgcgcgacttcctattatttcattacattgagcaagaagatacgtctcgattcctcaagtcaaataacgaggcacagcgcgctgaaaaactggccaatctatttggggatacttatgagtcagagcaaaaacttcaaaagcttacagatgtaaaaaggaaaatctttacagcgcgacgagacatcaataccaagatagaaaacattcgtagcctgcacaacctggaggccatcaatgatctatctacaggagaaacggagcaacatgtctatgccttgccttggctgacgggcgagaagtcaccgttctgggatcgccccacaattgcccagctcaacgaagatcgcatgaccaaagcgattgctgaactgcaaaaaatatccgccctatttactcatagagacttcttcctgcgctcacgctggtatcagcgggcagcacaagagcgtgaactcatcgagcagtacgtgggctatgcaggcacttaccaacattaccatcaaatcgaaatagaccatggcatctatcaatatatcaagcggtcacgtgacatactcaacagcggtgactttaaagtcatacagcaaaacctagaagcagctaaactttttcagatgctgaacgtcgagttccctgatgcattcatcaacgaagtaacctcactgatcggccttacagataaattcaggggactgacgtccatttacactgaattgatgaagcatcacacggctatgcatgaaagcatgcaggcacatccgacagagaccacgtgcggtctttgtggccatgactatgcaactcatgacgcattggacaaagcgattactgaccatgggcatcttttgcgcagccagttgggcgaccaagaccgggagttggttacagcgcgggaaaaattcgaaaacaatcaactcaagccactgctcaaggcgtgcgacgatttcctacagctgcgggagccaccgtcgcaagaagaattgtcgagaattgcaaaagcggcggccaacaaagaccgagtggaacgcctacgtggttggctggaaagcgaagatatttctgacctagatctcattgcacccgcattccctgtaacaggcggacaaacctatatttcagagaaagctgacttgctgtctgaaagaatccgaggacaaatcggcgcaccccctgacggttacacggaatcattcagtactgatatttacgaacgtgtttatttagattactttcaacgtgaaagtgaaaagcttcgcagctacgatatagctcagcttgatcgaaaagagagattcattaagtctcaatatttcagctctctcactgaagtagcagcgcaactccttaaactcgacgagcagaaagcgctccttgaagtggcattgaccgaaacaggcgaactaatagctgtcgttggaaaccaaataggtcaatatcgaaaaaaacttatcaccgacattgagatcccattctttatatattcgggtaaaatccttcaaagccatcaagcgggtaaaggccaaggggtattcatcaaagacccccaaggcgatgacgtgcttaaaaacgtgcgtttggtgtcagattggacgacagaccacgacattataaacaccatgagctctggccaaatctcagcggtggtcatcgctctcacccttgccctaaaccgtgtctatgcccggcgattctctactatactcatagatgacccagttcagacaatggacgacatcaacatgtcgtcgcttgtagaacttctgcgcaatgattttagtgacaaacaaatcatcatgtccacgcatgaagataaggttgcgcgatactttacatacaagtacatcaagcacagtggaaaggtgaaaatcatcaatcttatgcagcgcaaagagtatgagccgaccaacagctatgtgtaccgtgcgctcgtgaaacctccaacgtctaaccagagcccgcaaccgaggcgagactga

SEQ ID NO: 331607 - DNA, 705 bp, Pseudomonas aeruginosa
atgataacaatcctcaacaatatcatggcaagcaaccggttcacgccagtggatgtcaacctgcccaaccaatattttgaattcagcttgtataaggccgagagccgccacagagaagagtacttcttaaccgtccagcttgacaataacagtgaccaagcgcttaaaaacttccttgacaatactgcgcaagagatatttgaagagatccaaagcacaggtaaagttgaactgtactttgagaaaaactgcaccatgttaatttgcctagagtcccatggcctgaatcatgacttggtgctagccctcgaagaagacccttataatttcaaaaagaatgttatcaaatactccttacccgaactgacggcacttaatgtttacctgaccagcaacgccattgaggcgctcacgaacgacatcattaacgatatcttaaacgccaataacgggaaggattttctggcgttcaaataccagagtggaaatggacaccatttatatgaccttgtcgtacgggtcatgctgaagctttccttcctgtcttaccacccccaagagcaaaaattagaaaacctcacaggacagatcgactcagccctaccagccgcattaaccgatacgtttgaaaaaattctggcagcagactgggcagtcgagatggtcatcgggaacgtcgaatcgatctggggaaataaagcatga

SEQ ID NO: 331608 - DNA, 1434 bp, Pseudomonas aeruginosa
atggctttcgatgcttcaccctcctggagcggtttcaactaccagggcaaagtcgctctccattacgcgctgacgttaattaatgctcagccagtcaatcacgatttttcaacaaccgatttgatgctcgaagccaacgaggacttcgagatcttggtcaatgggaactccgtctcattccaccaagttaaagcatacaattccagtacatttgaagaatactcagatgctctatttggtctcacaatagagctagacaaaagagccggcgtatcgggctatattcatacctggaaaaaaatcaatgaccgccctgggtttataggcctgttggaatcggtaaaaaacgacttcagcaaagttctcaaagaatatagagacagcgagcctaagacgggggtaacgattcttgaaaccgctgctgcaggtggaaacaacctcaagaaaaaagcgtccattctaaaagcatcactcccaggcttcgatgccgacgcgctagctgagactatcgatagcatagtcatacaagaaagtgacgcactggctcgcctggcgagctacgtttatgaggatggcaacgctttttgcgacctcagcgacatcaacaacaaaataaaaaatcaactttcaatcgcgctagcaagccgagaaattgaaataactgatgagcagctggagaaagcattcgattacttcctaggcgtcatcgacaactatattattgaacgccacaagacaaaaacagacgcactcgccagaccgataaaattcgaagaaataatcagcatccttaactttgaccatgaggacgtgagcaaacactacatcgcctgtcggttcaaggatcgcttttctcgattaatcgatgactacctgagtgacgaagacgactatccgcacccagccccagaactttgcaatttaaaggctgcgcagaagctgctcctgtcgcttccccctttggaactatgggagcactacaggcacttttcgccgcagcttcatttggacagtggaaacaatactgacaacgctttcagcgcatctgatgatggtattcgtcactgcctattgaaaatcctacacgaaatagatttttcacgtttagcgcaagaggcggagcgctttagattttcatacagatgcgccacgactccaccacaaggttatctcccgactaccataatgcccgttggcaggatcagctatacgatccgacaactcagcacaaatccatgccttggcgagctactctacgagattcctaatctcatatattgcggtacagaggtgcatcccttctcaccggattccgacaaaagcaccaccgtgccaagggcggcagcggaggatacgcgtgccaagcgtgacgatatattgccgttaattaacctcctccctctagaacaagctaaaggtgtgcttgcaaaatga

SEQ ID NO: 331609 - DNA, 441 bp, Pseudomonas aeruginosa
atgctctgcgacgctaacggaacaccgctgcgctttctcctctctggcggtcaagccagtgacatcagctacgcacaaccactgttggacgaggtcagcattccatcgagccaacgtggtcgcccgtgcaagcgctgcaaatggctgcttgccgacaagggctatgatgccgaagtgctacgccgctactgcgaccaatatcgaatgcaacccgtcatcccgctgcgctcgatgaagcgcaagcccaagcctggccaatcgagactgtttgaccggcccaaataccgacagcgcaacatcatcgagcgcatgtttggctggctgaaagagaatcgccgtatcgtgacccgcttcgacaagctcgcgaaaagttatgccgccatggtctcgctggcttgttccatgcggtgtttgcgacatctcttttcgtacagagcctag

SEQ ID NO: 331610 - DNA, 1497 bp, Pseudomonas aeruginosa
atgtccaatgacaacgaagtacctggttccatggttattgtcgcacaaggtccagacgatcaatacgcatacgaggttccccctatcgatagcgcggccgttgccgggaatatgtttggcgacttaattcaaagagacatatatctacagaaaaacatttattatccagtccgatctatttttgaacaaggaacaaaagaaaagaaggagatcaacaagaaagtatctgatcaagtcgatggcttgctaaagcagatcactcaaggaaaaagggaggccacaaggcaagagcgagtcgatgtcatgtcggcagtcctgcacaagatggaatctgatcttgaaggatacaaaaagacctttaccaaaggcccattcattgactacgaaaagcagtcaagcctctccatctatgaggcctgggtcaagatctgggagaagaactcttgggaagaaagaaagaagtacccttttcagcagcttgttagagatgaactggagcgggcggttgcctactacaaacaagattcactctctgaagcggtaaaagtgctaagacaggagctcaacaagcaaaaagcactaaaggaaaaagaggacctctctcaactggagcgggactacagaacccgaaaggcgaatctcgagatgaaagtacaatccgagcttgatcaagcgggaagtgctttgcctccattggtcagtccaacgccagagcaatggcttgaacgtgccacaagactggttacgcaagcaattgctgataaaaagcagctgcagaccacaaacaatactcttatcaagaattccccaacccctctagaaaagcagaaagccatctacaatggtgagctacttgtggatgagatagccagtctacaggcccgcttagttaagctgaacgccgaaacgacacgacgcaggacagaagcagaacgcaaggcggccgaggaacaagcgttgcaagatgctattaaatttactgccgacttttataaggaagtaactgagaaatttggcgcacgaacatcggagatggcgcgccaactggccgaaggcgccagggggaaaaatatcaggagttcggcggaagcaatcaagtcgtttgaaaagcacaaggatgcgttaaataaaaaacttagccttaaagataggcaagccattgccaaagcctttgattctctagacaagcagatgatggcgaagagccttgagaaatttagcaaaggctttggagttgtaggcaaagctattgacgccgccagcctgtaccaagagttcaagatatctacggaaaccggggactggaaaccattctttgtaaaaattgaaacactagctgctggtgcggccgccagttggcttgtgggtattgcatttgccacggcaacagccactcctataggcattctggggttcgcactggtaatggcagttaccggggcgatgattgacgaagaccttctagaaaaagcaaacaatcttgtaatatccatttaa

SEQ ID NO: 331611 - DNA, 264 bp, Pseudomonas aeruginosa
gtgaaaaagcgttttaccgaagagcagattctcgacttcctcaagcaggcggaggccggtgtaccggtgaaggaactgtgtcgccgacacggcttcagtgatgcctcgttctacacctggcgggccaagtttggcggtatgaccgtggcggacgccaaacggttgaaggatcttgaactggaaaatagccgattgaagaagttgctcgccgaggcccacctcgacatcgagtcgctgaaagtggtcgctcggggaaaagggtaa

SEQ ID NO: 331612 - DNA, 843 bp, Pseudomonas aeruginosa
atgcaggcgcgaaccggcatctccgagcgtcgtgcctgtcagttgatcgggctgtcccgctcggtgttgcgctaccagccgcgagccagtgtgcaaaacaccgagctgcaagcccaactggtggaactggcccaagagcgccggcgctttggctatcgccgcctgcacatcctgctgcggcgtgctggcgtgcaggtcaaccacaagcggatctatcgcctgtaccgcgctgccggcttgatggtgaaacggcggcgccgccgccatggcatcgcggtggagcgcgaacgtctgagtttgccgagcgcaccaaaccaggtctggtcgatggacttcgtcttcgatgcactgagcaccgggcggcggatcaaatgcctgacggtggtcgatgacttcaccaaggagtcggtcggcatcctggtggagcacggtatcagcggctttcgcgtcacacgggcgctggacgagatggcgcggtttcgcggctacccgaaagcgatccgcaccgaccaggggcccgagttcaccggcaaggcactcgatcaatgggcctatcagcgcgacatcaagctgaagctgattcagcctggtaagcccacgcagaatgccttcatcgagtcgttcaacggtaagttccgggacgaatgcctcaatgagcactggttctgttcgctggccgaagcgagaatccgcatcgcggcctggcggcgggattacaacgaacaccgaccgcacagcgcgattggcaatctcgccccggcagaatttgctgcaagttggcgaactcgccagcagcagctgaagcaggaaaaattaatatcaaccccagggcctactaactag

SEQ ID NO: 331613 - DNA, 612 bp, Pseudomonas aeruginosa
gtgtccatttccatgaaaagcattctggctgccgcagtagccagcctggtcgtcggcaatgccatggcggcagacggcaccatcaatttcaaaggtgaaatcaccgcggccgcttgcagcatcactggtggtgccggcaccaccgttggcggtgcagcgggcaaccagaccatcgacgtaagcctcggcaagatcagcatcgactcgctgggcggcaccgcgggcggcagcatcgctggtggtaccagcctgaacctgaacctggactgtggcaagaccggtaccggcctgaccaccgtcaagctgaagttcaacccgatgtctgggagcactattgacccgaacaatgagagcctgctgaaaaccgtcggcaccgccaccggtgtcggcatcggtatctatggatccgatggcaagctgctgaacctgtcggcgaacgagaccatcgatgcgcccctggattccaaggtacaaaaagatggcgaaggcaatgacatcactgtctacagtgccaagctgaatctgcgtgccgcttatgtcaaatccggctccgtagctcctacggctggtagtgccaacggctccctgccgttcaccctggaatacaactaa

SEQ ID NO: 331614 - DNA, 159 bp, Pseudomonas aeruginosa
atgaacgagccgggcagtttcatctggacgtggtacgggcaggatgagcatcgatgggtcctgctcagcgcagaggcgttcctggcgctcgatttcctggcccttgacggtgccatgcagagagagaccatcggcagttgcccgggctgctctacctga

SEQ ID NO: 331615 - DNA, 1203 bp, Pseudomonas aeruginosa
atgaaacgagctttagaaaaccggatcggcaaagtggaatatttatctgaaatcctgaagatcctagatggggccttgaaagccaacgcaagcatggcatcgaattatgccggcttactggccgacaagcttgatagcgatggagcatcgcggcaagcacgtatgattcgtgagcgtttggcgcgcgcccctgcggccttggctacagcccaagatgcttcccgtggcgttagcctcactcagcttccggtggacggtgaaagtagacttcataccgtcgatgtgagccgaccgagcgcaagcgagttttctctgcaccttcccagtgcccttcatgagcgtattgttgagtttctggaaaacgttgagcattacgatgctctggccaaagttggagccgcgttaccgagccggctcctaacttacgggccgccgggcaccggcaaaacgatgcttgctaggcacatagcttcaaaactggacttaccgttgctgacagttcggtgcgataccttggtgagtagcctgcttggtcagactagtcgcaatctgcgccgggtttttgagtattcccagcagatgccgtgtgtgctgctcctagatgagtttgatgccttggccggggcaaggggcaacgaacgagatgtgggagagttgcagcgtgtggtaattgcccttctgcaaaatatagatgctttaccggaaagcacgattctcattgcagcaacaaatcatgaccagttgctggatccagccatctggcgacgcttcagctttaggatcccgatgccggttcctgatgcagtgttgcgagaatttctttggcaccaattcttgggcagctatcgaccagcaagcctggatattgcctctttggtacaagcgtcagagggcctcacgggtgcaatgattgagcaggtctgcatcgacaccaagcgccacgctgtaattcttggtgcggctgaggtggatgagacccaattgttccggaaattgggtctgttgattgcacttcttgatggtattttcttaagcacctctgaagcagaaattacttggttgagaaagtggaaccccaagcaattttcgctgagaaatctcgccaagacgtacaaagtctctacacggtacgtatcgaaccttacaaaggagaaggaattcagtggctcggaaaaagggattggcagcacgagaaatagctag

SEQ ID NO: 331616 - DNA, 2280 bp, Pseudomonas aeruginosa
gtggctcggaaaaagggattggcagcacgagaaatagctagcgcaagcgtaaacaaccccttccagcatgttcccttttctgagggagatcttggctcgtatgaccggagcgggggcggcggagggaagattcttgtcgatgtgaccgctgagtatcgtcagtcactgattgagaacatcacctcagcggcagcagttttagccccagagggggttaaacatccaggctaccttttgactcttgttttcaagctgagagaaacaggagttgccaagtcccaccgcccaaccacgctggcagaggaagctggtcttctgacagctggacatggaaatatcgacgagatgctggttggcgtggatgcagcgcgtatcgctgagttgaatcgggtcattaggacgagaacaactaaagctattgaggctaacctcagcgctatccagaagatcgagccttgggggcgagacaggagggttccagagggcgcgcctacccttcgagagaggggacgcgcactcgtgcgcttattccggtacggccaggaagccttttcccagcataactatgagagcgttcttgccatgctcaagaagctcaacattccataccgtcaactttttcgatcccgcggactaccgctgttttcattgttggatctggacaaggtaagtgatgaagccttcggcttgctgctcgactacccaggtgcacgtcagatcatcgcggaaccgattttcaagccattcacaacgcatgcagcctcctcagctgaaagcacgagctctgcagtagctggtcttcctgcggcatcctctattccaactgtcgccgttttcgactccggtgttagcgccggtgccaaagcactatctggatggattgagggaagagacctctacgtactacctccggataccaattacgagcatggcacgatggtcgcctcgctcgtaatcgattctcgccattttaatgacgggcacgattggttcccgccgctacagaccaaggtctacgacgtgtgtgctttagagaccggaggctcgtacatgagcgacctggaggagcggttgcgcagcgcacttaaaaagcgccccgacatcaaggtctggaacatatcgattggcggaaacccatgcgacgagcacctattcagcgacttcgcgcacacactcgataagcttagtgacgagtacaacgtgctgttcgttgtagccgcgggcaactataacattgagccaagacggagctggccgaactctgccccgctaaaggatcgcatctcgacacccagcgagtccgttcgggctctgactgtcgcctcaatcactcatattcatgcgaccgacgcgcataccttgataggccaacctaccccgtattcgcgacgcgggcctgggccggtgtttacccctaagccagatatcactcatgttggcggtggcgtacatcttccttggaagagcggagcaagtagcatcaaggtggtcactcctgatgacaagctcacggcgagattcggcaccagctttgcggcgccgattgcatcgagcatggccgctcacgcctggcaggctgtcgagggacaccctcatctgagcgccgacccctcgatggtcaaagcgttgatgatccatgccgcgcaactcgcctcgcctgactacgaccgtagtgaacgtcggtatcttggagccgggcgaccagacgacgtcattcgtacgctttatgacagcgacgacagtttcacgctggtcttccaggcaaaggttgctccgagcatgagatggcgcaagtccccctatcccatcccgaaagccctaatgcacgatggcaagttccggggcgaaatcatcatcactgccgcctacgcccctcctctcgacccaaattggggtagtgagtatgtacgggccaacattgagctcagttttggtgtgctcaatggcgagcggatatcgggacgcgtcccgatggagggcgaagcgggacagagtggctatgagactgctcaggtcgaacagggagggaaatggtcgcccattaaagttcaccgcaggagttttcctgaagggactgcgggagatatctgggcgctgcaagcatccgttttcctgcgcgctttcgagccgcgcctagaagaggcactgccagttacggtaattgttacgttacgctcgcttgatggtgaaacgaatgttcacgcagatggccttcgcgcattgggggcaacgaactgggtgcataatactttgccggttcgagttccggttaatgcttag

SEQ ID NO: 331617 - DNA, 930 bp, Pseudomonas aeruginosa
atgataataaatatttcagacgtatgggatgcagccgcagacaaccacaccaaatatctggcagcagtaattgagagcggactgaagctcttaagcaactcaacactggatcgacagatatatcagtttattatagacaacatagagaccatcaacggaggtaccgcctctgatttgaaactctgcatcaacgactacaacctgagatttggtagtggtttgttacgagcatgcgccgcagaaaaactaaagataatatttgactactctgacttctcaaagaaatctggaaagccctggaccgcatacaatctttgcatgctagcgaagtaccaagtctgctcatattgtcaattagtcttcactggcacatgcttacctgatgaagaaaatcaaggatacaggccaccaattgatcattattacggaaaagcagagtatccatttttagcgttgacccttagcaatttcgtcccctgctgtgaaaaatgcaatggcagtcaaatgaaaggaatgatcgacttctctgacattccacatttgaatcctttattggatgaggagactatagatttcgtgctcacaacccaaaacccagacaatgactcatttactgagttaatttctttaagcctaccaaaatccagctatctcctcacgcttagagttaagaaaaatgaagctctatcgaaggcatcgatcagaacctttcaacttaaaagtcgctataaagattattctggccaagcttatcatctagccaaagtcatgcgcggcatgtctgctcgcctggacatgcatcgagaaatattagaatgcgaaacctctattgaagattatttggaattcgaaccagaggactacaagactgtgccttatggcaaggcaagaatctgcatagcaaaacagttcggagcacttccggactag

SEQ ID NO: 331618 - DNA, 1446 bp, Pseudomonas aeruginosa
atgcctgcgattcttggtgtgcgagtcgatgatcaatttattgaattatcctccccggaacttgatagttttggaaaattatttgacatcgacagtataaacttgcttctcggcaagaatggttctggcaagacacgattcttagtagcactggcacgcgccatcacaccatcaacagatgagagagcaagaatatatttcagtaaagaagaaaaaaaaccgttctcctatcgcactctaaaagaaaaatcttgcgccatttactattcagcactgccctataggcgaaagcttaagcgacgtagtgggttaattgacgcctcgcctaccgcaagaaataaaaatgatgccggccgcctactgcgtattggagaagtggcacgagacctaggaatagacacaaaacttactgcttattttgggtactcgcgcaatgtatatcgttcaatacttataccgagactgcatcaggaaactgagataattgaaaaagacctaaaaaaactcatacatacgtattacaaggacaccgacagcaaggagcttacatcaaatagaagcacaagattcattgatcacgaaaaagaggaaatactccatgaaattgaacagcttttagatagagagatcgactccaagcttgggacctacgagcgcatcctttttttgacatcacttgaatatatgcatggacgcacaagagagtttgacgcccctaaagcagccactgcgtttctagattacatcggcctaattagagccaactcatcaaaatataactttgaggatcttgagcacatcgtcgagcgaactagatcagcattaaataactacgctcatcctgaggacttctaccttgacgaacgaacccagtactttcaaattgactcagttctgggcctggaagcgattcgccgacatgaaacgccaataaaaatcgagtggtcaaaccttagctctggcctccaagctttggtagagcaattttcattaatcgacgaggcagtagctcaagcgtcacagcaagggcgttcttctgtgctacttttaattgacgagggtgacgcatatctacacctagattggcagagaaaatacatatcactacttaataagtacctcgccaatgtcaagaaacgccacagactagaaagtctacaactcatactagccactcactccccattgctggccgcagacatccccagcgaatttgtaactaacctcgattcagccacgaggacaaaatcatttgccgcccccttggaggaagtaatagctggatcatttgaatcaaattcgattggagaatttgccgcaagtaaaataaatgaagtttacaagcgggcacagaaatccaagctaaccaaagaagaccgcaaactaatatctgcgattggagacccagcaatacaggcagcgttgagcggagcaacaaaggcatga

SEQ ID NO: 331619 - DNA, 408 bp, Pseudomonas aeruginosa
gtgctgaatatccgcaagccgagccctggagacggccgagaacgccgactgtccgccgacgaagaaaagcgtctgctcgctgcggtgaacaaccacagcaaccccatgctgggctggatcgtccgaatcgccttgaaaacgggcatgaggtcgtcggagataaccggcctacgttgccatcaggtagacctgaaaaagcgcgtagtgcggctcgcagacaccaagaacgatagcgcccgcaccgtccctctcaccaagatggccaccgaaacattcagggccgccctggagaaccccgttcgccccaaagactgcaacctggtgttcttcggtgaaccgggaaaggacgagaaacgtcgcccctatgccttcaccaagacctgggggctgcttgtagtggtctactga

SEQ ID NO: 331620 - DNA, 1593 bp, Pseudomonas aeruginosa
atggctgatgcagcagtagtacagcttcccgcgcagggaaagcagggagaagagccggatggtgccgctgacaaacgcggcgacctgatgcagagaattcgctccaggcaatccaaagagctagttattggtctggccggcgcagtgggttgtaatcttaaagatgtatattcccaacttcgacgtcagttcgagaatttcggctatgatgttcgcctggtaaaaattagcgacatcatcaaagattattacaaaactcatcctattccccctcagctctcgcatattaaggctgaaagccttgattcgctcacgtcctctgcccgttacaaggctctgcaagatctcggaaacgatattcgatctaccattgcaccttatgcattggctactcaggctattcgcacgatttcgcttgagcgcgaaagtcaattggtagctaacggacaagatgagcctccgcgcactgtctatatcgttgatcaactgaagcatcctgccgaagttgctctgtttaagaacgtttatcggaatgtcttttatcttattggcgttttaagccctgaagaagcccgcattagtcagctgaagcaagaagatatggatgctgtggctgctcaggaactggtcgagcgtgacaggaatgagaatgatgattgcgggcagaagcttgaaaaaacaatccagcacgcggacttttttattcgtcatgcattgggtggaatacagtcgctaaccgcgccctgcgagcgattcgtcggtttggtgcatggtaaaaatggtctaacacccaccgtcgatgaggccggtatgtatgctgcctattccgcctcgctaaaatccgcctgcttgagccgtcaagttggggcatctattgctgattcgaaggggaatattgtttctcttggctggaatgatgtgcctaaggctggtgggggattatatggggccgatgatggtgaaggcgatcagcgctgcgtgcataaaggtgggaaatgccagaacgaccaccacaagaatcgattggttgaaaaggtcgtaagtcttattcagaaggagttgaagatcgatgcagagaccgcgcgcggactctctggcaagattatgcagcatactccggtgggatcgctgattgaatattctcgagcagttcatgcggagatggaagcgattctgaatctcgcgagaaagaaaagcgggactaccagcggagctacactgtattcaactacatatccatgccataactgtgcaagacatattatcgcagccggaataatgcgtgtggtttatattgaaccatatgagaaatccttggcaactacccttcactctgatgcggtttctaagaataaatcagacgaccatatggttgtctttgaaaattttgaaggtgtttcgcctaagcgctatgccgccttctttggcggtggctctgatagaaaagatccacatggaacagcccttcacattgtatctcgtgaggctaatttgatctctaccgaactcttggactcgtatatcgatgtagagagcaaggtcgttcaactagctgtggatgagttcgggcatccatacggcggtcaagcctga

SEQ ID NO: 331621 - DNA, 294 bp, Pseudomonas aeruginosa
atgtctgctctcgacttcctcaccgaacgcggtttcgccgcccgcatcagcggcaacaaggtcagcatttcacccggtagccggctcaccgaagaggtccgccagtacgtccgccggcaccgcctcgaactgctcgccgaactgggctcgatggatggcaaaacgcgccgcatgcactgggcgatcacgctgggcggcaagccgctctgcacgatgatcacgccgcccctgacattcgaagaggccctgatcgaagcgcgctggcgctggcccggtgctgggatcactgagtaa

SEQ ID NO: 331622 - DNA, 306 bp, Pseudomonas aeruginosa
gtgatccgctattactgcatccaagtccgcggccaggcgacgttcccctatggcaaggccggcccaatccgcaccttgaccgaggctcgccgcgccctgcgcatgctgcgtcatgacttccccggccaggacctggaggcttacgagtgcgcctggttcctcggcgtgggggagttggagtgggacgagcgattcgcccccaagcgaggtaagcgcaaagccccggcgcccaggcgcgcatccagggcggcggttcagactctcgccctctcccccggcctgaccagcaccgcccaggaggcctaa

SEQ ID NO: 331623 - DNA, 249 bp, Pseudomonas aeruginosa
atgagcattcgtcccctggagcagatcgccgacgacgcggtggaagctgtgagctacggtcgggagcagactcagtggctcgctgctctggcggcggctatcaagcttgacctccggcacggcaaaggcagccatgccgaggccctagccgggctgatggggtacttgtcctacgactgcgcgaattaccttgactgcgaggtcgagcggctgcgcaaagagctcgacgctgcgggaggtgcccagtga

SEQ ID NO: 331624 - DNA, 225 bp, Pseudomonas aeruginosa
atgagcgacctcatccatctccagatcgatccgaagaccagccaccgacaagccctggagcaggctagctgcatcctgggcggtatgagcgatcttctctatgggctcatcgaaggcaccgccttgactggcgacgggtatttctctctggccctgctgagcgatcaggctaaggcattcgtcgatgcggcgctctcggcacaggcgaaggagggtcaggcatga

SEQ ID NO: 331625 - DNA, 234 bp, Pseudomonas aeruginosa
atgcgtaacctggtgacgctctccgactctatcggcggcaacctgaccggcgcgggcttcgccctggaaaccatcgccaacctgctcggcgctgacggttccgagcacttcctcaacaaagaccacatcaacggtctggtccatgcggtcctgacgatctcggtctacgtcaaagacgctggttacgacctgtgtgaggcagccgagattgcccaggaagggggtgcccaatga

SEQ ID NO: 331626 - DNA, 201 bp, Pseudomonas aeruginosa
atgacccaagcagcacccctggcccctctggccgtatcccccgaagacgctggtcgcatgagcggacacgcccgtagcgcgatttacgaagcactggcgagcggccaactgccctcgttcaagtctggtcgccgccgcctgatccttgttactgaactgaacgcatggctgcaccgcctggccaaggagaacgcccgatga

SEQ ID NO: 331627 - DNA, 1215 bp, Pseudomonas aeruginosa
atgaaaaccaagatcaccagtcgaaccctttccacactgaccgccaaagataagccctaccgcatccatgacaccgcccagccaggtctatcgattcgtgtgctgcccagcggacacgccagctacatggtgagttggggaagaaaccaagccgcgaccctcgggcgtgtcggagtcatgacgctggagcaagccagacgggaagcagcacaatacctggctgaagcacatgagcacggagcccccctggcagtgactctgggccggcggtccgcaaactccctaaccctccgcgacttcattgacgatcattactcgccctggatggccaccaacctcaagagcgccgacaagaccctgaacctgctcaatgtcggcttcgcctccatcatgggcaagcgtttaaacgagatcagccagcgcgaccttgaatcgcagcgcatggcctggctgaaggccgggaacaccgacagcacggcgaataggaagatggcttcgatgcgtggggccctgtccagagccatcgagtggggctttctgaccgagcacccgatgacacgcctcaagcagctcaagaccgaccgcaagggccgcatccgttacctgctgcccgacgaagaggctcgcttacgccaagctctggacgaccgccaagagacgatccgcgccgagcgcgacagtgcaaacaagtggcgggaagagcgccacaaagcacgtctacccgacttaagggaagtcgcgtttcccgaccacctcaagcccctggtgctgttatcgctgaataccgggatgcgccgaggcgaagtgtttaacctgacctgggcagacattgacctggagaacaagctaataaccgtcgaaggcgatacttcgaagtcaggacaaacccgacatatcccgatgaataaggaaacggtagcgaccattgagggatggagaaagcaacatccccgcaattccgggtatgtatttcccggcaaagacggcaagcggctggataacgtaaagaagtcttgggatgggcttttgaagctggcgcgaattgagagctttcggtggcatgacttgcgacacacgtttgcgtcgaagctggtgatggccggcgttcccctgaacaccgttcgcgacctgctaggccactcagacctagcaatgacgctgcgttacgcccacctggcaccagatagcaaggcggcagcggtggagcttatctag

SEQ ID NO: 331628 - DNA, 222 bp, Pseudomonas aeruginosa
atggtaaggcaggagcccctcctgccctgcctgcgccgctttccagtgccgaccgccgggaagcctgcggacagccagcgctccgatactgccggcgcatggatggagagacggatagaaggcggtcacttcctgccgcaagcgaaacccaaggactgcggcacggccatgcgggagttcgccgacggactgtcgacgcttaccagccgagggtttccttga

SEQ ID NO: 331629 - DNA, 867 bp, Pseudomonas aeruginosa
atgctcaaggcggcattagcctttataccattgcttgcaggctatttgtttgtgagtacttggcatgagactcgctatttaataaagcgagaggattcccagaagctatattttcgagcagccttttgggggctttggatatttcttctcgctttagctcttacatttagatttacctctgactttgaaaacggcttctcattctttcgaagctgggaaggtcaggctgtccttgagatcaaggatggcaagattgatggcgccttttgggtgacggtgctcggcgtaaccttgatgctagggctgctgggtgggtacctgttaaattgggctcaggcttttaaggctatttcttttaaagaaatatttcggttgggcgtgaggctgtttaagcgcaggagtgttagctttcttcctgctatatatgagtactccaatcgtgctgcgcttagaagagctattcatcttctgaactctgatctggatttgatcctgatgcgcgcattggagttcggcatgcctgtatgtgtaactttggggcatggaaaggtttacgtaggctatgtcactggggcgatagatccaggtgataaaaaggatatgcttaggattttgccttttgtaagtggatatagatctcctggcaatatgaagttaatctttacaacttggtatactgatgtatatcagaggtttaataaggaccagactttaagtcatttaaatccagagctgtttgaggtcgtgtttccggttagtgagattaagactgtgaatctctttgatattcgtgcgtaccaggcattccaagcaaaaaattcgcagtctagtcagccaggttcctcggctggagtcgtgagcccataa

SEQ ID NO: 331630 - DNA, 1203 bp, Pseudomonas aeruginosa
atgtcgaaaaagtcccgctccagactctggttcctcgtccacagctggctggccctgcccatctggttcttcgtcctgatcgtctgcgtcaccggcaccctggcagtggtcagccaggagatcgtctggctcgccaatccggaaatccgtgccggcaagcccagcgacgacgcccgccccctcagccacgaccagttgctggaagcgataaaccaggcacaaccggcgatccgcgtggaatcgctgaacttccccgacgaagagcattttgccctcagcgcccgggtcagctacccggacggctcccgcgccagcctctacgtcaacccctataccggaacgatccagggcaagagcccgaacttcgatttccgccagttcacccgtgccttgcacggctggtggctggttccgttcaacaatggctacagttggggctggtacctggtttcgttgctcggcctgccgatgctggcctcgctggtcaccggcctggtggtctacaaacgattctggaaagggttcttcaagccacgcctgcgcatcagccagggcgcccgcatcttctggggcgacttccatcgcctgagcggtatctggtcgatctggttcatcgccatcatttccatcacgggcacctggttcctgatccaggcgattctcgccgacaatcacatcaccctttccagcgaaggcgtaccgccggtcatcgcccgcaacgaagtacccaccggccacacggcgccccggatcagcctcgacgaagcggtgcggatcgccaccgaaggcattcccagcctggacgccgcaagcgtgtccctgccaggcaacgcctacagcccgatctacgtggaaggccgcggctggtaccccctcatgtaccaatcggcggcgatcaacccctatacgggcaagatcgaagccaagcgcctgctcggcgaccgcaccccgctggagttcgtcaccgaatccatgcgccccctgcacaccggcgatttcggcggcatctgggtcaagctgatctggttcgtcttcggcctgctgctgagcatgatggtgctcagcggcctgctgatctggagcaagcgcaccgcacaggccaccgccgcgctggtcaagcgcggcaagcgcccggcacgccagccgaaaccggccaagccggcgccggtaatggccaaccagaccgcggagggacagccatga

SEQ ID NO: 331631 - DNA, 2634 bp, Pseudomonas aeruginosa; identical to SEQ ID NO: 329711

SEQ ID NO: 331632 - DNA, 228 bp, Pseudomonas aeruginosa; identical to SEQ ID NO: 329708

SEQ ID NO: 331633 - DNA, 906 bp, Pseudomonas aeruginosa
gtgtgccgccaggcgctccaccgtcgaccgttcgaacaggctggtcgcgtagatcagcgacgcgctcagcgcgtcaccgctttcataggtatccagggtcaggtcgaactgcgccgtcgcactcgcccgctccagcgcctccactcgcagccccggcagcttcagagccttgccctgacccgcgttctggtggttgtacatcacctggaacaatgggctgtggctcaggctccgctgcggctgcaacgcctccaccagttgctcgaacggcaggtcctgatgggcctgcgcttccagtgcggtacgtttgacctgctgcaacaagacgtcgaaacgggtctccaggttgaagttggccttcaacacctgggtattgacgaagaagccgatcagacgctcggtctctacccgggtgcggttggcgatcggtaccccaacgcggatttccggctgcccgctgtagcgatgcaacaaggtctggaaactggccagcaacagcatgaacagggtcacgccctgctgctgcgccagctgtttcagcgagcgacccaggtcttcgcccagctccacctgcaggctgtcgccggcaggactctgtacgctcggccgcggccggtcggtcggcagttccagcaccggctgctcgccgcccagctgctgccgccagtaggccagttggcgctcacgctcgccggcttccatccagctgcgctgccacagggcatagtcggcgtactggatcggcaacggctccagttccacggcgcggccttcacggtagccggcgtagaactgcataagctcttccaccatgatcggcgtcgaccaaccatcggagacaatgtggtgcagggtcaccaccagcacctgttcctcggcggacaggcgcagcagcaggacccgtag

SEQ ID NO: 331634 - DNA, 7023 bp, Pseudomonas aeruginosa
gtgctgttcggcgagcagcggctgagctatggcgaactcgacagccaggccaaccgcctggcccagcgcctggtggagctgggcgtggggccggaggtgcgggtggccatcgccatgcgccgttcggcggagatcatggtggcgttcctggccgtactcaaggccggcggcgcctacgtgccgctggacatcgcctatccggccgagcgcctgcgctacatgctggaggattgcggcgcggcgctggtgctgacccagcgcgacgtgctcgagcgtctgccgttgcccgccggcctggcgagcctggcggtggacgatccgggcgaatggcaggatcgtccggagggtgcgccggaggtcgatctggccgaggaaaacctggcctacgtgatctacacctccggttcgaccggcctgcccaagggcgtggcggtatcccacggaccgctggtgtcgcatatccgtgcgaccggcgagcgctacgagacgagcccggcggactgcgagctgcatttcatgtcgttcgccttcgacggtgcccatgaaggctggatgcacccgttgatcaacggagcgcgggtgctggtgcgcgacgacagtatctggctgccggaggagacctatgcgcagatgcatcgtcacggtgtgaccatcggggtctttccgccggtgtacctgcagcaactggccgagcatgccgagcgtgacggcaacccgccgccggtgcgggtgtactgcttcggcggtgacgcggtgccgcaggccagctacgagctggcctgggaaagcctgcgcccggactacctgttcaacggctatggaccgaccgagacggtggtcacgcccttgttgtggaaggcgcgtccgcaggatccgtgcggtgcggcttacgcacctatcggtaccttgctgggacgtcgcagggcctatgtactgggcgcggacctggacctgctgccgctgggtctggccggtgagctctacctgggtggagaaggtgtggcgcggggttacctggaccggccggcgctgacggccgagcgtttcgtcccggatccgtacggcaacggcgagcgggtctatcgcagcggcgacctgacccgggcacgtgccgatgggctggtggactacctggggcgtgtcgaccaccaggtgaagatccggggtttccgcatcgagctgggtgagatcgaagcgcgcctgctggagcaggagtgcgtgcgcgaagcggtggtgctggcccgcgatggcgcgaacggcaagcaactggtgggctacgtggtgccgcaggatgtcggtgcgctggagggcgagaagcgcggcgccctgcgtgaagtgctgaagtcggcgctcaaggcgagcctgccggaatacatggtgccgacacagtgggtgttcctggcggcgttgccgctgacgcccaacggcaagctggaccgcaaggcgctgccggcgccggacgccagcgacagccagcagcagtatgtggcgccggcgacggagctggagcgcacattggcagcgatctgggcggatgtgctgaagctggagcgggtcgggatggccgacaacttcttcgagctcggcggggattcgatcatctcgctgcaactggttagccgggctcgccaggcgggaatccgctttactcccaaggatctgttccagtaccagacgatacagggactggcaggggctgtgcggttcgatacggggcagcttgtcgatcaggggcctgttctcggctcgatgccactgatgccgatccagcaacgtttcttcgaggaggatgtccccgagcgccatcactggaaccagtctttgctgctggaacccagcgaggcgctcgaccctcaggcgctgcagggggccctggcggcgctggtcgaacagcatgatgccctgcgcttgcgttacatgcctggcgaaaggggctggcaggcggagttcctgccgcaggaggcgagcgaagagttgttgtgggaacgtacgctggatgctacggaagaactggaggaggtgatcgaggcctgccagcgcagcctggatttgcgtcatggccccctgttgcgggcgttgcttgcggccctgccggacggcagccagcgactgctgctggtcgtacaccacctggtggtggatggggtgtcctggcggatattgctggaagacctgcagcaggcctatcaggcattggcgaccggagagatgccgcacctgccggcgaagaccagttcattcaaggtctgggccgagcgtgtgcaggaacatgcccgggggccggcactcaaatcggagcttgcctactggcaggcacagcttcagggcttgtcggataacctgccctgcgacaaccctcatgggagacgtcagctgaagcatgccgcctacgttggcgggcggctggagcgagagtggacccgccgtctgttgcagcaggctccggcggcctatcgcacgcagatcaatgatctgctgttgacggccctggcccgggtggtctgccgctggagcggtgaggccgaggtgctggtgcgtctcgaaggacatggtcgcgaagatcttttcgaggatatcgacctgagccgtaccgttggctggttcaccagcctctatccattgcggctcagtccacgaatcgatctggtcgactcgatcaagaccatcaaggagcagatacgggccgtgccgaacaagggtatcggctatggcctgctgcgctatctcggcgacgatgaagctcggacaacgctcgggtgcctgccggagggccaattggtcttcaactatctaggccagttcgacggcagcttcgaccaggagcaggggttgttcgtgcccgcgcgggagggaagcggtgccgagcgtagcgacgaggcagttctcgacggcctgctggctctgagcgggcaggtctatgacggcgaattgagtctgcaatggacgttcagtcgggaagtgttcgaagaagccaccatccagcggcttgcggacgaatacttgtcagaactccaggcattggttgcgcactgttgcgaagagcggaatcgtgggctgacgccttcggactttcctctggcggatatcgaccaggcacgcctggatagcctgccattgcccgtcggctcgatcgccgacctctacccgttgtctcccatgcagcagggtatgttgttccactctttgtacgaagagggcgctggcgattacatcaaccagatgcaggtggaagtggaagggctggacgtcgcccgcttccgcctggcctgggaagcgaccctggaggcgcacgatgtcctgcgcagcggcttcgtctgggagggagagctgggtcggccgttgcaggtggtgcacaaaagcgtttcgcttccttttgccgagcacgactggcgcgggcgcaccgacctcgagtcagccctggaggacctggcagaccaggagcggctgcggacgttcgatttgcaacaggcgccgctcctgcgttgggtctcggtacgagtggccgaccaccggcatcgcctgatctacaccagtcaccacatcctgatggatggctggagcggctccctgctgctcggcgaagtacttgaacgctactcggggcgtcagcctgctcctcaggccggccggtaccgcgactacatcgcctggctacagcgacaggaccgggaaagcgccgagcgctactggaaagagcggctcgccgagctcgatgcgccaactcgcctggcacaggctatacgttgcgaactgttgccagcgagcggacatggccatttcgtccacgccttcgatccggtttccacccagcatttcgaggcatttgcccgcacccagcgggtgaccttgaacaccttggtgcaatcggcctggctgttgctgttgcagcgttacaccgggcaggacacggtgtgtttcggcgccacggtggcggggcgaccgatggagttgcccggcatcgagcaacaggtgggattgttcatcaatactctgccggtgatcgctagcccgagggcggacctgagtgttgtcgattggatcagccaggtgcaggactgcaacctgggcctgcgcgagtatgagcatacgccgctgtacgaagtgcagcgctgggccgggcagggcggcgagggattgttcgacagcctgctggtattcgagaactatccggtatcggaggcactggagcagggagccccgtcggggctgcgcttcggtgaggtagagaaccgggagcagacgaactatccgctgaccttgtcggtcggtctgggggagaccctccaggtacagtacagctacgatcgccgttatctggattccgagacggttgagcggttggcgtcgcactggcgcaacttgctagaggctatgtgccgggcgccggaaatccgccttggcgaactgcggatgttggacgaggacgaacggcagcgttacctggcgcttggctgcgacatggatgcggaatatcctcgcggtctttgcctgcatacactgttcgaggcgcaggcagggcgcttcgcggacgcgcctgcggtgctcttcgacggtgagctactgacctacggtgaactcaaccgacgcgccaaccgcctcgcgcactacctgctcgctgagggagtggggacagagagtctggtgggaatcgccatggagcgcgggccggacatgcttgtcggcctactggcggtgctcaaggcaggtgccgcctatgtgcccctggatcccgactatcctcgcgagcggcttgcctacatgctggaagacagcggcgtacggctggtactgagccagtcctggctgtcccctgggttgcccttggcgaagggcgtggccgccctcgacctggatcggactggctggctggatggttatccctcgaatgacccgctgcgtcccctggctgcggaaaacctggcctatgtgatctacacgtcaggctcgaccggcaggccgaaaggtgtccagatcgaacatcgttcgctgctcaacttcctcgccagcatggcgcgggagccggggtgcacctcttccgaccggctgctgcaattgacctctctgtccttcgatatcgctggcctggagctatacctgggcctgacccgcggtgcctgtatcgtcatgcctaaggctcagcagagcaaggatccgcaggcgctgctggccctcatcgaagaggctgaggtcagcattatccaggcgacgccggcgacttggaggatgctgctggacggcgctccggagcgcgccgaggtcctgcgtggccgcaaggcgctctgtggtggtgaggcgctgggcggaggcctggcacgacgtctgctcgcgcacgtggactccttatggaacgtctacggtcccaccgagaccaccatctggtcgtcctgccagcgtgtgctcgacagcgaggtcatccatcttggcggacccatcggcaacaccgcgctacacgtcctggatgacgaactcgaacccatgccggcggggggcggcggtgaactgctgatcggcggggacggtctggccaggggctatttcgcacgtcccgccctgacagcagaacgcttcgtgcccaacccgttcgatgcacacggcggacgcctctaccgcaccggagatttggccagccgccgctccgatggcgttatcgactatctcggccgtgtcgaccatcaggtgaagatccgcgggttccgcatcgaactgggcgagatcgaggcgcgcctgcaggagcagggcctcgtgcgcgaggctgtggtgctggcacaggagggagcccatggcgcgcaactggttggctacgtagtgcccatcacgtcagaactggcaccagattggcgcgatgtgctgaggaatgcactgaagggctgcctgccggaatacatggtgcctgcgcaattggtggcgctcgaacggttgccgctgacgcccaacggcaagatcgaccgcaaggccttgccgaagccggatgccggcgcacagacgcaggcatacgcgcccccgcagaccgaagcggaaaaagacctggcgcggctctggagagaggtactcggtgtcgagcgggtcggtttgcacgacaacttcttcgagcttggcggcgattcgatcctggccgtccaactggtggggagaatcaggctgtggcgtgctccgggcttggagatcagcctgcgcgacctgatgcacaagccaaccatcgccgcgttgctggagtcgcggtcacatgcagggagtccgctggtgagcttgaacagggggcttgagcaggtgccgccgttgttctgcattcacggaatcttcggcacggccttcgactacctgccgtttgcgcggcggatggagggacgacgcacggttatcggtatccagtcgccgttgctctccggttatcgccccgaaggcctggcgatgcgggagctggccaggcagtacgccggactgatcaggcaaagacaacctcagggtccttacagcctgatgggctggtcgctgggcgcagtcatcagcctcttcgtggcgcgggaactggagaagcagggcgaggaggtcgtcttcctcggcctcgcggatgcaccgctggtcgacggcaggggaagaagcgatcaggagctgggccaggtcctcgatgagttcttggagatattcctggggacgcgctcccggcttccggccgaggcgtcggtggatgcctctgtcgtagccagtcatatccgtgctcaggtggcggagaaacctgttcgccatggcctcacggcggatgagctgattggtgtgttcgaaaccgtggcgaccttgcgcaagctctgctgggatgccgccgaactcgcagggctcgttgccggggttcattgctggtgggtcgaagggcgcgaggcggaggcgcggcagttccaggcgcagatgtctttcaccttggcgcgagaaaccttctgccaggccgagcacgacacgatcatgcaggacgagcgcctgttgcaggagcttgacgaggctagcgagcggtctttgaagcaacgtacgtag

SEQ ID NO: 331635 - DNA, 2448 bp, Pseudomonas aeruginosa
atgccaacagcacatgcggtttcccctctggcaagggctttaggaagtttgggggcaaacaagatgtccaggcttggcctggcccttctgctggtgagcgcccaggcggtcgcgcaggagtacgaattcaacgttcccgcccagcggctcgacgcggcgcttcaggcgcttggccgccaggcgggtctgcaggtgctctacaacccgagcgacctgagtggtctgcgtagccgcagtgtcagcggcaaactcgaattggaacaggcgatcagccaactgctggatggggccaacggtatcggtttcgaactgcagggcaaaaccctgatcctgcgcctgcaggactcctcttcggtgatatccctggattcaatggtggtttcaggcctggcgctgaatcccactactgagaacagcggctcctatgcctcgcctgcggtgtcgatcggcaagggcaacaagagcatcaaggaaattccccaatcggtgacggtggtcacccagaaacggatgcaggaccagaacatgtccaccgtatccgatgtcctggccaacgcgccgggcgttacctccatcccgatgttcggtaccggcgagcagtactactctcgcggtttcttcatcgaaaacttccagtacgacggtgtacccctggagcgccaatcctatgcccgtggttcggacttcagcgggcagaccgcgatcttcgatcgggtagagattctccggggtgcgcaaggtctgctggagggcggcggcaatccctcgggctcggtcaacttcgtgcgcaagcgaccgacggcggagaaccaggtccggctgactgccaaggccggctcctgggatcactatggtacccaggccgatatctccggcccgatcgacgaacagggaagactgcgagggcgcctagttctcgactacgacaccaagaactcgttcgtcgaccacgtaggcgatgaccgccagaccatctatgccgcgctcgattacgatcttacggaagctacacgcctcggcttcggcttcagtcgcgagcggatcgacgccaacatcgatgtcaacggcttgcccaactataccgatggttcgatgccgcatttcagtcgctcgactttcctcggcggcgactggtcctactgggacaagatccaagagaccttctacttcgatattgcccaccagttcaacgaagactggtcgttgaatgccacggtggtcaatgcgcgcgagaagaacgactacaagtacctgctgatggccggcagcatcaatccggacaataccagtacgctgcggggagatgcctacgtcttcgacttcttttccgagcactggggcggggatgtctatgtcaatggtcgtaccaaggttgccgatcgccagctgaaccttacattcggggcgaactattcggacctggacagcagcgatacctttggctggaggcagcgctacgtacccaactgggatatcttcaactcgccggtcaataccaacaaaccatccgatgacgacatctattccgtcaggcgcagcgacgatggctacgcttcgatccagaaaggcgtctacggcatggggcaatactatctgaccgacgacctgtccgtagtgctcgggactcgcatttcgtcctaccagaaggcttatacctccaatgggccttggggttattcgaaggcggtggccaaggagtcggcgaaggccattccctatgccggcatcatctacgacctcaatccggagtggagtgcgtatgccagcttcaccaagatcttccttccgcagtcggtgcgtaccgcgagcggcagcatcctgggaccgaaaagcgggaaaagcgtcgagaccggtctgaaaggcatcctcaacgatggccgcttgaatgccaccttcgcgctgttccgcatggaacaggacaacatcccgatccaggacgccaacctgcccgatgacgttcaggaagccaactgcggcggtacctgctaccacggcggcggcaaggctatcagccgcggcttcgagaccgagctcagcggcgagttgttcgacaacgtgcaggtatatgccgcctacaccctcaacctgctgcgttaccagggcgaggtgcccagcgaagcggatgacgttggcgccagcgtcaatacaccgaagcacatattccgctcctgggtcgactaccggttgccgggcaattggtcgcgggtatccgtcggcggcggcgtcaatgcacagagccggtcggccgggttcggctactacggacgggagcagagcggcttcgcggtatggaacagtcgcctggcttatcgcttcaccgaagagctgaccggtgcgatgaacgtcaacaacattttcgacaggcgctacttcaagtccgtcgactatggccacaactacttcggcgatccgcgcaacgtgctgttcacgcttacctatagctactga

SEQ ID NO: 331636 - DNA, 837 bp, Pseudomonas aeruginosa
atgagcgaggcgctcctcgacgctcgcgggatcgccctcggctatccgcgcggtgccggctggcaggcggtgctcggcgatttcgaattgcgcctgggcgccggcgaggtggtctcgatcctcggtcccagcggcgtcggcaagtccagcctgctgcgcgtgctggccggcctgcaggagccggccgccggcagcgtgcgggtactcggcgagcccctgcgcggaccgcatccgggcgtcgcggtggcgttccaggaccccagcctgctgccctggctgaacctggagaagaacgtcgccttcggcctcgatttcgcccgccagccgcacctcgacgcggccacccgccaggcccgcgtcgaccaggcgatcgccgcggtcggcctggagcacgcccgtgcccgctacccggcgcaactctccggcggcatggcccagcgcaccgcgctggcccgctgcctggcgcggcagccgaaggtgctgctgctcgacgaacctttcggcgcgctggacgaagtgacccgcgccgacatgcagcagttgctgctgcgggcgatccacgagcgcggcaccgccgtggtcctgatcacccacgatatcgacgaggccctgctgctctccgaacgcatcctgctactgggtgacagcccggcgcggaccctcggcgagtggcgcatcgacctgccgcagccacgcgcggagctggtcgaggaactgggcgcgttgcgcatcgagatcctgaaaaccctacggcgggcgagccgcacccatgcccatcccatcgctcagccggaggcctcccatgtgcctggacgacccgacccattcccgacgtga

SEQ ID NO: 331637 - DNA, 192 bp, Pseudomonas aeruginosa
atgggtgacctcaacagctggcgagtggtctgccaagaccccggagacggtagtggtgatgccatcatcgagctgccttccgagttgttggataggctgggatggatcgtgggggatgagttgatccttgagcgtgtcgagggtgtgctgtccttgaaacttaagcacccgcccggtgagccagccgagtag

SEQ ID NO: 331638 - DNA, 285 bp, Pseudomonas aeruginosa
atgagtcgcgatgtccaacggcaggtcgatcatcaatcggcctatcactcctgctatcgcactgtcctgcgtaccgtggatgcacgttacgacgttcgcggttctgtgctggcggaaatggtgaaggcctgtctggcgcaccgcgccgcgattcctgcggtgcagcgggcgtatttcgtgcagcaagcgccggcggaagcgatggcctacctggaaaagtttacggccatgctgctgtttggccccaagggacgcttttcgccgcaagagtaccgctactcatga

SEQ ID NO: 331639 - DNA, 402 bp, Pseudomonas aeruginosa
atgaaccagggagcactccggctagaggtgctgtcggccgccgagctgatcgactgtctgtgtcccgcgaacggggcgccctattcggttgagcactatgccgagatctttggcctcagccctaccgtgtttacccgccaggtcgcggtctatcgtcgcagccaaccagatgcggccagcgcatccgatgccgaagcgacacaacgttttatcgcggatgtcctgcgggtgatcttggccgtagccgagagcggagtcgctgtcgagcgggcgatcacttggtttcgcctcgagcctttaccgaccttcgaacagcagaccgcggagcaactggtcagtcagggtcagattgaacgagtgctgcagtttctggcctcatggcagacgggaagccagggatga

SEQ ID NO: 331640 - DNA, 2616 bp, Pseudomonas aeruginosa
atggccatttaccaggaagtactgacgtgggcggacaggctgccgccgtggcgccatgacgccttgcgtcgcttatgcgttcagggcagctggagcgaagaagatcttggagaaattctggacctcgccaagcagcatcatggaattgccagtgcatttgaacctgcgccgcagccgatcaggtttgctgcagaacactttcccgcagaagcaaatcgggaccaggtcgttgttctcaggtccctgcatacgctgaccaatgtgggaaaaatcccgagcgaccaagctttggagtttcaagccctgggcctcaccatcgtgtacgggggcaatggcacaggaaagtccggttatgcacgagtgttgaagcaggcatgcagagccaggagcccgggagccgtctacgccaatgcctacgctgatgactataagcagctcacaccgagcgccactatcgacttcgagctgaacggcgccccagagcagactatctggagtggtcagcagggccatgtttcgcggcccgaactcaggggcatctccgtcttcgatggcgactgcgcacgccactacctccagtcgaaagagaccgctacctttcaaccgtccgctctgagctacctccaactactggccaatggtctcaatcagactctgcgtccgcggcttcaggcagagattgcaggtctcgctacagacgttacacccttcagtatcattcccaccgataccgatgccggccgggcggtgcatccgattggcccaactaccgatctcacgcgggcccgtgcgttagccgtgctcaccctggatgagcaagcagagttcgcacgactgccacaggaaatcagcgaggcaaaccccaccgccaaggcagcaaatctcgacaacgctgctacgagggtcgacgagctggccaacaacatcaccgcggccgccggcattgtgtctgatgatacattggatgccaggcagttggcgcaccgaagtctggtagaagcggaggccgcggagcgtgcggcctctgaattgctgcaggccgaagatgcttcgcagttgctcgccggaacggggcaaggtccctgggcaatgctgtttaacgctgcgcgcgagtattcgaccagtacggcatatcccgagcaggccttcccagttaccggcgaaggagctgtctgcgtgctttgccagcaggagctgaccccggaagcgaaggatcgcttggagcggtttgatcgctacattcgggacaaggcggcagaagcagcccagcttgcgcgtaacgcttggaagcagatcgtacgcaatgtcggccaagagagcgttgccttcaccgctccgccgaacatgctggaaagcttgggcgcgcgcgtagcaacgctgccgggcgagattcggctcttccaagaagacctagccactcggcagcaatggcttaaagcctctgttctccgcggtgaatggcaggggcgccctgcgtaccggtgtgcaaacccaacagctttacttcaccaagtcgccgaggatcttcgcgccgaggcggcgcgattgcgtgcgaacctcgatgcggcagccctcgcggcgaagagacaacgtctgaaggagttggaggcccgacggacactttccgaacatatcgaagctatcgcgagggtgagtgagaacctcgctcacaaggcaaagctccagcgctgccaagaggatatcggcaacacgcgagctatcagcatgctcgcaggccagttggccaagacatacgtcagtgaggcgttggctggcacgatgaatgatgaactcaacaggctggatctgtaccacgttcgagccggtatcagttcaagcggagatgcaggagcggtgcggctgggcatccaactccaggattgccagcttgatccccatttagtcctgagcgaggcggagcagcgcatgtgtgcgctcgcgtacttcttcgcggagctccaacaatcgggctcctcatctggggttgtattcgacgatccggtttccagccttgatcacagccatcgaaccgctgtcgcgcgcaggattgttcaggagtccgcccaacggcaggtcattgtgtttactcacgatgcagtgttcttcggagagctagtcaccctttgccaagatgcccagctggctcctgaagtgaggtcgattacttaccgggcggaagggcctggctatatcgatgccggtttgccttacgacatgcgcaaacacaaagagcgtattgcataccatcgagcagaccaccagcgaattgccgccagcttcaataacccacctggggataatgagcggctcgcgatgcgcaatgcttacgacgatcttcgcgtcacgatcgaagtaggtatcgaggacacgatcctcaatgaaaccgtagtgcggttccgcgacggcatctcggtcggccgactagatggcgtgatgatcgtgcaggaggctgagtaccgcgaagtgcagcgtttgcatgacaagtgctgccggaacgtgcgagcacactcacatgcagccggccagcagcgtcctgtaacgcaaccagccgaactcctgcaggacatcgaggccgtccacaccctgtttcacgatatccgccggcgtaggggttaa

SEQ ID NO: 331641 - DNA, 1236 bp, Pseudomonas aeruginosa
ttggggcgcacccgccagtggcgggcgacgccgtatgtgttgatcgtgatcgtgctgtggttcgcgaccgtgtactccggcatccatgcctccctggccgggatggctgcggggctcctgatccccgcctacgcgacgcagcgtcacaaagtcgtcgcggcaagacaactgttccgtgacttctggcagtctccgagtgccgcatcggcccacgcggtggaccgcggactatcccgcggtatctctgtgaacgagcggctgcacgagttcctgcggctgccggcggcactgctgatcgtgccggtgttcgccttggcgaacgccggggtggatctgcgtggcgggttgctcgctgaggccttcggctcgcccgtgacctggggcgtcatctcgggactcgtgctcggtaagcttctaggcatcgggctcatcactctagccgcagtccgcctcggactggggcgcctgccggtgggcgtcgggatggggagcgtgttcggtggtgcggcgctgtccgggatcggtttcaccgtgtcgctgctcatcatcgggctcgcgttcggtacgacctctgacctgggccgccaggcgacggtcggggtgctcgtgtcgatggtactcgccacgttgctggggtggctcatattcaaggtcgccgctctcaagtggggggaggagactgccgatttgccgatggtacttgagccaccagtcgatccggagctcgatcacatccgcggtccggaggacgcccagctcacgctcgtggagtacgttgacttcgagtgcgcgtactgtgcacacgccaccggatcgtgggacgatctgcgcgcccacttcggggacgacctgcggtatgtggtgcgccagttgccgcaccacccccacgggccgatcgccgcgcgggcgtccgaggcggcatcgaaccaggggatgttctggccgtggctggacttcgtgttcacccgtcagcatgcgctggagcgagaggacttgatcggctacgccgccgagctggggcttgacatcgatcggttcatcgcggatctcgacagccccgcagtgatagagcgtgttgagcgtgacctcgtcagcgcggtcgccagtggtgcgcacgtcactcctacgttcttcatcgagggtcgtcgtctgctcggcagttacgacgcccgcactctcaccgcagtgctcgaagccagtcgccgcggccctcgcactcaggaagtcccgtcctga

SEQ ID NO: 331642 - DNA, 636 bp, Pseudomonas aeruginosa
atggtaactcgcaatttaggtttgaaaacgagagatattaaaaaagcaggcgaattttcacttaagcgaggcaatctttcatttagctctgcggcgacaattgctgaccgctggaaaccgttcgctagttatatgactgagaataatatcaaagaccttaaggatttatcccgagaggatctgattgggtatggggtgctgctttctgatcgtgtttgcgatgatgaaatatccgttccgtatgcgcagaacctggtaagcgcggttaacacggttatgaaaatggcaactcttggtgcatggcattcggttagcccgacactggattgcgggattccggagcgctcgcacataaggacgtcgcctccagatggattgtgccgtgatgcattttatcgcgcattgaatgcgttagacgacgagttctccgagggtaaagcggttgcaattctagctcgggagtttgggctcagaactaaagaggcagctctccttgatagcaaaaaagcacttgaggaagcgcacgacggcggatgtgtaaatatcacgcgcggcactaaaggcgggcgcaaaagaaaagttccagtttcatcatcttctcaaattcaggccttggagttttgtgcttttgtttag

SEQ ID NO: 331643 - DNA, 1095 bp, Pseudomonas aeruginosa
atgccctcaattcataccctgaacgctcgcggcaactttctgctccctgtaatgcgtgagtgcttttccctcagcgatgcacgtacctttgctgaaatacagaatcttcatggtgagtgcgtcggcatccttaaagccaaggggatcgactacgccttgctcaggacagccctgaccccgcaaccaacaaagcacgaggcggcgttccttttcgatacggatctttgtgcccggagcttcgcgcctggagtggagtgcgccgaaacgctatttagcgcgctggatgcccaaacgacacacagcatcctgggtggagaacttttcggctcgagcgatcagcttgcgcgcaagctgctggatcccgcagtggtcagcacaaaaccgagttttcatctgcccgatacgtgcttcgtcctgtacgtgaacaatctgtccgcaggtgctattgctgccgtcgactccaaactccagcagcttcctgcctacgtaggctacttgccgtgcacttactcaagcgcagccaaaaccttcacctcgctgaacctgatgaattatgtgatcaagcatggcggcacagtcatcatggggcacgaagatgatcgaccgaacacgcaggatttcaacctccaccagcatgactacgtgacacagggtttccgactcaggagcattcagtcgatctacttcggcacattcctctcatacaagcctgaacgcctgctgctcgatctcatcgacgacgacctggagatcgcggtcagggccatgtcgcctgctgtagcaccgctggcagagttcacggttctcattgaggatgccaagttcgaaaagtaccttcagatcacgaagttaggaaaactgcaaaaggccggcctggcagaactgaccaaggccgagcttgagaccgcaatccgaggcaagctgcggacgaactacctgtacaacctcgagtgggtgagccaaccgacccaccagctcagcaaattcaacatcctgcttgagttcccgcgagttggcggccacccggaacgtgtagttgtggccctggagtaccgcccggtcgaccgcatccttcgccttgtcaccattacctga

SEQ ID NO: 331644 - DNA, 1194 bp, Pseudomonas aeruginosa
gtgagggattggggacggcttccagatgacgttgttgaggagctgcgccgactggagtgggaccatacaggccggctgcgggagcgactcttgggtacgcgtcctttccctattccttgcttgctgaagccgccaaccggtagccaggcgcttgaggatcttgaccatttccatggctatatcgcggcctggcggaaatggccgtggccacatcaagtggcatgggtgacgaagcgatttcggcaactgggtgaatgcgaagttccgataaggttggagatcgaatcaacgcaagccctcatcgctgcgctgggggctgaggctgttgaacgaagcagaggctgggcggagcgaatggagccgttgctctcgttggataaagctttgttcactacccttatcaagcagcttggagagctggagaagctctccatgactgacatacatttgctggcgtgcctgctgccgcaactccagtgtggaatgggccagcgtcgatacttgcgggccctgccactacagaaggtggatacaaagttcgtggagttgaaccagagcctaattgccgctctgttggattcgatgcacgaccaagaggtttccgctcatggcgggttagaggcttggttaggctgccgcgccacaccatccaactggcttcacgtgaaaccactttgccctgacgtgaaaggtcgccttgctgggcttgatctcgttcggctgtcctttgagcaactgatgacctatccgttacccgctcggagtgtgctggtgatcgagaacctccaggctggctacggacttcccgagctaccaggcaccattgcagtgttcggaggaggcgcaaataccgcctggctacaagccgagtggctgaaggacagaagggtaggttactggggggatctcgatacatgggggctgaaattcctcgccgatgcacggttgaggcagccccatgttgaggctgtgatgatggatcgcgacacgctgatcgcccatgttgagcgcggggtgtgcgaagagcgaccagccgagctaccggactatggcttgactcttactgagcgctctctttttgaggagctgcgctctggtcgacacggagttggtcgactagaacaggagcggttgtctcaagactacgtagagcagcaacttgacgtctggcttcatgccatcgctacgatatag

SEQ ID NO: 331645 - DNA, 3387 bp, Pseudomonas aeruginosa
atgcttgaggctagcgaggtaagtctgagtgagttgttcagcaccggtcagatccgtctagccgagctgtcggtatacaactggggctccttccatggcctgcactccgcgaagatagaccccgagggcaccctcattaccggtgacaacggtgccggtaagtcgacactcattgatgggttgatggcgctgttgctgccctccagcaaggcgtcgttcaacatcgcggctgctcaaggggaccgtacggatcgtaccttgatgtcctatgtgcgaggaaactatggcaaggcccatgatggcagcgagacggctacgctgctgaaacgctcaggggcgaccgcaacggggcttcgggcactgtaccaagcggacgatggttcgaagatcaccttggcggcccttttctggattacccaggccagcaactcgctcaacgacctcaaacgcctttttgtggtgggtaagcgcgatgtgggcttggatgagctgttgcatctcttcggtgagggcaatgcccgtgtgctgaaacagcacctcaaagaggacccgctggtcgaggcattcgattcgtttaccgagtatcaagagacctatgtgcgactcctgtgcatggagaaccgtaacgctccagccctgctctcccgggcgctgggtttgaagaagattgatgacctcaccagcttgattcgagatctggtcctggagcccagtcaggtcaaggagcatgcccggcttgcggtcagtgaattcgatgacttggtcagcgtccatagcgaactcgatgatgctcggcgacagcgggatgccctgattgagttgccagagaccagccaagcgctaaatcaggccagggaggagatgcggcggatctcagttgagctagccggcctgccggtctactttggcgaacagtgctctcgactgtggcaaatgcgcctgaagaaatatgaggcggaactgcttcagttggcagaggaaatgacccgccttggcgctttggaggagcaagcaacggaacgggtacaggcattgttccatgcctaccagtcgcaaggtggtgagcgactggaggggctgcggaaggacttgaaagcggcaacgcaggtgcatcacgacagcgtgcgcgatgcgcgcctgtatcagatggatgtacgagaccttagtctgcccgacacgctgtcgctcgacgtattcaagcaaaatcaggtgagagcgcaaacggaactggcggatatgccggcgttacgtcaagcgcgccaggatcagttcgcttcgtcggcagcgaacctctcccgtgagcaaacacagctcaaggagctggtaggtgaaatcgaagacatggagtcgcgaccggactccaacattgaaccttcctatcagaagctccgcgaccaactggtagagagcttgtcgctagatcctgcggaggttgttttcgttggcgagctgatcgatgtcctggaggcgcatcgaccttggcaaggcgccattgaacgggcgctgggagggcatcgcaccacactgctggtgcctgatgagcgatatcgcctggtgaccaagtggctgaacactcgccacacgggtctccatgtcagggtgcaggttgttcggctgaaccagcatccgcaggttgctgagttcctaccggatggctttctaaaaatgttggattggaagccgcacccctatcgtgattggctgaaaaagcacctctcacgcttcgacctgcactgtgtggaatcgactgaaatactggaccagaccgacttctcgatgaccatccagggcctggtgcacctggataaagggcgatttgagaagaaggaccagcagcgcattgataacccacgtttctggtgtttgggattcagtaacaaggggcgtctagcggcgttaaggaaggatcgtgtcgagttggaggcagaggtcaagaagttggcccagcttacagcagatgcgcgcatggccatggatgacctcgagaagcacactcgggtgtgggagcgcatcgcccagctcacctgggcggcaattgatgtccagtcagcgcaagatcggatgcagtcgctgagggcggatctagaggcgcttgaacggcctgatagtgaattgggagtggcgaaggctcggtgggagcaggcaggtgctgagctgaaggaagtacaaggcaagaaagaactggtcagcaaaaaagtcggggggctggagagcgacaagctcaaggcgaaccaacaactggagctggcgttagatgccgcccggaccggtttggtggatgaggtcagggagttgctttctaagcgtgtgggacagctagaccttgacgatttggagatggtttcagaactcgaaaatcgccatcgatcagcgctggaagaggcccgtaagggggcccacaaccgagagtttcgagcatcgaacaaggctagcgggattgtctccgagttcaaaacaaaatggccgctcatcgccaatgattggctcgccggcgtggatgccctagaagagtacgtcgatcacctggcccatttggagcaggaaggattgccagacctggtcgagcgtttccgagagcgcttgaaccgcaacgcaacacagtcgcttgctcgaatcagccaaaccatccaggccgaacgtgaggacatccaggaccgaatcgaaacgatcaacgatgttctggaacgcacggagtttcggcagggaacctaccttcgtctgggaagtcggccagaaatcttcgaacacgtgaaagcattcaatgcacagttgatgcgcgtgctggcgcgagctggaagtgacgatcatgaggctcgctttgtcgagctgaaggagctgatcgagaaactggagaaagccaccaatcctgcaacctcgggcaatctagagagtctgcgactgttggactcgcgctaccagctgtccttcttcgccgaggaagtagagaaaggcagcaaaaaggtacgcgatgtgctggagtcttccagcggtaagtcaggcggggaaaaggagtcgtttgccggcacgatagtagccgccagcttggcttacgtgctgacgcccgacggcagcgaccgtccgctctactgcaccgtgttcctggatgaggcgttctccaataccgccgaggcggtgagtcgccgggtgctcaaagtcttccgggaattgaagatccacgtgaatctgatcactccatacaagaacctcaaccttgcacgtgaatcggcgcgctcgctgttgatcgcagagcgtgaccaggacaagcatgagagtcggctctgtgaggtcacctgggaggaaattgacgagcagttggcgcgtcatgaacagcaggggctgcaaaaggcagccagttcactggggatcgaagtggagccagatctgtga

SEQ ID NO: 331646 - DNA, 756 bp, Pseudomonas aeruginosa
atgaacgaagaagagcagcattcccaacaggcccctgccctgttcgaccagtatcgaacgaatcggcctgaaacgccgtcaatcagcggcgaggtggagacgtttgaggatgctcccgttgagccgcccgtcgttgggggggctgaagtcggcatgccactggaagcccggcgcgctctggtgctgttacttcgccaaggggtggtgatggccgaaagcaaacgtctggcgttcgaagcgctgtgccggcacgagggcctcatcgcagagcacttgggcaacatgttcatgcgcatgttgctggacatgaaggccggtatcgccatcctgctccagcaggaggtggcagagcaggacgaggagactgacgaagcgtcacgcttgatcaacaaacgcacgctcagcctctatgacacgctgctgttgctggtgctgcgtaagtactaccaggagcgagaaacagcgggcgaacagaagatcatcattgatatcgagcggatcgaggcattgatgacaccctttttgccgctgacctacagctcccgctccgagcggaggacgctcaacggatcgcttgccttgttgaaagataagcgtctcatcagtgcggttcgtggggatgacgagcggtttgagatcacctctgtgatccgctatgtcgtcaatgccgattttcttgaacgtctgttgaaagagtacgaacgcctagccggtaatgcgggcgtcaaaacgggcgacgaggtgcaggatgcttga

SEQ ID NO: 331647 - DNA, 1455 bp, Pseudomonas aeruginosa
atgagcttgcacgagcagcaggcgcgttttaggcgattgctctccgagcatgcagcttggcgtctgctacgcgctgagaatgcgtccatcgttcttgccttcatcaatgatctattcgctcaagacagcgaagtgccgtttgggaaagcacgtgtcgcgctggaggccgagctgctgatctggcaggaggtctatggcctgcacgataacgcgggcacctatctgcgccaatggatccaggcgggctggttgcgtgagcttgatgacaagctcacgcgaaccgatgccttcgagttagcactgcgctttgcccagagcctggatcagcgagacagtaacgccacggcctcgcacctgcgcattgtgcaagacgccgtacgagacttggctgtcgccctgagcccaaaccctgaagagcgaatcactctgctgactgcccgccggcaggaacttgatctggagattgagcgcttgcagatgggcgaggtgccagagctgagcgcgccggagcagcgagagcgcatccggggactgtatcagttgacatcagtgctcacgggcgactttcgccggctggaggacgaaattcgccaactcgatcagcgcatgcggatccgcatgatcgagtcggagtctgggcgcggtgaagtggtgaaggcgctgatagagcatgaaggtgaactgctccagaccgatgccggacaggccttcgacggcttctatcagttgctctgtgatcagaatcgaatcactgagttccgtgagcaaatccggtcgatcttggcacgtccggcatcccagtatctgaagtcagacgaactgcgttacctatcccatctggtccgcgagttgggcaaggaaagtgagcgggtattccaggttcggcgccggaccgaggagagcctgcgggcttttgtagaaagcggcgttcagcaagagcgtcgtgcggtcgaacgactgcttcgccaactggagcggctggcggtgaatttcaaggaccaggagttgagcctgcgcgagccggtggttgtggacgtccccacgggcagtctgcgcgtgcgttctccgtccagtattcacctacgactacctgaagaacgcctggatacccggcaggtggccgcaaataccaatagtcacgtcgccagtctcggcatgctggatcacctcaacacggtcaaggtgctggaagtagcccaggatgtgaagcagttgctcactgagcacggcccgatgacggtggcgagcatcgttagtcaccgccccatcaccggaggattggaagaactggtggcgcacgtgcggatcgccaaagcagtcagcgctgtggtgttggaacacccagaaagtctggtggtagtggatcggaccggcaattggattcgggccaatattccctctttgctgatgtccgccgagcagtttccaacggatttggaggaactcgccttatga

SEQ ID NO: 331648 - DNA, 942 bp, Pseudomonas aeruginosa
atgcgacgatatcgaccacaggctgttagccgctgccagagtcttctggggctatctacggcagtttgtggtggagagccgcaggaaaatggcaggcctcaggccccgcagtgcctccatcgcaccggcaacgccgaagatgttcaccagccgtttgaggttgtaggccagcacatgcaggctcatttccgtgctgactcggggcagcgttcgggtcaggaagtgtgtcgcgcccatccaatgtttgagcgtgccaaacgggtgctccacggtctgtcggcgcacgctcatcatctctggttcgcgatcaagccgttgctgcatggcttccaggattgcttcgtgccgccaacgcttgagtcgacggtaactgctcgtggtgcagctgctgcgtatcgggcagctcgggcaggcagaactccagtaagcatccagctcgaggccatcttccaccgtcgagaagcgcttgattgcacgctgtccagcaggacattggtactcatcatcagcggctatgtagacgaagtcctgcttaccaaaacgcccttccgccttgctgctggaggtcatcggcttgggcacgaagggggtaatgcccgcctgctcgcacgccaggatttccaccccgctgaagtagcctcggtcggcaacgatgctaaggcgttcagatccggtggcttcgcgagcctgctcggccatcgtggcgagcgctgcacggtcatggccgacgttggtgacttcgtgcgcaacgatcaggtgatgccgggtatcgaccgtcgtctgcacgttgtagccgactatgccggtgcccttcccgaattgtcgcggcgcgcctctcaccggtcgcgtggaggtccctggtcgactggctgctggccgaagtttatggcacggatggtgctggatctagtcggtaggataggccatggtgtggctatctga

SEQ ID NO: 331649 - DNA, 180 bp, Pseudomonas aeruginosa
gtgggctatcccaacggcaacaaggacgccaccgccctgatcgacgcccctctgcgcgacaacccggcgctctacccgtccaaagagatcatgagccccctctatccgctggaaaccctgcccctgcggcttgaacgcgtgcgtacgcgcagctggaccaagatcaagaccggcacctga

SEQ ID NO: 331650 - DNA, 168 bp, Pseudomonas aeruginosa
atgcgtaatggctctttgaaatcagataggggcgctaagtcggaattcaaggccggggaagcgaagaggctaaaatatatcttcgacgccacccagccgttggttgcgagctgctaccgcatgcgcatgagtcgccatctccaagatttcgctcggttcagcaactag

SEQ ID NO: 331651 - DNA, 1176 bp, Pseudomonas aeruginosa
gtgggaaaacaagaaaaagccaatgttgccaccggtcgctacaacaccgacgacgtgacgaagcgtgtcgtgtggactcaggctgcaggccattgtgagttgtgcggtaccgacctcatgtacgactaccgtgcaggtaagcccatgaattggggcgaggtagcccacatcctgccagctagtccaaaggggccacggggtcggtctgaccatgacgagggcaaggccgcgtcgcttacgaacgacccagccaatctcatgctcctctgccctggctgccatgacaaaatcgatcgggatgctgatggatatccggaaagcgatctgagcggcctgcaccaagcttacctagaacgagtccggctggcggcaacaactcctgacggtggaagagcgattccagtaattgtccaaagccagcatttcgcgacgaacaacgacatacccgttcgtgatctgttggtggcgatgtcctcagagggactgactgcattcgatcatcccatcaagatcacttttccgcccccgagccatcgtggcagggatgcccactattggcagagtattcaagacaatattcagcacgagttagagcagcagctaaagcgccgcggaggatcctatggtgatgttcctgcgctggccgtagtgggcgtggcagatatccccgcgctgatcatgctagggcagtctttaggtgatcgttccaagcgcctgcttttctcgttcaatcgcgagcaccaactacgttggcctgaccagtcagccgagcctccggaatttgcattcaccccgcccgcggatggtgacggtccgcttgctctcgtgttgtctatctccgcgcaagttcccactcgcgatgtcgaagatgcattacctggcgcacgtatcgcagagctgaccatcccagtgcccagctatgcgatggttcagaaccgtcgcgtgatacacgcgtttcgcgacgctctacaaacacacttgagccggcttgaagccatgactgcagacacaatccatgtgtttgcggcgattcccgctgctttggcaattgagttcggtgccttgctcaccacacaacaccaacacgcctatctgatttttgatcgagataaagacaaccaaaacaggttcacgccaacactacagttgggtcaccaagcccaggaggttcgttga

SEQ ID NO: 331652 - DNA, 1251 bp, Pseudomonas aeruginosa
atgtccatgagcaatgaacagaccaagcgcgggagctgggagcactttctgctccgcgccgcgagggagatctcactgtcggaagcacagtacgagaagatcaaagatcgatactcccagctcgagcaaatcctcaacgcctccgacaatccactactggcggaggcgcatatttttgtccaaggctccatgcgcctgaagacgacaatcaaacccgtttctggcgctccagaggatctggacaccatcgatgcggacgccattatttggctccctcatgcacaaggggctggagctcaagaagttctggatgccattgaggaacgcttcaaagctggcagccgcgtccaggaagaaatcaagcagctacgccggggcatccggatcatctatgccgatgaaaaccccggattccacatcgatgtcacaccggcgcgtgccatcaatgggaattctcagggcaatggcgaaggtaagctggaagtgccagatcgggtaactggctggaaggcgagcagcccgatcccctactccaactggctgcaagtggcttcaaaacagacgatttcgttggagcatctggccgtcgcaaaaagtcagcgtgcctttgatgctgccactcaggatcccctgccgcagtatgaagactacctcgatcaagacccacttcgggcaacgattaagctgctgaagcgacatcgagatgagtgggccatccgtaccaaaaatgcagaccatcgcccgatttcggcagtcatcaccacactcgctacccatgcctaccttgaagtggcgaaagagtctcagacggcgccgctaaagccgctggacgccatcctcgaaatcgtccggcggatgccggatcacgtcaaacgccaggggaatgaatgcctggtttgcaacccggcggataacggcgaaaacttcgctgagaaatggaataggccgcttgacgggcaccgttaccgccgcgcattcgaggagtggcatgagaatgccagcgcatcagtgtcactggggcttgaaagcttcgaatccgcagaggcttttgccaaagcagtgaaggaaaactttggcatgggccctacgttcatttcgacagtgaatagcgaaatcccttccaattggacgatgcctggccgcccggacggaaccacccgaaactccacgtcgatgggagcactgtttggtggtttcagcggaacagcgagctctcaagaggatgtgaagccagttgggcgtcttggttga

SEQ ID NO: 331653 - DNA, 1476 bp, Pseudomonas aeruginosa
atgggcacccctgaatatgttgtatcggacagccttgctcggttacgcaagatcgttgatctgtcccgtatgggatcatgcgcagctactcggaactccgaatttcggcgcgaaatcacatcctactggtctaggcagcaggggctgtcattacagaacctaattcttctcgatcgcccccaggccgcctcgaagctgtttgccctaagcgaccctaggcaagcattgccgtctggccaggagacagtctggctcgcaacagatctgtcatcactcaaaagccactacaggcgcacgattggacgttctccaaggatgcgtgccccggagacccccggattttacgcgaagcttcagagttatccggaccttcgccttccagcccctgagctgctgcttacatggctcatgccacaccttgctcctgacgacagcgctcagttgttagcttggttcaatgagcgtggctcactgcccaaccgctggatcgctttagagctccccggggatgccagcgccccaatctactgcttgaacgttcgcgcatatggcccacagctggatcgaggatcaagattttacctgcgatcagcgcggcgccggcctgcagttgcagtcaatcatcccccagttctgatccgagcaacgacgctggatgtgcttgatcggacagagattctatcccgtgatctcagtggcgtggcgcagaaactagaaggggctcgcgtcgtttgcgttggggtaggctcattgggtagcaccgttgccctacagttggcgcgtacgggtgttggtcatctgacactcattgacccggaccacttggtctcggcaaatcttggcagacatgtgctcggtgccgatgacctcggcctccccaaggccgaagcgcttcaggaaaaaattcgcaaagacctgcccactactgaagtcgcggcgttcgccaccttcgccgaagtggtgatgtacaagaatcccgaggtttttgataaagcggatctggtagtagttactaccgcggactggcagtcggaggtggcgctgtggggggccaagtcgaatggcacctcctggggtttactccaggcctggagtgagcctcatacacaagtggggcatgtgctcctagcgccatctggtgcttttgatgctcgaagcctattcacagacaacggtgattttaagcacaagttcaccgagtggccggaaggtggggtcgtcgcccttcccgcctgcggggagagtttcatcccaggaggctcactcgggatggtgaacattgcttcgatggtttctcaagctgcattacgagtgttgagcggcaacatcggcagcccgagctgggtcagcagcatcaatagacctgatgacgtggttacgctgggaggtaattacctcgggcctgagctacctgccggaatgcaacaggcccagctggagcgcgattggccggaaacattggagagaagtaaatga

SEQ ID NO: 331654 - DNA, 546 bp, Pseudomonas aeruginosa
atgagtgatgagctttatgtttccgtcgatgtcgagacttcgggaccggtgccgggcatctatagcctgctctccatcggcgcttgcgtcgtctcagagcccgctcagtcaatctatctcgagctccagccagacggcctacaacacgatccggaggctgtcgccgtaactggccttgacctcgccaagctcaaaaacgaagggctagccccacagacggcgatgctcaagctggagcaatggttgaagcaggtatgttcggcagatcagaaagtcgttttcgtggggctgaatgccccgtttgactggtcgttcatcaactactacttccacaagtattctggggcgaacccctttgggttcaccgcactcgacatgaaggcgtattacatgggggttaccggatgccgctggaaggaaactaagtcctctcaaatgaccgctcgtttcaacccccaaagcgcacccaatcataacgcgttggacgacgcacggttccagggggaacttttcgctctcatgctggcagaagcacgtaaccgctaa

SEQ ID NO: 331655 - DNA, 912 bp, Pseudomonas aeruginosa
gtggataacgctcgtgactgtgtgaccaaggaaattgttgaggccgaagacctcaagctgttggcagtggtggacacctatggctaccagtgcaccggctgtgaaactcaggctttcccgcgctcctaccgcccggaaaacctattgcgcgctcactttcagatccgcgaccctcatagcccagattgtgagacggagaaagagagcaaagttatagctcagggcaagcgcggcagtgtacagaaggagctagagacctcccccggtttatcgcctgcccgcttgcaactgattaatactcgaacaatcgtcgaccccgccttgcctcgcacagagcaacatacacagagcattggtcggcaggacactatgggcaacacagcacgcagagaaggacggcgcgctgcaaatagtattcgcccgatttgccgtgcatttttgcgctttccctacgatcggcacctctcgctcgaggtccccggcgttgctccaaatacgtatcaaacggccttcaagaaacttcgttcggatgggttggggcagttcgctcaagcgcgtgtgttctatggagagctggcatggtctcaggccgtagagtcgtccgaatacctgaccatttcgctcaatgcgggagagtggaaagatgaaaagcttacgccctaccaagtgatcgtccactggttagaatggtcagcggttgcacgcggccggctcaagaatgagctggaagtagcccgaaaggaggggatggaagccaaaaaagcgaagcaggcatctcgcagctttctcttcttcattggcaatcaagacgcaaaaaaacctgcactgttccatgtgcaggaccataggcttatttgcaccttacacgacgaactcgtgttccccgcatattcgcggacggcgcggaggtaa

SEQ ID NO: 331656 - DNA, 1374 bp, Pseudomonas aeruginosa
atgacttcagttggtcggctttggcgcacttcctctaaagaattttatttgcctggatatgataagtttaggaggtcggagcgatgggcggcccccgaaatgagggtgatgtattggccagatggttgtatctgttggcagcttaatgtttatttccttcatcttaggcgctcaaatagcgctatttccacaattaacacttatgcatcggagctatccttgtttgtacgttttttatttgagtctaaggtggtgattgaggacgtgtgtgatgatgtgctggtttcattttcagactggttagttaatcgcagaaaatcctctgggaaccacataaatagaatcttgttgcgggttatatcgttcttagagtggtatcaaactttgttggttggaaggcgtctagtgggttcattagggcagggggctcaagtaacaatttctttgcgttcgttgaagagtaagcaaggtgttgtaagggttcgaacccagcatcatgcgatggtgcctgcaagcattcctcgtacagttcgccctatttcttctaatatcgtatccgctctgctggattcttgtgaatgggctgccaaaactaattttcgtcgcagccgtgatcgatgtatgcttgttctccttgcagatacgggcatacgcagagaagagctaacttggatccgagtttcggatgttgtaggggcatctgctgaccgaaaactgcccgtaaggacatctaaaagaaaaggcaatccttacagattaatacctatctcagacgaaacgttcagaatgctcttggagtatatcgatgttactcgctctattcaggttaggagattaaataggaggaagattggtttcaaagatcagggctggctgttttgcaccagagaggggttcaagatggcgccctcaacagtgtcacagttgttttgtgatctccgggcagaggcgggtcttactgagcggatatctgctcacatgcttaggcaccgatatattacattgcaggtcatggctaggcttcgatctttgagccgccggggttcaattggcgttgaggcacttactactgttctctcaaaaattgcgagtctcagtggtcactcttcgcttgatagcatgtggcgctatgtagattgggcatacgaagagcttgaggctgagtacaaggattccgcaaacgtcgcagacgaggcgttaagtgttattgaagctttgatgggtgaagcgaagagtagtgaaaatagggctctagcagagtcacttttaattgtgagagaggctgtttcgcaactaagaacgaagagttatgagttgccaagtgtggtggcccattcccttcgtagctccgccgctcagtctcgacatggatag

SEQ ID NO: 331657 - DNA, 1965 bp, Pseudomonas aeruginosa
atgagtcgacacaaattaccgatcggggtcattgacttttttgagcgaacaactagaaaaataaatcatatatacagacctgcatggcttcttaatgagttggaaagttctacatggatcgtagactcaggggtggttgttcggaatgtagacggcacccttaaaggtggcgttcgtctaaattgggacaggcttttgccaagcggaagcttcacaagccctgtttatgcggttcctttggaacaggcaaaaatgatagtggtgtgcgcctatgatggagctcttaaagtcgctagatcgttaagaggcattcttcactttcatctatatctgttgtggctagctgagtttcttgctgttcgatatggagacaagttttctgaagagggtttttctatttttggggtggatgacgtagttgagtttcttggagcggcagaggtaggaggtgttagtggaacagcggctttcatacaacgctgggaagattatctatcaaattccaaggatggaattgagccaataccactttccgagcatctgggaaaactaggagcactggatggtgacggtaatctaaatctgcgcttcgctgcggctgctttgggggttgactacaagcggttatctcaatctaccgagttcagaagatacttgacgcatgggtttgattgtgaggctggaggtaagtccagcgagagcggggtatcaagagccacaactgctctgtcaaattggatggttaatttctgtgagctgctatcctctctgcctattcaatcgcatgtagagataggtaatccttacttaatatcggatattgtgcggcctttccgcatcggaggaaacggtagaacaagaactttgcctctttctacgggaagaagacttatgttcggttgcggcaaatggatgattgatacgtatccggtgctcagctattactgcaatgaaattattcctctttcacgatcgataatgaatgagtcgaatgtttcagtatttacggcgttatccatatcagaagaaactgttccgataccagatggactggtctctgcttttgatgtttacagacgaatgcaggtggatcctcttatctctgaggcaaaaattagaactcagtttccattctcgattttcttgttgaggcttcatacggctgtctgcttctgcttgatcggtgtcctgactagttgtcgcagaagtgagctggttgatctagatggaagcgctagctatgaggttgacggtagattctatctttctgttttactgaggaaaactgggtttgataatattcgtgaaccgatggaaaagccggttccgcgccttgtttatgagtgtttattatctttgaatgcgctaaaagaactttggcaaatcatagtgccttcaagtgatgttttatttaagtcgcaggcgttttttaaagttaacgtcagaggtgcctatccactaagtgtggctgatgcttatgtttttctaaaggaacttagtgagttcctaaaactggttgataactcgggagaacgatgggtggtgctcccacaccaacttcgccgctattttgctgtgacattttttcacttcggaggattggagaattccttgccggcgctttcttggtttatggggcatgaagatgttggggaaacctggcgctacattaaagaaagcttaacaggaaaagaactcagtgcatccgaagctgctttggctacttctgcagtttgctcagatgatcaatctcatggcgtgcagcaactcaggaatatccttgttaagcatttcggcactgaaaaaatcaacgtcatgcatgaggatgagttaagagattacctagagttactgtcggaaaaaggtgtatacaccgctaccccgattcagattaatgttggaaaaagaaagaggtatacggtagcaatttcagttagggagggtgccgatgcctcgacttggtaa

SEQ ID NO: 331658 - DNA, 2097 bp, Pseudomonas aeruginosa
atggctaggcacgcacgctccaccaagggaaaagcttcatcagggaaaaagaagtctgggctagaactgaaggtcaggaacgatggccgccagtcaggatgtacggtcgtcagctttgacttcctgactgattggttgggtgaggatgcagaagcctttttgaaaggcatttcgcgcttctctagacgctacacaagtgcggcccctacatacgctatacggcgtattctccagtattgggcaatgatgcatagaaagagaggctggaaaaaacctaaggacacagatgcgaataacttcaaacttcaactatctgagcttcggagaagcttttataccgatgagacagaaaaagggttggccctcataacgacctcaaataagtggatgtctttcgtaaggctaattgaggttctagtagttgcagaagttatcccaaagatcactataggtgcatacgttcgagctccaggaaaatcagaaataataactgaaaggcaatcagtggttgatggtgccgcggttgtttcggtaccaaaatcatttagaccggataagaactcatacaatgacgatctttttgagtcaatatctttagctgcttctgatgaaaagtacctgaccgagtacactgctagaataaatcgtgtgctggatacaattaagtcgtgcgcgctagaagactttaatctactaaaatcgaaacaggcagagggagatgcgctgataaagaataccggctgtggttatctgacggatatgaaagagaacccttggcttatgaggtattttgatttttccactaggcgccattactttgaggcagacggtggacatcctaacttgcttggaaacctactttctgttgttcatcatgagatgggggggatccctaagcctcatcgaaaattcaagtcgagtgacagaaggccggtatcgaacagcggaaattctcattggcaatatgttgctagatacggaaagaataagctcatcccgtatttaggattaatgaatagcgaggctgcggcagtttgcatgctcttgataatgatagagcacccaaggttcaattcgacttcattgtacagagctaaaattgaagatgcggatggattcgcaatcctcctgtcgtctgctgatggaaataatttgcgccttacggttaaaaagccgagagctagggagcagaaatcagaagtattgagtgacttggcgagagacgttatttcgaaagtaatggagtggactgcccctatccgggaagagttgagaaagcaggggcgaaacgaggaggcctcaaacctttgggtgggaataagctctttgaactatgacttgaagtccttttctgagaaggcgttggtaggagcgctttatatgaatccaatttggcgttcgacaggtaaggaagagtttagtacaagggcgtgttcatttgtagatagacacccggtactcatgccgtggagagataagatcaactttaaggcaattcgtgtcaatgtgggtgtggcaacatatcttaatacggatggcgacttggttgctacagctaaagcatttggccacaagcacattagaaccactattaataattatattccgcttgcgctgcagcgtgcaatttttgagcggcagatccgtaggcatcagaatctactaattacttcagcgatgaatgaagaaagcgaaatgctgaagatatcggactttagaacagtggagcaattacatgaatttcttaagtccatcgataattatttgtttgaaagtgagttggaagcgcaaagaagggaaacatccgaaaagataaccattgatattgccaccttgtccaggctcgtcatatctaatgatcctgaagcgcttgcggttgcaatgctttatcgggatgctctcgacaaagcaaccccaaccttcctaaataggccagacagtcttactggagtcacgccaaaattttggatggacttcattgacgcagttatggcacctcttccgttgtcaatgagcgatttaagtaatcttgttaagaaggcgcttttgaagaaagaagcgatgtcggctatggttgtcctaccagaggtggggtga

SEQ ID NO: 331659 - DNA, 888 bp, Pseudomonas aeruginosa
gtgatcgacagtggctacctgaagccgtcgcagaggcgcctggtggatgtagtggtgtcggagccgatgctcgacgatgcgctggatacggccaatgccctgttcctcagactggaggccgctggatatcgggtcatgctcgcgccgagcgatcgtacctatgaccgcgcttccgtggaggaaagggaaaagcccggaaagacggccaaccatcgttatccgagcctttggcatccctccaaggcgactgttgtcttcgtgggctccgtcgctatcggcctgactcttttcgagatgaccgaggagctggaggcgcggtacgtcgatggggaatacatcccgcttggcaagctaccggctgccgagcgacgtcgttcgatgcccagttggagctggaccacgcacaagcacttcgctaccgggcgtctgtgcctccaggcattcagtccttatccggtcgcggattgggtgcagcgctggccagaggccaaggcgcgcgaacttcgggggcaattggacgaaatagtcgcctacctggcaaaggcggcgaccactattgctggcctggtcgaggagggtgagcgccaggctgagatccgaaggcgggaatgggaagaagaacggcggcgattggaggagcggtgggagcgggagcgccaggaaaaagccagggccgaagcccggcaagagttgcttgaagccattcgtgcctgggatgacgtccggagaatacaggcattcttccgcgaggccgaggacgaagccttgtcgcgaacaagcgatgagagggaggtgcttctgaggcgtctggccgtcgccagggagcttgtcggggaaatggatgtgctcagtatgttgatgaaatggcgggggccggaagaacgttga

SEQ ID NO: 331660 - DNA, 597 bp, Pseudomonas aeruginosa
atgttcgatttcgagtgcgtgactaacgcggttcgagccatggagctggacagcgtacctaccggcctttcccattgccagcaattggagctcaaggcaaagcacttggggtaccaaagctggaaccatttgctcgacacgttgaaaaacgagcccagcaaagatcgccttgataaatgcaccatgcacctgatgcagcgaatttgccaagtgcgcttaccgttccgcaacaaagcttatgtacagctgactgtactgcccaataacggaatcggtcattacagctactggataggttgggataagaacggaaatgaggttcgcgtgcctcgcccgattgatggcagggagcaagcacggaaactccgcaaactccaagccgcgccaatttttgcaatcgaaacagaaagagagctcatagcgtggcagcacttgtggttttcaaccgcaatgattccgccagatttggccaaagattttttcccctcgctcttcaacaagaagcatcttgtggaaaaaaacccaccgatcgatgtagttaaagccaaatacgaggcgatgggtgacctctactcaaacaacctcgaagaaaattag

SEQ ID NO: 331661 - DNA, 1236 bp, Pseudomonas aeruginosa
atgagtaaaaatgaaaatttcgacaacgacgaaaaaataaaaaatctcttaaatgccgccctgaaaacaatccacgcatgcagtcgagaagaagcagtagcgtcaaaaaggtccaaaattaaagtaagaactgagcaggcattgatggtcactgacatcaactcataccttgtcctgctagatgccatctacaacagtgaaagtaaaataagtcaacgattcagtagggagactgcatataaaataattgaggataatatcttcgaaataaaattttccggcaaggatttatccaatgaggatattgtatctttactgaaaagatttacagatgtctcaccagaagatgtcaaggtggtggcgccgatatcgggagtaagactagataaagaaggcgcggtaatcatagggtcttttgaaataggtttgtcgggatcgctgaaaatgcctatttcaaacaacaatgactattacatatgctcagaaataaagaatagctatgacaatttaaaggccatctcgcttgctcatgatgaattccaagaattcattaatttaatattttttatagccggaaagaaagataattcaattttcataaaaacggggctgccttcttatcctagctacacacatcaacagatgtatgtggaaactagctcctaccagatacaaagaaatccttcaaattttccagatgcatccataagcaataaaattgttgagaaaattcctgttgatgacgagtttttcgtaaacaataccagctttagaatgttatgggatatatataaagaaagaaaaaatggagtgaaaatttctgatcttaactcacgcatattgaattgctcaatttcgattggcgaggcaatcagaagccagaaagaaaaggactcagtaattcatacttgcattgcccttgagattttgttgtcttacgatgaaggcagtctttttcaaaaaagcattggtgatcgcctggcagacacatttgtttttattgttgccaaagataaagagtcaagattacgggcaagctcagtactaaaaaaagtttatcggatgagatcagctttggttcacggggggagcaaagagattgatcagagctacgttggaataattcagttagtaagagctgcaatcgctgagttgctgaactccgaaaaatacaaggacgtaaagaaaattgataaattatatgagatggtgaaggacgctcaaaactcttattaa

SEQ ID NO: 331662 - DNA, 1182 bp, Pseudomonas aeruginosa
atgaatgatagtcaggaaaaacctcgaaccttgaatgcggaagacctacgagctggcatgctcttaaacatcttcgcagagcaacctctgtatgggctagacgaagagtactcattcttctatgacgaaactaacaacatccgaaaattctgggtcagggatgatggcttcaacgaaaaaccaaggaactttgttttgggtggaatctcgcacaaaaaatcatcgcccctatctggaattgatgatcttattaaatctttacatattcaaaaatcagccaaggagataaaattcaatcaacttgccaccggaaactatcttggcgtactcaattccaaaagaataaggacgcttctagaatggctgatcagcaatggggcattcattcactatacaaattttaatatcttatattgttctctggttgatattgttgattcaatgtgggatgagccggagctacttcagtacatgccttacgtcatgcacattaagggcgaactcttcaatcttgcaaattctgatctgggcagtttggttctaattctaaagaaatatcggtttcctaatgtccaaagaaatttgagcttcacgttcatgactgaatttgctgattttcttgaatcggcctccaaaaacccacaatccgatatcagcaagctcgttgttcacatgattcggaaggcagcaaatctttcagaacttccttttatagtggataacgtcgatgatgttcttattgacagtttcgatagtttgtttttgcgacccctgtatatctacccaacaagctcccacacttttgacaacgaaaccgaagttcaagaggcattaggcggaacacggatgatatacaagggggagccggtcgaatactcattcgttgactccatgagttgcatagaaactcagttatcagacggaatttgcgggttgctaggaagtcactttaacttcctggaagatcacactttcgctgagttaatagagataaagaaaaaccttaacccgagtcagcaacagacgctttcgttgcttaaaacgctcatagatatctcggatgctcagagcaatggcttcatgcaccgagtcacaccgatggatagcgactttaagaatgattacttcttgcatgacatccccttgcaagaacactttcaaaacaatggagccaatagatga

SEQ ID NO: 331663 - DNA, 2073 bp, Pseudomonas aeruginosa
atgaacgccatcaaccacaccgaagtccaagccatccacaccgcagccagcgccgcgcctgccgtgctgctggaagccgccgacccgagcaagaatctgattctggtgccgctgtcgcggctggtatcgcgccccacgggccgcaacgtgcgcaagaccccgcgcatgtcgattcccgaactcgccgccagcatccagcgtgtcggcctgctgcaaaacctgatcgtcaccgccaccgctgacggcgagcgttacgaagtcgtggccggaggccgtcgccttgccgccctcaagctgctggcgaagaagcgccgtatcagcagggaatgggaggtgccttgcttgttggtggccgatggcaccgcccgcaccgccagcctgactgaaaacgtgcagcgcgaagccatgcaccccgccgaccagttcgaggcatttgccgcgctggtggccgaaggccgccccattgaggacattgccgcagatttcagcgtcacgccgctggtggtgcagcgccgcctgaaactcgccaacgtgtcgccgcgcctgctggccgactaccgggccgaggccgtgagccttgaccagttgatggcccttgccatcaccgacgaccacgccgcgcaggaagccgcgttctacgatgcgcccacatggcagcgcagcccgcacaacctgcgcgaccgcctgaccgagcgcgagattgatgcccaccggcatccgctggtgcgcttcgttgggctggatgcttacgaggccgcaggcggtggcacccaccgcgatctgttcgcggaagccgatagcggtgtgtatttgaccgatgtcgcgctgctggaacggctggcgcaggacaagctggccagccttgccgccgaggtgaaggccgaaggctgggcatgggtggatgccacccccggcatgacccatgccgacctgcaagccttccagcgcgccccgagacagcgccgcagcccgaacaagcgcgaagcccaacgcatcgagaagttgcaaaccaagatgcaggcgctggccgaggccgtggatgccgccctggacgccgacgatgaagaaaaggccgacgccttgcaggaggaaggcgaacacctgggtgaacagttggaggcgctggaagatggcttgcaggactacggggaagccgtcaaagctgccgccggggccatcgtcaccatcgaccgcaacggcgaggccgtgattcatcgtggcctgctgcgcgaagccgaggccaaggcactgcgcacgtttgaacggctgcggcaaggtttcggcagcgagggcgaagccgggaacgacgacaccggcgaggaagccgacgacgcccccaagcccgccgccatgtccgaccggctggcgcaacgcttgagcgcccaccgtaccgccgcgctgcaaatcgaagtggcccggcatccgcaggtggcgctggccgcactggtgcacggcatggtgcagactgtcttgcaaggcagccactacggccacgatctgccgctgggcgtgaagctgacccagcaagatcggctggaaggcatggccccggactggccggaatcgtccgccgccgtggcactgcgcgaactgcaacaggtggcgggtgaagccttgccgcaagacagcgccgaactgttcgccgcactgctggcgaagccgcaggatgaactggtgcgcctgctggccgtatgcgtggcatccacggtcgatgtggtgacgccccgcgccacgcagcaccagcccggtgcggaactggcgcaggctgtcggcttggatatggccgcatggtggcagcccaccagcgaaggttatttccggcatgtaccgaaggccgcgattctggaagctgtcggcgcgttcgcgccggaaagcgtcaaccggctggcgaagctcaagaaggccgacattgccagcgaagccgaacggctggccgatggcaccggctggatgcctgccatcttcgccgccgaagccgcgcaggaggtggtgacggacgaggcagccgaagcaccggaggaagtcgccgctgtggcggatgagcagacgcaggccgaggcactggccgcttga

SEQ ID NO: 331664 - DNA, 723 bp, Pseudomonas aeruginosa
atggaaaaacgagatcttgaaaaccgcgttcttgaactttcaatgcctttgcttttgaagttgtatggccgtttcgaggttgatgaatctcagtccgacagacctgatgctgcaatagatgttatcaagcctcacaagcgattcggaaaaaaatgcgagccattcaaggtcggcgtggaaataaccacagtcgacaagaaggactcattggcataccttaatgatgaaaaatttggcaaagaaaagctaacaaaacagataagtgactcaatagatttgggtatagatagcgaacagccaaacaaaaagatcgacatcgaaatcccaaaatcatacatctatgatggagttgcaaaaaaaagagaaaagcacgccagctatgtgagccttggaaaatttaaagaaattattcttatttgctttagtgacgtaattagttcaaacaatgtgatttttaaaaacggcttgatggggtggtcgaaccgacttttaagtcaaaacgaatttcccttcgataaggtgatttttgttgactttctcggtggaactcccattagaatttacgataaaaacaagccgctccccgaagatcctcgtccctatatctatggggattcatcaataacagtcactcaaggcccatttatgagagtcggcgagacttataatttaaataaaatcaattccgcaccccccttaattgccccaaaagcaaaaaggtaa

SEQ ID NO: 331665 - DNA, 324 bp, Pseudomonas aeruginosa
atgcagaagcgaaccgtccagcgcggccgaccggccggctccaccaccttcgacgccgagctggcccaagccttcggcgcggcagtgcgtgcgctgcgcacagagcgcggcatcgcccaggaagcgctggccaacctggccggcattgagcgctcgcacatgggcaagatcgaacgcggggaacattcgccgagcttggcgatccttttcaagattgcaggggcattgaaatgcagcaccgtcgtgctgatggctgaagtagagagccagatgaggaatattgctgcagtacaaatcttttcctctatgcacgaggatcgttaa

SEQ ID NO: 331666 - DNA, 348 bp, Pseudomonas aeruginosa
atgactccgctcatcgccgccgacgagcgcacgcgcctgctgtccaacggccaggcccgcgccgccggacaggacaccgacccgctgcccgcggtgcgcctattcacgccagatgcgcatgccacttggctgttggcttcgctcgaccctgccgatggcgatactgcccacggcctgatcgacttggggattggtatgcctgcactgggaacggtgaagctgtccgacctggcatccatcgtcgggccgcgccagcagcgcgtgatgcgggatcgctacttccagccggtgcggcggctgtcggaataccttcagttggccgaagacaacggttcgatcaccgattga

SEQ ID NO: 331667 - DNA, 807 bp, Pseudomonas aeruginosa
atggctgatcgcagtgccgagccgtggtatgccacggcggcctatctctacgttctgcacctggatgacccggcgctggcctgggagtacctgcgccgtcacccggactaccggcgcgactggctgcgccgtcgtcgccaaccggatgctgccgggcattgggggctgcgcctgctggaagatcccgctctggatgcgcgggacgcgcacccggcctggttccccgatcacgatgccgtggtgcagctctacccggatgccgatccgccgcacgatgcgctatgttttgagttctggaagctgccgggccacaaacatctgatccatgacggcaagcgcctggtgctggtggctcgctggcccggctgttgcctgcgcttcgtgctcgcgccaggcttggccgatggcatggcttacgcctatgccatccgggcctgcgccgcgccttgcgaacgctatgcggccctggcgaccgaattgaccaagatcgccgtagcagctggtgccgcacctgcggcgactgtccggccacgtccgccgctgtccgcattgctggaactgcacacgcttcaggcgctggacgcgaccctggcgggtgcgtccttgcgggaggtggccgaagggctgtttggtgtggaagccgttgccgccgactggcacgccgacagcgctctgcgcgcccgtgtgcggcggctggtgcgccggggcgatgggctgatgcgcggcggttatcgccgtctggcacagcttccggctgccaccctgcatgaagggggacgtttcgcaacccctgcagaacgtccctga

SEQ ID NO: 331668 - DNA, 282 bp, Pseudomonas aeruginosa
atgcgacccgctcccttgcggcctgccgccgctcccgttgccacccccgcacaaccccaacgctatctcaccaacgatgaggctgccgactacctgcgcctgtcaccgcgcacgctggagaaacagcgcgtcatcggtggtggcccgaagtttcgcaagttcggccgccgtgtgatgtacgccgtggccgacctcgatgcctgggcagaaacgcgcagctttgagaccacttccgaccccgaatatgccgagcaccactcggctgacagccgtgcgcgctga

SEQ ID NO: 331669 - DNA, 825 bp, Pseudomonas aeruginosa
ttgcagccgcgcgaacagctcgacctgttccgcgctctgccgggcgaggacatggcaccgcgcgatgcccaggacttgatggcctatccgttcttctcgctggcgaagtcgcggcgcaccgcgccgatcgacttccgcagcggcaacatcaccatccgcgtggaaggcacgcaggagcatggcattgccaccatttgggatgccgacatcctgatctgggcggccagccagatcgtcgaagccaaggacgcgggcatccagccgtcccggcggatgcaggccacgccctacgagatcctgcgcttcatcgggcgcggcaagtcgctgcgcgactaccagcgtctcaaggccgcgctcgaccggctgcaatcgaccacggtggccacgtccatccgcgaaaccacggggaggcgattgcatcgcttctcgtggatcaacgaatggaaggaactggccgatgccaacggcacgccgctgggcatcgagctgatcctgccggactggttctatgcgggcgtgttggacgccgccctggtgctaaccatcgacccgacgtacttccgactcacgggaggcatcgagcgctggttgtaccgcctagtgcgcaagcatggcggcaggcaggaatacggctggcagttcgacttccggcatctgcaccgcaagtcgggcagcagcacgcggttttcggatttcgcctacgacctgcggacgctggtcgcccggcaatcgctgccggggtacgagctgggcatcgtgcggattcccgaggacgacatggaattgctgaccttccggcccgtgccgcagacggcacggggataa

SEQ ID NO: 331670 - DNA, 546 bp, Pseudomonas aeruginosa
atgaccacatccgcattgtctgctgccgcacctgccgccatcgcggtcatggctgcgcacgctgcaacttccagacaggctagcagtgcgccgttgacgcacgtatcgctcgcctacatcgaaccacgtttcaagctctacctgcgcttcggcgaaccagcgcgcacgctccagctcgatcgctggcggcgctgcgccatgttcatgccgggtgcaatgttctgccgcgttcgttggcaggccaacgactacggcacgatcctctggcagctcatggtaatgcaggctgctacaccgcttgatgccatgcagcgcatccccggtgtgcagccaggcgcgtgcctgctgctgcatgccgaaggtgatgccaatgtgcgcgccgtgctggaacgcatcgacggcatcgaggcgctgggtatcgctgccatcgacgtgccgcccgcgtactggcgcacgctgggcaaccgtctggcggctcgcctggcgctgcccgaatacaccgccgagcggcacgccgcctggctggccggaagggcgctgccatga

SEQ ID NO: 331671 - DNA, 600 bp, Pseudomonas aeruginosa
atgacgacccaatccaacaccccatgcacgcacgaagtcgcgccgcatcctcgctcgcgcctgcgcgttcgcatcgcgctggcgggcttcgccgccgtcggcctcgctgcgctggcctgggcggcgttcatgcagcccctgccgcgaatgacatacaacccgtccgacagcgtggcggtcggctggtatcgcatcgaaccgttcgacccgcgcaccgcctcgctgccacgtccgttgtccgtggacagcatcgtgctggtgccgctgcccgacagggccgccatgctggctgcgcagcgcggctacctgccgacccgcgttccgctgctcaaacgtgtgggcgcagtcgcgccgcaacacgtttgcatcgtcgccgggcaggtacgcatcgacggcgtgcctgcggccgccgcgctgcccgccgaccggctgggccggccgctgccatccgtgcagctttgccgccgcctcgaaccgggcgagctgttcctgttgagcgtgaccaatccggcgtcgttcgacagccgctatttcggcccggtcagcgcatccgccgtgatcggcgttgcgcatccggtctggctggagacacgcccatga

SEQ ID NO: 331672 - DNA, 1980 bp, Pseudomonas aeruginosa
atgaccgaccgccgcgacgacgatttccgcgtgcgccccagcgcccccatgaaccggggcaagggccagggtcagagcttcgtttccaaggtgcttaagcaggccggcaaagccagcagcggcaagtcggcggtgcgccgtcctggggcgggcggcaccggccagcgccccggctcgcgcctgggacgcggccacacagcagcgcgcttcgccggggcgaagctgacgcccatgtcgcggcgcgtgaccatcaagacgctgctggtcaatcaccaacgggccagcccgcagtcgctcgccaagcacctgcgctacatcgagcgcgacggcgcgggccgcgatggcgaaccgggccgggcctacgggccacaggccgacgaagccgacctggacgccttcaaggaacgctgcgccgatgaccgccaccatttccgcttcatcgtctcgccggaggacggggccgaactggacgacctgcgcacctacacccggcatctggtggatcgcatggaagccgacctgggcacgcggctggattgggtggcggtcgatcactggaacaccgacaacccgcacactcacctgatcgtgcgcgggcgcgacgacaccggcaaagacctcatcatcgcgggcgactacatcgcccacggctttcgccaccgggccgccgaactggcgacggagtggctggggccgcgcaccgaactggagatccagcagaccttggggcgcgaggtggaacaggagcgatggacgagcctggatcgcacgctgcaacgcgaggccggcgaggatggccgggtgcgaatcgaacgcttcaacgagccgaatttgcaacgccagcgcctgctgctgatcggccgcctgcagcgcttgcagcgactgggcctggccgacgagacgcagccgggctcctgggccatccataccgatgccgagaagaccttgcgcgccctgggcgagcgtggcgacatcatccgcaccatgcagcgcgccatgagcggccagccgcgcgagctggcggtgttcgagccgggcgaggatggccgtaccgtcatcggccgcgtagccgccaagggcttggccgacgaactgcacgaccggggctatctggtcatcgacggcacggacggcaaggcccactacgtcgtcctgaacgcccgtgacgagctggtcaactaccccaccggcgcggtggtggaagtgaagggatcagccgacgtgcgcgcggccgacaagaacatcgtcgcgctggcgagcgatggcctgtaccgcgccgatcaccacctggcaatcgaacagggccgggccaagcccggccgcgacccgcaggaagtcgtcgccgcccacgtccggcggctggaagccctgcgccgggccggcatcgtggagcgcgtggccgaagggctgtggaaggtgccggacgacctggccgagcgtggccgccagtacgacgcgcagcgcctgggcggcgtggcggcggagctgaaatcgcacctgccgatcgagcggcaggcccgcgtgatcggcgccacctggctcgaccagcaactgattggcggcggccgcgggctgggcgacctgggcttcggtggcgatgccaagcaggcgatgcagcagcgcgccgacttcctggccgaacagggactggccgagcggcgcgggcagcgggtgatgctcgcccggggcctgctgggcacgctgcgcaatcgggaactggcgcaggccgccaaggacattgctgccgaaaccggcctggagcatcgcccggtagccgaagggcagcgcgtcgccggcatctaccggcgctctgtcatgctggcgagcgggcgttacgccatgcttgatgacggcatggggttcagcctggtgccgtggcggccggtgatcgaacagcggctaggtcagcaacttgcagccacggtacgcggcggaggcgtgtcgtgggcgattgggcggcaacgcgggcccgccatctaa

SEQ ID NO: 331673 - DNA, 882 bp, Pseudomonas aeruginosa
atgcgcgtcttcgtggcggttgtgaccgatggctccttcacgacagctgcggatcggctgggcaccgacaaggcgcgtatcagccgcatcgtcagtcgcatggagaagaagctcggcgcacagctcctcacccgctcgacacggcgcctcagcgtgaccgaggtcgggcgcgattacttcgagcgcgccatgtgcatcctgaccgccgccgaagccgcagaggcggcggtggcgcagcagtccagggagcccaaaggactgctcaagctcacggctggatccgagttcggaacgatggtcgtggacgaatggatcgcggcgtttctgcgaacggccccgaaagtgacggtggaagcggaatacacgaaccgcctggtcgatatcatccatgaaggcttcgacgtcgccatccgtgtcggcacgctcgaagattcggggctctcggcgcgcaaactcggcgaggtgtcttacgggctgtatgcggcccctggctatctgaagcgcgggccggtgctttccgccgtcggcgacctgaagcgccacaacctgatcatgaagacgacgcgggggcgctccaattgggccctggtaaacggtgagaacatcgagaaggtcacggtatccccgcactgtgccgtcaacagcacgatcgccgcgaagaacctcgctcttgcaggactcgggatcacgcacttgccgcgcttcatggctgagccctatgtggctgctggcacgctttcttgcgtgcttcccggctgggcagaggttccggcgcctgtccacgccgtattcgcatcgagccgctacatggatccgaaagtacgcagcttcgtggatctttgcctaggtgcgtttaaggacggcggcggctcacaggattag

SEQ ID NO: 331674 - DNA, 798 bp, Pseudomonas aeruginosa
atgacacaaacaatcggaatcattggctccggcctcgtcggtaaggccgtcgcgcgcctcgcgatcgcagctggctacaaggtggtgatcagcaattcccgcggcgcggataccatcaaagacctgatcgaggagcttggactgctggcgagcgccggcaccaccgaggaggccatcgcggcgggtgacatcgtcacgctctcgatcccgatcgccgcctccgagcagctgcccgccggcaagttcgcgggcaaggtcgtactcgaccagacgaactactatcccgcattcggcaacaatgagcttctcgacaagggggagctgacctccagtgggctgatccagcggcgtttgccgggagcgaaggtcgtcaagggccttcacaacctcagctggctccacatgaaggccaacgcgacgccgaagggttcggcgaaccgcacgacgctgccggtcgcgggtgacgacgccggagcgaagcaggcggtgaccgagttcttcgacaagatcggcttcgataccatcgacgcgggctcgctcgcagacagctggcgcattgaaccgagcacgccgatctacttctgggcctacgctccgacggtagacctgaaggcgacgggcaccgaggccgagcgcgcctacacgcagcccggcacgcccgtgtcgcgcgaagatgctcagcgcctgatcgacgaggcaaagcgcccgtcaccgatcggcggcacgttcgagggcatgccgcaggtccacgtcgacctcttcatggcccaggcaagcgccgcgaccgtcaagaagtaa

SEQ ID NO: 331675 - DNA, 702 bp, Pseudomonas aeruginosa
atgaagataggaattttgaatgccggcaatgtcggcagtcgcctagcgcgagcctgggcaaccgcagggcatgacctcgtcattgcgaaggacggcgaggatcgcaagatcgcaccgttgcttgcagaactgggcgacagggcccggctcggcacgatccgcgaggccgccgaattcggcgaggccgttctgttctccgtctactggccgcgggtcgatgcgatcgtcagcgaagtaggcgacgcgctcgatggcaagaccgtcatcgacaccatgaacccgctcggcgtcaccgccgagttccagcatttccatgagctggacttcatgcgcgacaactcgacctccgaggttttgcagcaacgcctcccgaaggctcggatcgtcaaggcgttcaatctgctgggatcgccattacttgaggccgcagcgtggtcgaagtcgccggtgcagcccaacgtcttctatgtcagcgacgacgcatcggccgggcagatcgcgcgcggtctgatcgctgatgccggtttcaagcccatcaacgccggcccccttaaaggagcccggcaactggagcaggccggcgtcctgctgcaccacattgccgagcatgaatatgccggggacgcggagggtcttgttcggctggcgctgtcggtcatcgaggcaagccccggcccgatcgtgcgcgaacggatcacctga

SEQ ID NO: 331676 - DNA, 768 bp, Pseudomonas aeruginosa
atgtcccagtccctcaagggaaaaaccgctctcgtcaccggcggatcgcgcggcatcggtcgcgcgattgccgaacggcttgcggcggacggtgcgaccgtcgcaatcacctacaacgcaagcagcgcaggcgcagaagaagtggttacgaccatcgaaaaagcgggcggcaccgctttcgcgcttcacgccgacctggtcgatgccgcggcgatcccggcattgttcgatgcactcgaccgcgagttcactgcaaggaagggcagcaaggcgctcgacattctggtcaacaacgccggcaactcaggctggggtggtcttgccgatgcgacgccagacgcctggaacacgatgttcgcggttcacgcccgcgcaccgttcttcgtcgttcaatccgcgctgagccgtctctccgatggtggtcggatcatcaatacgtcctccggccttgccacgcgcccattgccggccgtccccatctactccatggccaaggcggccatcaacaacctgacccatgcgctggcgatggaattggggccgcgcggaatcacggtgaacgccgtggcgccgggttggacgcgaacggacatgaacgccgctgtccgcgaaaacgccgacatggtgaaggccatcgaagccgataccgcgctgggacgctttggcgaaacctcggatatcgccgcagtcgtggccttccttgcctccgatgaaggtcgttgggtgactgcccaggtgatcgaggcgagcggcggctacaagctctga

SEQ ID NO: 331677 - DNA, 690 bp, Pseudomonas aeruginosa
atggatatcggaatcataggagccggggagatcggaggctcgctgacgcgccggctttcgaaactgggccacaaggtgtccgtcgccaactcgcgcggcccggattcgcttgccgagcttgccgccgaaaccggcgccacggcggtcaccgtctccgaggcagccagtagcggcgagatcgttttcgttgccataccggtgtggaagatcgccgaactgccgaaggatctcttcgacgggatcggctccgacatcgtggtcgtcgataccggcaactactatccccgggagcgtgatggccggatcgatgacatcgaaacgggcatggctgaaagtcgctgggtggcaaatcagttgggacggccagtggtgaaggcactcaacaccttgtactggcgcaagctcctccatgagggcaagccagcgggtgctcccggtcgtatcgcgttgccggtcgctggcgacgatgaagccgacaaaacaaagctcatccggcttttcgacgaactcggattcgacggcatcgacgctggggggctcgacgagtcctggcgtcagcagcctggcacgccggtctatgccaccgatctcgacgcggaaggtgtccgtaaggcgcttgccgaagcaagccccgagcgcaaacctgaaatgcgtgccacgccgaatagcagcctcggcaagcctatttga

SEQ ID NO: 331678 - DNA, 807 bp, Pseudomonas aeruginosa
atggacacacagcttgaaggtcgcgtcgctttgatcacaggtgcaagccaaggcatcggcgaggcgatcgcacgagcgctgcacgccgagggcgccaaggtcgcccttctggcgcgcgacgagggcaagctggcgaagatcgccgaggatctcggagaccgggccttcgcgatcagtggcgacgtgacgagcgccgacagcttggcgcaggcgattgcggcggtggagtcagcgcttgggccaatcgacatcgctgtcaacaatgcgggcggattgcggtcatcgaccggcgggctgttccgaccattcgaagaggttcccgacgctgactggctcgaaacctgggaattcaacgtcctatccgttgtgcgggttgtcagagcagtggcaccgaaaatggcagcgcgcggatggggccggatcatcaacatctcgtcggaaagcggcgtccagcccgacgcggtcgccattgagtatgcctccgccaaaagcgcgttgaacatcctgaccaagggactcgcgaaaacttatgccgaccggggcgtgctggtgaacgccgtatcgccggcctatgtggacacgcccatcctccgtgatctgctgacgcagcaggatggtgccgagggtctgtcgcctgacgagcttgcggctcatttcatgcccaccttccgcccgaacatcggggtcggccggccgtgcaagccggaagacgtcgctgcggcagttgtgttcttggcgtcggaacaggctggcttcatcaccggaaccaatctgcgggtggacggcggctcggtaatggcgatttaa

SEQ ID NO: 331679 - DNA, 264 bp, Pseudomonas aeruginosa
atgaagaagaccatcccttttctgctggccttcgcgctgacggcctgcggccagtccgatatacctcaacaggcaaacctgccgaccgtcgaagaactagcatccaaccccgagcggcttaaagagctgcgccaacaatgtagagtcgaacgctcgaagctgggcgacgagctatgcaaccgcgtagccgaagccacgcgcaagcggttctatggcgacggaacggtgccctatacgccgccggagaatccgcccaagttctga

SEQ ID NO: 331680 - DNA, 759 bp, Pseudomonas aeruginosa
atgaagatccagtcctcaaggaaacctcggctggcagcgcttgccgccgtcttggtgctgactgctgcgcaacctgcacacgctctgttcggcgttggtgacatcgtgctcgatcccaccaacctggtgcagaacaccctgacggcgattcgtaccctggagcagatcaacaaccaggtgcaacagttgcagaacgaggctcagatgctcagcaaccaggcacgcaacctggccagccttgacttcaatgtcgtcagccggctgcacgcctcgctggtcaggagcgagcagttgatcacagaggcacaggggctggcctatgacgtgcagaacctcgacagcgagttcgcccgactgtaccccgacgagtacgccgccaccgtcagcggcgaccagatgtaccgtgatgcccgcgagcgctgggagtacacgctcgatggcctgcacaccgcaatgcggatgcaggcacaggtgtcgcggaacttgagtgaagacgaaggcgcgctgaccgatctagtggggcagagccagtcggccaccggtgccctgcaggccatgcaggcgaccaaccaactgctggccttgcaggccaagcagtccatccaggcccagcagctccagctcactcaggatcgttcaacctccctggagctggcacggcaggcggcggccagcgagcgagcacgtgaagtgcggcggcgcttcctaggtgagggtacgccgtacacgccacacacagtccagttctacgggaactga

SEQ ID NO: 331681 - DNA, 531 bp, Pseudomonas aeruginosa
gtgttccgcaatctgatcgaatcggagcgttcttctctctccaagcgttcacgcaagctgttcacgcttagcgctctacattttgccatcctcgagatgctcaacgagcaggagcttgaggatttctccgctgcctccaagaaatgtaatgagttctgggcggctgtgggcgaacagatccccgaatggatctatgtacgcgaggggcgcatgacagccggcgaggtgcgtcaggatttcatccactcgcatgcgatcgttctgcaagctttggggcgtgtaggtaagttcatctatcaaaccgatgcgggtaagcccaatctgaaatcgacgctcaagaaactgcgcgatattgattgggcgcgcaccaatgtttcgacttgggaaggtcgcgccatgatcggcgggcggatggcaaagaacagccagaacatcacactgacatgcaaccaaatcaaatgttcgttggggttgccactgacccccgaagaacaagttatcgaaagcgccttcactgccgcccgtcagtaa

SEQ ID NO: 331682 - DNA, 1491 bp, Pseudomonas aeruginosa
atgagcacgccacccgaggccatcatcgaagaaattcagtcgctatatcgttccgactccttaccctggattgtcggttatagcggcggcaaggattcgactgcctccttgcaattaatctggaaagccgttgcggcgttgccagttgagcagcgtaccaaggatattcatgtcattagcacagacaccttggtggaaaacccagtaatcgctgcctgggtcgagtcgtcgctccagcgcatgaaggttgaggccgggcgccaggggctgccgattcatccgcaccggctaactccccccctggagcatcgcttctgggtcaatctgatcggcaagggctatccggctccccgtaatcgctttcgttggtgtactgatcgcctgaagatcagtgcctccaccaagtttattcaagagctgtcagaggccaataacgaggccattttggtgctcggtcagcgtcgtggcgaaagccaggcgcgtgacaaggtgatggatcattacagcggcagtacgcgtgatcgcctgagtcgcaaccgtgatcctaaactgtcacgagtttgggtctatctgcccatcgaaacctggaccagtgacgatgtgtggatgtatgtcctcactgatgagaatccctggggcgtggataaccaagagctgttcagcatctacaaaggcgcaacgccagacgctgagtgtccggtagtggtcgacaagtccaccccgagctgcggcgatagtcgctttggttgttatgtctgcaccatggtgtcgcaagataaatccatgcaggcgatgatccagaacgacgatcagaagtcctggatgaagccgattctggacttccgcaacacctacctcagtgtgcaggactgggatgtgcgtgattttaagcgcatgaacggtcgggtgaaactgatggggaaaggcgatacagccgaactgattcatgggccctatctgcaagattaccgcgccaaacttttagaggagttgttgcgcactcagcgagtcgttcgtgatgccaaggttccggggcatgaccaaatcgaacttatctccatcgacgagctggacgccatcagacgtatctgggtagaggagaagggtgaaatagaggacttggtgcccaagatctacgagcgcgttttccaagaggtctatccagggcgggcgatggagccacacccgttggagcctgaagacctagccctgctgaatgaagtggtgactgagcttgatcctgaggctggcgagcggctctatcaacttacgcgcaacctgctggcagtgcagttccagtccatgcaagtccagaagcgttcgcagcatctagatcgcttggaagcagtgcttaaagccaacgcatttcgcaccgaacatgaggctttggagtttgccaagagcatccgcgaggatggccaagaggagtcgagcgcgggggacgagcttgagctaattccgcttgcagtggtagaggcggaagagaagtaa

SEQ ID NO: 331683 - DNA, 1986 bp, Pseudomonas aeruginosa
atggcgaagctaactattaatcagatttccattgagaatctcggcccttttcgcgagcaacaaagcttcgatctcaatgtgcaggccaaacgaccagtcattttgatcaaagctctcaatggcagcggcaagactacgctgctaaccgctctgcagattggcctgtatggctataaagccatcaacatggcgcgtcgctctgaatatgaacagctaattgttggcttgcagcgcaatgatgccacggggccggcgcggattgagatgcgactcagcatcgaagtgggtgactacactcaggcgctgacgatccgccgcgagtggttgccgaaggagaagggctatcgcgagcagtttcgcgtatatgccggacattccgaagatttggcgctggcagaaaattgggatgattttatcaacgatattttgccggtagagctggtacacctgttcctctttgacggtgaaaaaatcgaagctttagccaaccctgaacgtctgccagccctgctacgtcgggctacggaggtgttcttagggttaggtggtatcgatgctctcgcgaatgacctcaaggcagtagagcggcgtgccagcaagaagacgccgtcgggcgacgctagcgaagaccagcagcaagctgatgagtacgcactccagctcacggagctagagcagcgtatcgagatgctgtcccagcgccaagcgcaagctagaaccgagctcgatagttctcaacgcaaactggaaagcttctccgtcgaggcgcagcgaagcggcctgcaggcttaccagcaagctgcggccttgcgtgcacgggttgagctgtgcgagcagcagcacaagcaagcacgtgcctcactggtcgcggcgcttgaagatcctctgctgccgctggcttggttgggaccactttgggaacggtataaggaacagcggcagcaagagcagcaagccaagcacgctgacttgctggtcaatgagtttgccaagcgtgaccagcgagttctagagttgctggcccgccaagtaccgcaggctcagtctgcggtagccgatctgtttgcggccgatctccaaggcctgcagggctctcagcagcccacatcaatattactcgcgggcggtgacccggccgaaatcgagttacgacttcagcaagcgaagcagcttctgatggaagcgcaggaggttgttgtggttactcagcaggccatggagaaggctcagcatgctgtggatcagattcccgcgtatgagcagctcagtgctgtgtttgagaccatgcagcagcatacccaggccgtatcgactgcagaatggcgggtgcaggagctgagtcgcgaactagaagacgcgcgcggtaagcaagcacacttcgatattcgacacaaggcagcattgtcccgtgcccgagccgagcttaaggagaatgctttccagctcaaggctctagaggctgctgaccgagctaaggttgcattggatatcttccgtgatcgtttgctagcttcgaaggcgcagtggctatccgacatgatcacggcagagttcaagcagctactgcgtaagcgaaatctgattgctcgtgtgctggtcgagccgcagacttatgcagtatcgatagaggatgttaacggtcatagcctgccgatggagcgtttgtcggccggtgagcggcaaattctggcgattgcagtgttgagtgcgttaattcgtgagcgcaagggacgtttcccagtggtcgtggacacaccattagcgcgtttggatcgtaagcaccgtgaagctctagttcataatttctttgccaagatatcgcaccaagtcatggtgctttccactgatgaagaggtagaaggaacggtttacagtgcgttggagcctcatatgaatcgtgaatattcgcttgctttcgatgatgtgaagcgaagtagtgttgctagtattcaagcaaggcagctgagcctggagccttcgcaatga

SEQ ID NO: 331684 - DNA, 975 bp, Pseudomonas aeruginosa
gtgtcacttacacgagttagtagctatattggcaatgcaccaagtgacccagctggcatttggcaacagtcagaactggagaaatggtctaactcgccaccagaagacatgatagccaggcatgaaacaatattacgagcagatgcacatgctctttggtttagatggtttattgagggaatttgtaatcctttacgctatgtagaagacgaaaagaaaaccattattgatgtactttccgacgtaatacccagagtcgacgaaatataccctaaagagcctgcagatgagcgaagccaagtcgcaaaaaaaatagcgatacatattatggcggaggtatctagaaggaggcaaatcgaacggattagtgcatcaatccatcaaaaaagagagttaatatatagctctatcggagaaccacgctgctggatgtgcgggtataaattctctgaaaaagcaatagaaaaatttcttgggaaaacacgcggcttaacgctaacccctccacagtttgttgacatattgcgcccccgagggatctatgccagggatatagggattgaaattgagcatattgtccctgttgcaggtggcggtggcgggctagaaaacttagcgctggcatgcggctggtgcaacaaaagcaagggcgctagaacgtcgttatatgatgcagatgcgcgcgcccctcgagcatcttttgttcttggaaacatacgctggcatgagctgcctcaccccttttggacagtgagattaatggcaacaaggatgagatgcgagcacagctctggctgcgacaagaatatcaaaaattccgagttattcattgcaccctcagaccataggggagctccgaaccctagtaacttgcatatatactgcgcagatcacgatccatatcatcactctagatactttccaagagaggaagctgcacggatatggaaagaaaaaactagagcatatgcttaa

SEQ ID NO: 331685 - DNA, 1752 bp, Pseudomonas aeruginosa
atgagcattgaatcctttgactacccagctctacttttgagccaaggccctcaggctccagccctagttctgttctccgcatctgcggtagaaatctctgaatgggtaggtattccacaaaagactcgcctgcttgagggcgaaactctaggctttcagcgcgatgacgacccaatccgggtaaatcaaatctctaaattctatcaagatcctcgtaatgtaattcataaccccctactctgcgctatcagaaatgaccttgggcaagagattacttttacgccaaccccgcaaacggatgccaccaacgccctccccgaccattcgacccctggcatcctcaccatcaaaacaaaaatcagaagccatcaaccattaagagagcttttcaaggacgcgcgcatagcgctcgaatgccgggtttcgagccttaaagacaagccagatccggagatattaattgccaagctgcgcgagcaaattgataccccagccgagcatttggagcatgaagaactactcagagagctttcagaggctgacaatacagaaagcttcaacgaatcgagcgtcgccacagaagaagccttattcgaagagtctcatgttgaggagttctgggcagaactacgggcacgggagatattgctagagcaactaaaagatcaattcagcggtgaggagttcctgggattcacgagagaagccgtagaggcctatctccgccccgtagtactggtggatggacaacataggctacttggagcaatgcaagcggcaagatcaagcatagatggagatctcgagacagttgaacaagcgtcgcgcttactctcggagggactaaccgccaatgaagttgagagaaagatactaggccaaaaggcaaggcagctctctatctctatgctattagatgccaagcctcaagagcatgttttccagtttgtggttgtcaaccagaaagccacccccgttagacctgcacttttggccactattatatcaaccagcctatcggaagacgaactagagccaatctctgataggctagaaaacgctggaatcccattaaaaacttctagagctattagtttttttgctaagaataccgctagtcctttctcgggtttagtatcccgcgggtttgagggtgagggtaatgatttactcccctggaccgtcctcggacagctcgtgacaatgtttagagatctaaagggagcaaaattttttcacgacgggaagctagactatgcagatgcatggaaaagaagatatctagagaactctaaagtttcccagcctcaatcagaagacacgacatcatatgaccattggagacacccagatggtccctggaaagatgttttcattgctttctggagcgccctcagagaccaattaggaagcacggagaatcctgacgcagagaattactggggaagaccgaggaattcgaatctattcaacaaaccatcattactaaccttagccaccgacttttttgcatttctaaccgagaccaggactgtgattgaatctgtcgatcaggtctccgttttggtttccgattggcttgtagatgttgataaaaattatttcgctcgtgactggaaacttaccggtgtgaaaaaagacgcgcctggaaccaggaagcaatggtcgaagatttggtatagctaccgaagagaccctagacaactgcccaaaattactgattttgcggttatctacaaggaaggaagatag

SEQ ID NO: 331686 - DNA, 1074 bp, Pseudomonas aeruginosa
atgagcacatcagaacttaatttgacatatatagaaatagagcaaccaggcggaacattctactacacaaaagtcaaagcatacgaaataatagaaaagctcgacataaagaatcgtattgaatatgaagacggcgtgcagcgagagctaaacaaaaagcgaacatctgaaatcgcagagtacttatccttggctgatgcggttttgcccacccctattgtaatatcgtcaaaaagcgtaattgcgagaaacggaagcgagctaatactcgcactagacgaaggcgggaattacggagaaatcattgacggccaacatcgatatgagggactacggaaaagtaacgacttcttcaacttcgatgttccgctatgcatttttgttgagctttcaaccgaagacaaagccagcatattctcaacaatcaatagcacccaggtaaaagtcccaaaatcatacatctatgatctgttcggctactcagaagataataccccaataaaatttgctcacaacgtatgcaagacactgaactacgaagaaaagggccctctttttagacatataaaaatgctggggaaaaagctgcacgaccaagaagttctttcacaagccgcctttgtagacgccataattccagccttttcaaaagacatcaagaaagacgccaacacactaaggcaaaagaaacaattagaccctgacccaaacctgcccctcagaactctatacatagaaaacaatatattaatattctctaaattgttcagcaactacatgcgagcgctccaaaccgtatcggaagaaacatggaaaggcttcatactaaaaagcatcggcataaaggtattttccaggttattctccgaaatatgcccttacgctctgaaaaagggcaatgccaaagtagagtatttcgccttcgtactatctcatataaagcagcaaatcaaggaatgttccactgagaacggcacgaacaaacgcgctgaagaaagtacatttgaaaaattacgcacagccttgcctaatttagacttactcgaatttacagagaaagcagatgcgccatga

SEQ ID NO: 331687 - DNA, 651 bp, Pseudomonas aeruginosa
atggaaaagacaaaaaacacattatccggcgactttaaaaatctttttataataaaatcgatatatacattcttcaaaaagaacagaatagaccaagactatagagcaacactattccaggaaggaattacgccaaaagtcgtcttctcattcattttctttataatcattcttggtcaaattggaatactgacctccatcatcacgtccacaatcagcggacaaggattcctcaaagcaatagctgctcaaggagaatcaggaaattttttaacctttgaaatatcattaatattttcctgcgcgatgctctactttaatgaatatagtcaagatgaaaaaatagatctactcttcttaagggtaacctatttaatagccggactggtaatcgctttccttgcaatgctaaattacatatacataacgacaacaaacaacgttgaatggacctcatattttatagtatacaacatattcctatatgtttttggcatatacatctcatacaaaatgcacttaacattttcagctgccgaagagtccgccgcaaagcatgaaagcaagaacacagcagacacccaaaaaagagcgatcactctacagtctgttgaatccgcaaaaattggcggctccgaaataaagctataa

SEQ ID NO: 331688 - DNA, 2130 bp, Pseudomonas aeruginosa
atgaataccgagacaggtctcattctggccgagctgcgcggcgcatcaggtcttacccagaaacagatcgcggagcggatgagcggtaaccaaactcgggtctctcgaattgagtctggagacggcgacgctgccgacaccgatgcgtatcttgctgcagtgggaacaccgcaggcggagaacctacgggaactccttaagctaaattggagcaatttacctcgaccatcgcttcgccaccccgacctcgaaacattagtcgctgtcgagcaaggtctgatgcgcgtccggtcattcctagccgacggacaagttcccacagttcttgcgggtcaagcacaattgctcgatcggcgcctagaggaagctgggcgttatctgctttcgctggatcatgaggttgtctacgtcggcgaaatcggcgtcggcaagaccacagccgcttgccggcagtcaggtctagttgtagatgaagcaaccgctgcagacctgaaaggaatgctgcttgataccggtggtggccgcaccaccctatgcgatgtgcgcgttgagccaggtgatcgctttgccctcaacgtagacccagtcggtgatgaagaatgctacaagctggtcgcagaaatatgcaggagtctttacgaacgaatatcaggcgagtcctctcagagtaccgctgagttcaaaccagcagaggaagtcgagcgagccctccgcaatatggctggactacctcgccctgcgcgcgcacgaaaaggacaggtaacagccccggatcccgctgtcgaacttgcaagggcatttagctcacaagaggctcttactgccgagtttgctgcgaaattgagcttatggagacgtcgccggcggactattgaattcgaaggtgttgacgaaaaggatggccgccagtggttacgctcaacatttacagcgatcaacaacggcagacacgatgatttctcgctgcctgagcgcatcacgatcaccgttccattcgccttaatacccgactctcgcctgtccatcgcagtaattgatactcgaggcgttgatggcagcgccatacgccccgacatccttgagcacttaagagaccctcgagcaatcactcttctgtgctcaaaatggggcagcgcacccgaccctagcgctcaagcactgctagagcacgtcaatgagaccgatgccgatcccgcactattcaggcgcgtttctgttgtagcgctcgcccgtcagggtgacgcactctcgatgcgccacgattcgggagatgccgctgaagatacagacgaaggctacagtataaaacttggccaaattgaagatgcccttcagaaaataggcctacccgggatcgaagcatttgcgtttgatgcaggcactgacgatccgtcgcagttgacccagttcgttctggatcgagtctcggcaatcagggaaagccaggctgactcagccaaagcaaccatagttgcgattgatcaaatgattgaaaatcgtgctcaagccaccgcaatagcagcgcttagcacggtaagtagtaaccttgaccgatttgctgatcgcaaaagtcagttaagcggcctccgccgtccggcctacgaccttttgcttcgcaccattgatcagcgccacgctcgaacagtttgggcgacaacacgtcgtgccggccgattctggaatttcaacgtttatcagtatctgggcgatggcgcggctgccgaggcaaagtttaggtcttccgaggtcttagctggtctatacactcttatcgaagccgacctcgataacgatgaactcgaaagcgtacacggatttcttctgcaggtgcaggccgacgcggctcagtgggaaactgatttcgtcaacgctgcccgccatcatgccatcgcgatatatgcgcagccgcttggccgagagagcgcgctctgggatgcctgtgaaaacgactatggctatggcttgggcgaataccgctctggcgtcagggacaagctctgcgcttggttcgaggaacatgtcgacctgcgcgaagatctcgaaaggcgagtggcccgcgcctggcgaaccagcttcatttcgcccctgaaaaaagcagcaggcctctccgacacggcagtagatcgctaa

SEQ ID NO: 331689 - DNA, 1209 bp, Pseudomonas aeruginosa; identical to SEQ ID NO: 319918

SEQ ID NO: 331690 - DNA, 1266 bp, Pseudomonas aeruginosa
atgagcatgaccccgatcgcccgtgccgtggcttttgccgcgctgggttccagcattaccgtcccaaccctggcccatgccgagttcatcaaggacagcaaggccagcatcgaactccgcaacttctacttcaaccgtgatttccgccaggaaggcgccagccagtccaaggccgaggaatgggcccagggcttcctcctgcgctacgagtccggctacaccgagggcaccatcggtttcggcgtcgacgccatcggcctgctcggggtgaagctcgactccagccccgaccgcagcggcaccggcctgctcaagcgcgaccgcgagaccggccgcgcccaggacgactatggcgaggcagggatcaccgccaagctgcgggcgtcgaagagcaccctgaagatcggcaccctgacccccaagctgccggtgatcatgcccaacgacagccgcctgctgccacagaccttccagggcggcgcgctgaactccatggagatcgacggcctgaccctcgacgccgggcgcctgaagaaggtcaaccagcgcgactcctcggacaacgaggacatgaccatcaccggtggcggcaagcgcaacatcgtggtccgttccgggctgacttcggacaagttcgacttcgccggcggcagctacaagtggaccgacaacctcagcaccagctaccactacggcaagctcgacaacttctacaagcagcattacctcggcctggtgcacaccctgccgatcgccgacaagcagtcgctgaaatccgacatccgctgggcgcgctccaccgacgacggttccagcaacgtcgacaacaaggcgctcaacgccatgttcacctacagcctcggctaccacgccttcggcgtcggctaccagaagatgagcggcgacaccggcttcgcctacatcaacggcgccgacccctacctggtgaacttcatccagatcggcgacttcgccaacaaggacgagaaatcctggcaggcgcgctacgactacaacttcgccggcgtcggcattcccggcctgaccttcatgacccgctacgtcaagggcgacaacatcgacctgctgaccacctcgggcgaaggcaaggaatgggaacgcgacatggacatcgcctacgtgttccagagcggcccgttgaagaacctcggggtgaagtggcgcaacgcgaccatgcgcaccaactacaccaacgactacgacgaaaatcgcctgatcgtcagctacacgctgccgctctggtaa

SEQ ID NO: 331691 - DNA, 1404 bp, Pseudomonas aeruginosa
atgaaaacgcccgcctggacgcgccatgccctctgggtcatgccgctcgccctggggctgcaatccgccgtggtcgcgggggatgagcagccaagcaagacttccagctattcgccggtggtgatcaatgaggacttcgccaccatcatgaagcgcatgacggcgaacaaaccgtcgatcgaacaggcccacaagacgcttctcgagcagcgttacgatctcagcgacaggccggccaagggcgccagcatgacgcgcggcaagccgctgcaggaggggatccgggtgaagctgccggccggcaccagctgggaggaactggccaggctgagccccgaggaaatccgcaagcaggggctgttccccggtggcttcctgccgctgccgcaccccaaccatgccgaaggcgggatggtctttcccaagttcctcatcgacgagatcaagcgccaggaaagccgcgacctgacccgtttcgacctcgactacgacctgccggaccacttcctgccggaattcccggcaccgatgttccttaccacccggcctgacctgggcgatgtgtccaagggcaagctggtgaccatcgacaactatttcgagttgttcaacgggattctcaatcccaagcagctggaagggctgcgcctgctgctaacggcctttccgcagcagcagttcaacctcaccgacgatcgccgtagcgagcatccgagccgcggcgtagcctgcttcgactgccatgcgaacggccacaccaatgccgctacccacctggccggcgatgtgcgcccgcagccgttccgccaccgcatcgacacaccgacgctgcgcggggtgaacatccagcggttgttcggctcgcagagggcgctgaagaccgtcgaggacttcaccgagttcgagcagcgcgccgcctacttcgacggtgatccggtaatcgccaccaagaagggggtgaacgtgctcgagcgtggcagtcaagtgcatttcatgggtgagttccaggcgctgctggacttccccccggcaccgaagctggatgtggaggggcggctcgatccgggcaaggccagcgagcaggaattgcgtggcgaaaagctgttctacggcaaggcggcctgcgccgggtgccatgcgccgccttacttcaccgacaacctgatgcacaacctgaaggtggagcgcttctacgatccgaaactggtcaatggcgtgatggcgtccgccgacgggccgatcaagaccttcccgttgcgcgggatcaaggattcgccgccgtacctgcacgacgaccgcctgctgaccctggaggacaccgtggagttcttcaacctggtactggagcgcaagctgtccgcggaagagaagggcgacctggtggcctacctgcgtaccctgtga

SEQ ID NO: 331692 - DNA, 1365 bp, Pseudomonas aeruginosa
atgaacttcgcctgcgaacaagaagcccaggatttcctggccgccaaccccgacatcgaactcttcgaactgttcattctcgacgccaatggcgtgccgcgcggcaagctgctgcaccgcgacgagctgctggccgtctaccgcagcggccggccgctgccgagcaccatcctcgggctgacgatgaacggcgaggacgtcgaggactctggcctggtctgggacgtcggcgacatcgactgccgcgcctaccccctgtccggcagcctggtgcgcctgccctggcgacagatcccgacggcggcggtgcaggtcagcatgcacccgagcgaaggcctgcccgccagcgtcgccgatccgcggcacctcctggtgcgaaccatcgacgcgctgaagagcgagggctatcacccggtgatggccgccgagctggagttctacctgctcgaccgtgagcgcgacgccaacggccgcccgcaaccggcccgcgacgccgatggcggccgcccacgggcgacccaggtctacggcctgcgcgaactggagcagatcgagccgttcctcgccgacctctatgccgcctgcaaggcgcagggcctgccggcacgcacggcgatctcggaatatgccccgggccaggtggaaatcaccctcgaccacggcgacgccctagtcgccatggaccaggcgatccgctacaagcgcctggtcaagggcgtcgcgcacaagcacgggatgctcgcctgcttcatggccaagccgttcgacgacctggccggcactggcatgcacctgcacgtcagcctggccgacgaacaaggccacaacctgttcgccagcgacgaccccgccggcacgccgttgctgcgccaggcggtcggcggcatgctcgccagcctgctcgactcgctcctgctgttctgtcccaacgccaactcctaccgacgcttccaggccaacagctacgcgccgctggcgcagacctggggcgtcgacaaccgcaccgtgagcctgcgcgtgccgggcggcccggcctccagtcggcatatcgagcaccgcatctgcggcgccgacgccaacccctacctggccgccgcggcgctcctcgccggggtccaccgcggcatccgcgaaggcatcgatccgggtgcgccggtggagggcaacggctacgcccaggccggcaagcgcctgcccaccgactggctgaccgccctcgataccctgcaaggctccgagtgggcgcgggaagccttcggcgagccgttcctcggcgtctacctggcggtgaagcgcgcggaataccggcaattcatgggcgaggtcggcgagcaggactggcgctggtacctgacccaggcctga

SEQ ID NO: 331693 - DNA, 243 bp, Pseudomonas aeruginosa
atggaggtcaatacgttacggtttcgtgtcattcccagcggcgcgcatgggctggggaggggcctggcggataagcgcgaggcggccattcgccggtactgcggggtatcggcggatgacgccggggcgttgttcgccctgcgaagcgcccgccgccccgggcgccggaatgaaaaaggggtggccgaagccacccctccgcgcgtaccgccgctgcctcagagcatgctgcgcagcacgtag

SEQ ID NO: 331694 - DNA, 1566 bp, Pseudomonas aeruginosa
atgcgcaacaatcaaccgatcacccagcacgagcgcgtctatccggcggagcaacgcctgatcaccaccaccaatctcaaaggcatcattacctactgcaatgaagccttcatcgacatcagcggcttcagtcgcgaggagctgatgtccgcgccgcacaatctgatccgtcaccccgacgtcccgccggcggtgttcgcccacatgtggaccaccctcaaagccggccgcccgtggatggggatcgtcaagaaccgctgcaagaacggcgaccactactgggtcagcgcctatgtcacgccgatctacgaccagggcgcggtggtcggctacgagtcggtgcgggtcaagccgaccgccgaacagatccagcgcgccgaggccctctaccgtcgcctcggcgccggcaagccggcgatcccccggcgcgaccgctggctgccggtactgctcgactggctgccgttcatcctgatcagccagatcggcttcctcatcggtatctggctgaactcctggtggggcttcatcctcgccggcctgctcgccgttccgctcggcctggccggactgcgctggcagaagcgcgggctgaagcgcctgatgcggctcgccgaacagaccacctccgacccgctgatcgcgcagatgtacaccgacagccgcggcgaccaggcgcgcctggaaatggccatcctcagccaggacgcgcgcctgaagacctgcctgacgcgcctgcaggacaccgccgaatacctcaccgaacaggcgcgccaggccgacaccctggcccaccacagctccgccggtctggaacagcagcgcgcagagaccgaacaggtggccaccgcggtcaacgagatggccgccaccacccaggaagtggcgaacaatgtccagttgaccgccgacgcgacacagaaggccaacgaactgacctcgcgcggccgcgacatcgccgcggagacgcgcaacgccatccagcgcctgtcggagtcggtgggcgagaccggggccgcggtgagtcgcctggcccaggacagcaacgagatcggcggcgtggtcgatgtgatcaagggcatcgccgaccagaccaacctgctcgccctcaacgccgccatcgaggcggcgcgggccggcgaccagggacgcggcttcgccgtggtggccgacgaagtgcgctcgctggcgcaacgcaccgcggcctccaccgagcagatccaccacctgatcgccaagttgcagaacaccgccaacgatgcggtacataccatggagagcggcctgcagcaggccgaagccggggtccagcgggtgctggaagccgacagcgcgctggtcggcatcagcgaggcggtcagcaacatcaccgagatgaccacccagatcgccgccgccgcggaggaacagagcgcggtggccgaggaaatcaaccgcaacatcagcaccatcgccgccctggccgagcagacctccgacgaggcgctgcgcacggcgaaactgagcgaggaactgaccaccaccgcgcagagccagtattccctggtcgagcgcttcaaccgctga

SEQ ID NO: 331695 - DNA, 1431 bp, Pseudomonas aeruginosa
atgacgcgtctgttgctgctttcgctttgcctgctggtgctcgcacccttgccggcggctgcgcgcatcaccggccagccggacaactggcacagggaacagccggagacccgcgacctggcgagcatccgccgcgctggcgtgctcaaggtgctggtcaaccagagccgcaacagctcgggcgaggtgaagggcgagccgatcggcgtcgagtaccgtcgcctgcgcgccttcgagcaatacctcaacagccgctcgccgtccgcgcggaacctcaccctcaagctcatacccaagcccaaggaccagttgcttgccgccctgcagcgtggcgaaggcgacctggtcgcccccggcgaactgctgccggcgcacgacggcctgcaggtcagcccgagcgcgccggtgcgcgccgatgtgccgctggtgctggtggcgcgcaagggcaaccggcgctacacgcgcctggagcagttgtccgggcggaccatcccgctgccggccggcagcgccgccgagggcgccatcgaactggtcaaccagcgcctggcgcaacgccgcatggcaccgatccggatcgaaaagctggacgcttccctggccgtcgaggatgtgatggaaatggtccaggcaggcatcctcggcttcaccgtggtcgagcagcccatcgccgaacgctgggccaaggtgctgccgaagctgcgcgtcgaccgccacctggtgctggacaatcgcgccgacatggcctggtacgtgcgccgcgatgccagcaccctgcgcgcgaccatcgaccgcttcctcgccgactaccgcgcgccggccgaccaggacgtggctttccagcgcgtctaccggcgcgcctacaaggtccgcaaccccctcggcgcggcggaccgcaagcgcctggaagcggtccgtccactgctgcagcgctacgcgcggcagagcagcatggactggctggcgctggcggcggtggcctacaaggagtcgcatctgaacccgaaggcgcgcggttccggcggcgccagcgggctgatgcagatcaccccggcggcggcgcgcagcgtcggggtcggcaatgtgcacgacaaggacagcaacgtgctggccgccagtcgctacctgaccaagatccgcaagcagttcttctccagcaagcacctcgacgaacgcgagcgcctggcgttcaccctggcggcctacaacatgggcccggagcgggtacagaacctgcgcacccaggcgcgtcgccgggggctcgatccgaatcgctggttcttccaggtcgagcgggtggctgcggaagagataggcatgggtgtggtgagttatgtcagcagcgtcaacaagtactaccttgcatatgaacgcgaacgggttcgcctggagcccggggtgcgtgcgaagacggcgacggctcaaaaataa

SEQ ID NO: 331696 - DNA, 468 bp, Pseudomonas aeruginosa
atggaaaacaccaccgatagggacgtgcgcgcccaccatcgtcatacgaacatttcgcctttcctggtcaatgccagcacaccccgtacaggcgaagaccggttacctgggtattactgcgaacagcagcagatgtgggtaatcgagactgagcaaggcgctttacccatcatcaatgagcaggcgctctcgcagctgaaaacgaagactcgtgcagacggcgaagaggatgacgactgccacctcgcgcttgaactggtgaccaagacgcaccagcagatcgaaagcgacgacgatacccgcccaacggcgtacaacaacttcctgtacttagcgaccaagaccgattcaatcgacgagaccgacgacaattgctcagcagcccagttgctggagctggtcaccaaaaccaaggttcaacaggaggcagacgatgacgccatccagtcctttggctttcattgctga

SEQ ID NO: 331697 - DNA, 960 bp, Pseudomonas aeruginosa
atgcttctgctagttacaaaccgccgcgacatcaccatcgattacgtggtggccgagctcaagcatcggcaaacgccgttctttcgtttgaataccgaagatctgccaacagctcgctgcaccatggctgcattccccagaaatgcgtggtcactatccttcggtgaacgagacctaaaaggctctgatatcagagcggcctactttcgacgtcctgcccaacctaccagcaacgctaccatcatcgacgacggtgaaagggagtacgcagaagccgaatggggcgctctcctgaagagcctgtatgcacgtctagacggtctgtggctaaacgcccctatggacatcttcgcagcggaagacaagccgaagcagctgatgtttgcgaacgagatcggcttcaacgtgccagaggtcttgatcacgaacgacatcaaatcggtgcgtgagatcgttgaggcgggctccgctattggaaagccacttcgacaggcgctgatcaatggtgagcaggagcgagttattttcaccactcgtctggagcatctgagcgatggcgacgatgctgccatcgcactggcccccttcattgttcaaactgaaatcaaaaagaagtacgacgttcgggtgacggtagtaggcagccaggtattcgcgacggcgatcaggtcgcaggagcatgaagaaaccactgtagattggcgccaaggctgccgacctgacctcaagcacgagtgcatcgagcttccccacgaggttgaggatcaatgtgccgctctcatgaggcgcttgaatctgcgttatggcgcgatcgactttatctgcgatcagcagggcaaactgtggttcttggaaatcaacccaaatggtcagtgggcctggatcgaaaacttaaccgggtatccaattgctgctgcgatcgttgacgaacttgaggaaatcgctcgatgccaaagctaa

SEQ ID NO: 331698 - DNA, 660 bp, Pseudomonas aeruginosa
atgccaaagctaatcccagaatggctatggccccgcctcacactatcgacaacggctgactctgcacagcagagatggcttcgcgaggagcaagataaagtcgatcagggctactgggcagatataagtgatgtcgcactggaggaagcccgcaggctctttgacgccgaacacgagcgtcgtcgaggtgctgattcaaaggcggggctctacctcgcagcgatcacaaccctgatgccaattctggcgtccattctcccagggctgtgggataagcaaatcagcacatgccagcgaggggtccaactggggatattccttctagcgctgctgttcctgatgcgcgccggcttgtgggccctcaagaccatcaagatttccgcctcgactgtagtatcccccggcgacatcgcagacagcttcaactccgacggggctgaggagtgcctagcgaagaaattgttgagcgctgtaatccaaaactacaccggcacgaaccagaaaatcacctgcataaaaatgacgcatgaatttttgctgcgggccttcttcagcttcttggcttttttggccgtacaggcaagctggcctgcggcggtttggtcggtcggctggattcacaacgagctcatttcaccaatgatgggctgtttcccgtag

SEQ ID NO: 331699 - DNA, 1599 bp, Pseudomonas aeruginosa
atgatcacgaagatcaaaattcagggctatcggatctatggcgacttcacgctgcagccaaacaaggaactcaacatcctggtgggcggtaatgacgcggggaagtcgacattgatggaggcgattggtctcgcactcaacgggcgtatcggcggccgttccgcccaggaggagttgaacccgtactggttcaacaaggatctggttggtcaattcctagagcaatgcgagcaaggccggaaaccagctcttccggagatcctgattgagctatttctggaaaatcgaccagagctgcagtttctcctcggcgcgatcaatagcgaaaggaagacaaatgcctgccctggtatctcgttcaaggtcatccccaatcctgaatatgaagaggagctgacccagtggcgtgctaaccctagcgcactgatccccgtcgagtactacaagattgagtggcgacattttggggatgaggttctgacccgacgtccccggcagctcgcggtcgcgactatcgattcgcgtactgtccgctcgacctcaggtatcgactatcacatgcgccaaatcctgagcgatcatttggagccaagcgagaaagccaagatatctcatcactaccgctcaattaaagagtccatcacttctgactcactgggcgacgtgaatcaacgcctgaaggacatccgagcaccgctgggtgatcaggtgatggcgttggctatggatcaaagcgctcaatcctcatgggaaggggcggttacaccgcatgtagatcatgtgccattcgcgctggcgggccagggccaacaggcttcgatcaagatctcgctggctatgcagcgcctgtctgaacagaccagcatcgtgatgattgaagagccggaaaatcacctttcgcacacgagcctgaccacgttgctgtcgcgcatcgaggtggatgcacgcgagcgacagttgttcatctcaacgcacagtgcctacgtgctgaaccgcctcggcctgagttccttgctattcctccatcgcggcaaggcatcccatatcaaacagcttgatcccgacacggtcagctactttcagaagctcgcaggcttcgacacgttgcgaatggtgctggctcaaaagctcgtcctggtggaaggcccttcggacgagatcctattcgagcgtttcttcagagacctttacggtaagcgcccgatggagctggggattgatgtgatgagtatgcatgggctgacgttgaagcgctgcctggaactgtgtgctgccattgatcgccccgttgcagtaatccgagacaacgacgaccaagaccccgaggggctgcgcgaacaagtaaccgatctgcttgaggcaggcaaacgggagctattcattggcgcacaggacgccggtagaacgctggagccgcaacttagggcctgcaacagtgaagagaccctgcgtaagacttttggggtcactgatcgagccagtcttgagaaatggatgaagagggagaagacagaggccgcactgcgcatcgcagaggccaaggaaacgatcacgccaccaccttacatggctgcggctgcggcattcattcatggctaa

SEQ ID NO: 331700 - DNA, 1005 bp, Pseudomonas aeruginosa
atggccttgcctgctgatcgcaaggtgctgctcatcaccttcacacagaccaatcaggtcgagctgcgcgagcgggtgaggcggcacgtcggcgaccggtctggtttggaggtatctggctggttcagttttttgctgcgccatttcgtcaaacccttcgtaccttttgcatttcctggcaggcgctgcaggggtttcaattacaaaggtgagccaaaccggaatgcctggggtaaagaccgcttctttgactcaggggacagtgtgtatgcgaaagagatagcacgcttagcctatgaattgatcggacaaagcggtggcgtcttgatacagcgccttgagtgcctttatgacgaaatcctcgtcgatgaggtgcaggatctctcgggctacgatctaaatattctgcaggcgctattcgacactcgcatagagatgcggctcgttggcgacgtgcgtcaggccgttctttccaccaatcctcgcgggcaaatgaacaaagccttcgcctactccaaatcgcatgaatggtttaaaaagcaggagaaggctcgccgactgaatatcacctacagctctgtcacctggaggtgctgccaaacgatcgctacgttttccgacacaatcttcgacgggagctgggggttcccggaaacgacctcagaaaattatacaattacgagtcatgacggcattttcttggtgaagaaggagcacgtcagccagtatgtcgagatgttcaaacctcagtgccttcgcaacagcgtgagctcgggcaaggagttcgacctcgactacatgaattttggggtgtccaagggccaaacgttcagtcgagtactcatttacccgaccggccccatcggcaagtttatcagcaaaggggagtatctcgtacccctttccgccgccgatttctatgtggcggtcacacgggcagagcaaagcgtggcgatcatcctggacaagcccggagcttcgaaacttccgtattggacaccatag

SEQ ID NO: 331701 - DNA, 1248 bp, Pseudomonas aeruginosa
atgctgacggtggtcgccagcctggcggccgagcatcggtggcgggatcgttttaccgcgctcactgcggatgtctgggtgctcccggactttctgtctgccgagaaagcttgcggcttccttgcttatctggtggacagtcgacaacccgacctgatgctgctttccaactctgcattcgcctatgacgtgctggggtacgtccggacccgctacccgggcctgcccgtggtcgacctcaatcatatggaggagggctgggacgatggcggccatccgggtagagccgctcgatgcactgccttgctggacaggcactgggtcgtatccgggcacctgcgccactggctgctcgaccgtggcgtcgaggcgagcaaggtcgaggtgttgcactggttcgccgatgtggactcgtggaaacccgacagcctgacgcgcgcgaaggtccgggcgcgcctgggaatagctccgcagtgcgtagtgatcgcctatgcggggcggctctgcgcgcagaaacgaccggagctgtttgccgccagccttggcgagttggcgcgccgtggtagtgatttcgtcgcgttggtactgggcgatggcgagctggcaggggagctgcggaacgacctccggcgccatggcttggccgggcgggtacggatgctgggctggcaggacgaggctgcgttgcgcgagttgttccaggcctccgatatatttttcctgccatcggccggcgaaggtatcgcactggttctctacgaggcgatggcgtgcggaatggccatagtcgcagccgatgtcggcggtcacgcagaactggtctctgcccactgcggcttccttgttccgcggcgcgatgccgaacgagaggccagggattacgccgctaggctcgagagcctcatgcgcgaaccggaaatgctgaggcggatggggcagaactccgcacgccgcatccgcgaagcattcaccttgtctcttttcgagcggcgtttgcgggagttgctggaacgcgtgccggtttcgactccatgcggcgtttgcacggatagtccggtgcctgccctgggggcggccaggctgtccatgcaatgggcttcctaccgactggcaaacggattgcgctgccggctggatatccagaagcacggccgtttttcaagattcctggagcgatgcgcgaagggggtgttcttcttgcgcacattcggggcgaaggcgctttggcaaaagatcaggaagcactga

SEQ ID NO: 331702 - DNA, 192 bp, Pseudomonas aeruginosa
atgactcggcaatccgtactcgccaccggcccggaggccagcgattggtggtgcttcggcagcggcgacgagccggcgcgcgagtcgttctctgccggtgggcgttcgctggcggcgtcgagaaagcctgccgccgcgccgggcctgcgaaccttcgacctgctgcctggcaacccgccgaagaacccctag

SEQ ID NO: 331703 - DNA, 930 bp, Pseudomonas aeruginosa
atggatcgtttgctgagcatcgaggcgttcgtgcgggtagcggaaaccggaaacttcgccaaggccgccgtgcagctcggagtgacccgttccgtcgtcacccaccgcatccagcaattggagcatttcatcaatgccccgctgttccaccgcagcactcgccatgtgcgtctttccgaggttggcgaaacctactacaaggagtgcgcggacatggtggccggcttcaacagcctcaccgagcagatgcgcaacctgcgcgccaagccgaccggaaagctgcgcgtgcagatgctgccgggcttcgccatcgatcacttcggccctttgctggccgagttcaccgccttgtacccggacatcgaggtggacgtgatcgtcaacgaccgcctcaccgatccgatcgaagagggtttcgacatcgccttccagatgttcccgccgcaggccgagaccctcatcgagcgcaagctgttcagcgtccggcgcctgttcctggcgtcgccggagtacctgcagcggcatccggcgccagagcgtcctgccgacctgctggagcatcggatcggtctctacgaaggctatccgtcgcgtaaccgctggcagttccagcatggcgacgaaaccgtcgagctgagcctggcggggcaggtgcgttccaactcggtccatctgttgcgcgactatgcgctggccggcaccgcgctggtctgcctgccgaccctggtggcgcatgccgacttggagagcggccggctgctgccgctgctgatcgattatccattgtcgtcgttcaacttctccgcggtgtttcccgccacccagcggcgcgccttgaaggtacgcagcctgatagacttcctggtggaacggatcagcgacgagccctgctgggaccggccgttgctggcaaagggctgggtgcgctga

SEQ ID NO: 331704 - DNA, 492 bp, Pseudomonas aeruginosa
atgaatgccgctattcggactgtcttcggttccctgggcgactatcgcaagggatccatcgagctggtgaagggcgatgcccgtcactatgccttctccaacgtcttcgaggttgccagccgctcggcggcctacgagaaagtagtggtcggcctcaatctcggctacgtcatcgaggtgctgcgcgccgaaggacgctcgccctggttcacctgtagccacgacgaattcgccatttccatggatggcgaggtgcgcgtcgatttcctcgatctcgacatgccaccgacggaaggcgagggcacccggctggccggtgaccagccgcgcggccgaccgatgggctacgtgctgctcggtcgcggccaccaggtgctgctgccggccggccgcgcctaccgcttcgaagcgacgcggccctgcgtgctcctgcaacagacgatcctgggtccgctctcggtggagaagtggtcggacatctgcctcaagtag

SEQ ID NO: 331705 - DNA, 1020 bp, Pseudomonas aeruginosa
atggccatgctcgatacccccgaacagacccgcaccttcgccagcgacgaggtcgaggccgcgcgccccgacccggtcaccggctaccgcagcttccggctcggtgccttcaccctctcgcgcgacgaatacttcgcccgcgtcgaatggccggccaagggccagccgcgctcgcacctgatcccggtcgacgccttcctgcgcgcgatgatgcgcgacgtggcctggggcttcttctacggctgggtgaacttcgaccatgtgatcggcacgcgcaaccactatggaaaggtcgacctctatgcgggcactttcaatggcgtcctgcgcgaggctggcgtcgactacaccgagcagttcgacacgccgaagatcatggcgaccttcaaggcggtcttgcacgactggaccaacgccagcttcgatccgttcgccgcgccggaggagaccggcagcgccttcggccgcaagcgcggcgacaaccccgaggccatcgagcgcttccgcatcgccacccggcgcatgcccggactgccgggcgattcgccgctgcgcgacgacctgccggtgaatcgccagttcctcgatgtcccccaggacgagccggagctgcaccccgcggaaggcttcgagggcgagttgcacgccttcaacctgttcaagtacctgtcgcgctcggacgtgacctggaacccgtcggtcagttcggtgtgcaaggccagcctgttctgcccgaccaccgaggagttcatcctgccggtgttccacggcaacgaccgggtcgagtggttcctccagctttccgacgagatcgtctgggatgtcgccgacaaggacgatggcacgcccagggcacgggtgatcatgcgtgccggcgacatcgcggcgatgccagcggacatccgccaccagggctattcgaccaagcgctcgatgctgctggtctgggaaaacgccacgccgaacctgccgcaacgctatgagagcggcgagctgaaaccctacccggtggacttctga

SEQ ID NO: 331706 - DNA, 1464 bp, Pseudomonas aeruginosa
atgcagaacctattgttcatcgacggtcgcttcgttcccgcggtggatcgcggcgagatcgaggtgctgaatcccgccgacggttcgtcgatcactcgtatcgccgccgccgaggcggccgacgtcgacctcgctgtggccgcggctcgccgcgcttttccggcctgggccgggttgccggcggcggagcgcggccgcctgctgttgaagctggccgacgccatcgaggccaacgccgagcaactggcccggctggagtccctggataccgggcatccgctgcgcgattcgcgcaacctcgacgtcccgcgaaccgccgcctgcttccgctatttcggcggcatcgccgacaagctcgaaggcaaggtgatcccggtggacacgggcttcctcaactacgtgcagcgcaagccgatcggcgtggtcgggcagatcgtgccgtggaacttcccgctcatgttcaccagctggaagctggggccggcgctggcggcgggcaacacggtagtgctcaagccatcggagatcaccccgctgtcgaccctgcgcatcgccgagctgatccaggaggtcggcttccccgacggggtggtcaacatcgtgccgggctacggcagtaccgccgggcaacgcctggcggaacaccccgacgtgggcaagatcgccttcaccggctccacgctcaccgggcaacgcatcgtcgaggcctcgcgcggcaatctcaagcgcgtgcaactggagctgggcggcaagggcgcgaacatcgtgttcgacgacgccgacctggatgcggcgctcaacggcgccgcctgggcgatcttccacaaccagggccaggcctgcatcgccggttcgcggctgatcctccatgagcgcatcgccgagcgcttcctcgagcgcttcgtcgccctggcgcgctcgatccgcctgggcgatccgctggatccgcaaaccgaaatgggaccgctgacctcggcgctgcatcgcgaccgggtgctgtccttcgccgcgatcgccgaggaggagggcggacgcatcctcaccggcggacgggcgccgagcgatccggccctggccgcgggctactacgtcgagccgacggtggtcgaggcgcggcccgatgaccgggtggctcaggaggaggtattcggacccttcgccaccgtcctgcgcttttcctctgaggaggaagccttggacatcgccaacggcacccgctacggcctcggcagcggcctctggacccgcgacctgcaacgggcacaccggatggccgagcggatccatgcgggaatgtgctggatcaactgctacaagcgggtcagcccggccagcccgtttggtggcatcggccagtccggctatggccgcgagatgggcttcgaggccctgcacgagtacaccgaggcgcactcggtgtgggtcaatgtcgacgcgaagatcgcgccgcatttcaagcgttga

SEQ ID NO: 331707 - DNA, 1068 bp, Pseudomonas aeruginosa
atgcggacattcgtctatcagggcctgccgagccgggtggtattcggcgacggtgcgttgcagcatcttggcgaggagatcgagaagctgggcgccgagcgcgcgctgctgctctccaccccggaccagcgcgagcttgccgagcggctggccgggctactcggctcgcgtagcgcaggggtctatcccgaggcggtaatgcacgtgccgctggaggtcgcccgcgctgcccgcgccgaggcggcgcggcgccgggccgactgctgcatcgcggtcggtggcggctcgaccattggcctgggcaaggccatcgcactggagtccggcttgccgatcctggctgtgccaaccacctacgccggttcggagatgacaccgatctgggggctgaccgaggaccgtctgaagaagaccggtcgtgacacgcgagtcctgccaaagacagtgatctacgatccgcaactgactctcagcctgccccctgcggtctccgcctgttccgggatgaacgccatggcccatgcggtggaggcgctgtatgccgaagacgccaacccgatcatcggcctgatggccgaggagtcgatccgctccctggcgcaggcgttgccgcgggtggtcgagcatcctgccgatcgtgaggcgcgcggccaggcgctgtacggtgcctggctggcgggcgtgtgcctgggctcggtgggcatggcgatccaccacaagctctgccacaccctcggcggtaccttcaacctgccgcacgcgcaggctcacgcggtggtcctgccgcatgccgcgcactataaccgcgaagccgcggcgtcggccctggcacgggtcgcccgggcactgggcggaagcgcggcggaagaggccgggccgctgctgttcgctctcaacagacgccttggcgtgccggcctcgctgggtgaactcggcctgccgcccgaggggccggcggaggtcgcgcggatcgcctgcgccagcccctattacaacccacgtccattcgagcccgtggccatccaagcgctgctcgagcgcgcgcgcgacggattgccgccggcatga

SEQ ID NO: 331708 - DNA, 891 bp, Pseudomonas aeruginosa
atgacggcgaagccgggcgaggccgcgcgtgcgggcgccgccgaagagaggatcaccgccctggtcctcgccagtttcgccgccgcgcctgacccgaggctgcgccgcctgctggagaagctggtcgagcacctgcacgccttcgctcgcgaggtggagctgagcgaggaggaatggttctccgggatacgtttcctcaccgagaccgggcagacctgcgatggcctggtgcgccaggagttcatcctgctctccgacgtgcttggcctgtcgatgctggtcgatgcgctcggccatcgcggtagcgccgggatcaccgaaagcaccgtgttcgggcctttctacatcgccggcatgccggcacgcggctacggcgagaacatggccttcacggcgggcgtgccggcgctggtgctggggcgggtgctggacacggaaggccgaccgctcaccggcgccagcctggatgtctggcagagcgcgcagaacggctgttattccgggcaggacgcgggtcaaccccacggcaacctgcgtggccgataccttacggacggcgagggacgctatgcgatccgcagcatcgttccgactagctacccgattcccagcgatggcccggtgggccgcctgctacaggccggcggccggcatccgtggcggccggcgcacctgcacttcatggtcgaggcgccaggataccggcgcctggtgacccacctgttcaaggatgacgatccgtacctggcgtcggacgcggtgttcggcgtgaaggattcgctgcgggtggaataccgggcgtgcccggctgagcatccgttggcgcgggagtacggtatcgacacggggtttcgcctggtccgctacgatttcgtcctggagcctgcatga

SEQ ID NO: 331709 - DNA, 312 bp, Pseudomonas aeruginosa
atgagtcgttatttcgcagtcttcgccaccgaccggccacggctcgagaccttgcgccggcagattcgtccggcgcaccgggcgcacctgcgcgacccgtcgccgcatccggtggtggtgcgcctgggcgggcctacgctggacgagcgtgacggacggatgaacggaaccctgctggtggtcgaggccgcatcgctggacgaggtgcaggcctttcttgccgacgatccctatgtccgcgccggcctgttccagcgagtcgagatccgcccctggaactggagcctgggcgcgccggatgcgcgaccgtga

SEQ ID NO: 331710 - DNA, 342 bp, Pseudomonas aeruginosa
gtgagcgccgccgcgcgcgtgctctgcgccctggaggaaatccctgacggcggcgcgcggggcctgcaactgttcttcggcgacgagcgtctgtcgctggtcgcggtgcgccggggcgggcaggcctgggtctatcgcaaccgctgtccgcatttctccgtaccgctggacttccgtcccggcgaattctgtacctatcgtggggaggtgttgatgtgtgcgcatcacagcgcgctgttccgcttcgaggacggactttgcatcgacggtccctgcgcgggtgcggcgctggaaggcttgcattgccgggtcgaggcagggttgctgctgctcggggactga

SEQ ID NO: 331711 - DNA, 2262 bp, Pseudomonas aeruginosa
atgcaacccgttcctccccggcgagaagcccgcccgccccgtcctcctcgcagcgccggctactgtgcgggactgctctggatcacggcgctgccattgctcccggcggtcgctaccagcgagacggacggcctggtcgaggaaagcgtctgccagacctgccacgcgcggcaaagcgaacagtggcgcggctcgcaccaccaactggcgatgcagccggccaaccccggcagtgtcctcggcgacttcgccgatgcacgcttcagccatgccggggaaaccacccgcttctaccgcaagggcgacggattctgggtgaacacgcccgctgccgacggcggcaacgccgacttccaggtgcgctacaccttcggcgtggagccactccagcagtacctgctggacaccggcgacggccatctgcaagccctcggagtggcctgggatacccggcgcaaggcctggttccacctgtacccggacgagcgcgtggacgcccgccatccgctgcactggagcaagccacagcagaatgccaacttcatgtgcatggagtgccacaacaccggtttcgaacgcaatcacgacgccgccagcggccgcttcgacagccgatggctggcttccggcgtcggttgccagagttgccacggcccggccgccgcacacctggcctggacccgccagcccgatcggagggaggcgcacgccggcttcgccgggagcctggcagccaccgccaaccgcgcccaggtggaaagctgtgcgcgctgccattcgcggcgctcgccgctaagcgacggcttcgatgcgacggcgcgcctgctcgacgactacctgcccagtccgctgggcccggtgctctacgaattggacggaaagatcagggacgaagtcttcgaatacggctccttcgtacaaagccggatgtacgccaagggcgtggcctgcagcgattgccacgatccccatggcgcgcgcctgaaagccaacggcaacgatgtctgcctgcaatgccacaatcccaccggccgcgccgttcgcagcgacatcgacgacagcggcctggtggccgccgactactcgtcgcgcgaacacctccgccaccgccccgaaggcccggccgggaaatgcgtcgcctgccacatgccgggcaagtactacatggtcaacgacctgcgccacgaccactcgttcagcgtaccgaacccggcccaggccctggctctaggtgtccccgacgcctgcgtgggctgccatgcgcggatgcccggcgcaagcctggtggaacgtttccgcaactggtacccgaacgccattccacgcgacggcggctatgcgcaagacctggcgctggtacgcgacggacgccccggcgcggccgccgccctgttgcgccagctgctgcgtagcgatctgccggcgatccgccgcgcgaccctgctcggcgaggttcccggctatcccggccagcccctgctgcgccaggcgctcgccgccctcggcgagaaggatccccaggtccgcgaggcggctatcggcgccgtcgccaccttgctctcgccgacagaacgggtcgaaccgatagctccgtcgctgaacgacccggtgcgcgcggtgcgcctgtccgccgcctatgcgctgcttcccgccatagccgaactcggcacgcatggtacggcctggcggcgggccatcgacgagtatgaaggggcccagctcgtccagcgtgagcgcgccgaagccaacctcaacctggccaacctgtaccgggccgacggtcggtcgggcctggtcgaggcgagcctgcgggaagccctgcgccgcgacgcggacttcgctccggcgcgggtcgccctcggccagtggctggaaaacgcgggccgcgacagcgaagccgtcacgctgttgcacgagggtatccgccgccagccgcaatcggggctgctgcactatgcccggggactggcgctgatccgccaaggcaagcgcgaggcggcacgccaggcgctcgccgaagcgctcgcggcggaaccggacaacccgcgctatccctatgtcctcgccgtcgcctggcacgagaccggacaaccagacaaagccatcgaaaccctgcgcgcgctgctcgcgcggcgaccggccgagcgcgcggcacgcctggccctggccgactaccttcggcaggccggcgatgccgccggggccgacgcggtactggtcgagctgcgtgcgatcaatcccgacgacccgctgttccgctag

SEQ ID NO: 331712 - DNA, 1689 bp, Pseudomonas aeruginosa
atgagcgcaatctcccgaaaggccctgggcctgttgttccccttgctctgctgcgtggcccagagccaggcggcgccatcgcgcccgaacgtcctgctgatcgtcgccgatgacctcggcttctccgatacctcgcccttcggcggagagatatccacccccagcctgcaggggctggccgacgagggcgtgcgcctgaccaatttctacgccggcccgacctgctcggtgagccgttcgatgctgctcaccggcgtcgacaaccaccaggcggggcttggcaccatggccgagtacctgcaaccggaacagaagggcaagccgggctacgaaggccagttgaaccgccgcgtggcgactctcgccgaactgctgcgggacgtcggctacaacactttcatgaccggcaagtggcacctgggcgcaactccccagagcaacgccgcggcccgtggcttcgaacgctcctacaccctgatgccggggggcgccagccacatggacaagacccagatgttccccggcaactacaaggcgcgttacctggaggatggcaaggacgtgtcgatccccgacgacttctactccagcgacttctacaccgaccgcctgctcggctacctggagcgtgaccgccagccgggcaagccgttcttcgcctacctggcgttcaccgcgccgcattggccactacaggctccggaccagtacctggacaggtatcgcggcaattacgcggacggctacgaggcgctgcgccgcaagcgcctggcacggatgatcgagctggggatactgccggccggcacccggcccaacgatccgctggcggacaagctgccgacctgggagcagttgaccgaggcacagcgccgggagcagacgcggatcatgcagatctatgcggcgatggtcgacaacatggaccacaacattgggcgcgtgctcgatcacctgcgcaagagcggcgaactggacaataccttcgtcctgttcatgtccgacaacgggccggagtcggccagccccgagtcgctgggcaccaccgaggaccgcaacggaatccgcgactgggtcgacgcgacgttcgacaacagtccgcggaacatgggccgcaaggggtcctacgtgaccctcgggccgggctgggcgcaggtcggcgctacgccgttcccgtacttcaagagcttcaccgcgaaaggcggaatccaggtgccggcgatcgtgcgctatcccgcggcgacctcgaagggcgcgatcagcggcgaagtgctgcacgtgaaggatttcgtgccgaccatcctctccctggccggcgcgagctatccggcgcagtaccgggggaatgccctgttgccgctacagggacgctcgatgcttcccgccctgcggggccaggcgcagccggaacgggtgctcggctgggagttcaacggtcgccgcgcactgtacaaagggcaatgggcggcgcagatgcagaagccgccttacggcaatgggcgctgggaactctatgacctggcacgcgacccggccttcagccacgacctggccgcgagcgagccgggcaaggtcgccgagcttgccgcggactggaatgactacgccagggacaatggcgtggtgcctgcgccgatccgctacaagtacgggcagatgacctgtctgtacagccactgcatccagtag

SEQ ID NO: 331713 - DNA, 1416 bp, Pseudomonas aeruginosa
atgaccggatatccgatcccactcccgttacgcggcctgttcggcggcgtcctggtcggcctgctggcgccgctggccgacgtctccgcggccgacggcctggagcagcaacggccgctgcggcccgggctgccgcgctggctggaggactaccgcttcctcgacgacccgcgccagcgcagcgatccgttcgatgaactgcgatatcggcgtctctccgagtcggcctggttgcaactcggcggcgaactgcgctaccgcgcggatgcagtcgagtcaccgtacttcgggatgcgcggcgacgccgacgactcgtacctgatgcaacgcctgcaagcgcacgccgatctgtacttgctggacggccagctgcgcctgttcacccaggtgcagaacacccgggcctggggcaaggacacgctggcgccaccggacgagagccgcacggacatccagcaggcgttcgtcgatgcacgcttcgaggtcgccggggccgacctgacgacgcgcgtcggccgccaggaaatggcctacggcgcccaggtgctggtgacctaccgcgatgtccccaacgttcgccaggccttcgatggcgtgcggttgagcgtgagctgggcggcggatacccggctcgatgccttcgccgtgcgtccggtgcggctcggtcgcgatgccttcgacgatgggtccgacaaccaggtgaagttctacggcctctacggcagcctgccattgtggcgtgcctggtatgtcgatctgtacgcctttggcctggatacccggcaacggagcctggctgggctgagcggctcggagaagcgctataccctgggtagccggctgttcggcaagcagggcgcgctggactggagctgggacctggctggccagttcggccggctggcgggcgccggtatccgcgcctgggcgctttccagcgatagcggctacaccttcgccacggcctggaagccccgcctgggcctgcgtctcgacgccgcgagcggcgaccgcaaggccggcgacggacgggtacagaccttcgatccgctgttcccgcgcaatggcgtctacggcgaggcggcgctgatcacgctctccaacgcgatcatcgtcgggccggtgctgggcttctcgccctggccgcagttgcgcatcgagcccgggctgttcaaggtctggaagcagcaggccggcgacgccgtctactacccggggatgggcgtcgcggcgagtgcgcagcagagtcgcgggcgcgacgtcggcaacatcctccgggccaacctgaagtggttcgcctcgaagaacctgaccttcgacctcgactacaagtactacgatgtcggcggcgccttgcgcagcgccggcgccgacaatagccagttcgtctccctgcggggcacctaccgcttctga

SEQ ID NO: 331714 - DNA, 720 bp, Pseudomonas aeruginosa; identical to SEQ ID NO: 322380

SEQ ID NO: 331715 - DNA, 1995 bp, Pseudomonas aeruginosa
atgtccgcctcgctccccaacgacaccccgcctgacgaagccctgcccctggtcctggccggtcccctgctgcgccgcgcagagcccggacgcctggtgttctggctggccacgtcatgcccgacgaccatcgaactgatcctcgccagcgaaggcgaggcggagcgtcgggtccgcctcgcggaaggaacccactcggccatccgcatcggcacccatgcctggctgcacctgctggatgtcgcgctcgacccgccgttgccctgcgcccgcctggtcgactacgacctgcgcctcgccgccgacggccgggagcctgcgggaatcgccgaatgggcaccgcatctgctctaccccggtcgccagcgcgccagcctggtgctcaagccacgtctcgaccagttgctccacggctcctgccgcaagccgcatcacccagcggccgatggcctgctgcaggtcgaccggctgctggaggaaaacctgctgcaggccgaaagccgcccggcgttgctgatgatgagcggcgaccaggtctacgccgacgacgtcgccgggccgatgctggtggccatccatgggttgatccaccgcctcggcctgtacggcgaacacctggaaggcgcactggtgaacgacagcgaggcactctacgcgcacccggccacctactaccggcgcgaggacctgctgcccgccttcgagtccaacgaagccctgcgcgagcgcttcttcggcggggtgaagaagccgatcttcacctcggccaacgcccacaaccatctggtcggcctggccgaggtgctggcgatgtacctgctggtctggtcgccggcgccctggcgcctggtcaggctggaaccgccgccggggctggatgcgcggcacgcgcagcgcttcgccggcgagcgccggcacatcgaagccttccgcgatggcctgccccgcgtggcgcgggcgctggcgcatatctcgtcgctgatgatcttcgacgaccacgacatcaccgacgactggaacctttcagcacgctgggagctgaccgcctacggccatcctttctcccggcggatcatcggcaacgccctgctcgcctacctgctctgccagggctggggcaacgacccgcagcattgcggcgaatggctggcgccggtcgcggccctgatggagggtgccgcggcagacggccggctgccctgcgccgagcaggaccgcctgctcgatgccctgctcgacttccagcactggcactaccggttgcctggcagcccgaccctgatcgtcctcgacacgcgcacccgccgctggcgtagcgagcgcaacctgggccggccctccgggctgatggactgggaggcactgagtgaattccagcaggacctgctcggcgaaaaggcggcgatcatcgtgtcgccggcgccgatgttcggggtcaagctgatcgagggcgtacagaagcttttcagttggatcggccagccgctgctggtcgatgcggaaaactggatggcccatcgcggcgcggcctcggtgatgatgaacatcttccgccactcgcgtacgccgggtaactacctgatcctttccggcgacgtgcattactccttcgtctacgacatccggattcgccatcgcgagcgcgggccccggctctggcagatcaccagcagcgggatcaagaacgaattcccgcgacgcctgctggactggttcgaccgcctcaatcgctggctctatgcgccctggtcgccgctgaactggctgacccagcggcgcagtctggaaatccgcccgcgcgttccgcagcacagccaggccggcgagcgcctgtggaacagcgccgggatcggccaggtattcattggcgaggacggccgtccgcgcgcggtgttgcaggtcaatgccgatggctcgccggcgaccgccttcgagcgacatcgcgacatcgaagacgaacgagcggaccagtcgccggtcacgccgggtcgctga

SEQ ID NO: 331716 - DNA, 219 bp, Pseudomonas aeruginosa
atgatcgactggagcatgttgaaatcacccgaagaccatcaggttgagcagcgggaggccgtcagagcgcagcgccgccaggcttaccgggacgaggcagacccgctgcgcctggaggccgaatatgacgccatcgcgaccggtatagagccggacctgtcggcctgggtcgaagctgtcaaggcgatcaaagaacgctatccgctcccccagtcctaa

SEQ ID NO: 331717 - DNA, 303 bp, Pseudomonas aeruginosa
atgatcatcaagctgtcaccgtacgctcccctgccaggtagcgacgagcgcctggtgctggccagggtcggcgaggtactcaccgtgaacggccagtcgttcgatttcacaccgctcccggagggcggcgagttgccggccgaggccattgggtcggagtggttcgctggccccgtcgttcgccgtgaggggcgtctagagttcagcctgcggctgccgctggctgacggcgctagtgcagccgctcgctttcctgaaccaatgctgatcgaggccgacggcccggtggagttgccgcgatga

SEQ ID NO: 331718 - DNA, 285 bp, Pseudomonas aeruginosa
atgaccgtcatcacccatgcctacaccccgctgatggacgttgacgccatgagcgagcaggactgccggcaagcgctgaaggacgttctgcgcgatgggttcgtgaaggaccagcaactggtcgagctgaagacgggcattcacaagctggacaacacgctggtcaagctcatcgacctcttcatcgccggaaacttctccaagctgcatgcgcagttgcaggacatggcggtctacctgcaggagcagcgtgccgcccagaagtcggcaaggagggtgcactga

SEQ ID NO: 331719 - DNA, 660 bp, Pseudomonas aeruginosa
atgagccacgagccagtcaccgcgcgagatctgttcgtccgcctgattactgtgactcgggagatgggcgtgaatgaggctgaaatagagctggccgccatgatcaatggcgtgcgcatccccctgactcgcgggaacttccaggtcgacgacgacggcaccctgctgatcgacctggcccccggtctcccggcagccggagtgccggccatgttcgtcggcatgctgcaggacaagctcctgtggtaccgcggctgcgacttcgttcggatgggcgacatcgagaccgcaatcgtcgaggccgtcctggcaacggggcagcccggtgcactcactgcccaccacgtggtcctgttggaacgcctccggcagatctatgaggaaggcttcaccgaggagcacgacgacgagcaccagttcggcgagttagcaatcgctgcagcctgctatgcggaggaagccttctgccagatccgtgagcccgaacgcctccccgtgatcagccaggtcgtgccccagctctggccgtgggaaccctcccggtggaaacccagcctcgacgcgcgccacaacctggtgaaggccggggccctgattcttgcggcgatcggcgtgatcgaccgtgccattgaacgtgaactcctggagccgagcccatga

SEQ ID NO: 331720 - DNA, 624 bp, Pseudomonas aeruginosa
atgactgaagccaaacacatcccgattcccgaaggctgggtgcgcaatgccgtcggcaacctggtgcacgaaagcgagatccgcgaacaggacaagctgcgagatcgcgtagtgaccgacatcgccgccgaagccaaccgtctgcatgaagccctcaaggccctgaagaagaaggccctgagcgacatcgacgacctgatcagcatcgctggcgagaagtacgacatgaagctgggcggccccaagggaaacgtcagcctgctgtcgttcaatggtcagtacaaggtcatgcgcgtctatgccgaccgcgtcacctacaccgaggagatggaagtggcgaaggcgaaggtcttcgagtgcatccgctcctggggcgaggagtccaacaaacacctgctgaccctggctaccaatgctttccgcctgaaccgccacggcgagatcagcatctctcgcgttaccgagatgatgcgcgccgagatcgatgactcggagtggaagaaggccatggacgcggtcaaggacagtctgatcgtcagtggttctgcggtgtacatccgcgtccagcaacgtcaggacaacggccagtacgagaccatcaaccttgatatcgcgggggtgtga

SEQ ID NO: 331721 - DNA, 159 bp, Pseudomonas aeruginosa; identical to SEQ ID NO: 329011

SEQ ID NO: 331722 - DNA, 255 bp, Pseudomonas aeruginosa
atgaacccactgttcaccaacctcacccaggaaaccctcgcctacctcgaggatcaactgtccaacaacgacgtcgccggcgacgacgagctcatcgacctgttcatcgaggagctgtcgctgaccttggagcaggcggaagcggctgtcgcgctacgcgatcagtacctctgccaggtcttcctgaacggccaagggccgctgcaccaagacgatgggctgagcttcgaccctcacaccaagagcgttcggtaa

SEQ ID NO: 331723 - DNA, 318 bp, Pseudomonas aeruginosa
atgcgccaacgaagctcttatccaaaaaccttcaaggcccaggttgttcaggagtgcctgcaaccgggggccactgtttccggcgtcgccatcagccatggcatcaacgccaacgtgatccgcaagtggctgccgatttaccgcgaccgacaccctaccggcctgccgacattcgtgccggtacaagcgactgccaggcggccggctgaagaagtggcggtgatcacattgccgctgggtgacacatccatcacggtcaaatggcccgtctcagatccggacggctgcgcgcgcttcatccgaagcctctcgcaatga

SEQ ID NO: 331724 - DNA, 1425 bp, Pseudomonas aeruginosa
atggaaactactccaattgtcctctttgagctcgatgttgcggtaccagcgcaacagtttcgcattgagtacacgcttgttgacaaaggcgggcttccagtcgtgccagagtttctgctcaggctactaaaaatttcagccctcatgcccgccgaaattgcgaaatacttcggattctcggccaaagagctgagcgtcgcgatgattccgtttattaaaaacggtgaaatacgcatccgccctgatggaaaagcagagctcacagaaatagggcttcgactattttccgaaggccacgaaaccccaatagtaaagcggaaggaagaacgccagcaaaccttcaccttcgatttgctagcgttcagctatctcggccggagccttaaatcagttgaatcaaaacgcacattagagttacaggccgctacggagacattaaccgaatcctgcagatccgcagtagaagctttcatggggcagctatatgacattcaccgcatggggcatcttggtggacagcagcaagaacgtcttcctccagagctttacaaagttgccgaaacccagaaggtacgggaagggtgggagattttggttgagcgagcggcaatcgacgcgaacgcccgccaggttcggtttattgcattagaagggctgagggagaacgaagcctatctccgtcaacggacagaacaactgagccggcaaactgcaacagaaaatttcgagttggtgctccggctagttgatatgcttggtgatgcggacagttatgactttctaagatcaggcgggctagatctacaggcattcaacgcaactgcagcgtccgcaattaattctgatacgcgaattttcggatctcttcagttacaagaaaattggaataaagtgttttccctgctgggaaaacatcgaaaagaactcaagcggacacaccagggagagcctttaaagctaacttggctcgccccagcatcccatgggctctgggggaagtcagcacggcatggagagatctgctccgccttcaatgagttgtcagatgcgaaagcgcaaagagggaaaggggaaaatatatttgaagttaaagttcttatcccgctgtctggcgatcgtgatatgcaaggaatcaagagggccaggtcggactgttcagaagcgaaaaaattactatgcggtttcgttgagtcagaaatattagcccctattgaagccatcattctagagggcaggcttgcagttgttctttaccatttagtcatcccggagatatcgcaggtaccaattccgtttggcttcgtcaccgagaacgaaaatcgagttgacatgcttgcgaggcttataaattcaacgcttgaagagtatgtttcgggtaatactccgagatttctcgggccaatagaaaaatcaaaaaagcaatag

SEQ ID NO: 331725 - DNA, 5043 bp, Pseudomonas aeruginosa
atggaagtacgttactgggagggggggcttcactcgtttgaggtggaggcgatcgaaaggatggcgaaggccttcgcacccaacgaggaggtggcgcagccaggtactcccaccgctaaagggaattctttcgcggtgctcaaacagctgaaaaagcccgacggagtatggccttggaaggggtatgcgggctttcgctttgccaattctcgtggctctgatggggagttcgatctcgtcattatcactcacagcatggtgctggtggtcgagctaaagcactggaatggcaagatcacttcgaacggcagcaagtggtatcaggacggtaaagagcgggatgcctctccggtcgaaagaactcggaggaagatgtacgagctcaagaagagaatgcaaagcatcaaggccagcttgccaaaaggaaaagaaccgtggttcgagttctgcgttgttctcagtggcaagtgcaccctggatctaccagacgcagaaataccgtacgtcatgcaactcgaagacttcctcggtctcgccgacgagaagcagttcaggcaacggtatcccaaagcccacaatgtccacttgaatgaccattttggcgacttcgacagactgctaaatgagggattcgtcaagccgaaggagctcgtggtcgacgactaccgtgcaatagcaccggcggtattcacccacccgaccaaggtctacagcgagttcgacgccgtgaacatccataataaggatgaccacgcgatgcttcggctatgggacttttcaaagctcgatagcacttctgccaggaccaaggagggaaggttcaagatcctctcgcgagagcgggagatccttgtctatcttaagcgcctcgaccaggacttggtgaatcgctgcgccagatttaaaggaaatgtcagccccgactccatcaccgagcagcattccgaattgtttgagatgccggatgggcatttccgtctcaacgaattcataaacaggttcgtggtgcgaatgagcggtggggagcgcctccagctcctcaagattctactggcccaatttgcaggcctgcacggccatagcgtcgcgcatagagatgtcggcgatcatagcgtttggttctcgccagcctccggcattgcactttccaatttcatcagtgcctaccaccaacctattggtacagtaggcgacctgcgtagcctactgagcatcggcgccatttcactgcccgaggaccagggcaacgcaaatctggacacgacgccattcaaacgcgatgtgttcgcactcgggatactgtgctgccatttgatccaagctaagccccttccactcaagctcgatgaaacctacatacaaggcgtactgcgcgagacagagggcgccacggagtggttctcggaggtgattcggaaagccatacagcgtaacccggcagatcgctttgaaaacgcaatcgcattcctgcaggcattgagcgaagccactccagacaactcggcaagcttcgagtttgataagcgacagctcgatcgttttgctacagatgtgcggttagcctcggcgtaccgagaagacgaagagcccctggtggactcggcagagaagcttctgtaccgatcgggtccatggatggtgaagtcttggccatcgatcaatgcacgtgagccgcaagataggcagggccccatgctgatgtctttcttcgagacacttgagcgcttgaaggtcagtagctttcatttcctgccgaaacttgagcacttcggatacgatcgcagcggcaaccctttcttggcccaagagcatgtagagggtgtccactggagcgacttgcacgatctccccgtcccccaagccctaatcgtctcacgtcgattaattgaggcggttgagggtctccatgagcagcaactcagtcacggggatttgcaccccgaaaacattatggtcactttgggtagtgactacgagtcaactcatcttcacctgctggactaccctgatttctcgccgactggtgaacgcccctataacaacaggtacagccccatagttgaagacagcactccagctgaaagggacaatttcgcagttatgcggatggtcctcgaactgcttgggatggactgggacacctcccgtgaaggagacaaccaagcccttagggacgctatcgacctagagaagaggagcggttcaggttacctctccctcgaacggttcaacgatgctctggaagttgctttccagtccaagccgaccatcgaaacgatcaatgtacccatcagaggcagtgccaccttcgacatccttccagacaacgaaaaaatttacgtcgttgtccgacctgacccgaataccccagccaaagcgctcgaagtccttttcgccggaattggtggtcagttcttggcgtgcttcgacccagaaacaaaggtattcacaagagctttcagaccgcatcaggagcagagagtcagcctattctttgtccgaaatgccaaccaccatctgaacgtgcgcttcaccgtgtcgtctgggggggcgagcaatctggcgtccctaggaagcaccggcaacctcgcggccctgtcgagatacctcggacaggacgaagggtttatagcgttagctgcaaaaatccttgaagcagaagtccgaaagcaagccgcattagcggaaagcgatgccgcggaggaatcgatcaccggcgaagacgccgagaatggactagctgtcgatgaccccaaacttgaaggcgttcctgtccaaagcttcccggtaggacagatttggaaaaccatcacatcaacggagcttgaggcgcaaccgtcgttcagggttgcagcagagccgcggttccatcgagacaatctgggacttctcattccttacatgatggagtcgaaggcgcttgagggcttcgaggctgacgacagcattcgtctgatcctaagggatggggagaaggacatcgatgttggcgaaatcgacttggccaaaagcctccgcgatgcggtctacatcccggcctcgagcaagtcacgacgcgtaaaagctgactcggtgctgtatcttcagagtcagcagaacaaaacgtctatggcccgccgcaaaagtgcaatggatcggatcatcaaccgacaatctgtccagccagatctattggactacttcgacgaaaagtgcaagctagtccccaaacagtactcagatgccccaacagaagaagacttcgcagtttatgagcggatcacgtctgacggcactgtcattggcttgaatggcgcacaaaaggaagccttcacgaatctggttactactggacctgtaggcttgctccagggccctccaggtacagggaaaactgagttcatcgccgcgtttgcgcactacctgatcgataaggtcggagtgagaaacatccttctggtgagccagtcgcatgaggcggtaaacactgccgctgagcggatcagagcacactgtcgtcgcttgggtactgctctcgatgtagttcgcttcagcaaccggggccaggtggtctccgaggagctcctcgatgcctactcccgaaacatcgttgaccgccagaggaatagcttcagtgccgaactcaaggaaagggtaggtgccttggcgtcgtcactcggattgggtacggagtttgcccagaccatggtggacgtcaaccaacggatcactcgccagataaagtccctggagagcctcgagaaagacatcatgcgagccacggacgacgaggatcgagccgccctggaagctctccgaaaagctgtgcagaacgatgtaagtctttccgctaaggcttaccttggcgattccgatttgagcgaagttcctccgcaaacgatccttgagcgagtctatgcacgcattcagtcggaccatggggtccgaccgccggagttcaagcactgtcaggatctgatccaactctcgcaggatttcagtgagcgcttgtcgagcaatcgcgctaactacgacgagtttttaatgagatcccgtagtctcgtatgtggaacctgcgtagggattggcctgcagcacctgaatcttgctgcaacccactttgactgggtgatcatcgatgaaggtgcacgatcctcgcccagcgagctagcaatcgccatgcaagtcgggtcccgaatcctcctggtcggtgaccattcacagctgcggccgacgtatgaggatgagcacaagaaagctattgctcaatctcttggcattcctgcgaactcagctgaattccagcgagtcatgcgaagcgattttgagagagtgttcgaatccccttacggtcgtgcagcacgagcaaccctcaaaacgcaataccgcatgcttccgccgatcggtgaccttgtcagcgaaatcttctacgagaacgaactcaagaacggtgagcggccgagccctgaatacttcgcccaaaagaccccaagctgcctgtctcacattgtcacttggctggacaccggaacgcttggcagtaaggcctttgatagcggtggtcaaagcatctcaaacggcgctgaggccgacgcaatcatccagcttttgcaggagatcgaagctgatgaagacttctgcgcgggaatggttagagaaatggcagagtcccaagaacctcctattggcgtcatctgcatgtaccgtgagcaacgcaagctggtccgcaagagattcgcagagaaatcatggtctgaggacttccgcagacttgtcaaaatagaaacagtggacagttaccaaggtaaagagaaccacatcattatcgtgtctttaacacgagccaagtctgaccagcacccaggtttcctatcaattccgaaccgtatcaacgtagcgatttcacgcgctatggagcgccttattattgttgggagtatgaaaatgtggagcggccggaacgcaaaactcccacttggcaaggtggcaggctacattggggccagacaggatgataggaactatcaaattgtgcctgctacaccctcgaagaggattgtctga

SEQ ID NO: 331726 - DNA, 243 bp, Pseudomonas aeruginosa
atggctgaccgcgccatcgccctgattgactgcaacagtttctacgcgagctgcgagcgggtgtttcgaccggacctggcacggaccccaatcgttgtgctgtcgaacaacgacggctgcgtcatcgcgcgcagcgcggatgccaagccgcatgtcgccatgggagagccctacttcaagattcggcacaagcttcagcgcttgggtattcgcgcgttctccagcaactacgcgctgtattaa

SEQ ID NO: 331727 - DNA, 219 bp, Pseudomonas aeruginosa
atgttcttcaagtgcatcaagggagcaattcgtcatagcttaattcctaggaatagcctttcagtcaacctagccgaattcctctgtagccacaccctttccaatgaatctccaatcttccggcgcctggtggatatcgcaaatacctacttcaatcatctgcccctgtttcggctctgcaggcagaagcgcaacgtactcagcttcgatctcccgtag

SEQ ID NO: 331728 - DNA, 963 bp, Pseudomonas aeruginosa; identical to SEQ ID NO: 329825

SEQ ID NO: 331729 - DNA, 240 bp, Pseudomonas aeruginosa
atgcagcacgggatgctctgggccggcaacccgatcctccccgaacagcatctgggcgtgcctccggaagaggcggccaaccgcctgggttcctggtccggcctgatggtccaggccgacaagaccgcgccggacttctgccccggcgatctgaagaccgcgcgcttgttcggccaacactttgccgaaaccctcagccgtcttcaccagccccagctcgaacaggaggctcaagcatga

SEQ ID NO: 331730 - DNA, 225 bp, Pseudomonas aeruginosa
atgatcgcgcgccgatacgctccgctgctgttcgcgctgattctgtccggggtgatgagcctgctggtctccggccttgccaccgggcgcgccgtcggcctcgcaccaggcttcgcccatctctggctcggcgcctggctcaccagttggagcattgccttcccgctggtgttggtcatcgccccgctgacgcgccgcctcgtggagaagctggttcgcgcttag

SEQ ID NO: 331731 - DNA, 417 bp, Pseudomonas aeruginosa
atgcgacgaatcacgatgattctgctcgccgccaccctgttgcagggctgcgcgcaccagaagaccggcaagcagtgcgaagacaacttcaacaccgagggcggcttcatcgccggcaagaccttcacgtccaacgtccagctcgacatgccctacgccaaggtgttcgaccgggcgcagaagaccctggtgaaggagggcttcaccatccagaccgccgacgagaagagcggcaccatctccgcctaccagggcgtcatcctgagcagccggaacgcaccgttgaacatcgtggtggaaaaggcgggctccggctccaaggtaagctacgtcttcgtcaccctgggggggatgtacaccaccgaaggcgcggtgcgtgacggcttctgccggttcactgacgggattcggcagtaa

SEQ ID NO: 331732 - DNA, 1041 bp, Pseudomonas aeruginosa
atgtcggagtatttcgatagcagccgccgcgacctgatgcgcctggcagcggtggcactcgccgccacccaattgccagccgtcgccctggctgccagcgagaagagcaagaccaccgcgtcgctgaaggccggcacacacaccaccttcaaggcgctcaagcagatcgatgcaggcctgctcaatgtcggctatgccgaagatggcccggcggatggcccggcggtgatcctgctgcatggctggccgtacgacatctacagcttcgtcgacgtagcgccggcgctggccgcacaaggcttgcgggtgatcgttccgtggctgcgcggctatggcagcacgcatttcctctcggagcagacgatgcgcaacggccaacccgccgcggtagccagcgacatcatcgcgctgatggatgcgctgaagatcgacaaggccgtgctcgccggcttcgactggggcgcgcgcaccgccgatatcatcgccgccctctggcccgaacgctgcaaggcgctggtagcagtcagcggctacctgatcggcaaccaggcggccggccagcaaccgctaccgccggaagccgagtttctctggtggtaccagttctacttcgccaccgagcgcggcgccgccggctacgcgaagaacacccgcgacttcacccggctgatctggaagcaggcctcccccaagtgggacttcgatgaagctaccttcgagcgcagcgccaaggcgttcgaaaaccccgaccacgtcgccatcaccctccacaattaccgctggcggcagaacctggcggcaggcgaagcgcagtatgacgagctggaacagaagctcgccaaggccccgccgatcagcgtgccgaccatcaccctggaaggcgacgccaacggcgcgttccatccgccacccaaggcctacgcggccaaattcaccggccactacgagcatcgcacgctgaccggaggcatcggccacaacctgccgcaggaagcaccggcggcattcgccaaggccgtcgtcgacgtcagcacgtggtaa

SEQ ID NO: 331733 - DNA, 1251 bp, Pseudomonas aeruginosa
atgaaaaatcgtcgtacccctgtgctggtctccggactggcgctgctgccctcgttcgcccatgcggatttcctcgccgacagcaaggccagcatcgaagcacgcaacttctacttcaaccgcgactaccgccagagcggtgccgcgcagtccaaatccgaagagtgggcccagggcttcctgctgcgctacgagtcgggctacaccgagggcaacgtcggcgtgggcgtcgatgccctcggcctgctgggcctgaaactggattccagcccggaccgttccggctccggcctgctgccgtactcggccagcgacaagcgcgccgccgacgactacagcgacctcggcctgaccgccaagctgcgcgtgtccaagagcacgctgaaggtcggcacgctgctgcccaaactgccggtggtgcagtacaacgacacccgcctgctgccgcagaccttccagggcgcgctggtggagtcgaaggaactcgacgacctcgacctgcaactcggccagctgcgcgaggtgaagcagcgcgattcgtccaacaacgaagacctgtcgatgacccgcggcaacaagcgcaacatcgtcgccggcagccacctgaccagcgaccgcttcaacatcgccggcggcacctatcgctggagcagccagctgagcaccagctaccactatgccaacctagaagacctctatcgtcagcactacgtgagcctggtgcacacgctgccgattgccgagggccaatcgctgaagtccgacatccgctgggcacgttccaccgacgatggcggcagcaacgtcgacaatcgcgcgctcaacgccatgttcacctacaagctgggcaaccaggcgttcggcctgggcctgcagcgcatgtccggcgacaccggcttcgcctacctgtcgggcaccgatccgtacctggtcaactacgtgcagatcggcgacttcgccaacaaggacgaacgctcctggcagctgcgctacgacttcaacttcgcctcctacgggctgcccggcctgagcctgatgacccgctacctgcgcggcgacaacatcgacctgctgaacggccagggcaacggcaaggaatgggagcgcgacaccgacgtcggctacctcgtgcagagcggcccgctgaagaacgtcggcttcaagctgcgcaacagcaccttccgcagcagtttcggcaatgacatggacgagacccgcttcatcgtcagctataccttgccgatctggtaa

SEQ ID NO: 331734 - DNA, 945 bp, Pseudomonas aeruginosa
atgactgtgctggttgttgcagaacattcgaatggcgcgctgggcgccgcgacgctgaataccgttgccgccgcgcagaagatcgggggcgatatcgccgtcctggtcgcaggccataacgtcggtggcgtggctgaagccgctgccaggatcgctggtgttgccaaggtgctggtcgccgacaacgcagcctacgctcaccaactgccggagaatgtggctccgctgatcgccgctcttgtgaacggagaggggggcaagggctacagccacgtgctggccgccgccaccaccaacggcaagaacttcctgccgcgcgttgccgccctgctggacgtcgaccagatctccgagatcatcgaagtcgtcagcgccgataccttcaagcgcccgatctacgccggtaacgccatcgctaccgtgcagtcctcggctgccgtcaaggtcatcaccgtgcgtggcaccggcttcgacgccgttgctgccgaaggtggctccgccgctgttgaagccgtttccggcccggccgatgccggcaagtccgccttcgttggcgaagaactggccaagtccgaccgtccggaactgaccgctgccaggatcgtcgtatccggcggccgtggcatgggcaatggcgacaacttcagcattctttattccctggccgacaagctgggcgctgccgtcggtgcttcccgcgccgccgtcgacgccggcttcgtgccgaacgacatgcaggtcggccagaccggcaagatcgtcgctccgcagctgtacgtggccgtcggcatttccggcgccatccagcacctggcgggcatgaaggattcgaaagtgatcgtggcgatcaacaaggacgaagaggcaccgatcttccaggtcgccgactacggcctggttgccgacctgttcgaagccgtaccggagctggaaaagaccctctga

SEQ ID NO: 331735 - DNA, 750 bp, Pseudomonas aeruginosa
atgaaagtactggtcgcggtaaaacgcgtggttgattacaacgtcaaggtccgcgtcaaggcggacaactccggcgtcgatctcgccaacgtcaagatgtccatgaaccccttctgcgaaatcgccgtggaagaggccgtacgcctgaaagagaagggcgtcgccagcgagatcgtggtggtctcggtcggcccgagtggcgcgcaggaacaattgcgcactgctctggcgctgggtgccgaccgtgcggtgctggtcgagagcaacgaagaactgaactccctggctgtcgccaaggcccttaaagctctggtcgacaaagagcagccgcagctggtcatcctcggcaagcaggccatcgacagcgacaacaaccagaccggccagatgctggccgcgctgaccggctacgcgcaaggcaccttcgcctccaaggtcgaagtcgctggcgacaaggtcaacgtcacccgtgaaatcgacggcggcctgcagaccgttgccctgaacctgccggccatcgtcaccaccgacctgcgcctgaacgagccgcgctacgcgtcgctgccgaatatcatgaaggcgaagaagaagccgctggaattcctcccccctgacgcgctgggtgtctccacggcctcgaccgtgaagactctcaaggtcgaagcgcctgccgcgcgcagcgccggcatcaaggtgaaatcggtggccgaactggtcgagaaactgaagaacgaagcgaaggtgatctga

SEQ ID NO: 331736 - DNA, 1233 bp, Pseudomonas aeruginosa
atgggtgctttgagcggataccgcgtactcgacctcagccgcgtgctggccgggccctggtgcggccaggtgctggccgacctgggcgcggaagtgatcaagatcgaacggcccggcgtgggggacgacacccgcggctggggcccgccctacatgaaagccgccgacggctcggacagctccgaggcggcgtactaccagtccaccaaccgcaacaagctgtcggtggcgctgaacctggccaccgaagaagggcaggcgctggtgcgcgccctggcctgcgagtgcgacgtgctgatcgagaactacaaggccggttcgctggccaagtacgggcttgactacgagagcctgtcgaaagtgaatccgcgcctggtctactgctccatcaccggtttcggccagaccggcccgcgcgccgaggagcccggctacgacttcatcatccagggcatgggcggcttgatgagcatcaccggcgagaaggacggcgtgcccggcgcgggcccgcagaaagtcggtgtcgccgtatccgacgtgatgaccggcctgtactcggtggtcgccatccaggccgcgctgctggcccgcgagaagaccggccgcggccagcactgcgacatggcgctgctggacgtgcaggtcgccatgctcggcaaccagagccagaactacctcgccaccgggcgctcgccgggccgccagggcaatgcccacgtcaacatcgtgccgtaccaggtgttcagcgcgaaggacatggacttcatcatcgcctgcggcaacgacagccagttcgtctctctgtgcgacgccatcggcctgccggaattgccgaaagacccgcgcttcacccgcaatgccgaccgcgtgcgcaaccgcgacatcatcgtcggcaagctcgccgagcacttccagggcgacaccgccgataactgggtgaaacgcatccacgcgatgaaggtgccggtcggcgtgatcaacgacatcggccgcgcgctggacgagccgcaggtggtcgcccgcgacatgctggtggagattccccacgcgcagaacccggcgttccgcatggtcggcagcccgctgaaattgtccgagacgccggtggaataccagcgcccggcgcccatgctcggcgagcacaccgacgaggtgctcaagcgccgcctggggatcgatgacgcacgcctggcgcagttgaaggccgagggtgtgatcgagcagttgggataa

SEQ ID NO: 331737 - DNA, 1203 bp, Pseudomonas aeruginosa
atgctcaatgcttatatctacgccggcctgcgcacgcccttcggtcgccatggtggcgccctggcgccggtgcgcccggacgatctgatcgcccaggtgatccgcgagctgctggccagcaccaaggtgccgggcgaagccatcgaggacgtgatcctcggcaacaccaaccaggccggtgaagacagccgcaacatcgcccgccatgccgcactgctcgccggcctgccggtgaccgtgccgggccagacggtgaaccgcctgtgcgccagtggtctggcggcggtaatcgatgcagcgcgcgccgtgacctgtggtgaaggcgcgctgttcgtcgctggcggtgtggaaagcatgtcccgcgcgcccttcgtcatggccaaggccgaggcggcgtacagccgtgacctgacagtattcgacagcaccatcggtgcgcgcttccccaacccgaagatcgttgccgggttcggcaacgacagcatgccggagactggcgacaacgtagcccgtgaattcggcatcagccgcgagcaggccgaccgcttcgctgcccgttcccaggccaactttgaagccgcccgccaggccggtttctttaccggggaaatccttccggtcagcgtgccgaccgggcgcaagacgccgccgaatgtggtcgagcaggacgagcatccgcgtccatcttccgatgaatccgcgttggcgcgcctcaagccgctgtccgagggcggggtggtcaccgcgggcaacgcttccggcgtcaacgacggcgccgccgcattgctgatcggctcggcagaggcgggcgaacgccacggcctcaagccgctggcgcggattctttcggcggcggcggtcggcgtcgagccgcgcatcatgggtgtcggcccggtcgaggcgatcaacaaggcgctggcccgcgccaacctgaccctggccgacatggacatcatcgagatcaacgaggctttcgcttcccaggtgctcggttgcctgcacggtctgggtgtcgacttcgacgatgcgcgggtcaaccccaatggcggcgccatcgccgtcggccacccgctgggcgcctccggcgcgcggctggcgctgagcgtggcgcgccaactgcagcgcagcggtcaacgctatgcggtgatcagcctgtgcatcggcgtgggccaggggctcgccatggttatcgagcgcgcctga

SEQ ID NO: 331738 - DNA, 1536 bp, Pseudomonas aeruginosa
atgaccctttctttcggtattgagcgcatggccatcgtcggtacgggagtcatgggcagcggtatcgcccagatcgccgcccaggccggcatccaggtgaaactcttcgatgcccgtgacggtgcggcccaaaccgcgcgtgaaaacctcggtcgcaccctcgccaagctggcggagaagggcaagatcacttctgccgaagccgacgccaccctggctcgtttgctggttgccggttccctgggcgagctggccgattctgatctggtggtggaggcgatcatcgagcgtctcgatgccaagcaggcgctgctggccgatctggaagccgtggtcagcgccgactgcatcctcgccaccaacacctcgtcgctgtcggtcaccagcatcgcccgtggttgccagcatccggagcgggtggcgggcttccacttcttcaacccggtgccgctgatgaaggtggtcgaggtgatcgacggcctggccagcgacccgctggtcggcgacagactggtggcgctggccgcgcgcatgggccatcgcggcatccgcgccaaggacactcctggcttcatcatcaaccacgccggccgggcctatagcaccgaagccctgcagatgctcaaggaagccatcgccgaaccggccgatatcgaccgcatcctgcgcgaaggcctgggcttccgcatggggccgctggagctgttcgacctcaccgcgttggacgtttcccacccggtgatcgagtccatctacaaccagttctaccaggagccgcgttatcgcccggcggcgctgacccggcagatgctcgaggccggcttcgtcggtcgcaaggtcggccgcggcttctatcgctatgcagacggcaagatgatcgacccgccggcaccgcaaccggtgccgagcgtggccgcgctgccgccggtgtggatcggtgcggagaacgaccaggaccgcgagttgctcggcgaactgctgaagaaactcggtgcgaccctggagcagggcggccaccccagtagcgaggcgctgtgcctgctcgccccttatggtgtggacgcaaccacggcctgccagaacttcggcaccgacccggcacgcaccgtctgcatcgacctgctgctggacctgcagcgccaccgctgcctgatgcagaacccggcgactgccccggccatgcgcgatgccgcccatgcgctgctggcggcggacggtgcaggtgtcacgctcatcaatgacagcgtcggcttcgtcgcccagcgcgtactggcgctgatcgtcaacctggccggcgatatcgtccagcagcgcatcgccagcgtcgacgacctcgacgaaggcgtgcgccgcggcctgggctacccgcaaggtccgctggcctggggcgacagcgtcggcccggcgcgcctgctgaccattctcgaacgcatgaccgacctgaccggcgatgcccgctaccgccccggtccgtggctgcgccgccgcgctgcgctgggactgtcgctgcgccacgccgagcctgcgctgggctga

SEQ ID NO: 331739 - DNA, 777 bp, Pseudomonas aeruginosa
atgagtaccagcgtggttcatctcgatatccaggccaacggcgtggcggttgtccgcatcgaccgcccggaagccaaaaacgccctcaatgctgcggtgcgccagcaactggccgagcacttccgcgccctgagcgataaccctgaggttcgcgcggtggtgctgaccgggggagaggagtgcttcgtcgccggcgctgacatccgtgaattcgcccaggccagccccatcgagatgtaccgtcgccacaccgaactgctgtgggaagcgatttcccgttgccccaagccggtgatcgctgcggtgaacggttttgccctgggcggcggctgcgagttggcaatgcactgcgacatcatcgtcgccggcgagtcggcacgctttggtcagccggaagtgaaactcggcctgatgcccggcgccggcggcacccagcggttgatccgcgccgtgggcaagttccaggcaatgcgcatcgccctgaccggttgcctggtcaaggcgcccgaagccctggccatcggcatgctcagtgaagtggtggaagactcgcgcacgctgccacgcgcgctggaactggccgctgagatcgccgcgctgccgccgctggccgtggcacagatcaaggaagtgatgctcgccggtgccgatctgccgctggacagtgcgttgacgcttgagcgcaaggccttccagttgctgttcgactcgaaagaccagaaagagggcgccgccgccttcctcgaaaaacgcaaagccagtttcctgggggaatga

SEQ ID NO: 331740 - DNA, 879 bp, Pseudomonas aeruginosa
atgcgccgcaacaagacggagatggactcggctgcgccgacgaaaaacgaaggtgaaatcggcctgctggaacgcggcctgtacgacccggccacggcactgagcgaagaggaaaacagcggccagttcgtcacggcgctggcgcgcggcctggagatcctgcgttgcttcacgccacgggaaaacgtgctgagcaaccaggacctggcccgcaagaccgacctgcccaagccgacggtgacgcgcctgaccaacaccctgatgcgcctgggttgcctcaagcgcgaggtgcattcgggcaagtaccagctggatgtcggcgtgctgggtttcggctacgcgatgctgtcgaacctgtcgatccgcgcggtggcccacccgctgatggaggaactggccaaccacgcccaggcggcggtggccatggccgcccgcgaccgcctgcagatggtctacctggacgtggtccagggacagggaaacatgacgatgcgccggcagatcggcagttacctgccgctggcggtgagttcggtaggccgcgcgtgcctcgcggcgatgccggagaacgaacgggaattcctgctcgaccacgttcgcgaacgcgaaccggacaactggccggccatccgcaagggtctggaccgcgccttcagggactacaccgactacggctactgcctgtcgatcggtgaatggcaccgcgacgtcaactccgtcgccgtgcccttggtacacccgcagtacggcctgctggccttcaactgcggcggaccgagcttccagctgacccgcgagaagctcgaggacgacatcgggccccgcctgatcaacatggtcaacaacataggtgccgcccgctcgctgaatctcgggtga

SEQ ID NO: 331741 - DNA, 1278 bp, Pseudomonas aeruginosa
atggaaaacactgcttccgctccggcggcaaccgccgccacccaggacaagacctgggtgctcgtcttcgccttctgcttcatcggcctgctgatcgatggcgcggacctgatgctgctctcctacagcctcaccagcctcaaggccgagttcggcctgagcaacctccaggccggcagcctgggcagcgtcaccctggccggcatggccttcggtggaatctacggcggctgggcgtgcgatcgcttcggccgggtcaagacggtggtctggaccattgtgctgttctccgtcggcaccgctgtccttggtctgacccacaactactggcagttcgccgcggcacgcttcgtcgcgtcgctcggcctcggcgccctttacgtggcctgcaatacgctgatggccgagtacgtgcccaccaaataccgcaccaccgtgctgggcaccctgcaggcaggctggtcggtcggctacatcgtcgccaccctgctggccggttggatcctgccggaccacggttggcgctacctgttctatatcgccatcatcccggtggtactggccatcgccatgcgcaagctgatccccgagcccgccgcctgggtccaggcgcaggccgaacgccagcagcgcaaggccaacgctcctgccggaacggttgccgctccacggcagaacgccttccgccagatcttcgccgacccgaaggccagccgcatgttcctgttctgggcgctgaccgccggcttcctgcagttcggctactacggcgtgaacaactggatgccgtcgtacctggaaaccgagatgggcatgaacttcaaggccatgaccgcctacctggtcggcacctatgccgcgatgatcctcggcaaggtactggccggcgtcgccgccgactggttcggccgccgcaccgtgttctccttcggcgccctgggcactgcggtgttcctgccggtgatcgtgctgttccacagccccgagaacattctgtggatgctggtggtgttcggcttcctctacggtattccgtatggcgtgaacgcgacctacatgaccgaaagcttcgctgcggcgttccgcggtacggccgtgggcggcgcctacaacatcggtcgcatcggcgcggccattgcgccggcggtgatcggcttcctcgccacgcagatgtccatcggcgtgggcttcctggtgatgggcgcggcctacttcatctgcggggtgatccccgccctgctgatccgcgacaagcagttcgacccgcaacaggaatga

SEQ ID NO: 331742 - DNA, 918 bp, Pseudomonas aeruginosa
atgaaaattggctatgcgcgggtgagtactcgggatcagaacgccgacctccagatcgatgctctgacaaaggcagggtgcgagcggatctatcaagacgttgccagcggctcaaaaagcgcacgtccggaactggacaaattattggttcatgtacgggccggtgatgctgtggtgatttggaagctggatcgtctagggcgctcgctcaagcacctggtcgaactggtcggtgaattggccgctcgtaacgttggcctgcaaagtctgaatgaccccatcgataccacccacgcgcaaggccgctttgtgttcaacctgttcgcttcattggcagagttcgaacgtgagttgattcgtgagcgcacacaggcaggcttgtccgctgcacggtcacgtggtcgagtcggtggccgcccgaaggggctgcccgctcaggcggaagcgaccgctatggccgcagaaacgctgtaccgagagggtcggttaagtgtgagcgccattggcaagaaactgcacatttccaaaagcacgctttaccgctacctccggcatcgcggcataacgatcggcgtacccgcaaaaatcacccagcatctcaacatcacggtcccaccggcagtggacaatgccgaacggatcgcgacggtcatattgcgcctggccgtcgagaacaacagcaagttcgtgcgtggtaaaaaacgggcactggagaatatcgagcgttactgcctggaaccttacggcatgaagctgcttgagtcgggcaactacgcgctgagcattccctatcgcaacgatgaggcactggataagacggtacatgatctgctgaccgagatcagccaagaggccgagatgcgtaattgctttatcgaggcggatgcctgggaagagggctctgagcggaggtggtag

SEQ ID NO: 331743 - DNA, 240 bp, Pseudomonas aeruginosa
atgaataccactcgctggaacgtcgccgtctccaccgacaccgaccaatcgcttcgcatgtttctggccagccaaggcggtggccgtaagggcgacctgtcgcgcttcatcgaagaagcggtgcgggcacacatcctggagctgagcgccgaacaggccaaggtttccaatgcccatctgagtgaggccgaactgaccgaagcggttgaagaagcgctcgactgggcgcgtaagcgctga

SEQ ID NO: 331744 - DNA, 411 bp, Pseudomonas aeruginosa
atgcgggttgtattggataccaacattctgttcagtgcgctgatctcaccgcatgggtctcctgatgcgatctatcgggcctggcgttcagctcgcttcgaggtggtgacttcacgggcacagctcgacgaaattcgtcgcgccagtcgttaccccaagcttcaggccatccttcagcctgccaaagtgggggccatgatcaataacctgcaacgcgccgtggtattggagcggttgaccattgaggttgaagccgatgatccggatgactcttttctgctggccatggctttggcgggcaatgcggactacctagtaaccggtgatcgacgcgcaggcctcttgcagcgcggacatatcgaacgcacgcggattgtcaccctcgccgtgttctgcgccgaggtactgtga

SEQ ID NO: 331745 - DNA, 2994 bp, Pseudomonas aeruginosa
atgccggttggttttctgactcaggagcaacgcgacggctttggtcgctacatcgatgcgcccagccgtgatgaactggagcgctacttccacctgagcgatgaagaccgtgaagccgtccaggtactacggggcaaccataaccgcttgggctatgccgttctgctgactaccgttcgcttcgtcggtgttttgccggacaaacccacggctgtgccggtggaagtcctgcttgtgctttgtcggcaattggcaatcgccgaccctgactgtcttgtacgttatagcgatcatcgtcgctggatacatgcggccgatattcaagagcgctatggctatcgccactttactgacccaggcatcggctttcgtttgagccgatggctgtatgccctttgctggactggtactgatcgtcctggcgtgctgttcgaacgagctacctcatggctgctcacacagaaagtcctattgcccggaatttcccagttagagcgcttcattgcccaactgcgtagccgggttgaagaacgcctctggtacaccttgagccgcagcgtgaccgaggagcaaagacagcacctacaagacttgcttctggtggccgaaggcaaccgtagttcccgactggatcaactacgctccggcccggtgatggtcagtggccctgcactggttcgggcgctgcgtcggctggatgatgtacgcgggttgggtatcgccttaccggcagctgcgcatatccctcccagccgcattgccgccctggctcgctttgccaacaccgcgaaggtcacggccatcaatcgactgccggcgtcgcgccggttggcgacgttggtggcattcgcggtttccttggaagccagtgcgcacgacgatgctctggaagttctggaagcgctactgcgtgatatcttcaacaacgcagagaaggctgacaagaaggctcggttgcgtagtctaaaagacctggatcgctcggcggcaatgctcgccgctgcgtgcaaggtcgtgctggatagctcgatcagcgatgacaatgtccgtgcccggctgttcaacgacctgccacgtgtcacgctggagaaagccctggaagaggtcaatgcgttgatccgtccggccaacgatgtgttttacctcgctctggaggagcgctaccgcagcgtgcgccgtttccttcctgacttattgaaacatattcgcttcggcttcagcccggcgggtaagggtgtggcggctagtttggactggttgcaactgaacttgcctcgcaggaagccggaggatgacgtgccgcaggagatcgtggccaaggcttggcagaaccacatcactcgcgaagatggctccctcgacatgggcgcctatgtcttctgcacgcttgatgcactacgcacggccctacgccgccgcgatgtctttgttgcacccagttggcgctatgccgacccgcgtatcggtctgctcgatggtgcagaatggctgtcggcgcgaccgatcatctgtcgctcactgggcctgactgtggacgccaaaaccaccttggacgccttgtctgccgagctggatgcgacttggtacgcagtcgccgctcgcctgcccgacaatcctgcgatccagttgagtgagaatacagagggcaaaaccgagctgtccctcggagcgctggagaagctggaagagcccaactcgttgctgcaactgcgtgcagccgtggccgacttgatgccgcgtgtcgatttgccggaaatcctgttagaaatcgccgctcgtaccggcttcactgaagccttcacccatgtgtccgaacgcaaggcgcgggccgacaacttggtgacgagtttgtgcgcagtgctcttgggaggagcctgtaacaccggcctggagcccttgactcgcaacgacaaccaagcgctgcgccgtgaccggctgtcctgtgtgagccagaactatctccgtgacgataccctgtcggcagccaatgccattttggtggctgcgcagagtcaactggagctggctcaggtctggggcggcggcgaggtggcctccgccgatggcatgcgttttgtcgtacctgtgcgtaccgtacatgccggccctaacccgaagtatttcggtaccggccggggcgtcacctggtacaacctgatctccgaccagttttccggtcttaacgccattacggtgcccggcaccctgcgcgacagcctagtattgctcgcggttgtgctggaacaacagaccgaattgcagcccacacaaatcatgaccgataccggtgcttacagcgatgtggtgttcgggttattccgtctgctcggttatcacttctgcccgcgcctggctgatgtcggcggtacccgcttctggcgcacccgcccggacgcggattacggcaagctcaacggacttgctcgccagtcagtcaagctcgacctgatcgccgagcactgggatgacctgttgcgtttggctggctcactcaaacttggccgagtgccggcgacaggcatcatgcgcaccctacaaacgggagatcgtccgacccgtctggcccaggcgttggcagagttcggacggatcgagaaaaccctgcatacgttgacctacattgatgatgagtccaagcgccgcgccaccctgacccaactgaatcgcggcgaaggccgacacagcctggctcgcgccgtgttccatggcaaacgaggcgagcttcgccagcgctaccgagaaggccaggaggatcaactcggtgccctgggcctggtggtaaatatcattgtgctatggaataccctctacatgacggctgccgtggagcggttaaagcagcacggctacccggtacaggacgaagacctggctcgtttgtcgccgctgatcttcgagcacatcaatatgttgggacggtactccttcgcggtaccagaagaggtcgcccgaggtgagctacggccactgcgtaatccagacgacgatatttag

SEQ ID NO: 331746 - DNA, 852 bp, Pseudomonas aeruginosa
atgacccacgtaatggcatgtattgataactcacaatcctcattggcggtctgcgactacgcagcatgggcgtcgcagcgactcaacgcgcctcttaccttgcttcacgtattggatgaagagaaatacccagcagcagctgacctaagtggaaatattggtctcggcagtcgagagcatctgctggaggagctggctacattggatgcccaacgcgccagactcgctctggaacagggccaacacatgctggaaaaggccagggagcgaacggtcatttccggcgctgcgtttcctgagctgaagcagcgccacggacacttggtagaaagtctgagcgaccttcaggaggatattcgactgttggtgataggaagagtgggtgaagacaactcacgcaacgcgcacagccttggcagccagatagaagctgtagtgcgaacaattcaccggcctatcctgatcacagccaacagctataaaaagcccgaaaaggtgatgctcgcatttgacggcagctccacagcctacaaaaccatccaaatgtttgccgccagttcgctttgcaaagacttgcccattcatcttgttacggtcggtgcagattcggtgagcaatcacgaggcactgggaaaagcacaaagcatgcttctctcggctggcttcctagtccaagctgaaatcagacaaggtgaggtggagtcggctctgcacgattatcagacagagcacggcattgatctgctggtcatgggtgcctatgggcattcacgcatcaggcagtttttggtaggaagcacgactacgacgatgcttcgaacagccaccatgcctgtattgctgctgcgctga

SEQ ID NO: 331747 - DNA, 1488 bp, Pseudomonas aeruginosa
atgctgcaatcgctcaaacagacgtggttttccaacgtccgtggagacgtgctcgcggggatcgtggtcgcgctcgcgctgatcccggaggccattgctttctctatcattgccggcgtcgaccccaaggtcggtctctacgcctccttctgtatctgtgctgtcatcgccttcgtcggcggtcgacccggcatgatctcggcagctaccggtgcgatggcactgctgatggtcaccctggtaaaagatcacgggcttcagtatttgctggcagccaccttgctctgcggggtgcttcaaatcctcgctggatacctgaaactgggctctctgatgcgctttgtttcgcgctcggtagtcacaggctttgtgaatgcattggcgattctgattttcatggcgcagttacctgaattgaccaacgtgacctggcacgtttacgccatgaccatagtgggcctcggaataatctatctgtttccgtatgtaccgaagatcggcaagctgattccctcgccgctggtgtgcatcctggccctgacggccattgctatttacctcggtctggatatccgcactgtgggtgacatgggcgaactgccggacacgctgccgattttcctgtggcctgaagtcccgctgaacgttgaaactctgcgcatcatcttcccgtactcagccgccttggccgtagtaggtctgcttgagtccatgatgaccgcgaccatcgtcgacgatttgaccgataccaccagcaacaaaaaccgtgaatgcaagggtcaaggcattgccaacatcgctgccgggatgctcggcggtatggcaggctgcgccatgatcggccagtcgatcatcaacgtgaaatccggtggacgtacccgtctctccacattgtgcgcgggcattttcttgctgctgatggtcgttttcctcggcgaatggctctccaagatcccgatggctgcattggttgctgtgatgatcatggtatccatcggcacctttagctgggattccttgcgcaatctgaaagagcacccactgtcgaccaacctcgtcatggtcgcgaccgttgtggtggtcgtggcaacgcataatctggcttacggcgtgttggtcggcgtactgctggcttcgttgttctttgcgaacaaggtcggacattacctcgatatcaagagcagtcttgaagagacggagtcgcatcggacttaccgcgtggtaggccaggtgttcttcagctcggcagacaagttcaccgaagtttttgacttcaaggaagcgctcaacaaggtcaccatcgatctgacacaggcgcatttctgggatatcaccgccgtcgccgcgctggataaagtggtaatcaagttccgtcgcgagggcgccgaggttgaagtgctgggtctaaatgaggccagcgccacaatcgttgaccgctttggcgtgcatgacaaacctggcgccatcgacaagctcatgagccactaa

SEQ ID NO: 331748 - DNA, 1131 bp, Pseudomonas aeruginosa
atgaagatctgttcgcgctgtgttatggatacatctgacgctgaaatcgtatttgatgaggcgggagtctgtaatcactgccataaatttgacaatgttcagtcccggcagctgttttccgatgctagtggtgagcagcgccttcaaaagataattgggcagatcaagaaggacggttcaggtaaggattatgactgcatcattggccttagtggcggcgtagatagttcctatcttgctgtaaaggtcaaggatcttggcttgcgcccactggttgtgcatgtggacgccggctggaatagcgaacttgcagtcagtaatattgaaaagattgtaaaatattgcggttttgatttacatactcatgtaataaactgggaggaaattcgtgatcttcagttggcttatatgaaagctgctgtcgccaatcaggatgtgcctcaagatcatgccttcttcgctagtatgtatcactttgctgtgaagaataatattaagtacattctgagtggtggtaatttggccactgaggcagtattcccagatacatggcacggcagcgctatggatgcaataaacctaaaggctattcacaaaaaatatggtgagcgtccgctaagggactacaagactattagttttcttgagtactatttctggtatccctttgtcaaaggaatgagaacggtccgtccgttgaatttcatggcctatgataaggccaaggctgaaaccttccttcaagaaacgataggctatcgttcttacgcgcgaaagcatggagagtcgattttcaccaagcttttccagaactactatctaccgaccaagtttggctatgataaacgcaaactgcactactccagcatgattttgtctgggcaaatgacgcgtgacgaagctcaggctaaactggctgagccgctatatgatgcagatgaactgcagtttgatatcgaatatttctgcaagaagatgcgaatcacccaggctcaatttgaagagttgatgaatgcacctgttcatgactattcggagtttgccaactgggattctcgacagaggattgcgaaaaaagttcaaatgattgtccagcgtgcgctgggtcgtcgcatcaatgtctactcgtga

SEQ ID NO: 331749 - DNA, 756 bp, Pseudomonas aeruginosa
atggtccggaggcgcgttatcccatgcttgctgctcaaggatcgcggtctagtgaaaaccgtgaagttcaaggagcccaagtacgttggagacccgatcaacgcaatacgcatcttcaatgagaaagaagtcgacgaactgattttgctggatatagatgcttccaggctcaatcaagagcctaactatgagttgatcgcggaagtggctggtgagtgttttatgcctatttgctatgggggcggtatcaagacattggagcatgcggaaaaaatcttttccctaggtgtcgaaaaagtttcgataaataccgccgctcttatggatctttcgttgattcgaagaattgccgataagtttggttcgcaaagcgtagttggctctatcgactgccgcaagggtttctggggaggacactccgtgttctcagagaatgggacgcgcgacatgaaacgctccccattggagtgggcgcaagcgctcgaagaggctggagtgggtgagatttttctaaattctattgatcgagatggagtgcagaaaggcttcgacaacgctctagtggaaaatatcgcttctaacgtccatgtgccagtgatcgcctgtggtggagctggctccatcgctgacctcatcgatctttttgagcgtacgtgtgtgtcggcagtagcggcgggaagcctattcgttttccatggcaagcatcgtgcggtactgattagttatccggatgtcaacaagctcgacgtcggttag

SEQ ID NO: 331750 - DNA, 1776 bp, Pseudomonas aeruginosa
atgccgttcaatcaagatgcacagattcttgaaaatctcgcgttgcgcattccgcaacaggaagcttgggctgcgattcgagatcattttgcgcagccgggctgtgacagtgaggtcggcctggtgctgccggttggttgcggaaagtcaggtctaattgcggtaacgccctttgccttgaatgcacggcgcgttctggtgatcgctccgggtacgcgaatcagagaccagctagcagcagacctgcgcgccagcagcgcaaccaatttctacgagcgatgtggagtgctgtcggctgcacaagagtttcctgagacagcagttgtcgcaactgggcggatcaacctagacgacctcacaaattgcgacgtcgccgtggccaacattcagcagatcgctggtgatcagaatcgatggctcgatgagctagctcctgacttctttgatgtagtgcttgtagatgaggctcatcacaacacggctgaaagctggcagcaggtgaagcggcggttccctgcggctcggattgtgaactacagcgctacgcccacccgggcggatggggcgctgatggaaggtgagatcatttactcctttcccgtggttcgggcaatcgaggccggttacgtgaagcggttgcgagcaaaaatgctgagcccggaagcgcttcgatatgtggatcgctcatccggtgaagagaggatcattggccctgaggaggtccgccagctcggcgaagaagacgccgaatttcgccgtggaatcgtgatgtccgaagagacattggcctctatcgtggaccaaagcatcaatgagctgctacggcttcgagaggaaacgggcgagaaccgtctgaagatcattgcatcggctctaaattatgcccactgcatccaaatcaccgaggccttccgcgccagaggtatgcgtgctgactatgttcactcacgggaaggcgaggccaatacccgtgtcttcgcggctctggagagccatgagcttgacgttattgtgcaggccagaatgcttggcgaggggttcgaccacaagtacctcgcagtcgccatggttggcagcatcttcagaaacctaagcccgtttgttcaatttgtaggccgggtaatgcgagcaatcgagcagaacgctccgggtcatcctttgaaccagggcgttgttgtattccacgttggcgccaacatcgcccgcaggtggtcagattttcggcagttcagtgaggcagatcagaactacttcgctgagctcctacccgaggttgaggaggtaaccttccgcgagaatacagcagagcgtgagccgggaggcggacgccttgagcctgttgaaattcttgaggagcgaggagtgcgagctgcggaaatggctccgattggagatccgagggctcaggaattgctgcagcagcttgcagatatgggcattaatcctgagcaagctgctgcagaaatcaggcgtcgccgccaaacgcgccaagatcgccgggaggcgcgtcgtgcgtccctttccgagcgggtcagcaatgagtgcggtggactgcttgcccgattgggtatccgtgttggtggacgaactcttgaccggcgtcgcattcaggacaatttcgcctggacggttgctgaggtacatcgtcggatcaatgagcatgtagaggggaggaatgctgatcggcagaactttacccttgagcagctcgatgtggcccacgacgctctgcctgaaatcgtgcgtcagcttgaagaagagcttcgcgatgcttaa

SEQ ID NO: 331751 - DNA, 2898 bp, Pseudomonas aeruginosa
atgatcaaagccgaaggaaagaagcacccgaccttcgccgaagtgaaacgcgccgccctgcaggccattgaccgcgtattggcgcactggcttcccgggggcaagcgcgtagacggtggcaaggagtacaccgctcccaacccgacccgcgccgacaagcgcgccggctcgctcaaggtcaacctggccaagggcacctggagcgacttcgccacgggcgacaagggcggcgacctgattgacctggtgcactacctggacggcggcagcgacgtggacgcttgcaacaagctggcggaattcctccacgtcacggcaggggctgccagcacggcgccggccagcagcaagcccaaggccgcggaatgggtgccggtgcagccggtgtcggatgaggccatgcgtaaggttccgacgcagcaccgccagcacggcaagccctccacggtctgggtgtacaaggatgccgaggggcggccgctgatggtgctctatcgcttcgacctcgggccggatgagcagggtgttccgcgcaaggtgttcgccccgctgacgtggtgcaggagcagcagcggcggcaccccgcagtggcgttggcaaggcttggccgatccgcgcccgctgctgcgcctcgatgagctggccgcgcgacctgatgcgccagtggtgctctgcgagggcgagaagtccgccgacgcagccggcaagttgctgcccagccacgtcgctacctgctggccgaacggcaccaactcttggcagaaagccgacttcgccccgctgatcgggcgtgacgtgttgctctggccggacaacgatgcccctgggctcgcctgcatggatgccttggccgcgcacctgggccagctcggcgccgcctcggtgcggccggtggccttgaccgtgttcggccagcgccccggcctcgatggcgagcggccgaccttcaccccgggcggcgaatgggccgagggggacgatgctgccgatgctctggccaagggctggacgccggcccacttggcggagctggtgcgcacgggtgagctgttcgccctggctcccatcgcgcctaccgccaagtcgccaacggccgacaagccccgagcagccaagcaagccgccgccgaaaagcccgcctctgcccctggaggctttcgcgtcacggcagacggggtgttctatgtcggcgaggatggcgaggcacgggcggtctgttcgcgcttggagattctggcgcgtacccgcgatgacaagggccagagctggggcttgctggtggagttcgacgatccagatggcgaccctaaacggctgaacattcccgcccgggcgatggccggcgacttcggcaaggaagtgctcggaccgctagtggatatgggcctgcgcctggccccggtacgcaccgcccgcaactcgcgcaatgacctgcaaagctacctgcagagctacgacagcaccgaccgcgcacgcctggttgcgcgcctgggctggcatggcgatgcctacctattgccggatcggcagatcggccagagcggagagcacctgcacttctacgaagccggcgcgcagctcccgaccatcagccaagccggcaccctggaacagtggcagcgacagatcggcgcactgtgtgtgggcaaccatcgcctggcgttcgtggtctgcgcggccttcgccggtccactgttgcacctgctgggcgcggagtcggggggcttccatctgtatggcgacagctcgggtggcaagaccacccacctgcaggtggccgcctcggtctggggtggtccgcgcctggtgcgttcctggcgctcgaccgacaacgccttggagtccatcgccgccgcccactcggacggcctgctggtgctcgatgaaatcggcatgtgtgatccgcgcatcattggcgaaaccgtctacatgctgggcaacggcaccggcaaggcgcgggcgaatgatcggggccaggctgggcgccaggttcaggagtggcgtctgatgttcctctccaccggggaaaagaccctggcccagcacatggccgaggcgcacaaggagttgaaggccggcatggaggtgcggttgctcgccgtgccggccgacgccggcaaggggctgggcctgttcgagatgctgcacgattttacggatgcagccgccctttccgatgcgctcaaggcacgggtaagcaagtactacggaacaccggccctcgccttcctgtcggccctctgcgagccgggcaagttgcttggttacggcgcgatcctacgcagcaccctggagcgattcaccactcaggctttgcccgctggggccagtggccaggcccaacgcgctgccgcccgcttcggtttagccgctgccgctggtgagctagccacggcgctgggtgtgacgggctggcccgagggcaccgccaccgctgcggctcgtgtttgtctagacgcttggctcgctgagcgcggcggggctggaaatttggaagctgatgcgatagtcgagcgcctgcgcctggtggtggaacgccatggcgaaggtcgctttactcgctgggacggcatcgccgcgaaggtggacgaccacgctccacgcacaggtgaccgcctgggcttccgtcgcaccatggagcacggcgtgggcgattcgctgtacacctctgtcacctactacttcctgcccactgcttggcgtgaggaagtgttcaaagggatgaacctgcgcaacgtcaaccgggtgctagtggagcgggagatcctgcaggccagcaaggatggtaaagccgcacagtcactcaccctgccgggcatgcccaagggccgagcctatgtggtggatgctgtaaggttatttgctgcggagcccgacgcattgcgcctagctgcctag

SEQ ID NO: 331752 - DNA, 273 bp, Pseudomonas aeruginosa
atgactcggcggcctgtcgcaacgactcgcgctcaccctttcggcccttccgctgggcccgccctgttcaccgtcaatccgggcgttccgatccatgacgctctgcagtgcgcatccagcatgctgggttgtgtgcatgagctggttatcaccatcagcgacggcgacattcgcggccaggaaatcttcgccgtccagtatctgaccgagatggccaaggccctggtggattcttccagcgagggggtatgggacaaggagcgagcgcaatga

SEQ ID NO: 331753 - DNA, 171 bp, Pseudomonas aeruginosa
gtgttgcagctgctctccgggcagtttggaaatcctgacgagcgttacgcagaccatattcttgccgccgtgatctgggacgttcagggcaccatcgagcagatcagaaccctcgccctgtatggcaactccaccagcacccccgacgcacgcaaagggggtgcccaatga

SEQ ID NO: 331754 - DNA, 165 bp, Pseudomonas aeruginosa
atgaagcactcgcacgcccgcaatccgtccagccgcgccgccgccttccgcgctatggcgctgtccgcgctgcactccaactccagcctttccacccgcctcgctcggtacaacagccacatggccaaggcccgcgccctggaagcggtagggggtgtgcaatga

SEQ ID NO: 331755 - DNA, 321 bp, Pseudomonas aeruginosa
atgactgctcggccgttgaagttcgcggacgcctgccagggcataccgcagtcgttcgaggtgctgcgccgggttggcctgtcgagcaccagcatgcaccgcctggagcgctaccggcgccgccaagaaaaacggggagcggtggtgctggtgctgagctgggcggacggcacctggtgcgtgttggcgctgcacctgccgccgctctgcgccccggtgctgaccagtgagctaatagcggaagcctacaccgaagccttcgagtggatcaccgccggcaggctgcccttgctggtgctgcgcccgaccttccaagcctga

SEQ ID NO: 331756 - DNA, 681 bp, Pseudomonas aeruginosa
atgacgctctcccgctcgctccacctggagccgtaccgtgatccgtccggcctgggcttcgcgctgattaccgaatacaccggctcccgtccgccgtgccgacaacgcaccatcgtggcggttggctggaacttcaccgaggatcgcgcgctgttcgtcaatggcgcggggctggtggtgccttcctggcataaccgcgatgcactggcgccgctgctgcgccgccacaccgtgcggcaggcgttcgggcgcgtgatcggtgatgggcagttcgccctcaagccggctgaactcaaggcgctggaaggctcggggcggctcaagccctggctggtgcattatctgccacagccagccgggtatctggacgatgccgacccctggacggcctatgtcgcggccgatcttgaggccgagcgcgatgccttcgcccggaaccatgccgccgccgtcgaactggggcagcggtgccgagctggtgttgagctgccctggtctgctgcgccggtagccggtggcgccgactatgacgcgatgctgcacgagcagcttgagcagcaccgcgccgatctggaggcctggcggcgtgaagagcttgccaagggggcgcagattgctgcctacctgcgcggcgacgttggcgacccgcccctgttggccctgatgaagggggccgcctga

SEQ ID NO: 331757 - DNA, 297 bp, Pseudomonas aeruginosa
atgaccaaagttccgcgcctcaagcaatctgccactgcctcccctgtaggcctgaccactcacccggcgagcaacttcgatcccggcaccactctgattcgcatgccggagctgctcgccctcaccggcctgcagcgcgccacggtgtacaagcgcctgaaagatgacccgacctttccccggccggtgccgctgagtgacagcaccgcgcgcggcgctcccgtggcctgggtactggccgaggtgcaggcctggatacgtggccgcatcgcagcccgtggggaggtggcagcatga

SEQ ID NO: 331758 - DNA, 282 bp, Pseudomonas aeruginosa
atgcaaccccagcaaacatccagtaccgccgcaccgatgcgccagcacgcagccgctgccgccgccctgaaccccgttgacctgctgactcccgagcaagcggcgcttgctctggggctgtcggtaaaaaccctggccacctggcggagcaccggccgccattccctccccttcatccgctgcggcgcccgcatccgctaccgccgctccgacctggccgcatggctgcaggaacggcagagcagtggcgcacctagtgcggagggaggcgtcgagcaatga

SEQ ID NO: 331759 - DNA, 423 bp, Pseudomonas aeruginosa
atgatcgaggccggacatgccaccttcgagcaactacgggaggacgtgcctgatgtgttcgaggtccctgcattcaaggactacctggccgcgcgcgtggcgtccggcaacatgcccaaggccaagcgcggaaagcggcgcaacgccgagcagcacgcagcgaagcgagaactctttttgctggcctgcaggatcgagcgagacgagcagccgattacctggctaggggcctgcgctgcagcctgcgagcggcggccggaactagttcccgtcacgtggattgaatgccccgccgagaacctcaggcgcgagggggacaactactacaacaagactcgctggggggcgtatcgtcttcgcaatgccccggcacttctagccgacgaacggccggatggatattacgtgaattacctcctttga

SEQ ID NO: 331760 - DNA, 1236 bp, Pseudomonas aeruginosa
atgaaacgcagcgagatcaagcgccgcccgctggcggacacgaccctggccggcttggagccggaggcaacaccctatagagagctggacggggcgagcctgtacttccgggtgaagcccaatggccagaagtcctggaacttccgctacaagaaaccggacggcaagtggtcctggctcggcctgggtagttaccccgaggtcagcggatcggccgccaggcagaaggctgccgagctgcgcgccgacgctgcggatggaaagagccctctcgccaccaagcacgctcgcaaggcttccgagctggaggccgccaacagtacctttgaggcactggcccgggagtggatcgaggttcgtctacctggttgggcggataacaccgccaagcgaaccgtcggtgccctggagctgcatgccttccctgtattcggcaagcgcttgtacaccgagatactgcccatcgagtggatggagttcttcaagggcatggagcaaaagggcatcatcgagcagatgggccgcgttcgccgctcctgcaaggaaatctacgacctggcccgcgtcactggccgcgcagtacataaccccctggacggactgagccgcttcctgcagagcaagccggcagagaactacgcccacgtcagcgccaaggaactgcctgccctcctgcgggccatcagcgcctatccccacgcacacgatctgcggctagggctgcgtctgctgatgctcactggggtacgccccagcgaattgcgggaagcctcctgggaagagttcgaccgagacgctgggctgtggacgatccccgccgagcgcatgaaaaagcgccgcgcccataccgtacccctctcccgccaggccctcgatgccctggagcaactgcaccggatgaccggggtttatcccctgctgttccccggccgtaatgaccgcaccaagccgcgtagcaacatggcctttaacatggccctacgccgtatgggttacgaaggccggcagactggccacggtttccgccatatcgcctcgaccaccctgcgcgagaaaggctttgccaaggaacacgtcgaggcacagctatcacatgccgagaatggggtagccggcgtgtacaacaaggccatctacctggagcagcggcgcaccatgatgcagtggtacgccgaccacctggacgaactggagcgggataacgtagtaaaaggcaacttcggcaaggcggtgtaa

SEQ ID NO: 331761 - DNA, 2676 bp, Pseudomonas aeruginosa; identical to SEQ ID NO: 323713

SEQ ID NO: 331762 - DNA, 243 bp, Pseudomonas aeruginosa
atgcgcgagtcgatcaccgaagacgccctgcaggcgctcatcgccgccggcggcgcccgcgacaccctggtcacccgcggcccgggcggggagggctggcagctgctggtgcgctatgccggcggtggccaccactacccgttacgctcacgccgcgaaccgctgcgcgtgttcgcctcgctcacccagctcgaacgctacgccaccaagatcggcctgcgcgaattccgcgtcgagctgtag

SEQ ID NO: 331763 - DNA, 534 bp, Pseudomonas aeruginosa
atggacggctacgaacaccccacccgcaatgccaccccgcaccaggtctaccgcctgtcctggctggcctacgtcggcccggtcctgctgttcctggtcctgtgcgccggtgcgctggccctcggctggtggacgctgcacaaggcgccgagcgaacaggcctaccagatcggcctggcggccagtgccggcgtcctgctcatcgccctggcactgttcgtctacaagctcctctacctgcgcagcgtccacctctacaccgacgacgtgggcgtctggctctaccagggcatcctgccctggcgccgcggctaccgcggggtgaagtggcgcgacatcgaggacgcgatgtacttcaccggcttcatcagctgggccctgcgctcctacaccgtgcgcatcggccaccgcttcaccaagaccagcgagatcctggtaagccacctggcccggggcaacaaggcggtcgagcacatcaaccaactgcaccaggccctgctgcgctccgagccggcggtcgacgagcggacgtga

SEQ ID NO: 331764 - DNA, 675 bp, Pseudomonas aeruginosa
atgtgtggcaggctttcgcagtacacagggcttcatgagttcgtcgacgcactgtcgatgcccaacgcgctggtcaacctcgtcggcgagcagcccgagcgctacaacgtcgcgccatcgacggccgtgacgacgctacggctcgaaggcgatgccctggtcgcccagccgatcagatggggatggaggccattctgggcgcgcgatcgcgccgcgccgatcaacgccagggtcgagaaagtggcgcatggacgcttcttcagcaccgcgtggcgccatcgcgcgctgacgccgatctcgggctggttcgagtgggtcgatggaggcgaggcgcggaaacaaccgttccacatccaacaccgggacgggagtccgatcctatgtgcagcgatcggccagttccccgggctcgatgatgagcaggccgagcagcatgggttcgtgatcatcaccgcggactctgccggcggcatggtcgatattcacgaccggagaccggtcgtgctcccacccgacctggcccgcgagtggcttgacccggcgacgccgccagagcgcgcggaacaaatcgtgctgcaccagggcgaacccgccgaggcgttcacctggtacacggtcagccgcgacgtcggcaacgtgcgcaaccagggcgcctacctgatcgagcctgcgtag

SEQ ID NO: 331765 - DNA, 279 bp, Pseudomonas aeruginosa
atgattatctccttccgacacaagggtctggaagtcttcttcaagacgggcaagaccaaagggatccaggcggcacacgccccgcgcctacgccgccaactgctcgccctgagcgaagcgaacaatccaggcgacatgaatcaggtcggttggagactccactccctgaaaggggatcttgccggatactggtccgtccgcgtttccggcaattggcggctgacattccgcttcgtaggcgaggatgtcgagctggtcgactaccaggactaccactga

SEQ ID NO: 331766 - DNA, 297 bp, Pseudomonas aeruginosa
atgggtatgcacaacccgccgcatcctgcggaaatcctgcgcgaggacgtgctccccgggctggatatcactatcacggacttcgccaaggccctgggctattcgcgggtccaactgtcgaaggtgctcaatgggcacgcctcgatcacgtcggacctggccgtgcgccttgagcgtgctggcatcggccgggcccgccactggttggccatgcaggcggcctatgagctatggcatgcagagcagcgcgctcagccgaaggtgccgcgtctgtacgatgcccacattgcggcgtga

SEQ ID NO: 331767 - DNA, 363 bp, Pseudomonas aeruginosa
atgtccaagctcgccgccttccgggaagcggaacgcaaactccaggaacaaatgcaactgctggagaagctcaaggccgacagcagcctgaaaaaggagctggagttccgtgatgatctggaaaagctcatgaagaagtacggcatgagcctgcgcaacatcatcgagatcctagatcccagcgccgtcgcgaaccggcctgccggcccggcctcctcgatccgccggccgcgggcggtgaaggtctaccgcaatccggaaaccggcgaggtggtggaaaccaagggcggcaatcaccgggtgctgaaggcctggaaagagcagtacggcgccgataccgtcaatacctggttgcaggcctga

SEQ ID NO: 331768 - DNA, 543 bp, Pseudomonas aeruginosa
atgggacaacttaaaaatatctacttccctggcgtgagtagtgcgccgtcgtctgcgcaatacggaatttttcttagccctgaaaagtcttttccagtcgccaatatagtcgtcgtacagtccgacaaacagaacgactatatgggtacaagtctttataatacagacgaaggccgaaacattgttctcaatcgaattctagagaatgacctacgagggatacggctggactatatcaacttttacgtcatcctcgacttgtctaccacgcttgaaggcatgaaactgccgatccaccttgacttcgacgattacatcgccaaaggaaacccctacaatagtactcctagcgacacgacaaccggacgcatcttgcaatggattacgggcgaaaagacctattcctactggagcggccatgtcctggggggctgtgcccgtttttacactgaactggatgaccagaaccgtgaacctctctcggtcgatagtgcgcgggaactactgcaccgagtgggttataaaattccaacaaaggaatag

SEQ ID NO: 331769 - DNA, 411 bp, Pseudomonas aeruginosa
atgagaatcgagttaccgagcatatctgagcagcagcgcgccatcttcgagcaggccacgcaggatggaatcaaacaactgaggaccaacctcgacgctccgcgcctcccgtcgcagtctgaggtcgacgagcaggcctacagccgggcgcacctgttacgcgagcatgaaggctgggaagccccgcacccggatgttatctgcgcctacttccgtcacttccaggcacacttttctgattacaataccgacgccaagttggcggcgctgcttggcctgaccagtgaccgacgtatccgggagtataaaagcggtgcgagaaccatcccttacggggtgtggcggaaattcctggtgatgaccggcagggctccgcaggaaataattcaagtcttcgctttcatggggtga

SEQ ID NO: 331770 - DNA, 816 bp, Pseudomonas aeruginosa
atggaaatcagcttgaaggacatagcttggcagcgctcgcttgggaacctgctcgaccacctggaccagccagacttttggttggtactggtggaaacggtacgggagttcgtgcaggtcgataactgggtttctctggtatttagtgactccacaccagtgatacttttctacgccgaggaggaagaagaggaaaaagacgaaaggaagcccaaccatttaattggaaaatacataaccggttactatcgcatcgatccgttctatgccgcctcacgctctgcgcccggacctcgaacgatctatcttcgagatatcgtgacgcccgcatttaataagagtcgatactacatagaatacttcgagacgcatgtggtatgcgatgaaatgcaatataacatccctattgatgagcgccgcacgctttgcctgtcgctgggaagcgaggcgaagtataccgccgagaacattgcgtttcttgagatcattcgcccttgggtgctttccctcatgagcaagcggctccacttcgaggaaagcctacaagacgacagtagcccatcgctcagagtcgacagctctgtgctgaacgctcttgtcgcaccactgacagggcgtgaatcccaggtcttgaatctgatgctagagggtaagtcaaataaggaaatagctgacaagctcgcaatatccgtatcgacaaccaaagttcaccggcgtcacgtctacgccaagttgaacgtaagttctcactccgaactatttgccttgctcctgaaagatatgccgtctgtcggaaacatagtttctcaaacataa

SEQ ID NO: 331771 - DNA, 1104 bp, Pseudomonas aeruginosa
atgaaagggattgctgcacttgccttgtctatcgcctttaccgcgggctctgccggcgtgtcggctgatcaacgtcaggagaagagtgttcacttctataactggatcgatttcatcgccccaggcgtgaccggcgattttcagaaagagacgggcgtgaaagtcatttccggcactttcgatagtggtgagttcgcacaaggcaagctcttggccgggcggtccggttacgatgtagtagtgatcacttccaacctgctgcccaacctgatcaaggcgggggtgctccaggagctggagcaccaggacttgaaagagtggtccaacctggacccccaggtgatgaagaacctcagtgccacggatcccgggaaccgatacgcggttccctacctgtggggcaccacgggcatagcctacgatgcagaaaaggtgcgccagtacctgggcgctgatgcgccgaccaactcatgggatctgattttcaaggaagagaacatttcgaagctctcgaagtgtggggtggcgatgctcgactcttccactgagattctttctatcgcattgaactaccttgggctcccctacaacagccagaatcctgccgactatgagaaagcacaagcactgattctgaaagtgcgtccttatattcgatacttcgactcgtctaagctgacagccgacctcaccaacggaaatatttgtgtttctgtggggtggcagggtacggcctatcttgcaagaaacgccaataagagcggaaaagtccaccgggagattgggtatagcattcctaaagagggctcccttgtttggatagagaatatggtgctactcaaagatgcgccgcatcccgaagagggaaggaagtttataaacttcatgatcaagcctgacgtgatagcgaagtcttcgagctatatcggctatccaaatgggaacagggagtccttccagtacgtggaaaaaacagtcagggaagatcccgctgtgtatttcgacgatgaaaccatgaagcggctgttccccctggaaactctgccactgaaggccgagcgggtcagaacgcgggtgtggaaccggatcaagagcgggctgtag

SEQ ID NO: 331772 - DNA, 348 bp, Pseudomonas aeruginosa
atggacaacctccgaaagtccatcggtgcacgtcttcaagcgctcagaaaggctcgctccctcactcaggcggaccttgcctacagaatcgactgtgagacggtcctaatcagccgatatgagcgcggcatcaacaccccgagcgtcgagcagctcctcaagatcgcccgcgccctgaacgtaaccccaggcgaactgcttcccgttgaccaggacctcgacagggagcgcctcatcgccctccgccgggatctggccgagaaagcgctcaaaatcgaatccaccactgccctggaacagctcaaccgcctggccgactctttcctcctagaaaggaaaaaatcctag

SEQ ID NO: 331773 - DNA, 606 bp, Pseudomonas aeruginosa
atgcatgtacagtgtttcggctccagaatgccgtgccagattcgacccccacacgggtcgggttttggaggagcgtgcccgaaaagggaggattttagagtgcgcaattggtacctgatgacccataaccgcaatgcgctggagtgggttacgagcaaggtggaggctctggatgttgagctgtacgcaccgacgcgaacggagcttcgtcgcagggtagatcgcccctcccaacgaaagacgacgcgacagctcttccccggctatctattccttcgcttcgaccctgaagtggtccacacaacgacgatcacggatatagccggtgtgcaagggttcgttcggtttggtggtgcgccttatgtgatttcggactcagtgattgaaacattgaaggaaacactgctgcttcgcacagataaggggctcgatgtagtcgagtacagaaatctgccatccgagttcgaaaagtcgctccgactaattgtgctgatgcaagatgatgagcgccgtaaggttgctttttatgcgttgcttcagcagcaagatttgtggcgacgcttggaaagtaagaagcagtcacgcctttgtagtgcaatcgcctag

SEQ ID NO: 331774 - DNA, 213 bp, Pseudomonas aeruginosa
atggcaattccaaaagtgagaaccggaaagaagacggtaaacgtctatgttggcaatgagcgatttgaaacgcttctgcaactcgcaatcgatgtaagccaggaaagtcgggtgcagatcaccccctcgcaatttgtgcaatggatgatcgatcgactctcgaagcaggctgcgcaagaaatgctgcaagagctgattaaaaaggagatttaa

SEQ ID NO: 331775 - DNA, 708 bp, Pseudomonas aeruginosa
atgcttactaccagtgccttcatggcgctggccctgcaatgtgctcctgctgtccatccctccacgctgtatcccgtcgttaaagccgaatccgccctcaatccttacgccatcggtgtgaaggacggtgctttgtcgcgtcagccgcaaagccttgcggaggccttggcggcggtgaaaaagctggtggaagagggcaagagcttcgctgtggggctgggccaggtccatcggcagcatttcgatgccagcgatccccggcaggtggccgaaatgttcgagccttgccacaacctgaaacgctctgctgaggaactgcgccgctgctatggccaggcgcgcccggtcagcagctcagatcaggaagccatccgcaaggcctacagctgctactacagcggcaacttcaccaccggcttccggcccgagcccgaatttggcggaacgagccatgttcagcgggttctggccaacgcggatctaccagcgtacgtcccggcgcttcaggcacagcccccagctgcgccaacccttccggccgggtcggcaaatgttcccgtcgccccccagccgacttaccagagctgggatgtgcttcggcagtacccccgttatgacccgccggcggcaagtcagccgcaggcacaaccacaacccctggaagaccaggatcgagaggtaaagagcgatgcaaaaactgaagagtaa

SEQ ID NO: 331776 - DNA, 339 bp, Pseudomonas aeruginosa
atgcaaaaactgaagagtaagtcccgcgagatgttgcagcggctggcggtattcctggccgtctacacgccatacatggcgatggccgacgagtgggatcagaagctggtgcagctgggcagaaatatccgcctggggatgttcgccatcggtggcagcatcgccctgatctgcctgctgtgggtcggcattggctggatgtcatccagggccgcgggcgaccacagcactacgttcatggactacgtgaagcaggtcggcgtgctgggcgtggtgggcggggttctgctcctcggggcgtgggcctgggcgttcttcggtggcggcacgattgcgtga

SEQ ID NO: 331777 - DNA, 399 bp, Pseudomonas aeruginosa
atgaacgatgaggaactgctgttcccaagttacaacgccatgagccgcccggcgacgttcctgggcgtgccgatcctgcctttcgtaggaattgcggtcgcgttgttggtggtcggcacagccggttttctgctgtttccgtggtggggggcgttgctgttggcctcgcccctgttcctggccctggtcggcttttccgtggtgagttcattcgacgcccgctacatgcgtcgaatcgtctacgccatgcgtcgtttttccttgaacctgagatacggccgcggggtgtgcctggcgccgatcaatcccctttggagtgtgttctatggcaagcgtttcgcacaacgtcgtcatgccggcggaagctttggcgccgctgatgaaatatcacgtgcatga

SEQ ID NO: 331778 - DNA, 2436 bp, Pseudomonas aeruginosa
atgccggcggaagctttggcgccgctgatgaaatatcacgtgcatgagcacatggtgaccctgacgggaaaccgtctgctgagcttgatccggctcaagggcgtttctcacgaaacccgtgacaaggccgacctggaccaactgttccaccggctcaaccgctatttcttcacgctcgggaagaaggaaggcaaaagcctgatgcttcagacgtacgtcaccaagagccagttagagctggacggtgagtaccagctcgatctaccggtgctgcaggagttcgtcgacgcctacgtgcgtccgttcagacagggcagctaccgggaggtgagctaccacctggcggtgatcttgaagtaccgcgatttggacgacgggatacggcgcatgcaggatctgttgatcacctcgatcagtatgctcaagcgcttcgaacccgttctgcttggagtggaggagacggagacaggggcgttctactcgcagatcgggcgcttctacagcctgctgttcaatggccgtgagcaagcggtccggttgtccgatacgcgcctgggcgaggcgatcattgatagcgtgaccagcttcggtgcctatgacttcgtcgagaaccgcccgaaccacggtggccggcggtttgctactacctacgacctgcgcgactaccccagcgagggcagccggccggggatgtgggacgaggcgattgagcagccgctggacttcaccttggtacaggcgttcatgttcgaggagcgcaacgagatcaagcgcaacttcaagaaacagatagcggacctggcctcggtagagggtgagtcgaagcagaccgacgagctggatgatgcggcgagcgaaatcgcgcagggcatcaagagctttgggcgctaccacgcctcgctgatcgtctacggcgatacgccggacgaggcgatcacgaacggttcgaagatggagtcgttattcagcgcgaaggacgcgacgttcgtacggtcgaccctgagcaacgtgtacacctggtacacccagttccccggggtgacgcaggccatgtacccgatgatgaaatccaccgagaacctggcctgcgggttttccctgcatgccactcccagcggcaaggcacgcggcaacccgattggcgacggcacggccttggtgccgatgcgcacgctcagcgacgggatgttcctgctcaacgcccacgacagcccgccaggccagaacaacctgggcgagcaattgcctgggcacctcgcggtgacgggcatgacgggcgctggtaagaccactctggaggccgtcatgttgaccttcttcagccgatgggggccgatgctgttcggcatcgactacaaccactcgctggagaacctgctacgggccctaggcacgcagtacttctctatcgatccgggaacgtcgaccgggttgaacccgttccagctccaggacacgccgcagttgcggcaattcttgctcgacgtggtgatcacctgtgccggagggatgaagaaggaagacggcaccggcgggctggtggatgaggtcgaggaacgggagatccaggcatcgatcgatgcggtgatggcccactcgaaggttgaacaccgaggtatgtccctgttgctccaaaacatcccccccaggggtggaaactgcctgcacactcgtctgtcgcgttggtgtcgactgcgtgccgatggcggtcgggaagggagctgcgcatgggtgctggactcgccgcggaacctgttcgatcccactgcctaccaacggcttgcgttcgactgcacgcacatcctgaaaaaggagtacgtcagcaggcacccggctgaaatggaggtgctcttgaagaccttgttcttcatgaagcggctgatgcaccagacccagccgggcagcctcttgctgaacttcgtcgcggagtactgggcgccgctttccttcgagagcactgcggagctgatcaaagaggtgctgaaggcgggccggttgcgcggtgaaatcctgatgatggatacccagtcgccggaggatgcgttggcaacgccgtatgcgccggcagtcgtgcagcaggtggtgacctcgatctggttggccaacgacaaggccacggccgagagctacgcgaagttcggtatcgagggacggctgttcgaggcggtcgccgagcaggaccggtacgaccgccaggcagtggttgtgcaggggccccggtcggtgcgtctgaagatggacctttccacgcataccgaggtgcgggacgagctgaagtactggctgccgctgctgtccacgacgacgaagaacgcggccgtggccgctcggatccgtgccgagctgggaacagacgatcccgcagtgtgggtgaagccgttcctggacgagatgcagcggcagtccctggtgactgaaggcgaggggggagggtag

SEQ ID NO: 331779 - DNA, 228 bp, Pseudomonas aeruginosa
atggctagctacttcgagtaccccgctgaagagatgggccgcccggttccggttctgttgagcctgcgtgaactcaaggccttggaactcgctctggacggtgaccctatcgtcgagtccagtccctggaaagaagtgctgacggcggcaacgcaacggctcatagacgcgctgattgatcggcgcattgagctggaccggacggtgaagagccgtctggacttctga

SEQ ID NO: 331780 - DNA, 669 bp, Pseudomonas aeruginosa
atgaaaaagaccttactggcggcggcgctggccgctgtgacggtaacggctgcgccgttgatacaggccagcggtatcccgaccttggatgcggccacggtgttgcagctggggatgaatgccaaacagcaggctgaagaggcgttgaaggccctcaacgaggctaagcgcgggatcgagcaggccaggcagcaatatgagcattacaagtcgctcatcaacggcaacgacaagctgggaggctttctcaacgacccgacgctgaaccaggtactgcccctgggcgactgggccgatgtgtacagcagcgctcgcgatatggctagtttgcggaaccgctacggtctggtatcaagcgacggccgggtgcaggcccagttcgacaagctactggctgtaaccgatgccctggaacgcaactacaaggccagcaaccagcgggtggagaacgccgcccggttgcgggagcagttggaccaggtgcagacgccacagcagaaacaggatctggaactgcgctaccagcaagagttcctggagctacagaaccagcagatgcgcctggcgaacatgaaagtgctcacggagcagaaagaacgcatcgagagcgacaaacgagcacaagaggtcatggattaccttaacggtaaaagacctctacctaagtga

SEQ ID NO: 331781 - DNA, 966 bp, Pseudomonas aeruginosa
atggatgaagatggaaacatcaaggtagagttcaccaagaacctctacacgttcatcgactccgctctacaaagcatgatcatggtcggaatggccaaggtcatgctggtcatgggggcggtttttgggacattttggttggttcacctgatgatgcgcgccattcgctggctttggacggggctcgatgtgccgttccaagaagttacgatggagttcatcaaaatagcttttttgatttcgattgcgttcagcgttgcaacatactggaactgggtagtacccgtggttcaaggactacctttgtggatggcgcagacgttatcaggaggggacgggaggttcacaaaccaggtcgatcagctcattagtggcttttttagctctgtaatgaatttggtgaaggcttttaagtttaatccgataagcaacttctcagaaactttcttctcagggcttggaatattttacatgctcctgggagggattccgttcttattggtcgcagtcggaaccctggttacattaaaggccagcaccacagtgatcttggtagtagggccgctgttcattgcctttgcaatattccctcagacccgacagtggttttgggggtgggtaggcgtattgggtggttttatgctggctcaggttctgttctcggtgatcctcggcttgcagatgaggttcatcaacgagatcgttgtccatgacggtaatatcccgagcgacctgacaggggccctttccatcctgttctacttttcagcatttacagccattgcactggagatcccgaactacgcggccaccatcatggcaggggcgccgacctcagcgggtggagggcttggtggtctagtcaaacgtggactgggtctgcacccggcgatgcggatggctaaaggagtagcaggggctgggcgcagacttctgtcgagggcacgaggcaacaggatcagctga

SEQ ID NO: 331782 - DNA, 816 bp, Pseudomonas aeruginosa
atgttaaaggggcgcagtaagcaacgtttcaaggcgctggccgagcgcgaacaacagttggaggctcagccgttggtgggggaggcctcacgcgaagcgagcctggctctgaaggcgtacacagacgcggcacgctggttcgaaagctcggtggccaagcaggagcggagcaaggcgaggacctggcgggcgatcgcaatcgtgttcggcctgctggccttcatggcggtgggcgcggtgctggggttgacgccgctgaagacagtggaagctttcctggtacgggtcgacaacaacaccgggttcaccgacgttgtgccggtgatgaaagaccgcactggcggcggcgatgagcaggacacacaagatgagttctggctggctacatatgtgcgtttccgcgagagctacagcttcgccggcgccgacgtgaactacggcatggtccggctgctgtcgtactcgggagcgttcgccgagtaccggaacttccagttgtcgagtaaggggtacacccaggtgctgggggataaccggcagctgcgcgtggacatcaacaatatcgtgttcctggatgccgatggctcgctgcccggcagcacgaagaagttccgaaccgcccaggttcgcttcaccaagaccgtcctcgatcgcaacggtgtgccggtcctcggcatggctccggtgacatggctgggcacgatcagtttcgactacggcaacgcgccgaagacccgcaaacagcgctggctgaaccccttgggctttggcgtggcggcgtattcggtggcacaggaagttggaggttcgcaatga

SEQ ID NO: 331783 - DNA, 822 bp, Pseudomonas aeruginosa
atgaagcagagccagaagctgaagccgctgtgtgcggcattgatcctcggggcatgggtcagcctcgccgcggtgccgtccggcgccgaggtaatgggtggtgggtctcctttcgacgcgcgtatccagaccgcgctgtactcgccggaaaacgtctaccgagtgcagtcggtagtgggacggtcctcgctcatccagctcgggcagggcgagaccgtcaacggtgacactggtctgatcgtcagtggagatcctggcgcctggaccatcggtgtgaaccaggcgggcaatctggtggcgatcaagcctatgtctgaccaggacccggacaccaacctgatcatcaacaccaaccgccgcgtgtacgtcttggaactgcgcctggcccagcgcgtggcggacatgacgtacctgctgcgctttcgctatccggaaccaccgaagaagcccaccgccggccgcaacctcaacgccgacccttgcgcgggcacgttccagaaccgtcgctaccagaagcgcggcgacatggagctgtcgccttcggaagcctgggacaacggcatgctgacgtgcttccgcttcagcacggccatgccacggccggtggtctatcgcgtcctgccggacggaaccgaaaccctggcgaactggcaccaggtacacaacatcgttgtcgtccacgggatcagcgacgaataccgcttccgactgaaccggcaggtactggctgtgcggacgcggcaccagggcggcggtttctacaactacgacggcaccactacgggtgaggtgcgggaggtaaagcatgcaactgcgcaataa

SEQ ID NO: 331784 - DNA, 321 bp, Pseudomonas aeruginosa
atgcaactgcgcaataagggggtcatcgcgctcactgcggccattgtgctgtccggtctcagctttgcactgactctgtggttttccttgtccattcttgaggccatggtggcattgctcagtccacgtggtatgggccgctggcaagctggagcgggctggtggcaagcaggggctgtcttgtggtcgataggcgttatcacattggtgggctatgccagcggaatcgaccgactgatcgttgaaagcgcgagactgatcgcggaggtgaagaaggaagaagcggcagggaaggaggacgagaatgacctccaacactga

SEQ ID NO: 331785 - DNA, 1347 bp, Pseudomonas aeruginosa
atgacctccaacactgaaccgctcgacccgaaagaccaccaggccgacgaccaggtgcagggggctgatgcagcggcagaagcgtcgactcaggcgcgcggggcgtttgacctgcgcaagggcaagatcaagcgtgagggacggagcggtctctacgtgggaatcggagtgctcgttcttgtagtggtggcgatcatcgttgccggctggatgtgggttatctcggaaatgcgttcggacaccagcgatatcgacgagagccagatcaaggcggatgcgacgctggaagtgcaagaacaagacgatgccacgatgcagcggatcaaggagcagaagctccgggaaatggaagaggcgcaacggagggccgccgcggaggctgaagcggcaagaacaccggcggcggaggcaccggcggagcacgttgagcgcggtagcgcctctgctactccggctggttcgacgaccacggccagcaatcaagatgtaccgccgagccctctggaacggaagcttgcgggtggggttgtggtgcaagctcaggttgccagtggctcggcctacaacgcctcctcgaccgccggatccaactcaggttcaggacgaccagcagcgggcgccggcacgccgccgacagccttggacctgatgggacaagggcaagccgactcaggaagcggtggagtggctttggatacggatacgaacagtggccgggcacgcctggaccaactgggcggtactaccttcgtgccgagcaaagctgtcctggctccgccgggcaagtacctggtgcggcacaacacgtacaccagttgcgtgctgtacacagagatcgtcacggacaacccgagcctgatcgaatgccgactcacagagccgttgtattcggcggatgggtccacggtgatcgctgaagccggggaccggctgaccggagagcagcgcaccgaggttcggcccggccaaacccgggtgttcactgcctggaccgagctggaaaccgcctctggagtacgcgcacgactggacagcttgggggctgggccgatgggggccagcggcaccgaggcctacatcgacaagcacctggccgaccgcttcatgggcgcggtgatgttgtcggtgttcaaggatggcatgcagatcctggtcaatcgctcgcagaagaacaactccgatggctacacggtgaacaacaccgaaagcagcgtcgagaacatggcggatcgggcgctggagaacagcatcaatatcccgccaacggcctacatcctgccgggcacggtcatgaccgtagtggttgcccgcgatatcgacttttccacggtcttcgagaaccgataa

SEQ ID NO: 331786 - DNA, 1035 bp, Pseudomonas aeruginosa
atgagtgctgaagagaaaacggggtatggactcgatgcttcgaccctggcgcgcgatttcttgaacaaggccggcatcagtgagcggctggacaggcctggcgtcagtgaagtggcgatcaaccgtcccggcgagatctggaccgagggtgtagacgggtggcaacgcgaagatgcgccgtggctgacgtttgaactctgcaggcaggtcgcgaacgccttggcggcctacagccaccgccacctgtcggcggagacgcctatccacaccgtcgagctaccgaacggcgagcgctgccagatcgtgatgcctcctgcatgcgagaagggcacgatatcgctcacggtgcgcaagccatccctcgaccgattcagcctgcaggactacatcgacagcggccggttcgaccaggcacagtcggttgctacttcgactgtcgagcttgcggactggcaacggaagttgaaggatctgcacgcggccggggcctggagcgagttctttgccctggcgatacagcaccgactgaacatcatcatcttcggcggccccgggtcgggaaagaccaccctcggcaaggccctggtggacctgttcccccgtgaccggcggttgatcaccatcgaggagatcaacgagatgaagttgccgttccacgccaaccacgtccacctgctgtacggggcgacggtgacggccaaggagctggtggcgagctgtctgcggatgaagcccgaccacctgttcttggccgagctgacgggcgatgaagcctggcacttcatggagatcctcaacaccggcaaccccggcacggtaacaacggcgcacgccaacgacagcgtgtcaggctatgcccgggtcggaggcctggtgaagcagtccgcggttggccagggtctggacatggcttacatcgaacgccaagtgcggatcagcttcgacgtggtggtctacatggaacggacccacattctcgaagtgcactacgagccggaggccaaactggccctgctcaaccaagggagggcctga

SEQ ID NO: 331787 - DNA, 345 bp, Pseudomonas aeruginosa
gtgtggtggaaggtggtgctcctggtcctggtcctgatgctgctgttcttcatcggcgggctgtacgccggcggggcactgttcctctggctgacggatgcgaacccgggggatgtgggaatccagacgttattcgtggcttcgaagatgcccctgtccgatcctcgactgctctatgtgccgtggtcctggtgcgtaacggcagcgctgacgttcctgccagttggggtcacgttgctggccttcatgagccgcttttcaacgaaacagtcgttgcacggcgacgcgcggttcgccaacgaccgcgagcttcgccttttcgagtaccgcggcgagtaccaataa

SEQ ID NO: 331788 - DNA, 636 bp, Pseudomonas aeruginosa
atgctgattcacatcgctcctaggctctttgtgcctaggtccttcccttttgcctgcgaactgatcgacgtgcgggtgaaagagttcggtctactgcttgctggtgggcacgacgtagtggcccgccagccatttcccaacaagcgctactacgttgcctgccggaacaaagggcgtcaggcgaagagtgggttgctgatcgacgtgccgggccaggtgccgtacttcactgtgatcacccgctggaagatcgccggcgagattgttgtgcagcatcgggtggaatacgtcgtgctcgatgaggagttcgatgcggtcacggacgaccccgttctgtggaacgggttgtgcttcgagatgggtgacttcccgaaccgtgtcaccgacgtgctgttgcagcaggcaaaggagcggggcgagccgctagggatgtctttccctcgggcgactttcgatccaccgtcgttcgacgacaggacccgcaggcctgtgtcgccggtcgaaatttgcgagcagttccgcatgccgactatcgaacccggtcggctgctgcctcgggataacgatatccagagtcgtttgccgtcgcgggagttggctttcgtggtgagggcggaggaggtcaactatggctag

SEQ ID NO: 331789 - DNA, 1560 bp, Pseudomonas aeruginosa
atggctagcgcggccggggtgccggagtacagcccgtcccggccgcagcggcgaatcactcagtatcccccgctgttactgggcaagcatccgcgcaaagacgcgttccttgcgacctacgggcagacgttcgtcatgcttgccgctccccccgggagcggcaagggtgtggggatcgtcattccgaacttgctcagctacccggattcggtcgtagtgaacgatccgaagttcgagaactgggatacgactgcgggcttccgcgcagcgatggggcagaaggtgttccgattctcaccggaacgcctggagacccaccgctggaacccgctgtcgggcctacgccgggatccgctgtaccggctaggggacattcgcagcctggccagcgtgctgttcgtgtcggacaacccgaagaaccaagagtggtacaacaaggcggcgaacgtcttcggtgccttgttgctgtacctgatggaaacgccggagctgccgtgcacgctgccgcagctttacgagttggcttcgctggggaccggcctggggcagtgggcgcagcaagtcatcactgatcgagcggacggggaaaacgcgctttcagatgaatgccggcgcgagctgtacagcgtctatgtcgcctcgcagaacaagtcctcgggctggtcgactacgagcgacattgtgcgcgacgtgctggccatatatggcgagaagacggttgcgtgggcgctgtcgggtgatgacattgatttctccaagcccaggcaggagaagaccagcgtctacttctgcgtgacgagtaacgcactgaagaagttcgcgccgctgatgaacctgttcttctcgcaggcgatcaacgagaactcaaaagtgttacccgagcagggcgggcactgtgccgatggctcgctgcgtttgaagcaccagttgctgttcttgatcgatgaaatcgccgtgatggggcgcatggaggtcatggaaacagcgccggcgctgatgcgtggtgcaggtctgcgcttcttgatcatctttcagagtaaggaccagctccgggccgaacgtacatacggccgcgagggtggcgacgggatcatgaaggccttccacgccgagatcgtctatacgccgaacgatatcgacctcgctaccgagtacagcaagcggctgggcaacaccactgttcgagtcgcgaatgattcggtgaactatggcgacaagcgcagcaggggccgcagctacagcgagcaaccccgtgcgctcatgctgccgcaggaagtcaacgagctgccgtatgacgaggaactgatcttcatcggggcgacgaaggtgcacccgtcgctgagcatccgggcccggaaaattttctggtacgaagagccggtgttcaaggaacgggccaacatgcccccgccggcgctgccgacagcagacatggagaaactcaagaacatcaccgttccggttcggatggaggagaagactgccgcggtggtggcaccgcatgacgaacagatcaaggcggaacaacagaaacgcacttccaaaagcgcacagcagtag

SEQ ID NO: 331790 - DNA, 2490 bp, Pseudomonas aeruginosa
atgtgcaggcgcgttaatcgtgcggcggcactctattgccgttcgaaaaaacacttcatcacgggcgtcgccctgatggttaccgcaacaggcgtggctcacgctgcaaacacggtcgactccaggttcacgaacaccgttgtgaccggcgacggcaacagcgtgacgggcaaccgcgatacccatttttcgggggctacctcggcaaatgaccaggtgattgtcggcaaccacaacacactcaacaacactatgtcgtcggagatcatcggcaactacaacaccgtgaccaacagcgacatcgttgttcgcggcgaaagtaacacagtgtcgaacgcatacggccaagtgtccggggactcgaacaagatcgatgcggcgaacgggacaacaactgttattggctccagcaacaacgtcaccgggcagagcaacactgccgttggcaacgggaacacgatgaccggccggggatccgtggcgatcggtgaggcgaccacgacgacggccagcaacagcgtcaccctcggcacagggtcgagcaacaaccgcgacaacaccgtgtctgtcggctctgctggggctgaacggcagattaccaacgtcgccaacggaactacccgcacggatgcatcgaacgtcgggcagatgcaggatggcgacgccgcgaccctggccgcagccaagggctataccgacacgaaggtcgctgctgaggcacagaaacgcgcggatgaggacaaccgggtactcagcacggctaccaaccacacgaaccaggctgtggccaacgaagcgcaaactcgtggtcaagaggacgcgcgcgtgcttggcgaggcgatcgatcatgcgaatcagcaagtggcggccgaggctcaggcccgccacgccggcgatgctgcaaccttggcgagcgcgaacaatcacactgacagcgcgatcaagactgaggcgaaagcccgggaagatgccgatgcggccgaggccaaggcccgggcggacggcgatgcggcgaccctggccagcgcgaaggaccacaccaaccagcgtgtcgacgccgaggcccaggcgcgtgcggatggcgacgcggcgaccctggccagcgcgaaggaccacaccaaccagcgtgtcgacgccgaggcccaggcgcgtgcggatggcgatgccgcgacgttggccagcgcgaaagaccacaccaaccagcgtgtcgacgccgaggcccaggcacgtgcggatggcgatgcggcgacgttggccagcgcgaaagaccacaccaaccagcgtgtcgacgccgaggcccaggcacgtgcagatggcgatgccgcgacgttggccagcgcgaaagaccacaccaaccagcgtgtcgacgccgaggcccaggcacgtgcggatggcgatgccgcgacgttggccagcgcgaaagaccacaccaaccagcgtgtcgacgccgaggcccaggcacgtgcggatggcgacgcggcgaccctggccagcgcgaaggaccacaccaaccagcgtgtcgacgccgaggcccaggcgcgtgcggatggcgatgcggcgaccctggccagcgcgaaagaccacaccaaccagcgtgtcgacgccgaggcccaggcgcgtgcggatggcgacgcggcgaccctggccagcgcgaaagaccacaccaaccagcgtgtcgacgccgaggcccaggcacgtgcggatggcgatgcggcgaccctggccagcgcgaaagaccacaccaaccggcgtgtcgacgccgaggcccaggcgcgtacggatggcgatgcggcgacgttggccagcgccaagaaccatacggaggattactcggttgcgcgaggagtagaggccggggacggctcggtcgctgtaggcaaaggatctaacgcgaccgctgcaggatccgttgcgcttggtgcggggtcggttgccgatcgggccaacaccgtgtctgtcggcgccgccggcggcgaacggcagatcaccaatgttcgtgccggcacggccggcaccgatgccgtgaatctctcgcagatgcaggccgccgacttgcagatgctgaatagcgcgaaccactacaccgacagccgggaggtggcggtccggcaggacatgtacgccggcgacgtgaacacgctgaacagcgcgaatcattacaccgaccagcgcatcgatgccctcgacagctcgttcaacgacgctctcgccggcgcctacagctatgtccgcaaagagaaccagcagatgcggcaggagtaccgtgcgattggcgcgctggctatggccacggcggcaatcggcattggccccaaggatctcggccgctcgcagttcgggttcggcatggggacggtgcagagcgcgtcagcgatggccatcggattgaaccactacgtgaacgactcgaccgtggtcacgttccgcggcgctatcggtaccagcaaagcggtgtcgggcgcgtcgttcggcgtcgtgaaaggatggtga

SEQ ID NO: 331791 - DNA, 333 bp, Pseudomonas aeruginosa
atgaaaaagttactggtaacgctggccctcgcaggagcagtgggactctcctcgggagcccaggcgatgagcgcctgcgaagtggcgttgtgcatgtacggcaagacgaccggcaacagtgggggcagtgagtgtcgggcggcggagaagaagttcttcagcatccaggtcaggaagaagggcaagttcaaaccgaacccgacgttcgagaagcgcaagcagtacctgaacggttgttccgaggctgaccccgatgcagctgctcgtgcactcggcgctgacccggctgcgaagtcgaagatcctcaacaagtacggccgcgtccccggctga

SEQ ID NO: 331792 - DNA, 1806 bp, Pseudomonas aeruginosa
atgttgttaagggaggtggcggcggtcaggggtggtccgagggtggaggctgcgcgtgccctggccagtgctgcttgtgaagagccggcggtgcgtcggcgcgcgcgtgaagcatttggacgtgccgacttggcgaaggtttaccgccaggcgaaggacctcatcatcacgcacaagctgttccgcctggtgcggtatgcggagctggagggcgttcggcaactgacgatcagcaatctatggcgcatcgagcgctttgccgacggggcgatccggatcctggaacacgacctggttcatgacgcgtgggtagaggtggaggatttggcgggctggccggaagtgccgttctttccggtgcgagagacccgaacgctcgattggtggcgggagattgcgcgcaaggcgatttggaaggcgctgaacgcagcggggtatgccgagttgccgcagcatcgccgcctggtgacgagatgggtggaggtcaaaggttcgccgtttccagtgccggcccccggacagcaggaaatgtcagccgcgcacatggcctaccgaatgattgagcgctacatcggcaaacaggtgaaagtgaaagggaagacaggcgtgtaccggtggaaggatgggctgttggaatcgaaatcgatgcaggccggtgcccgggcgttgcgcgcgggcttcttcgaacacatcctcgatggcgaggtgttgtcggcgatgcgggtcatcgactatcggaactgctctttcacccgttacctgagctatgcgcggtggcgggaggggttgctcaaggtcgctcgggaacaccgaaacctgctgccactgctacgtcgcatcaatccggagcagtgggcgcgaaacaacttgttctcgcgcaagctgtgggtgcgagggggacgccggtttacggcgctagaccggcggcctatcggcgttgcctggggctctggtattgagggagccgactactggcgggtgtgcagcttcgatgacggcgccgcgtggcgctggttgagtcgggccagcagcctggtggtgaaggaatggcgaggaggacgagcgatcgttacccacttggcgctggccaaggtcagtgtccgggtaccggtgtgcgcgtatgtccacgtgcttcgagcggcagaacgccatcaggaaagcatcgagcgttatgccggcagctatccggggcagttgcaacagctcttgcgggtctatctgatccactgcgcgacgctctggaaggagcaaggccacggttacgtgcggggctggttgcgcagcgaggccggcaatgtgtcgaacatgctcgattacctgatgaatgaagggttcgatcgtgggcagccagagcgcaatgcgacctggccggcgttgttgcggcgttccgaggactggcacaaacgcatcgctattgagcacctggagcgcgaaaagggcttgcagtggtcgtcgttgcttggcgagacggtcatcgaggggatcgtgttcaccccgttgaacaacagccgggccttggcggaggagggttacgagatgagccactgtgttggctcgtatgacgggcattgcgccaagggggcgtaccaggtgtacgcggtacgggagccggacggcaggcgttccacgctcgggttcagggtcatcaaggggcacacccggtgggatcagcatgagggtgggcggcatggacgcgtatcgaccgccgccttgcgggctggcaagcaattggtgcgcgcctacgccgaggcgctggccgagagaagcgaagcgagccaggcggcacaagcggtagcggaaatctga

SEQ ID NO: 331793 - DNA, 243 bp, Pseudomonas aeruginosa
atgaaggtaaaagatctgatcgatcaactctcgaagctggacccagagctgctcttggtaggctattcggaggatgaagacgtgcgcgaggtcggccagctcgttcggcttttcgatatacgggccgtcaccgccgaacagtgcaaccgcagtcgtgatgagagcgggaaagcgaggatcgagcttaccgggagcggcgcaggccacccggttgccctgctggaactgacgacagacatttga

SEQ ID NO: 331794 - DNA, 5679 bp, Pseudomonas aeruginosa
gtgatcgagagcggcaaggacttcagcctgcgtgccagcctgatcgagaaccgtcgcgccgtgctggaaagcaagtcgggcctgtacaccgcgaagatggagcagaccgcctgcatcgaaggcgtcaacgcgggcgactgcagcggcaagcgcaacgccatctggaccatcacccagcgcgacaagaccgaggtcaccgccagcagcgccatggggcaactgctggccggaggcgacttcgccatcgacggcggcaccctgaacaacctttccagtctgatcggcagcggcggcaacctcaccgccaacctcgaagtcctcgacaaccagggcctggaaaccggcgagctggaaaccatccgcgtgctgcgtaccgctcgcggcggcgatatcggcggcatcgaccagaagtcgcgcaacttcaccaacctctactggtaccagagcgccaatttcgacccggcgcgcgcgggcgagatccccgccgcgctcaacgcgatcctcagcgactggtccttcgagtacgaattcccgagcaaggggccgaccccgatcagcagtggcgaccagtcctacgcagcggtgatccaggccgccggcgacgtcacggtcaatgccagcacgcgcatcgacaacggcgtcacccgccccggctacaccttcgtcggcagcggccgccaggtgggcgacagcgcggtgggcggcagcggggtttcggtggtcgtgccgctgacctcgcaactgccgcccgacctggcgcggcgccaggtcaacccggttaccctgcccggcttcagcctgccccagggtgacaacggcctgttccgtctcagctcgcgcttcgccgaggacggcaatggcagcgccgcgctcggtgccggcgccgaccgcacccagggcggtagcggcgtctcggtcggccagcaaggcgccggcaacgccgccggtacctggcagggccagggcgtgcgagtcgacggcctggctggcgcggccaacgtccagggtcagggcggcagcacgctcggcggtagcctgccgggcgtcgcccgggtccagggcgtgcccggcaacgccacgccgagcgccagccacaagtacctgatcgagaccaacccggcgctcaccgaactgaagcagttcctcaactcggactacctgctcagcggcctgggcatgaacccggacgatagcaagaagcgtctcggcgacggtctctacgagcagcggctgatccgcgacgcggtggtggcgcgcaccggccagcgctacatcgacgggctgagcagcgacgaggcgctgttccgctacctgatggacaacgccatcgcttacaaggaccaactgcacctgcaactgggtgtgggcctgagcgcggagcagatggcggcgctgacccacgacatcgtctggctggaagaggtcgaggtgaacggcgagaaggtcctcgcgccggtggtctacctggcccaggcggagggtcggctggcacccaacggtgcgctgatccagggccgcgacgtgaagctggtgagcggcggcgacctgcataacgtcggcaccctgcgcgcgcggaacgacctctcggcgacggccgacaacctcgacaacagcggcctgatcgaggccggcaagcgcctcgacctgctcgccggcgactcgatccgcaaccgccagggcggggtcatcgccgggcgtgacgtgagcctcaccgcgctgaccggcgacgtgatcaacgaacgcagcgtgacccgctacgacagcgcgctcgacggccgcacctgggaacgcagcttcgccgacagcgccgcgcgggtggaggcggcgaacagcctgaacgtccaggccggacgcgacatcgccaacctcggcggggtgctgcagagccgcggcgacctcagcctcgacgccggacgcgacgtcaccgtcgccgccgtcgaggaccgccagggccagacccgctggagcacgtcgcggctccagagcgtgacccagctcggcgccgaagtcagcgccgggcgggacctgaacgtcagcgccggccgcgacttgacggcggtggccagcaccctcgaagcgcgccgcgacatcgccctctccgccgggcgcgacgtgaccctggcggcggcggcgaacgaggagcacagcttcgccaccggcaagaaggtgacggcgaagaacgatcgggtggaacaccaatcgaccgtggtcagcgccggcggcgatctcagcgtgcaaggcggcaatgacgtgaccttcgttgccagtcaggcgaaggccagcaacgaggcctatctgtacgccggcaacgacctcaatctgctggcggctcacgacgaaagctattcctactactcgaagaagaaaaaaggctcgttcgggcgcagcagtagccggatgagcgagagcgaagccagtaccgtggtgtcgtcgtcgatccaggcgggacaaggggcggaactggtcgccaagcgtgacgtcaacgtcgaggcctcttccgcctccagcacgaagggcgagctggcggtcgtggcggggcgcgatgtgaacctcacggcagctgagaacagctactccagcgtgtccgcgaaatccaagtccggaggcttggggctgtcatccaccagcaaggccaacgcccagtcctcttcctacaccagcgttcagggcgccacgttgagtggcgataccaccgtggtgcaggcgggaagggacatctcggtggccgccagcaatgtggtttctaccgggaagactgcgctgcgtgccggcaacgacatcatcatcgacagcgtggcggagacgtcggagtcgcatcgcagcgagtcgaagaagaagtccggcctgatgagttccggagggatcggcatcacgctcggcacggcgaagaatgcctcgacacaggacacccgtaccgtcgtcaaccagggcagcaccatcggcagtgtgctcggcgatgtcgacatgcgggcgggcaagaacctgtctatcacggcttcggatgtggtggccggcaaggacatcaacctcgtcgggcagaacgtgagcattctcgctgccgacaaccagaacgtcagcgagcagacccgcaagaccagcaagagcggcttgacgctggccttgtcgggaacggtcggtagcgcaatcgacgccacctaccagaatgccaagcaggccaggaacgaagacgacagtcgcctttccgcgttgcaggggatcaaggccggcttgagcggcgtccaggcctggcaggcagctcagcagagcggcggcatgacgggcgagaacagcgcgcagttcgtcggcatcagcgcttcgctgggctcgcagaagtccagctctcggcagcgccaggagcagcagatcagccagggaagcacgctcaccgccggtggcaacctgaacattatcgccacgggttccggggctgtcggcgaagacggcgacttgcgcgtgcaaggcagcaagctgcaggctggcaaggacctccaactgatcgccaaccgcgacgtcgtgctggaagccgcggccaatacgcagaagctcgatggcaagaacaagagcagcggcggcgctgtcggggtaagcgtcggcgttggttcgggcgaggctggcatcagcattttcgccaacgccaacaagggcgccggcaaggaaatcggcaacggcaccacctggaccgaaaccaccctggacgcgggccagaaggccagcttggtcagcgggcgcgacaccacgctgaaaggggtgcaggtcaatggtgaaagcatcctggcgaaagtgggtcgtgaccttaccctgcaaagcctgcaggatcgcgattactacgattccaagcagaagaacgtcggtggtggggcgagtttggctatcgttggccagggtggcggcgccaacttgagtctcagccagagcaagctgcattcgaagtacgacagcgtgcaggagcagaccgggctgttcgccggcaagggcggcttccaggtggaggtgggcaagcacacgcagctggatggcagcgtgatcgccagcaccgccgaagccgagaagaatcgcctgagcacaggctccttgggctggagcgagatccgtaacaaggccgagtacaagagccaacttcagagtgtcagtgtcagcagcgccaacgatggcgccggtgcgttcgtcagcaacatgcctagcggcatgctcattgcctacaaccacggcgatagtgccagcggtaccacgggttcggcgatatccgaaggcaccctggaggttcgcgatccggcgcgccagcaacaggatgtggcgacgctcagccgtgacccgagccgcgccaacgatagcgtcagtccgatcttcgacaaggagaaagagcagaagcgtctgcagcaggtccaactgatcggcgagatcggcacccaggccatggatatcctgcggacgcagggccaactcgacgccgacaaggcggcgcgggccgaactggaagcgcggggtatctccgcgccggacgccggcgccagcgagcggcaagtcgaggactaccgcaaagcgcttctgggcacgaatgcctaccaggacatcatgggcaagtacggcaccggaggcgactaccagaaggccgcccaggcggtgaccgcagccttgcaagggctggccggcggcgacattggctcggcgttggcgggagcttcctcgccctatgtggcgggcgtgatcaagcaggtggcaggcgacaatgacacggcgcggatcatggcccacgcggttcttggcgcggtggttgcgcaggcccagggcaattcggctgctgcggggggcgcaggagcggcggggagcgaactggcggcgcaggtgatcagcgagcgactgtacggaacccgggacagctcgacgctgaacgaagcgcagaagcagactatcaccgcgctggccagcctggccggcggattggccggctccgttgtcgatgggagcagcggaggagccattgccggggccgcaggcgggaagaacgcaacggaaaacaacttccttggcggcggaaccccgccgggcttgatcagctatggtcaggcagcgagctccttgaccgagtacatgcgcaagaacggggcgacagccgaggagatcacccaggcgcaacgtgatctggcccagggacagggcttcgatggcgtacagccagcgaatgagttcatcaaggcctggggcgaggccatggttgcggaggctgccggccttgggattgttgcggggttgggtaggtttgggttgtgggttgggaaaggggcgggagaaactgccatagccgttcccggtcgtgtccaatctcgtataaatattgccaatggccgcacagcaactacaccgcttcgcgataccggaaggccagtatctgcggggtttgaccatgttctacaagggcatttcggagtagaggtttccaactcacggtctgtgttcactatcactccgagtgaactgaaggatgtacttcagagcagccctgttgttaagtcaccagttatggcattgcctgatgggcaattcgtgaggaccgttgatgtaggtaaagtaattggcactaccaatttaaaggatggaggagtgcccacctcggtattaaaaatatttactgacagagctggtaatttgatcacaaccttcccaatcaaggcggtggattaa

SEQ ID NO: 331795 - DNA, 279 bp, Pseudomonas aeruginosa
atgcctaggcaagggcgagtggttttaccgaattatccgcttcacgtggtccagcggggacacaatcggcaagtggtattcgccgaggacgaggactaccaacgctacctctccgatcctcaagacctcgaggatgccttcgataacaagctccatgcattttgccgaatggccacccatatccatctgctcctggcggcttgccggccctcctttctactgccccgtcccacagcgccccaatgtactagtacaccggaaaccgccgtctcccgttga

SEQ ID NO: 331796 - DNA, 1254 bp, Pseudomonas aeruginosa
atgacgctttccctggatctgttgttgagcctgtgcacggccctggccatcggccttctgatcggcgccgagcgcggctggcaggagcgcgaccacgaagatgcgcggcagatcgccggaatccgcaccttcagcctggccggcctgctcggcggcttcgccaccctgctcgcgggcgaactgggcagcgcggtctgggtagccttgctgctggccctcgcggcgctggccgtggccggctacgtgagcgatgtcaggcgtggcggcgaccagggcatgaccaccgagatcgccctgctgatgaccttcctcctcggcagcctcgccctcaccgaacagcgcctgctggctgccgccggcggcatcgtgctgaccctgctgctgagcctcaaggacaagctccacgccctgctgaagcgcctgaccgccgaggagctgtcgggcaccctcaagctgctgttcatctccgtggtcctgctgccggtgctgcccaaccagggctacggtccctgggcgttcttcaatccctacctgacctggtggatggtggtgctgatcgccgccctcggtttctccgcctacctggccatccgcctgatcggctcgcgcaagggcctgttgctgaccgcggtgctcggcggcctggtgtcctccacggtgatgaccctgaccctggcgcgcctgcgcgagcgcatgcccgacgccctgttggcgtgcgccctgctggcgacctcggcgctgatgttcccgcgcatcctcgtcgagatcggcgcgatccacccggccttgctgaaggagctggccctgccattcgccgccaccaccctcgtctaccttggcggcacgctgttccacgccctgcgcggcggccgcgccagccaggaggcgcccgacgagccaggcctgcgcaaccccttcgaactgctcccggccctgcgtttcgccgccctgctgagcgcgatcctgctgttggtggaggtcggccggcggctgttcggcgatgccggcatctacgcggtcgcgttgctctccggcctcgccgacgtcgacgcgatcaccctgtccctggcccgcgcggcgcagggcgaactcgatccaggcgtggccagccgcggcatcgcccttgccgccctgagcaacagcctggtcaaggccggcctggtcgtgctggtgggcggcaagcggctggccctgcaaacgctacccttcagcctggcggggctgctggtaggagcgctgctgatcctgctgtga

SEQ ID NO: 331797 - DNA, 435 bp, Pseudomonas aeruginosa; identical to SEQ ID NO: 325092

SEQ ID NO: 331798 - DNA, 351 bp, Pseudomonas aeruginosa
atgtctgaaccaaaaaccgggcgcggcgcgctcttcactggagggcttgccgccatcctcgcctcggcttgctgcctcgggccgttggttctgatcgccttggggttcagcggcgcttggatcggcaacttggcggtgttggaaccctatcgccccatctttatcggcgtggcgctggtggcgttgttcttcgcctggcggcgcatctaccggcaggcagcggcctgcaaaccgggtgaggtctgcgcgattccccaagtgcgagctacttacaagctcattttctggatcgtggccgcgctggttctggtcgcgctcggatttccctacgtcatgccatttttctactga

SEQ ID NO: 331799 - DNA, 276 bp, Pseudomonas aeruginosa; identical to SEQ ID NO: 325094

SEQ ID NO: 331800 - DNA, 366 bp, Pseudomonas aeruginosa; identical to SEQ ID NO: 96026

SEQ ID NO: 331801 - DNA, 423 bp, Pseudomonas aeruginosa
atgacatcagacactccaccgattgccgcgcaaggcgtggccaccctgcccgacgaggcatgggcgcaagcccggcaccggacggaaatcatcgggccactggcagcgcttgaggtggtcgggcatgaagccgccgatgaggcagcccaagcgctgggcctgtcccggcgacaggtatatgtcctgatccgtcgcgcccggcagggtactggcctggtaacagacctgacgcccggccgatccggcggcggcaaaggcaaggggcgcttgccggaaccggtcgagcgcatcatccgcgagctgctgcaaaagcgcttcctgaccaagcagaaacgcagcctggcggcgttccaccgcgaagtcgcgcaggcgtgcaaaaggggtttggggagcagtggaaccaaaaaccaacgtaaggcttag

SEQ ID NO: 331802 - DNA, 1635 bp, Pseudomonas aeruginosa
gtgttgtcggtggggcgggtgcagacgccgatccttggcctgatcgtgagtcgatatctcgcacacacggctcacaagggctctttctactacaacgtatcggcagcgctggactttaagggtcggatccgggggcgtctgctggtcgcggatgacgctccgactgacgaaaaggggcggatcctcgaagagagttatgccaacggcatcgcgagcgcgtgtcgcggccagccgggcctagtcgtgtcggtcatccaggaagagaaatcgcaggtcgcaccgttgccattttcgctgctggacctgcaggcgcagatgagccgtgaacatgggatcaatgcggaaaagaccttggcgatcacccaggcgctgcgcgagaagcacaaggcgatcacgtacaaccgctcggactgcaactacttgtccaccgagcagcatgccgaggcgccgggaacgctggcggcgctatcgcaagcactaccggagctgcggacgaccttcgagcagcttgacccaggacgtaagggacgggctttcaacgattcgaaagtgtcggcgcataccgcgatcatcccgaccgcggtagtggtggacatgaatgcactgagcgccgacgagcaagcggtctacctggcgatcgtcaggcagtacctggtgcagttcatgagcgagaagcggtatttggccgtgaaggcgctgtttgaggtgcagggtcatgtgtttgaggcgagcgcgaccaagaccacggcgccgggctggacccagttgctgcgcgaggtagccgatgaggcgagccaggccggcgaagaggatgagggcgaggtggaagctacgcagttcgaggagctgtcggctctcgctggaggggagcaaggccattgcctggatgcatcggtttccagggcgaagaccaagccgttaccgctgtataccgaggcgaccttgctgaaagaccttaagcaggtggccaagtacgtgcaggaccagcgcatcaaggcgctgttgctggaccgcgacgatggcaaggctggagagcgtggcggcatcggcaccccggccacccgggcggcgatgttgggcaagctgcaggagcgcggtttctacacgatcgagaagaagaagctggttccgacggccctcggagtggccttcatccaggcgctaccgcggatcgcaacgaccccagacatgacggcgctgtggcatgagcagcaggtgatgatcgagcgtggcgagctgtccgtcgatgccttcctggacgagctggaggccttcatcggtgagcaggtcagcacgatcgatctcggcgacatgcccattgccggacgtgctggggtcgagccgctggcggcgcgctgccccatgtgcggtggcgagctggccagaacggcaaaggtggtggggtgcaaggggtgcgagtttcgcgtgtacccgagcatcgccggcaaagagctgaccaccagtcacctcgaaagcctgctcagcaagggcaagaccagtttgatcaagggattcaagagcaaagagggcaaggccttcgacgccgccctgctcctcaatggccaaggaaaggttgtgttcgatttcccgaagaccagcaagaccagcaagaccagcgggaagcgttacgcgtaa

SEQ ID NO: 331803 - DNA, 498 bp, Pseudomonas aeruginosa
atggcacgtggagttaacaaagtgatcctggttggcaacgtcggtggtgacccggaaacccgctacatgcccaacggcaatgcggtgaccaacatcaccctcgccaccagcgagagctggaaggacaagcagaccggccagcaacaggagcgcaccgaatggcaccgcgtggtgttcttcggccgcctggcggagatcgccggcgagtacctgcgcaagggttcccaggtctacgtcgaaggcagcctgcgcacccgcaagtggcagggccaggacggtcaggatcgctacaccaccgagatcgtggtcgacatcaacggcaacatgcagttgctcggcggccgcccctccggcgacgattcgcagcgcgccccgcgcgagcccatgcagcgcccgcagcaggccccgcagcagcagtcgcgtccggccccgcagcagcaaccggcgccgcaaccggcccaggactacgacagcttcgacgacgacattccgttctag

SEQ ID NO: 331804 - DNA, 756 bp, Pseudomonas aeruginosa
atgaaaaatacttctcatcttgttcttcaaggtaaaggcggcgtcggtaagtcctttagcgctagcgctttggcgcagtactttatcgagcgcggatataccgtggcatgtgctgatactgatccggtaaacagttcgttctaccaattcgcggcgcttaatgtcagcttgctaaaaatcatggaaggcggtgtgatttctcaaaagctctttgatccgctgtttgaagagcttttgtccacggaagatgtttgcatcgttgataacggtgcatctactttcattccgatgctcaagttcatcagtgacaactgtatgttgtcggcgcttcagggcgcaggtaagcagctatatatccacactgttattacggctggccaagcgaaggatgatactttcaatggcctggaacgtctcattgaaatgatacgcgccgagcaaagtaacactaaagtggtggtctggcagaatgagttttggggggttcccgtttttgatgggaagccacttgataagacagagctgatcttgggcaattcagacataatccaaggaatatgtcctgtcattgacaggaacagcgacgccttcacggcagacattcgtaatgttctagaggcacatttgacgttacaggaggttaagcagtccgaggacttcggagttattgcgaagagccgaatttgccgagtgtataacgatattttcaccgagttggacaaggtgttcggcggggaggtgatcgatgatgaatga

SEQ ID NO: 331805 - DNA, 492 bp, Pseudomonas aeruginosa
atgatgaatgaacgccagacggatgtgctggacgaggttcgcaagcgggccctagctgaactgaatataaaggtgtcccgagaggacccagtattcagcgtagtgtttgctactgaagcagtgcttgaacggatgacggagccgctggtgctcgcggtgaagcagatacctggtgaaatgggtatcagcattgagaaaatcgcgagcgccgtcgaagatgccgagcagactgttgagcgattggttgaggaggggaaaaccgcccttgctgaagtgagagataccgaggccaagaaactggtgaaagtggttcgggaaagcctggaggggagcaaaggcgtcagccataccaagttctctatcgtgatggccctgtgtttcttcttcgcttcaaccacatttggggttggtgggtactcatacttcgcggtgaaagatgcgatgaaggacgccaactactggtacacccaatataaggcatccaggaagtga

SEQ ID NO: 331806 - DNA, 357 bp, Pseudomonas aeruginosa
atgtcggacaagaaggcggcccgtagccaggtcgtggcttttcgcgtaccggacgaaaagttcgccccttatgaacagaagctcaaggaactgggcatcagcaagtccgagttctttaggaagctgctcttagagaggctggatcaagtcactatcgttgctccatccaaggataatgccaagttgctctttctgtataacaaggcgagcaataaccttaaccaattagcacatcgggttcacctggcctataagtctgaagttgtctccgaaagattatacctcaaactcatgaattcccttgcggcaattcatgccctacttttatcgggggtggacgatgctgattcgggttag

SEQ ID NO: 331807 - DNA, 360 bp, Pseudomonas aeruginosa
atggcttacatacttccgaacgagcgggaagtcatcagcgaagtcctgttgaagctggaagagaaagcacttccagatctgccgctggcctgcaagacctgtccggccgcgatgtggcagatcacagggagggatacggagaaggtgaccgctcgctgctactgccgcgcgatgcatacgttcacctgggacagcaagaaccgggaggagatcctggactgcgacatgctgtacgccacggaagagcaggaggaaggactggaggaagaggaggatcgcagcgacgatctgcccccgttccttcgcgggctaagggaacagccccagggcgagatcgaacgcctgcaggacgaggactga

SEQ ID NO: 331808 - DNA, 2022 bp, Pseudomonas aeruginosa
gtggcggggtatttcctacgccgccacgaagagaaccagatcggacctgcgcagcgccgggcgctgtggcgggtcgaccagcagtttcatgaaacccgccgcgccctttttgccgacgaacgtttcagccgccaggagaaacagcagctcctggcggtgttggcgttcgagcgtatgaaggcgcgtcagcggatcgaggagccgttggctcaaccaccagaagaggaccgcagtatgggtagtaaagagatacgcgcgttgctgagcgcgaacgacgacgcgccggagaactccatcagcggggggcgtagttcagccccggcaagggagcgcatgcagcgcctgatggagcggatgaagcaagatgtgagcaccgagaaacagcgcgagcgagcgagggagcttagcgctgccgacctctacaccaagcgggcgaggttcagccagaacgtgcattacctcgacaagcagtccgacaaaacgttgttcgtcgacaccggcaaggcgatcacgttgaggcgcgaagcgatgagcgaatccgcggtgaaagtcgccctggagctggccaaggaacgcttcggcagcaccttgacgatcaagggtagcgaagagttcaagcgcctggtcgtcgagacggttgcgaagaacgggttggacgtgcacttcaccgacaagggtatgaaccagctactgtctgagcgccgggctgagatcgaggccgaacgtgagggggcgactatcaccgctgcggacttggaacagccggagcagacttcagcctcggccgaagctgaagtggacgatcccagcgtgatcaagggtgtactgctggaccatggggacgccccctacaagcacgatccgaagcagaacatgagctactacgtgcggctgatgacggcggccggcgagaagatgtactggggcgtcggcttgaaggacgcgatggaggctcaagacttcaggctgggccaggcgattcgcctgaaggacatgggcactgtcccggtgttggtgcgtacccgggacgagcgcacggggctggagctggagcgcgaggtgcagcggcgaggttgggcggcggagccggtggcgcgttcggcaccagaggtggccgcagaggcgggccaggtcgagcgggagcccgggcaggtggtcacgctggaagccgcacatgccgcggatgcggaggaaggctctgcgatcctggcgcgcgaggcgcgctgggagcgaaacagtgggctatcgatggccgaggtgggcacggcgccggcgatgctgggcatgcgcgcagaggagcatgcggtgcaggtgctctttggcgaggacggaagcgaggccggccgcgagcgggtggcatccttgatggagcatgaggcttaccgggcaaccttccagcaggtggtacgcgatcgcagcgagcggctgaaccctatgttgcgcgaagagctgctggtctcgcctggctacgcacttgcccggtcgctcatcgagcaggcggagcagcgctacggcgcagtcccggactctgtgcaggaagcacagaaggcccagctggaggaccaagagcggcagcgacaggaaaccgactggatcgacgtggatgcagcgatcgcagtgatcgaggcccaggaccgagcgttcgaagcacagatggccagcgaagcgccctcccctgtgcctgttacccgtgacgagcgtgacgaagagcgacaatcagcgctcacgccgaaggagcgggcagcagagcagcaggcgagcccggaggccctaccggacctgcaggcgaagcacgataagaacatcgccaggcgcgagaacgaacgcgagttcaagcagtggtccaaggagcagttggccgctgacccagaacgtttcgagcagttgtcttcgaaggagaaacgggcggagttcagggagtggaaggcggcagaggccgagcgcgatcaggatctgtccgcaagtgcacctgccgaggtcgaggtgctggagatcgaggagactggccccgaacctgactga

SEQ ID NO: 331809 - DNA, 651 bp, Pseudomonas aeruginosa
atgatactactactcggtggtgagaaaggcggtagcgggaagagctgcttggcgcagaacctggctgtatggatccaggcccgcggcggcgatgtgctgttgcttgacgccgacccgcagggcactacggcggactgggccgaggagcgctctgagcaaagcgacctgaaggctataccggttgttcaagcgcaaggtcagattcggtctacgctgaccgacctgcagaagcgctatcggcagattgttgtagatgccggcggtgccgattctgaagcgctgcggtccgcgatgacagtggcgacacacatgctcatccctttcaggccgaagcggcgtgacctgaagaccttgccgaaggtcgagaatctcgcgaggctggccacggctgtaaaccctggtttggtagtgcgagcggtcattacacagtgccctgcccttcccagccaagtccagcgaatcctagatgcaaaagaggcctgcgcgtcctttggcattcaaccgctggaggctatcaccactgctcggaatatctacgatgacgccgacgaaaacggccgctcggttctcgaatcgggatctgacatgaaggccgtcgaagagatagaggctgtggccaccgaactgtgggggaacttcaaatgggactga

SEQ ID NO: 331810 - DNA, 363 bp, Pseudomonas aeruginosa
atgggactgaaggacctgcgcaagcaatcagctccaattccgcctgatggcgaggacaaggaggcgcagatccaggcgttcatcgctggagcaccggtcacaacagctaagagcgtgaagaggaagcgcaaaccaaaggcaacttacaagcgtctgaccttctcgctgtcggagagtgttgaaaaagacattctgaagctgtcgcgggtcccgagaacatttgcgatcaacaagtctcaggtcgtgcgggctggagttctcgccctgatggaaatggatagagcggttctcctcgctgtgctcgaaagagccgttaaaggagagtcggccgagctttccgaaacgatggtcgatgaggagtag

SEQ ID NO: 331811 - DNA, 924 bp, Pseudomonas aeruginosa
atggacggcgccacggccccgtgcaagcacgggaaagtgccggccatcggctcccctgctgcttcaatggggagaacggaatcagtggcacgaccttatgttcagcgaacaaatcatggtggcaacttctgtggccatcaaccagacgcaccgaggctggacctcatccgcccaaccaccgacaaaaacaggcctggaatcctgcggcagctccaggaacgagttcgccgctactacagttcccctaccgtcatccggtctcttcgcaatgccaaccgtagccgcaaaggtcgacagcaacgcagcgagcgccgggaggcctgcttgttgctcctcaactcgatccttgaacatacggatctcgtatcgctgcgttgcggcgttcctacgtccagcggcttcttgtcgttgacgcttgactacctcacgcgctggaccggattgcatccccgccgagctgagcgcgctatggctgatctgaaacgtgcgaatctgctcacagtcaatcagcctcgacagctgaacgaagatggctcctggcgtgggcttgctgctgtgaaggctgttaacaagcacctgttcaccgcgttcggcctcggccgccgtttaagctatgagcgcgatcgagcatcgaagcgactcgcgaggaaagtcgccgtccgtggggggacactcactggctgggcgcgtaacgtcgcactgctggtcggcggattgggcaagaagccaggccgtgcattccgttccccggctgcagatgggcctcgggtgtcgcatggaatggaccctgcgacctacgcatctgcacggaatcaactgctcctcgacctgatgactaggcacccgggcatgcctagggatgatctgtacgcagaagctgagcggatcctccaagaacgattagccaagtccattcgcgcctag

SEQ ID NO: 331812 - DNA, 1056 bp, Pseudomonas aeruginosa
atgtccaagtgcgagcagttcagcctattccccgaaaactttgccctaagtgatgacggattcagcgggatctgcgacgagttcacagacgctggtgatattgaccaccgcttgttcgctgcaccgcgctcgaatgagattgtgcgtctggccgacaaagtacggcgatacacccgctcacacggctggatggctatgggcgaagcccgcagccgtgtcgattcctggcgcagccatgcgctcgcgcagcactgcacccgggcaaacgaggggcgcatcgtgctatcgctgttcgaccataccggccaatggtccaggccatgggaagaggcgggctaccaggtcgtgcgcttcgatatccaggacaaccccgaaacgggcgacgtgaacgcattcggcgtgaatttcttctcggattggttcggtgacttcgatggcctggatatctacgcggtccttgctgcctgtccatgtacggagttcgctatcagtggcgcgaagcatttcgccgccaaagatgcggacggccgcaccgtcgccgccgtggaacttgtccaccagaccctgcgtaccatcgagtattaccgtccttcggtatgggccatcgaaaacccggtcggccgcatcgagaaactggctgggctgccaccttggcgcctggccttcgacccgcatcacttgggggatccatacacgaagaaaacgctgctttgggggcgcttcaatgcggatttgccgatagctccagtagcggcgattgaaggctcgaaaatgcaccgtaagtacggtgggcgaagtgtggcgacgaagaatgctcgtagtgagacgcccgaagggttttcttacggattctttatggccaacaacgccatcgacaaccccgtgttggccgttgcaaatcggtacgaccggttggacccccagctactgcgtgtcgcgcttgatgctggcatttgtgagaaagggattgatgcccttatagctgacgcctatttctttgaactcgacgacgttgctgccgaacgagcactacggcaggccataaactgccaataa

SEQ ID NO: 331813 - DNA, 1056 bp, Pseudomonas aeruginosa
atgcaagacccgaaagaccccggaaccctggacctgatcgaggcctgtaagcggccgctgactgcggccgagcgacagaagcggcaccgcgagaaactgaagcgagaacggcaggcagggaaacgcgcggtgctggacctggggcagccagagcttgcccttttgaccgtggcgctgcgcgagttcggtgagcgttggtcacgggtgccaagcaagactgaaggggcggcggccctgctgtcgcgtctacctgtcgtttccattgccgaggcgtttcctggcgactcggcatggatccccgatgcccttcagcagggggacgaccgtgcgctctggcccgcatgcacgtcggcgcagagagatattggaggtttcaatggcccttacgcctaccgtcaaaccccgtatggacagcccgaggtcgatgagctggtgaagcctggcgaccaggtttggacaagctacgacagtgggccgtacaaggttctggaagtgaagcgctatacggtggaggggatgcgggtatacaccctgattatgacggcgttgaacaagcgtaagccgtcagcgtggatcaatgaacttgtcgccgtggatgggcgcctgctgaagctgttcgccaacaacatggatgaagtcttcgtcgtcggtgccggggcgctggcatccgcggcgcctctgcctgagccggtgcggcagatggaggaagagcgggccgaggcaaatgcctggtaccagacagggcggcgccttgagggcgaagtggcacatttgcgcgaacagcgtgacgcctggatcgccgagaatgaaaagctgctgggaacgatccgcgagcttcaggcggaagtgaagcggctgaacgatggcgcacttcatgcgggccaggttgcggcccgactgaaggggctacaggatgaaaacggacgggtgatcgccgagcgtgctggagctttccgtgcggtcgaagtattgcaagcccggttgaagcgtcacgggatcgatgccgacttccgcgaaaccgaggatgaccggcgcgctctgctgggatcgacgtag

SEQ ID NO: 331814 - DNA, 249 bp, Pseudomonas aeruginosa
atgcccccctctctaccaccgttcaagccgatcacgcttgctgagctgcggcggatatgggaagcctaccctgaccccgacgtgcgccggctaactctcgaagtcgccagataccgccgcgtcatcgcagagatagatggcctgtatagcagtatccaccagtcatggcgcgagaccgtgggcggcgaactttgcgcccttcacctactgaagggagtgatggcaaccgaacgtcagcgcttgctatag

SEQ ID NO: 331815 - DNA, 414 bp, Pseudomonas aeruginosa
atgaagagactcacgctcgatgatgtgatttgccctgtctgttgcgtgttgctgcccttggacaacgacggttgccctgaatgtggtcatcaggatcagctgcagggtcgaatccccccgattcgtgcctattccgatcgattgcactacccaggcatgagggcgctcatcggccgcctgcaggagcaggctgaggccgcctcccaggaggtgacagaggaggtgatcaggcgggaatgcgtcgacctggtgaaggctgggaatgtagtagctgccgtgcgccgctatcgtcacgccaccggttgcggcttgcctcaggccaggcgacaactcggcctcacctggccctcgctgctggacgttgatcctgcggatcctgacttccttgtcgaccgtccaggggtgattaagtag

SEQ ID NO: 331816 - DNA, 387 bp, Pseudomonas aeruginosa
atgagtgagtccaaccttgtgctgagctgtcgtcacctgtcgaccctgctgcgctatgtctaccctagcgatcgacttacctgtgcgcttgaacttcagcagatccagcaggatggccaactcctgcgcgaagaaaacatccgctctgtgcggttccgctccaggggcctggactatgacgaagggcactgcatcccattcgtcttcgacggccaggccgagtcggtttctgcgctggaactgctgaagctcgccgatacgtaccatcggaattcatgtgatgcaccgggctactacaagtcgcgggcctacgaactgctgtcccggatccgcgaggcggctatcgaggatctacctggtttcaaggaagccccaggctgggtgtag

SEQ ID NO: 331817 - DNA, 228 bp, Pseudomonas aeruginosa
atgagctgggttgagcaagcggcaccgattgtccacgaggtcattcgacgtgtcggtcgatcagacctgaaggcgttgcgccgggagttcaggaaagcctatccgttcggtcctcggacgaatgctccttacaaggcctggctgtcggagattcgccggcaactgggtcaccccctgaacctgccaaagtgtgacccggaggatccgcagatggagtttgagttttga

SEQ ID NO: 331818 - DNA, 291 bp, Pseudomonas aeruginosa
atgccagaacgttacaccctggagcactgggagaagtgcctgccggcgatgagacgcctacaccccgacaccctggcgatcgcccggagcgtgtacgtggatggcgtgaaaccggtcgaagtcgcgcggcagactggacgcagcgcgcagaacgtcaactcagcgctgaagcgtgtagaaccgtacttgcagaaaggcgccgcaggccttgttttcgtcggtgtctggttaccgccagagctggctgaacaagtcaagcaaatggcagcacagtatgagcaaaacgactga

SEQ ID NO: 331819 - DNA, 222 bp, Pseudomonas aeruginosa
atggccgcttataccgtcacctggaccatcgatgttgaagtcgatggggatcataaggacgctgcgcagttcgttgccaacagctatttccaggcgcgcattgccgcaggagagcaggacagcgcttgcagttttgtcgtcgtcgacgaaacggatcagcaccaggtcgatatcgacctcgccgatagcctttcggaccttgacggtgatgacaccgagtga

SEQ ID NO: 331820 - DNA, 189 bp, Pseudomonas aeruginosa
atggaacgagaactgagcttcaatgagtggctggacgagggcgagcggcgcgaggcgctgcgcgacatttaccatgaggaccagataggccctggaagtgatttcaccgaatgggccaggatcatctaccggattcgtaaggagcccgccgagcgtaccaagtgcccgcgccgctggccgtatgtgtga

SEQ ID NO: 331821 - DNA, 195 bp, Pseudomonas aeruginosa
atgacgctgatagacccccgcaagctgccaccgctcactgccgattggtacggcatgggtcgggaggcattcattgctggcctggctctggatatgtgtccgcgcagcgaaggagaggctgcctcgcggtcctgggttgagggctggcatgcggccgagggggacaacctcaacctgggcgaagacgggacgtga

SEQ ID NO: 331822 - DNA, 189 bp, Pseudomonas aeruginosa
atggccgacttcgtgaacagtgacgtgaagaaggtgcgcgaggtgttcgactgggtgagggtcaacgagcatttggcgcgcggctgggtgttgttgagtatcgcggagggacaggatgaccagaagtacccggtcgtccgctacatcctgggatgggtcaaggacgagctgccgccgggcgacgactga

SEQ ID NO: 331823 - DNA, 216 bp, Pseudomonas aeruginosa
atgaccaagcaacgccgtacctttgcacctgaattcaagcgcgaagcagcctgtctggtgcttggtcacggctacagccatcccgaagcggcccgttcgcttggcttggtcgagtcggccctgcgccgatgggttaatcagcttcagcaggagcgcggcggcgtcacgccgaccagcaaagggcaaaaggggactgatttatctctcaggaaatag

SEQ ID NO: 331824 - DNA, 1758 bp, Pseudomonas aeruginosa
atgtccgaatccaggctgaaacgcacggtatcctcagctctttggtcggcttacggcgatgcattgggttttccgacagagctcgcttcggaggatttggtcaaaaggcgtgtgggccaaacccgatccacccgcactggccagtggaagcgtctggttggcggaaaattcggtgcagacgtcaccttgcccgcagggtcttactctgacgatactcagcttcgactttcaaccagtcgggcaatttccggccaagggtatttcgatgttgaggcattcgcaaagatagaaatgccggtctggcaaatctatgcgctcggcgctggccgaggcagcaaagcagctgccagttctttggcgaacagaagcactgcatggttcagcaacttcttcaaagggtatgaaagtggcggtggcaacggtgctgcaatgcggatccagcctcatgtatgggccgcctgcaagttagacgataaaccatcctaccttgtagacgtcatccgtaacgcaatctgcacccatggccatatgcgtgggatcgcgggtgcagtggtgcatgcgctttctcttgcccatgtcatgcaatacggtcaaatggcttcggacagtgattggctttgctacagtgatgatattcggagcatcccgaaactcatcaagagtgacactgatctgctcactttctgggtgcctacctgggaaaaaaacagcaagactacactggaacgtgccgctgatgaggtggccaatgagtggagtctttctgttcgcaaggctatggattgcttcgcgcaaaccaatgagtcggccacagttttgtatgcaaagatcgtagagggtgataacggcctcagtaaagaggagcggggttctgggctcaagtcggcactcttcgctaatgtggctgcgtttttgggccagcgagccggatcccaagagatcatcgaagtggttgccaatctgctgtggagtgatactgacactatcgcgagtatggcgggtgcattgattggtgcagctaaacctgatgtcaagtttattggtgagattcaagacgagccgtatatccggatggaagctaatcgtctttttaacatcagtcaaggtgatacagagggcactttcccatatccggacaccttatactggcaggcgcctagagcagctattgatacattgaccgttgctgatggtcagtatgttcttcagggatttggccctgttttacccgtcggtcagagattcaagggccggcaaaagggggccgcttggcaatggttcgcttcgtcttggggacaaagttttctgattcgaatgcgtgccgagctgggcgtgagtagtcaggctgttgataaagccgtcgagcgtgaaaagaacatcgctgatcttttcgattaccaatcgcaagatcttgagctcgcagcagagctgtcagtgccagattcagaggttgtgtatgacaccgacactggcactcacgttgcggtgccaaccttcgcagtgcaagacagctacatggatacgcagcagacggttgctgttgatgtgttgtatgaggaagacttcattcccagcaaaggcactacagtcgatatcgatgcgctgtctacagaagcgatcaaaagctttgaccccgagttgattggtcaacacctgctgttgatcgccgaacaacccaatggggtaacgctggctactggctacgcctcgattgtggcgaaagcgagagctacccgtctgcgtcacaggcgcggatag

SEQ ID NO: 331825 - DNA, 642 bp, Pseudomonas aeruginosa
atgagcatcaagcaatttatcaagcagcgtggcatcgaatcggttgtgcatttcacgactaacaggggttcgttggggattttcgcgtgcaatgcgttaaagtcgagacagcggctgaacgcggatgaacagctcaagcatattttccagcccaatgcccggtatcgggacaaggatttggcgtggcttgactatgccaacctgtcgatcagtcgcatcaacatgaactttttcaatacctgctcggggagctggcatcgagaaagagattttttttggtgcattttcgatttcgaaccggaaatcatgcttcatgacaatgtgcagttcaccaccacgaacaacatttataccggtaatctgaggtctcctggcctggagggtctgcagcgagcatttcagcaaacgacgcatcagtattcgaatcactatgcggaacgaactgaaggcttccctgaaaacgagacgacttgcaaccaagcggaaattctttatccgggagaggtttcaactcgttatttgcaacgcatctacgtgcgttgtgaagaacattcggatgagcttgcaggacaaatggctgccacggcccaccgagcggtcgaggtctttgtcaggcccgagctcttcgagaaaattaggtga

SEQ ID NO: 331826 - DNA, 1218 bp, Pseudomonas aeruginosa
gtgctcacttacaaccgcacgctgcggggctacatcagtgagttggcggagcaacaactgccagacacgggaatctcgctggagatttccacgttcaacaagtgggcacggcgcttgacagacgctgacaacatcctggatttcgagcaaaccgagcggttgctgcgtcagaacctggccaagacccggttggatgtcgaatttggcatggaagaggcgctgtacgtcctggggcggtttgagacggatcagttggacgactacctctctactcgacgagaagggcgtggtaacacgcctcgtatggagcggcctgcgcgccagatcttgttggatgaggtcatacgtccctatatcgatcataagcgcactcgtggactggttgactggaacgaccttgcctgcacgattgcgtctcacgactacgaacaatgcgatgtggtagtcgttgacgagacccaggacttctctgcaaacgagatccgggcgctactgcgtcagtgctcccctgaagcatcagtgacgttcgtgttggacagcgcgcagcgtatctacacacgtaacttcaactggggtgaagtgggtgtgaccctacgctcggaaaagagccatcgcctggagacaaactatcgaaacacccacgagatcgctcgctttgcgagcgcgttgctcgatggagtcgcaatggacgacaacggcaccatgccgaacttcgataccgcccgcggtcatggtccgaagccgattgtcctgatgggtgagtacttggatcaggtcaaggcggcaatcgagttcttgagcgaaatcgaccttaaacaaaactctgttgccttcctgcatcccaaaggctggtttagagacctcatgccggcgttgcgccgcgctggttacccctttgttagcattgccggcaactccgagtggccgcagggagaagagaacatcgctctgtgcacgatccactccagcaagggactggagttcgaccatgtcatcatgatcgggctggacggctcggtggtggatgtaagcgccccggatgatgaagaagatgatgatgaagacggcggctatgagccatctgctcgcttgcgccgcttgatcgccatgggcatcgggcgagcacgtgacagcgtcatgattggctttaaaccgttcgacgccccagatatcatgcgcttcgtggacgatgagctgtatgagggcagggacgtatga

SEQ ID NO: 331827 - DNA, 186 bp, Pseudomonas aeruginosa
atggacctgagcagccgcaaataccaagaggacctaaatcactggagagcggttgtagcgtccatattccaggcgctggatttttatggagatcatcacgaaaaggaggaggataccgaggccgccggaagcggccacaaccacggaaaagcccccaaatatgagcaatactgccggtgctcctga

SEQ ID NO: 331828 - DNA, 243 bp, Pseudomonas aeruginosa
gtgactataatcctcttcctgggacttcctttcacttacaaaaatgcactcaacgttagcatttttaagctcttctatagcaaccgatttagtataaagctcgccgaggcctttggctatatcgctaacgatgtatacttcaatattctgattgactcgcaactcaatgtaaaagtccacaatattattttgaatgacattctcccgaaggtcatcctccagcctattaatgaaaccaattga

SEQ ID NO: 331829 - DNA, 1272 bp, Pseudomonas aeruginosa
atggcgcctcgcagtttttcggctgtaaataaagtgttgggtatgagtggcctggtgctgctcagtgtcatgggtaacaccgcaatggccgacgtggctggcaccgcccctgaagctgaaagtgtggtggacatgctgtctgagggcacagtgtccggatcgctgagaatgcgttactacaccgacaagaacgcttacttcgtcaaagacctgaatcaagacacggctggctatggcggcttcgtcaaatacgaaaccgccgcgctgaatggctttaaattgggcggcagcctgatctaccaaagaaccttcaaccggcctgacgacaaaggcagcgtaattcccgatatcggcaccaacgtcaccaacatcggcgaggcttacgtcagttgggagcatgacgcgttcaagataacggccggtaatcagcgcgttcaattgccgtggaccagtgactacgactggcgcgtagtgcccgtcctgttccagggcattaatgtgcactatggcaacgacgatgacttcctctcactggcgcgcttgtaccgctggaaaggctgggccgacgacggcttttcccggaacagcatgtactcaacagatgaaaaaacagccggaatgtggagcctgggcggtggccgctcagtgacagtcaacggccttaaatactccggccaattatggcgccagcactattacgactacaccaacgtgagctacggcgaaggccacgtttcagcggtgtcaggcgattttcgacccaatgccggtcttcaatacatacgcggcacgggcgacggacgtgaactggcaggcacagtcgacaacacaactttggggttccaggcggggttcgattacaaagcctacaaagtagccctgggctacgaccacatcaaagcggccccgggtgcgtacaacaacggaagcctggtaacgccctatgcccacaacatgtcatccggcccttactttgcccagccctacttcaccagcacccaagacctgggggctggtaatgcctactcactggacgtcagcacaggcgccgttcaaaacctgttcctgggcgcccgctattcattcatggacctgaccgccgtcgccggcaccgccagcctcaaccagtctgaatacctgctctacggaatctacaacttcgcaggcgccctcaaaggcctgagcgtggccgaatgggtaggcgtacaaacctccccggcacgagacacccgcttcttccagaaccggttggaggttagttataacttttag

SEQ ID NO: 331830 - DNA, 1311 bp, Pseudomonas aeruginosa
atgagaaacctcttcaagtggacggtaaagctggatggcggtgaagtggtcgctccgaatgagcggctcccctggtctcaaacgttattgatggggctgcagcatgtcttcgccatgtttggcgcgacagtgctggcgccgttactcatgggctttgatccgaacgtgaccgtgctcatgagcgggttcgggacgttagtgttttttgtcattaccaaaggcaaggttcccagctacctgggatcaagcttcgcctttatcggtgtgacggcagccgtcacgggctataccggctcagggcccaatacccatatcgacctggcgctgggcggcattattgtctgcggcatcctgtacatattggccgggctagcggtacaggcgatcgggtatcaatggatcgaaaaactgacgccgcccatcgtcaccggaaccgtcgtcgcggtcattggcttgaacctggcagcgatccccatcaaaaccatggcggccaatcattttgatatttggatgcaagtgatcacgttcacctgtgtcgcgctgattgcggtcttcaccaaaggcatgatcaaaaggatgctgctgttgaccagcttgattgcgtcgacagccatttactacgtgctgaccaacctctttgggttaagcacgccgatcgacttcagccttattcaacaggcggcctggtttggcttgcccaccttcacggcacccgcgttttcgtcaaacgcctgcctgctgatcgcgccggtcgtcatcattctgattgctgaaaacgttggccatttaaaagccatcggctccatcagcaacagcccgatggaaaagcattttggccgagcgtttattggtgacgggatcgccaccgtcataagcgccggtgtgggcggcacaggtgtcaccacctatgcacagaacatcggtgtgatggccgccaccaaagtgtattccacagccttgttcgtcgtggccgggctgatggccatactgctgggcttgtctcctaaatttggtgcgctcgtgcagaccattcccacctcggtcatgggcgggatgaccattgtcgtgttcggcctcatcgccgtctcaggggcgaagatctgggttgaaaacaacgtcgactttagtgacaaccgcaacctgatgattgcttccatcccgctcattttgggcaccgggcagttcacgctgcactttggaggctttgaactggatggcctgggcagcgcagcctttgccgccttattgctgaatattattttgaactacaagaaaaaagctgatgtgacgacgcccacgcgtcctcagtaa

SEQ ID NO: 331831 - DNA, 390 bp, Pseudomonas aeruginosa
atgaatatttcaggtctggacatcaaccttccgcacgtccatgcagacgtcatgattgcgtttgaagcctacgaagccgccctcgtcagtaatgacgtcagtgtgctcgacgaactgttttttaattcgcctttcacattgaggtatggcgccactgaaaacctctatggctacgaggcgatcaaggcattccgggcgaaccggccgtctacaggtctggcccgtaaagtgcttagaacagaagtcacgacttacggccatgacatggcgaccaccaacatcgagtttcaacgcaccgggtctacgtccataggccgtcagagccagacgtggttacgcacagaccaaggctggcgggtggtatcggcccatgtgagtgtgatgggctaa

SEQ ID NO: 331832 - DNA, 1398 bp, Pseudomonas aeruginosa
atgactgtcaccgccatgaacatccgtgacgccatcgtaaaaggcgagttgagtgccttggaagtggtgcaagacaaactggatcatatccagagcacaaacgcgtcgttcaatgcgttcactgaggtcacgcgagaccgggctttggctgaggccaagagcattgatgcgctgcgtcaagcaggggagccattgccgcctctggctggcgtgccttatgcggtaaaaaatctgttcgacatcgaaggcgtggtcacgctcgcaggctccaaaatcaatcgtgacaatgcacccgcagccgctgatgcgtttcttgtagagcgcatgaaagctgctggcggcgtcctgttgggggccctcaacatggacgagtacgcctacgggtttaccactgaaaactcgcactacgggcctgcacgcaacccccacgacaccgcgcgctcggcgggcggctcatcaggagggagcggtgccgccgtggctgcggaccaggtaccggttgcattgggctcagataccaacgggtcgattcgggtgccgtcatccctgtgcggggtgtggggactcaagccaacctttggacggctctctcgcagaggctcctacccctttgtccacagcattgaccaccttgggccgtttgcgagtgacgtgttatccctcgcgtacacgtatgacgctttgcaaagcccggacccacacgatccggcctgccacgcattacgcgtccagccctgcctgccaaccctgcagcaaggcgtcgccggattacgagtcggcattcttaccgattactttgacacctatgccagcccccctgcgcgtgcggcggctcagttggctgccaaactgctgggggcgacggatgaagtccactggccgagccctgcccaagcgcgagccgctgctttcatcatcacggccagcgagggcagtaacctgcatgcgcacaacttgaagactcgccctcaggacttcgagcctgtctcggtcgatcgctttttgtccggtctgatgcaaccggctacgtggtatgtccaggcccagcgtttcagaagaatgtaccgcgaccaggtcaatcagctgtttgccaattgggatgtattgatcgcccccgcgacccctgtgcccgcgccccagatcggcgctgagtggattgatatcaatggtctgcgccatccgtgccggcctgcattgggcttgttgacccagccgatttccttcgcgggctgtccggtggtcgcggcgcctatgtggcccgacaacaccggcgggctgcctctgggcgtacagattatcgccgcaccctggcgtgaggatcttgcactcagggccgccgccgtccttgaagacagcgggtatgccaccgttaaagcccattacgcaggacaactgtga

SEQ ID NO: 331833 - DNA, 207 bp, Pseudomonas aeruginosa
atgagccctgaaaaaaactacgtcacggccatgtccgtcctgttggacctcaacctcagcgaggagcagcttgagcgcgtggccgagcattttgccaggacgaagcaattggccgggttgctgggcgctgtgcccatgaccccatgggatgaacctgccgaactctaccagccttgcccctttccatctgaggccaatccgtcatga

SEQ ID NO: 331834 - DNA, 1701 bp, Pseudomonas aeruginosa
atgactctgaaccgttcgaaccctgattcaaccggcgccgccgttgagtggctgtaccgcctgagccagcagccacacgacaaaatcaccggccccctgagcggccttacctttgcggttaaagacaacattgatgttgcaggcgtacccaccaccgcagggtgcccggcgtttgcttatatggccgatacccatgccggtgtggtcgagcgaattctcggcgccggtgcatcactggaaggcaaaaccaatctggaccagttcgcgtgcggcctcaatggcacacgatccccatacggcgctgttcccaatgccatcaacccagacatgatttgtgggggatcgagtgcagggtcggcgtatgtggtagcaaccgggcaagtcgattttgctctgggcacagacaccgccggctctgggcgagtgcccgcagggttgaacaacatcgtggggttgaagccttcaaaggggcttctcagcaatcggggggtggtgcctgctgcccgcagcgcggattgcgtatcgatcttcgcccgtacggtatcgacggctgttcaggtcctgttagtggccgcgggtcatgatccgctcgacccctattcaaaagaccttcacttgaacaccgaaccctttggcaaccgctttgtctttggcgtgcccgatgagcttgagttctttggtgacacccttagcgaggaggctttcaagcaaagtattgatcagcttgaagcgttgggcggtaaaaaacggatcatcagttatgcaccgcttaaacaagctgccgctttgctttacgaaagtgcacttgtggctgagcgatatgaggccattcgagactttttcgacaccacatcgcacgcggtgatcgaacccgttcgaagcatcattgctcaaggcaagcaatacagcgccgcggatttgctcgaagcacaaaccgagctgcggcgcctgggccagatagcggccgtgatgtggcgtgacatcgatgtattgctggtgcccacggcccccacgagctacaccctgcgcgagatgcaagacaatccggtagtcctcaatcgaaacctgggcacctacaccaacttcgtgaatttgctggactacgcggccatctcagtgcccagcacttttcgttctgatggtcagccttttggtgtcacgttcatcgcgccaagcggtagcgacctgcaattggctgaactggcgcagtgttttcaccatgcgaccggcttgactcaaggtgccaccaggcagcctcttcctgcactggatcgcattctgaaatcgtcagcccagtcgtcggtgctggtcggggtggtgggcgcccacctcagtggtatgccgctcaattaccaactcacggaacgcaatgcgacgctcgtgtccaccacccgcacagccgccgattaccagctctacgcgcttgccaatacctcgcctcgcaagcctggaatgatccgggtggcacccgggaagggcagccgtatcgaagtggaagtgtggcagatgcccatttcggactatggatcgtttgttgcgatgattcctggccccttgggaatagggacgatcacgctcgaggatggcaggtcggtgcaggggtttgtgtgtgagccttttgcgctggagggtgcgctggacatcagctcatacggcggctggcgcccctatgtgtcgtcgggtgcgggaggtggcgaatga

SEQ ID NO: 331835 - DNA, 690 bp, Pseudomonas aeruginosa
atggaaatggcgagcatcgacagtgccgatgacgtgcattacgtacaggtcaaatgcccgctgctgacccgccagcgcatcgccgaagcaaacgccagaggcgccagcacctcgaccaccgatacctacaagtcgatgtcctattctcgcgccgcttcagcgctgggggttggtgtcgcccttgatgaactggacggcaaaacaccgggcgagcttggcccgggcatctgccaggacttcgacctgtattccagccgcgccagcacttcggccggggtggagctcatgcaccatgaaattctggtgttgggtaactccagggcgtggggcggtgatctggtcatcggacaccgcgtcatgaaggacgcgattgatctggatgcggtgcaaggggtccttggcgaccttggcttcgagtcaagcaagcaactctcagcggatgaccgtgaccgcttgattgcgatgctggccaaggccgagccgtctcagaccggcaccatcagaggggctcgacacaccatgctggatgacagtgatatcccggcgacccgccatgccagagcgctggtgggtggcgttctggctgccatggtgggtgacacccggctcttcgtttcgggtggcgccgagcatcaggggccggatggcggtggcccggtggcggcgatcgcgcgcctcaaacgcccatga

SEQ ID NO: 331836 - DNA, 1470 bp, Pseudomonas aeruginosa
atggggagaaaggcaaccctcggtaccacccgacatgaccaccaccgcccgctcctcagccggggcatcgtgcgcagccccatgacgctcaaggcactggataaccgactcggtcgcgtagccacgcgtgaagtcattgacgcagccattcccttcggttttacccaacaccccaatgacccgcttggcatccagcaggcccgtggctgcggcctggtcgacagcggacaaatcgctcggcgactgggcttcaaatctttgaactctggctttccaacgcatttgatcgcaccccaaacagatagtgatcaaagtgtaggaatcgatggagtgagccgggaagcggtgtttttctctcgctgtgagctaaaaaaagcagcactcaaattgccggtcaaaggcagcgaacgccagaaggcctgtgcggtgcgagtacgctcgccgcgtctgtggcttactgctaccatcgcagagctcgcagccgtatcccaagcggcgagtctttacctgtatccagcaggactcagccatgcgtttcaggcattcaggtggtcccacgtcatgaagcacgtaaagctcctgagctactttgtcgctgtcgctcaccatcgttccatcagagaagctgccaactttcttcacctgacttcgtcggcattaaaccggcacattctcgatcttgaagaagagttgagcgccccgctgttcgagcgccacgcacggggtgtgcgtttaagcgctgcgggtgagacctaccttgcctacgccaaaaaagccttgtgcgacgcagaggatgctcattcaagcattagagagcttgaagggctcaagcgcggtcacatcaaaatcgctgccgtggcggcgattgcagatgttcatttgattgacctgattgcaacgttccagacccagtatccgaaggtcagctttgctgtgaaggtcgccggcgcagataaagtggtcgatgccgtcgtagagaatgactgcgatctgggattggctttcaacccctcgcagaatgctgattttcatgaacttgcccaggccccctactccatccacgcgctagtgaaacgcgatcacgtcctggccagcgctgagtccatttcgatttcatcaacagcagactatccattggcgctggccgacacctcctggggtggcagacgcctgttggatgaatacctgaaacgtaatggcacccgcatttacccacaaatggagtcgaactcttttcaggttctaacggactttgtcaggcgtaccggggggatttgtttccaggtcaggaaagagggaggtgaacgccttgtagacgacgaccttgtcgccctccctgtatcagaattgaggaggtaccagcgcaggatgatactgggcgtgcttcgaggccgcgtgctgcccgttgcagctgcgcgatttagcgaattgctcaaaaagtcgctattcagtgaactgaacgacagctaa

SEQ ID NO: 331837 - DNA, 984 bp, Pseudomonas aeruginosa
atgacgaatgctgcgccctcgataaagctcagtacgcttcggcaaattgctccttatctggggatgcgcggggtgtcgccgctggagttttttcggcgttatgggatttctccgcaggtgtttcagaaccctgaggcgtggattccacgggcggcgtgttttcatattgccaatgagatggcggcggtcgctcaggacccgtttgccggggcgtcggtggggcatttgattgaggtgcgttcgctcggtgtgtggggcgaatgggtgctgggctcgaccaatctggctcaggcgtgtgcattggcggcggtgcacacggatttgctgcaccaaggcagtgacgtgaagatcatcaccgaaggccggatgacgaagctggttcatcacttcaacgggcaccacggggccgaccccaagcaggtgattttgggcacgctggcgctgctgagaaagatcccgctgatgtccggcgagcccggcgccattcgtgtgcatctgaaaaacccgcgagagcgcggcgacgaggcgcttgaggagtatctggggccgaatctggtgatgaatgcggagcacaacatgatcgagtttgatcgtgacttgctcgaaacgcctttgcagcctgttcgggacagtgcctggaaaaccaccctggccttgaagtcgacctccgacgccgcggacgcgctcgtgcagcagatcgcggatcaggagttgtccaaacttgtgactgtttcacgaaagatcgggctgtctgcccgcacgctccaacggcgcctggaacattgcggtatcgacttcgatgcattgcgtgacgagacacgccgcagtgaagccatgcagttgattgccagcgccagatacagcgccaccgaaattgcctacatggtcggctacagcgaccccgcgcactttactcgcgccttcaaacgctggacgggcagcccgccgtcgcactatcgcactctcttgaaacaagaccgttaa

SEQ ID NO: 331838 - DNA, 1035 bp, Pseudomonas aeruginosa
atgccccctttacatgcgatctgcatccttgccatggcgctggcagtagttggaagtgcgaacgctcaatcctcccctgaggcggcgataccggtgggtgtggataactttgtccgtgccgagtccgacctttacttgggcaagatggtggcaacgggcagtttgggccgctttgttcatagccgcgaagccgtgcccatcgacgcccagaatgtggtgcgaatgaaccgggacacgctctattcgtcagcggtgttcgatctcgacgcaggccccgtcaccattaccttgcctgaggccgatgggcgtttcatgtcgatggcggtgatcaatgaagatcactacgtgcccctcgtcacttacggcgccggccgccagacattgaccaaagagtccgtcggcacccgctatgtctttgtggcggtgcgcaccttcttcgatcccgctgatcgcaaagaccttgagaaggtccatgcactgcaggacgcaatgacagtcagccaggccaaggttggtgagtttgtggtgactaagtgggacccggccagccaggccaaagtgcgtgcggcgttggaggtgttgggctcgacgatccctgactacaaccagtcctttggcgccaagggcgcggtcaacccgatccatcacttgatcggcactgccacgggatggggcggcaacccggccaaggatgccatctacctgggcggcgtgatgccgcagaacgatgggcacgccgtttaccgcctgaaagtaggcgaagtcccggtcaaaggtttttggtcggtcagtgtttataacgccgacggttacttccagaagaacccccaagacgcctattcgttgaacaacctcaccgccaagaaaagtgaggacggctcgattgtcattcagttcggcggttgcgacgcgacgatcgccaattgcctgcctaccacgcccggctggaactacacggtcaggctttatcagccgagcgaacaactactcaatggccaatggagcttcccgaagccagagcttgtcgcccgctaa

SEQ ID NO: 331839 - DNA, 843 bp, Pseudomonas aeruginosa
atgacaaccatcggcggttcaaactttctcaagcatcccgtggccctcatgacaggtgcgacgctcgcattggcgttggcgctgccggcacacgcagacaacgcaaatgagccatccctgacggtaggtggcggccttggtgtcggcccgttgtacgaaggttcttcgcactacgcagccttcccgtcgctgaaattgaaggccgtgttaccgacccaagagtggggcacgttcagcgcggcgttcccggagggcctgcgttgggacttgccgggcttgtcgcctttcggctttgcgctgttgatcggctatgaccagggccgcaaagaacgaatccacaccctggacggccgcgatgactatctgcggggcatgggcaacctggacagcaccgcgctggtcggggctgaggcgtactggacgctgccggccggtcgcctgtttgtgcgcggcctgcgctcgagcgacaaccgcaattacggcggcgagcgcctgggcaaaaccgcctaccttgaagccggttttgccacgacttacgcgctgtcgtcgacattgaccctggactcgacgctgtacggcacctggagcaatgagaacgacatgatggcgcgcttcggcgtcacggctcagcaagcggcccgcacccagttcgaggaatatcacccgggcggcgggatgcgtgacgtgaccttgaagctgggcctcacctggcaatggcagccacagatcgcccttgaaggcggggtcaaaacctacgcactggtctccgatgcccgcaacagcccgctcacgggtgaaaaggtcggcgctggcgcttatctgaacgcgctgtactcgttttga

SEQ ID NO: 331840 - DNA, 828 bp, Pseudomonas aeruginosa
atgaaacaacgacataagcagttggggctgaccgtgtccctgactggcctgctgtggtcggggctggtgctggctgaagaggcggccaccaagatcacggaccctcatttcaagctggctccgggttacctcaacccggccggcctgccgctgcgcctggcattgctcggcgcgccgcccaagcccgactctgcggcgctggcacgggatgaagaagcccggcgggcagcgctggcactgcgtggcacagcccgggaggcgctcgcggcaacggatgcagagttgtcgttcccgggcccggcgaacacattctcgtgcgcgatggggacgcagatcagcgagaagaccacgccgcacctgtacaccttgatgcagcgcacgctgacggatgccagtggctccacgtatgccgggaaaaacgcctacaaccgcacccgtccgtttgtggtgcatgacgaaggcacctgccgcaaagacatggaaccgctgctgcgcaccgacggttcctggccttccgggcactcggcggcgggctgggcctggggcttgatcctcgcagaagtgaacccggcacgcgccactgaactgatgacccgtggcctggcgtatggccaaagccgcgtcatctgcaacgcccactggcaaagcgacgtggatgccgggcgcatcatgggcgccgccaccgtggccagtctgcacagcaatccggcgttcctgaaggatctggcagcggcgaaggaagaaatccaggcagcacaaaaagcaggcaacacgccgacagaaaactgcgccgccgagggcgtcgcgctctcgttgacgcagcactga

SEQ ID NO: 331841 - DNA, 777 bp, Pseudomonas aeruginosa
atgaggctcagtaacacttcgttgcggcgtaaacacgtgcatctggccctgttgttcggggccttggcgagcgctgcaagcggcctgccgacggttgccaacgcggcagacagcgatgaatggcagttcaacggcgggccttatctgtggggcgccggtattcgtgggcacgtcggccacaaaagcaccgggacggcctctgtgaagtccgacttttcggacatcgcacgcaccgtcgacatgtccttgatgttcatgggtgaagcgcggcgcgggccttacagcgtgcttgccgacctgatgtacatcgacaccgacacccgcagccgcctgccaaccgggtccaagcttgaggttgaaggcaagacggcgtcaggctttttggggggcggttatacggtgctcggcgatgacgattatcgggtcgacgtcgcgggcggcgtgcgcgtctggtacagcagcaccaccctgaccctccatggtgggcaggcttcggggcattccggttctgacaacgccacgtgggcagacgccatggtcgggctgcgggggcgctatgccgtgagtgagcggttctggttgtcctcctggggcatggtgggtgccgggcaatcccgtgaagactgggacctggcagcgctggccggctgggagttcacccccggattttcggcggtggccggctaccgggccatgggcgtgaactatcgcaacgacgggtttgtgtacgacatcgtgcaaaaaggcccgttgctgggcattagcggacggttttag

SEQ ID NO: 331842 - DNA, 375 bp, Pseudomonas aeruginosa
gtgcgggtgatgacggcccgccatgacgtgcccattcgcgagcctcggggctatctcagtgccattgcccgctcgctgctgatcgacaagtcccgtcggcgcaccattgagcaggcgtatctgtttgcgttggcgcaacggccagagccggtggaggtgtcgccggaggtgcggttgtcgatcatcgagatgctgatctcaatcgataccctgctcgacgaactgggccccagaacccgggagattttcctcgccgtgcagttggaagggctgacctacgtggccgcagcagaacgctttggggtgtcggtgaccacggttaaaaatcacctgattcgcgccatgacccgctgcctgttgctggttgacgcgtga

SEQ ID NO: 331843 - DNA, 936 bp, Pseudomonas aeruginosa
atggacatcaaaaccctcgaagccgccgccacctggtatgtgcaactcaatgacggcacggtcaatgaggcgcggcagcgggcctggcacacctggctgcacgccagcccgcagcatgcggcagcctgggcacgggtcgaaatcctccagcagcagtggtccaaaatgccccggcaagcggcgttgtccagtttgggggccgccaaggcccagcgccgtgatgtgctgaaaatcctcagcatgctggtggccgtgggcgggtgttcgtggctggccgttgagcaggtgccctatcgttcgatgctggcagaactgagcaccggcagccgtgaacgccgctcgctgcggctggaagacggctcgcaattggagatgaacgccggcaccgcgctggatattcacttcgatgcaacgcagcgacagatccagttgtatcgcggcgaaatcctgctgcaaaccgcccagcccgccgacccgcggcccttggtcgtgcaaacggttgacggcagcgtgcgggcgctcggcacccgcttcagtgttcgccaactgcccgcttacacccgcgtcggcgtgctacaggctgcggttgaggtccgcccgcttcgccatgccgatcagcctttgcggctggaggccgggcagcaagtcacgttcgatcgcgatgcggtgagcgcggttgggcttttaccggctgaatcggccgcctgggtgcagggcatgttgagcgtcaatgactggcccctgggggactttatcgaagagttgggccgttatcgccccggcgtactgcggtgcgacccggcggttcaagggttgagcatttcgggggcgtttcgtatcgatgacaccgacaccgtgctggaaaacctgagcaagacgttaccggtcaaggtgcgttatgtgacgcgttattgggccaacatcgagccggtctga

SEQ ID NO: 331844 - DNA, 2424 bp, Pseudomonas aeruginosa
atgcccccgctccccctcaatgccagtacccagataacgcgcgctgtgcgcatggcggtgttcggcgcgtcgctggccagcctgcccgccctggcgctgatgcccacccaggcgtgtgcgcaaagccagacggtgtatgagattgccccaggcccgttgggcaacgccctgacccagtttggcgtgcaggcgggggtgactatttcgttcgacacggaacaggctcgccacctccacaccagcgggctggaaggctcatacagtgttgaagaaggcctggagcgcttgctcgccaacagcggcttgcaagccgagcgccagagcaatgggggctatgtactggtcgcacgcaacgcgcaatcggccctggagctgggcgccactcaggtcaccaccaaccagttggggtctgttacggagggcacggggtcctacacgccgggcactatcgccacggccacacggctggtgctgactccgcgagaaacgccgcagtcgatttcggtggtgacccgccaggtcatggacgatttcggactcaacgccattgatgacgtgatgcgccacacgccgggcatcaccgtgtcgacgtatgacactgagcgcaccaactactactcgcgtggcttttccatcgtcaactttcaatacgatggcataccgactctacgggacgcgcaatactcggccgggcagaccctgaccgacatggccctgtatgaccgggttgaagtgctcaagggcgcgaccggcctgctcaccggggctggcggccctggcggcaccatcaacctgattcgtaaaaaacccacctcgcaattcatgagcagcatcgaggtgggcgccggctcctgggacaactaccgcacacaaatcgacgtgagcggcccgctgaccgagaccggcaacgtgcgcggtcgagccgttgcggcgtatcaggacaaaaagtcattcctggaccactactcgcgcaaaaccggcgtgtactacggcattcttgaggtcgacctggatgaagacacgctgctcaccctgggcgccgactatcaggacagcaaccccaaaggctccagctggaccggcacccgtaccattttcgatgcgacgggcaataagctggatctgccgcgctcattcaacaacggtcccaaatggagcagttgggagcagtacagccgaaccgtgttcgccaccctggagcacaactttgacaatggctgggtgaccaaaggccaatacaaccatcagatcaatggctacgacgcgccgctgggttacatctcacaggactccgcaaccgccagttcgatttatgcgcgcaaatataccggcgaaaccacccgtgacagccttgatgtctatgcatcgggaccttttgagctgtttggccgcgaacaccaattagtcgtgggccagtccctgtccatctctgactggaaaggcaaggactactcaaacgccacctacttcgacaacaactacgatttctaccagtggcacggccaagccattgagccgctgtggaatcagcccaccaaaataaacgatgagaccactcgccaaagcgggacttacatcgccgggcgcttcagcctgatggatgacctgcacgtgatgctcggcacccgggttgccaactaccaagtcaccggcaccagtaaaaccaaggccagcggcaagggcgtgccctatgccggtgtggtgtatgacctcaatgacaatgtctcggcctacgccagctacaccgaaattttccagccgcagacgcagtaccgtgaccgcacgcgcaaaatgcttgcccccgacgaaggcaagaactatgaactggggcttaagggcgagttttttggcggccgcctgaacagcagccttgcctactttgaagtgcatgaaaccaaccggcccgtcgcagacctgctgtttaactccacacccggtgcggaatactcctacatcggcaccaagaccacgaccaaagggtacgaggcagaaatttccggagaactcacccccggctggcaattgcaggccggttacacgcacaaaatcagccgcgacgacgaccacataaaagtcgcgacctgggagccgcaagaccaggtcagcttttacagcagctacaaactcaagggtaatctggacaaactcaccctcggtggcggcgcacgctggcaaggtgctggctggcagacggtttacaactggggctacgacaaccgcgcgggacgctacgaaaaattcacccaagacccgtactggctggtggacttgatggcgcgctaccagttcaccgacaacctgtcggccaccgtcaacgtcaacaacctgttcgacaaggcgtacttcaccaacatcggtttttatgactccgcctactacggcgacccacgcaacgtgatggtgaccactcgctgggatttttaa

SEQ ID NO: 331845 - DNA, 123 bp, Pseudomonas aeruginosa
atgtacatcagcacgttgcgtaattacatccgcgccatggggggggagctggaaattattgcgaccttcccggatgggcaggtgaaaattgagaatttttcggatccggaagcggtgcgctaa

SEQ ID NO: 331846 - DNA, 375 bp, Pseudomonas aeruginosa
ttgaacgacaccacagacagcactctgcgagacgacatgaacatcccacagaccttgaggaccgccagaaagaacagggggttgacgcaacgagaagtggccgagcttgtgggggtatctatcgaggcctacaagggctgggaaggtggaagacaccaccccagatcggaaaacgtcgcaccccttgcccaggcgctaggaatatccaccgacgaactgatgatggaagcccagcagcgctcaatatcggaagacctcagagcgctattcaacgccgccgacaagctgccggacgacaagaagcggcaactcagaacggcaatcaaagggatgctgctggccatcagccaagagcagctagacgagggggagtag

SEQ ID NO: 331847 - DNA, 1020 bp, Pseudomonas aeruginosa
atgatcgaactgcaccacgcgcctttgagcagtggggcggtggtctgtatcgaggctgacggcacggttgcttgggaaaccccgcgcaagatgctggtccgtggctcccatgactcgaccatccatatccggagcgtaggcggggacgggcagggcaacgcgactcatctgtacatcgacggcaacccaagcaagtggttgcaaggacataaccttgttggttcctgtgatctcgttgccctcgtctgggatgcttttcaacgcctctgcgccctggtgggccttgagccgactgactttgagcgtcagaaggtcagggcagggcagtaccgcgtcactcgcgtcgattacaaccgaatgttcgaacttccaagccgggccgatgttcgagcctggctgcgtgcgggcgagttcaaatgtaagtcacgccatggtcgtccggtaaacaatcgcgggactctaactttcggcaaaggctcaagccattggtcgattgtttgttactgcaaggccgatgaaataacttccggtggttcgcacaagttgccagaagagtttcaccagtatcccgaaatctatcagtggatagataacaagcttcgcgttgaacttcggttgcgctcaaagaaactcaaggcgctgggccttgaatatgcctctcaactcacccccacggttctttggaagctctaccgtgacttcattggggaactggatatgtcagagcaaatagaactcaagtccgatgaggtgatgaacctcccgaactggcttcgtggcacgtatatgctttggaagcaaggtcatgatctgcgcgatagtttgtccaaggctacttattatcgtcatcgtactgagcttcttgcgcttgggattgacataaatatccgctgtgatcgccgcgacgatagcaatgttgtgccgatgattcggattcttgaggctaagcctgcggccattccgaacttcttctttgaaagggggctgattcataaatcggcccgtcaggtggctgtatga

SEQ ID NO: 331848 - DNA, 237 bp, Pseudomonas aeruginosa
atgaagtctggcttcgacttttactttggcggtcgagttagctcccgccaggaaatgcaacagcgcctgcgcaatctcagaactgagggcagcgttatggatgatctggagaaggttctttcgtctaggactccggctgaacaagtccaggccgctgaggatttcaataaggcgaatcgttctaagttgatcagtaacaagaaaggcactctttatttgggggatgtattcgaatga

SEQ ID NO: 331849 - DNA, 1239 bp, Pseudomonas aeruginosa
atgctaggcggcagaacctcgccaaggctgatccccgcccccatggatatagcgctgacccatcgcctgtcgttcaaacaggccagcctcaccgtgctggtggcctttatcctgggaaccctgctcagcctgattcaggttggcgtcgattatgccagccaggacgcatccatcaatcgcgaagtgcgcgcgctgctggacgtcagccacaaccccgccgcgcgaatcgcctacaacatcgatgcggagctggcccaggagctggtcctcggcctgctgcgctcgcccgccgtggtccgcgcggaaatcatcgacacctccggcctgccgctggccagcgcctcgcgcgaacccgccgaaagccgcctgcggccgctcagcgacttcctcttcggccacaagcgggtctacgaggacccgttgcatgtcgaccatgcgccgggcgaggccctcggcgtactgcacctggaaatcgacaccttcgtgttcggcaacgacttcctccgtcgcgccggcatcaccctgctctccggcttcgtgcgcagcctgctgctgtcgctgatcctgctggtgctcttctataccctgctgaccaagcccctggtcagcctgatccaggccctcagcggacacgatccacgctcgccggcacgcatgcgcctgccctgccccaagggccacgaacgcgacgagatcggcgtgctggtggaagtcatcaaccgccagctcgggcgcatctcggtagagatcgaacagcgccgggaggcggagaaccgcctgacccagtacctggaggagctggaaagcatcgtcgccgcccgtaccgccgagctgaaggccgccaacgcgcgcctgacgctatccaaccaggaactcgaagaagcccgccagaccgctctcgatatggcccaggcccgcgccagcttcctggccaacatgagccacgagatccgcacgccgctgaacggcctgctcggcatgctctcgctgagcctcgacggcccgctcaccccggaacagcgccagcaactgtcgatcgcccacgactccggcaaggtgctggtggaattgctcaacgacgtgctcgacctctccaagttcgaggccgggcaactggtcctggaacagatcccgttcgacctgggcgtcctggtggaagacaccgccagcctcctctcgcagaacgccgcggccggcgtggagctgacctgcctggtcgaccccgccccaggcgggtga

SEQ ID NO: 331850 - DNA, 1044 bp, Pseudomonas aeruginosa
atgactgcggcaacttgcggatgggtcaccatgagcatgcgggagctggatcgcctcaaggtcatcgaggcaatcatcgagggtcggttgaaacctgccgctgcggcgcagcgtctgcgcctgacgacacgtcaggtgcaccggctggttctgcgttatcgcgaggacggcccagccggcctaacatctcgtcgacgtggtcagccgagtaaccggcagttgtcgccaggtctggagaatcccgccattagcttgattcgacggaactatagcgactttggtccaactctggcccaggaaaaactagtcgagtgccacggccttaagctggccaaagaaacggtacgacggatcatggttgatgccggcatgtgggtaccgcgcaagcaacggccgcccaaggtctatcagccacgcaaccggcgcgcctgttgcggcgaactgatccagatcgatggcagcgatcatcgctggttcgaggatcgtggaccggcctgcacgctgctggtcttcattgatgatgcaaccagccaactgatgcacctgcattttaccgaagccgaatcgaccttcagctacttcaccgccacccgcgcctatctggagcggcatggaaagccgctggccttctacagcgacaaagccagcgtgttccgcagtaaccacaaggcgcctcagggcggcgacggctatacccagttcggccgagcgatgtacgagttgaacatcgagagctgcgccaacagcagccaggccaaaggtcgtgtggagcgtgcgaacctcactctgcaggatcgcctggtcaaggagctgcggcttcgcggaatcagcaacatggccgacgccaatgcctttgcagcccactttatggccagctacaacgcgcgttttgccaagccgccgcgctctgagcatgactgccatcgcccgctgcacagtgatattgcacctgaggtcgctcaccgaaatactgttggctcctccggtttcggcgaccgtacgaatagtgacctcatgaaccttgaagtagtcgtcgaagactag

SEQ ID NO: 331851 - DNA, 777 bp, Pseudomonas aeruginosa
atgctggagctgaccaacgcgcagatcggcggctggatcgccagcttcgtgctgccgctgttccgggtcgcggcgctgctgatgaccatgccggtgatcggcacccagctggtgccggtgcgggtgcgactgtacctggcgctgggcgtctgcgtggtgctggtgccgaacctgccgccgatgccgcaggtggacgcgctgagcatgaaggccatgctgctgatcggcgagcagatcctggtcggcgccttgctcggcttttccctgcagttgttgttccacgccttcgtgatcgccgggcagatcatctcgatgcagatgggcttgggcttcgcttccatggttgacccggccaacggcgtctcggtgccggtgctcggccagttcttcaccatgctggtgacgctgctgttcctggcgatgaacggacacctggtagtgttcgaggtaatcgccgagagcttcgtcaccctgccggtgggcgagggcctgagcggcaaccatttctggatcatcgccggcaagctcggctgggtgatgggcgcggcactgctgctggcgctgccggcgatcaccgcgctgctggtggtgaacctcgccttcggcgccatgacccgcgcggcgccgcaactgaacatcttctccatcggctttccgttgaccctggtgctgggcctggtgatcctctggatcggcaccgccgacctgctcagccagtaccaggtgctggccggcgaggccctgcaattcctccgtgaactggtgcgggcgaaatag

SEQ ID NO: 331852 - DNA, 261 bp, Pseudomonas aeruginosa
gtggagatcgccaaccgtgccggcgaaagcctgagcagcgtgacccggcggatcggcgagatcgacgggatgaaccagtcggtggccaccgccaccgaggagcagaccgcggtggtcgactcgctgaacatggacatcaccgagatcaacaccctcaaccaggaaggcgtggagaacctccaggccaccctgcgcgcctgtggcgagctggaaacccaggccgggcgcctgcgccaactggtggacagcttcaagatctga

SEQ ID NO: 331853 - DNA, 339 bp, Pseudomonas aeruginosa
atgaaattcggactcttcgcctcgatcgccctcttcctcctgtcggtctgcgcacttccggcgctggccgccaatagcccctgctcgggaaagaaaggcggtatcgccggttgcgacggcgatatcttcctctgcaacgacggctccatcagcgcctcgaagcgcagttgcgcggcctacttcggcaacgccggcggaggtaccggacaacccgccgtacagcgtctgcaaggcacgacgcagggctgtgcctgtggcagcggctcgttctgcacgggcccgcgcggaggggtgtactgcctgacgccgggcggcaagaaaagctatcggagaaagtga

SEQ ID NO: 331854 - DNA, 624 bp, Pseudomonas aeruginosa
atgaaaaaatcacttgttatgtcgactgtgcttttgatggctagcaatttcgcgtgtgctgatgagggctcaaatgatggaagtgagatatgtcgggcgcagggtggagttgaaataacaagtctgggggaagtctcaaagggtgtggatgttgaagatgttgtagtttgttcgattcttccaagtaatatgaagtcgagtcaaagagcgcctacactccctcctctgcaaaggatgatcatttcggcaatgccttcaccaggaacggtcactgtttctgccagcggagataggaagttcacaacatcttgccgggcaaatctttatgctccacgttatgccaatttctatccagacggtgttagcaggggaacatcagatctacgatgtgttggttacaatacacccgggaattcatctcaagggtgtaatgtgtcatgggtcggcccgaccgacattcaattgggtgttgagccatatggcggatctgttgttgtaaactacagttgcactgcattcaaaacaacgattccagtgataatgaactacagttatcgtgatgggcgggcagtgtatggtgaggtccagaatgtgtcaggaataataaatgtggttttaaactaa

SEQ ID NO: 331855 - DNA, 981 bp, Pseudomonas aeruginosa
atgagccagatgagcttttccgactttgagtacgccggcaagcgcaagcaaacccgccgagagcgcttcctcgccgaaatggatcaggtggtgccctgggcaggcctgctggagctgatcgaaccgttctaccccaaggccggcggcggtagaaaaccctatcctttggaaaccatgctgcgcatccatctgttgcagaactggttctccctgagcgacccggccatggaagaagcgctctacgaaatcacgcccatgcgccagttcgcactcctgacgctgagcgcgccaatccccgaagacaccacgatcatgaacttccggcacttgctggagaagcatcagctcgcaccggcaatccttgcggtcatcaatggttatctgcaggaaaaaggcctgtcgctgcgccaaggcaccatcgtcgatgccaccattattcatgcccccagctcgaccaaaaataaagaaggcaagcgtgatcccgagatgcaccagaccaagaaaggcggtcagtatttcttcgggatgaaggcgcacatcggtgccgatgtcgagtccggcctggtgcatcacgtccatggcaccgctgccaatgtggccgatgtcacgcaggtggctgaactgctgcatggcgaagaaaacgccgtgtatgcagatgccggttacaccggtgtcgaaaggcgcgaagagcatgaaaatcggggggtgatctggcagattgcagcgcgtcgcagcacctattccaagctgaaccagcgcagcgtactgtacaaagccaagcgcaagatcgagttctgcaaggctcagacacgggccaaggtcgagcatccgtttcgcgtgatcaagcggcagtttggttacgtgaaagtacgttttcgtgggctgatgaaaaacacggctcagttgaccacgctgttcgccctggcaaacctgtggagggttcgaaaacagctcatgggtatgggtgaggttcgcgtttaa

SEQ ID NO: 331856 - DNA, 339 bp, Pseudomonas aeruginosa
atgctgatcaaacttcccgactttgacgacgatcttgccgagcgactgaagagccgcactggccagaacactggctccaaggctgtgctgcgtgctgctgaggagtatttgccgctgctgctgaagctggagcatcgcgatcggcagattgccgagctggaagagcggttgcgagtggcaagccaggtgatcgagggcgctcgctcggctgctgcgctgctgcttgaaaagaccgctcagggcgatctgctcgccgctccggcatcgagcaagccgcgcatgaccggtgaagagatgttgaacgaactgcaccgcagtgcgggcttgcgtcagcgttga

SEQ ID NO: 331857 - DNA, 1017 bp, Pseudomonas aeruginosa
atgtcttatcacgaactcagcgttgaagaacgctccgatatccaggtcagtctgctgcgtggcatgagccagcgcgccattgcccgaatgctcaaccgcagcccctcaacgatcagtcgcgagatccgtcgcaatcgtgatgcccggggtgagtacaccacccagcatgcccaacaagccatgcgcgatcgtcgattgccctgccggccccggcaaaagctggtgcccggcaacgaattgttcgagctggtcgcccacctgctgcgacagcgcttttctcccgagcagattgccggcaagctgcgaaccatgaaatccccaagcttcgaagacgcctacgtctgccgcgagacgatctacaacgcgatctatgccctgccggtcggcgaactgcgcaaggagctgatcatctgcctgcggcaaggcaaaacctcccgccgtccgcgttctggcggcgtagatcgccgtggccagatcccggacatggtcagcatccatgtgcgtccgccggagatcgaggatcgcgtgatgccgggacattgggagggcgacttgatcaagggcaaagccaacgcatcggccgtgggtacgctagtcgaacgcaccagcggctacctgatgctggtgaagatgcaagacgcgacggcgacctcggccgtggaaggcttcagttcggcgctgaaccatatgccgctggcggcccgcaagagcatgacctacgaccaagggcgggagatggcgcgtcacgcggaaatcacccagaagaccggggtggcaatttacttctgcgacccgcacagcccctggcagcgcggcagcaatgagaacatcaacggactgatccgccagtacctgcccaagggcacggatctgtcggtgtgcagccaagagcagttggatgcgattgcctacgagttgaacatccgaccgcgtaagcgcttcggtttcaagtgccccatcgaggtcatgaccgagctgatggccaagcatcacgaggctcccgcctcaatccagtaa

SEQ ID NO: 331858 - DNA, 906 bp, Pseudomonas aeruginosa
gtgtgccgccaggcgctccaccgtcgaccgttcgaacaggctggtcgcgtagatcagcgacgcgctcagcgcgtcaccgctttcataggtatccagggtcaggtcgaactgcgccgtcgcactcgcccgctccagcgcctccactcgcagccccggcagcttcagagccttgccctgacccgcgttctggtggttgtacatcacctggaacaatgggctgtggctcaggctccgctgcggctgcaacgcctccaccagttgctcgaacggcaggtcctgatgggcctgcgcttccagtgcggtacgtttgacctgctgcaacaagacgtcgaaacgggtctccaggttgaagtcggccttcaacacctgggtattgacgaagaagccgatcagacgctcggtctctacccgggtgcggttggcgatcggtaccccaacgcggatttccggctgcccgctgtagcgatgcaacaaggtctggaaactggccagcaacagcatgaacagggtcacgccctgctgctgcgccagctgtttcagcgagcgacccaggtcttcgcccagctccacctgcaggctgtcgccggcaggactctgtacgctcggccgcggccggtcggtcggcagttccagcaccggctgctcgccgcccagctgctgccgccagtaggccagttggcgctcacgctcgccggcttccatccagctgcgctgccacagggcatagtcggcgtactggatcggcaacggctccagttccacggcgcggccttcacggtagccggcgtagaactgcataagctcttccaccatgatcggcgtcgaccaaccatcggagacaatgtggtgcagggtcaccaccagcacctgttcctcggcggacaggcgcagcagcaggacccgtag

SEQ ID NO: 331859 - DNA, 219 bp, Pseudomonas aeruginosa
atggccgacaacttcttcgagctcggcgggcattcgttgctggcgactcaggtcacggcacgcatccatgccgagctggacatgaatgcccccctggtcttgctgttccaggccgagactttacaggcctatgcgacttcgcttgaaggctacaaacctaccgacgcagcggacttcgacgagctgcgggaattcatgagcgaactcgaggccgtctga

SEQ ID NO: 331860 - DNA, 1200 bp, Pseudomonas aeruginosa; identical to SEQ ID NO: 117479

SEQ ID NO: 331861 - DNA, 2304 bp, Pseudomonas aeruginosa; identical to SEQ ID NO: 117482

SEQ ID NO: 331862 - DNA, 894 bp, Pseudomonas aeruginosa
atgatgatgggcgaacaggtatctcagattaataaagctgcggaacttcgtcgtaaaaagctgcgcggcaatgtgggcaaggctgttgtagattatgcaatgatcgaagatggcgacaaagttatggcctgcgtaagtggtggcaaagattcattcgttatgcttgacgctttgctgcacttgcagagagttgcgcaaataaaattcagtgttgtggcggttaatcttgatcagaagcaacctggctttccggagcatatattgcctgagtttttcgaggctaaagggattgattattatataatcgacaaggatacttattccgttgtcaagagtaagatcccagaaggtaagactacttgttctctttgctctagactcagaaggggcacgctttatagttttgctgaggaaattggggctactaaattggcactcggtcatcatatggatgacatggttgaaactttgtttctgaacatgtttttccaagcgcaattgaaagggatgcctcctaagcttcttagcgatgacaagaggaatatagtcatccggccactcgcctactgtcgcgagaaagatatagcaaaggtcgctgccgatagcgcatatccaatcattccgtgtaatctctgcggatcgcaagagaatttgcagaggaaaaaaatcaagtcgatgattgcggagtgggattcggtaaatcctggctgcgtagaaaacatctttcacagcttacaaaacgtaagtccttcccagttagctgatcgcagtctcttcgattttatagatctatccattgatagatcggatgtccggccgccctacgaattcgaagcagccgaggtttcatcatccagtgttgaaggccggattgatgtcgttcggattttgtaa

SEQ ID NO: 331863 - DNA, 843 bp, Pseudomonas aeruginosa
atggcggatcgactggccggcttgctccggcactactcgctttcggcgcgcgtttttcacagcggcgccttctgtgggcagcatcattacgcggcgccgcatggctatatccatctggtgcggcgcggcccgattacggcgcgttcgcccgtgcatgaagatctgctggttaccgagccgagcctgctgttttatccgcgcgtggcgtcgcatcgttttgtcgccgcccccggcgataccgctgagctgttgtgtgcggaggtcgacctgggcgcttcgacgggcaatccgttggccatggccttgccgtcgatgctgctgattccgttggcggacttgcccggcctcgggccgacgctagagttgctgtttgccgaagccgagcgcgaccagtgcggtcggcaggccgccatcgaccgcttgtgcgagttgctactgatccagttgctgcgttatctgatggatgggcggcttggcgccaccggactgctggcgggcctggccgacccgaaactcgcgcgcgccataaccgccatgcacgatgcgccgcagaccgcgtggtcgctcgaggcgctggcggcgaaggcgggcatgtcacgcgcgcgcttcgccgccgcgttcaaggacgcggtgggcgtcacgccgggcgactatctggccgactggcggatgaacgtcagttgcaccctgctcaagcaggggcggccggtggcggtggtggccgaccgcgtcggctacggcagcccgaacgctctggcgcgcgccttccgcgtgcgcatgggctgcgccccgcgcgactggctggcgcagcagcgcggtgacgcggcgctcagcggttcgtga

SEQ ID NO: 331864 - DNA, 534 bp, Pseudomonas aeruginosa
atgacccaaatcgcccccctgaccatcgacaccgctgacgccgctaccgctgccacactcaaggccgtcaaagccaagcttggcatggtgccgaacctgttcgccacgctggcccacgcgccggcggcgctcaatggctacctcggcttgtccgaaacgctgggcaccggccgcctgaatgcctcccagcgcgagatcgttgcgctcgctgccggtcaagccaatcgctgccagtattgcctgagcgcacacaccctgatcggcaaaggtgccggactgtcggcagaggccatcgccgcggcccgcaccggccaggcggccaacgcacttgacgatgcaatcgccggctttgcccgcgcgctggtcgagcaacgcggcgtggtgtcggccgacgccatggccaactaccgccgcgcggggctcgacgacggcctgatactggaagtgatcgccaacgtcgcgctgaacacgctcaccaactacaccaaccacatcgccgacaccacggtggatttccccgtggtcgccgtctga

SEQ ID NO: 331865 - DNA, 549 bp, Pseudomonas aeruginosa
atgaaaatcgcactcaccggcgctctgctcgccagcgccctcgtcctgccactggccgtcacggccggcgacttttcgccctatgtggacagccagggcggcatcagccgccccacagacttccgcacaaacttcgtccacctgggctcatatgcggtgttggacgaaaaatccgcctctcgcggcttgcacgatgtgtacaccgaaaaggcctcggccgagcactaccgcaagaccggcaagttcttggacggcgccacgctggtgaaagagatccgcaagctcgaaaccagcgccatgaccactggcaaccctgtggtctggggttccgatgcggccgtgtggttcgtgatggtcaaggacgccaaaggccgtttcgccagcaaccccttgtggggcgacggctggggctgggcgctgttcaaggccgacgcccccgccaagaatgtcgccgtcagctacgaagccgactgcatgggctgccatgtgccggcggccaagaccgaccgcgtattcatccagggctatccgacactgacccagcactga

SEQ ID NO: 331866 - DNA, 222 bp, Pseudomonas aeruginosa
atgcagcgtttcgagcgcctgtcgctggtcatcgtgctgggcagctacgccatggactaccacctcggtactggcaagacgccgctcacccgggtggtcgaagcctggcgcgagcactggccgcaagcgttccccctgcctcaccctagcccgcgcaacaatcgctggctggtgcgcaacccctggttccaacaaggggtcgtctcagaaaacggaaaataa

SEQ ID NO: 331867 - DNA, 615 bp, Pseudomonas aeruginosa; identical to SEQ ID NO: 108024

SEQ ID NO: 331868 - DNA, 3030 bp, Pseudomonas aeruginosa
atgagcaacaagaataagctactcaccgtcttttctgacgcagagcaggaagccttgtacggcctaccggacttcgacgatgctcagcggctggaatacctggcgttggccgaatctgaactggcgttcgccagcagccggcctagcctgcaggcccaagtctattgcgtcttgcagatcggctacttcaaggccaagcatgctttcttccgcttcgattggcatgaggtcgaggacgattgcgccttcgtgctgagtcgctatttccacggcgaagcgttcgaacgcaaggcgatcaccaagcatgagcactacagccagaggggtcagatcgccgaactgttcggctaccggtcgtgggcggctagcttcctgccgcaactggcacagcaggctgaacagatcgtgcggcgcgacgtaatgccaggattcgtggccgccgaactgatcgtttggctcagcgagcacaaaatcatccggcccggccacaccaccttacaagagctggtcagtgaagccctgtccaccgaacgcaggcgcttgggcggcttgctggcagaagtgttggacgaatcggccaaagctgcgctgggccagctcctggtgcgtgacgacaccctgtctcaactggcagcgctcaagcaggacgctaaagatttcggctggcgtcagatggcaggggagcgcgagaagcgcgccacgctgaagtccttgcacgggatcgccaaggcgctgctgcccaagctcggcatctcgcagcagaacctgctgtactacgcgagcctggcgaacttctataccgtccatgacctgcgccacctgaaggcggagcagacccggctctacctgctgtgctatgcctgggtacgttaccggcagctcaccgacaacctggtcgacgcgatggccttccacatgaaaaaacttgaggacgagagccgcacgggtgcgaaacagtcctttgtcgccgaacagctgcgacgccatcaggaaacgccgcaggttggccgcctgctgtcgctgtacgtggacgacagcgtggccgatccgacgccgttcggcgaggtgcgccaacgcgcctacaaaatcatgtccagggaattgctgcaaaacacggcgcagcgcatgagcgtcaagccactgaacaaactggcgctgcactggcaggcggtggacggcctggccgaacgcattcgacgccatctacggccgctgtacgtcgcgctcgacttcgccggcacggcccccgataacccatggctcgcggcgctgacttgggccaagagcgtgttcgccaagcagcagcgcctatcacaacggccactcgacgaatgtccggcggcaacgctgccgaaacgcttgcgtccgtacctgctgatgttcgatgccgaaggcacgccgacaggcctgcatgccgatcgttacgaattctggctttaccgtcaggtcaggaaacgcttccaggcgggcgagctctacattgacgatagcttgcagcaccggcatttgtccgacgagttggtttcgatggacgagaaagccgccgtgctcgcgcagatggacatccccttcctgcggcagccggtcagtgcccagctcgatgcactggcgaccgagttgcgtgcgcaatgggtggcgttcaatcgcgagctgaaacagggcaagctgacgcacctggaatacgacaaggacacgcagagactgacctggcgcaagcccaagggggagaaccagaaggcgcgcgagcaagctctctacgagcaactgccatactgcgatgtcgccgacgtgtttcgcttcgtcaacggccagtgccagttcctgtcggcgctgacaccattgcagccacgctatgcgaagaaggtagccgacgccgacagtctgatggcggtgatcattgcccaagccatgaaccacggcaaccaggttatggcacgtaccagcgacatcccgtaccacgtcctggagagtacctaccagcagtacctgcgccaggcgacgctacatgtggccaacgattgcatcagcaacgccatcgccgcactgccgatcttcccgcattactcgttcgacctcgattcgttgtacggtgccgttgatgggcagaaattcggcgtcgagcgaccaactgtgaaggcgcgctactcgcgcaaatatttcggccgcggcaagggcgtcgtcgcctacacgctgctgtgcaatcacgtgccgttgaacggctacctgataggcgcacacgagtacgaggctcaccacgtgttcgacatctggtaccgcaacacgtcggacatcgtgccgagcgcgatcaccggcgacatgcacagcatcaacaaggccaacttcgccatcctgcactggttcggacttcgtttcgagccgcgcttcaccgacctcgacgaccagttgcaggagctgtattgcgccgatgatctggcattgtacgagaaatgcctgatccggccggctggccagatcgaccggcaactcatcgtcggtgagaaggcgaacatcgaccgaatcgtcgccacactgggcctgaaggaaatgacgcagggcacgctgatccgcaagctgtgcacctatacggcgccgaacccgacgcggcgcgcaatcttcgagttcgacaagctcatccgcagtatctacacactgcgctacctgcgcgacccgcaattggagcgtaatgttcaccgctcgcagaaccgcattgagtcctatcaccagctacgctcgaccatcgcccaagtcggtgggaagaaggaattgaccggccgcaccgacatcgaaatcgagatcagcaaccagtgcgccaggctgatcggcaacgcgatcatcttctacaactcggcgatcctgtccctgctgctgacgaagtacgaggcagctggcaatgccaaggcgctggcgttgatcacgcagatgtcgccagcggcctggcggcacatcctgctgaacgggcattacaccttccagactgacggcaagttcatcgacctggatgcgctcgtggcgggactggagctgggctga

SEQ ID NO: 331869 - DNA, 603 bp, Pseudomonas aeruginosa; identical to SEQ ID NO: 239729

SEQ ID NO: 331870 - DNA, 378 bp, Pseudomonas aeruginosa
atgacaaacaaagaaaaaccgctcgaatggatcgcgagcagccacaaggatttgatggcgttgccgtccgacgtgcgtcgccgtttcggttacgcgctctcgttggcgcagataggcgatcaggatgacgcagcaaaggtgctcaaggggttcggtggtgccggcgtgctggaggtcgtcgaagacgatgccggcggcacctatcgagcggtatacacggtcaagtttgcggaagcggtgttcgtcctgcactgcttccagaagaagagcaagagcggaatcgccacgccaaaggccgacatggacatcatccgcgctcggctgaaggtggccgaggtattggcacaggagctacgaaatgcaaaaacgaatcattga

SEQ ID NO: 331871 - DNA, 336 bp, Pseudomonas aeruginosa; identical to SEQ ID NO: 239731

SEQ ID NO: 331872 - DNA, 327 bp, Pseudomonas aeruginosa; identical to SEQ ID NO: 239733

SEQ ID NO: 331873 - DNA, 381 bp, Pseudomonas aeruginosa; identical to SEQ ID NO: 239734

SEQ ID NO: 331874 - DNA, 915 bp, Pseudomonas aeruginosa
atgtgttatgcacggaaactctgtcttgcggccaagtcccaagtcatggacatgttccaggaagcccggcttggcaaggccgtcgacccaagcacgacgttgccgctggtcggagaaatcgctgcctcggtgctgcgccaacctcatgccctcatcagcgtcgcacgcatcaaaacgcacgacgattacacctacctgcactcggttgccgtctgcgccctgatgctatcgctggcccggcatctcgatctagacgaggagcaaacgcgcctggctggcatcggcggactgatgcacgacctaggcaaggccgcgatgccgctggaagtgcttaacaaaccaggcaagctcaccgatgccgagttcgccatcatgaagcgccaccctgtggagggcgcaaagatgctgcgcgcaggcggggccgagcccggggtggtggacattgccctgcaccatcacgagaagatcgacggaaccggctacccggatcgcttggccggtgacgccatttcactcctggcccgcatgggcgcaatctgcgacgtctatgatgccgtgacgtcggagcgagcctacaaaaagccgtgggacccgtccgcggcgatgcggcagatggccaagtgggagggccatttcgacaaacgcatcttccacgccttcgtcaaggccgtgggcatctaccccgtcggctccttggttcgcctgtcctctcagcgtctggccgttgtcgttgagccgggaatggaatcactgctgactcccaaggttcgcgtgttcttctcgctacgctcgagagagccgatcccgatgcagaccatcgacctggcggccacgagttgcaaggacagtatcactggccccgaagacccgacgctctggaacttcaagaacctcgacgacttgtggatggaatag

SEQ ID NO: 331875 - DNA, 240 bp, Pseudomonas aeruginosa
atgaacaccactcgctggaacgtcgccgtctctaccgacaccgaccaatcgcttcgcatgtttctggccagccaaggcggtggccgtaagggcgacctgtcgcgcttcatcgaagaggcggtgcgggcacacatcctggaactgagcgctgaacaggccaaggctttcaacgtccatctaagtgaggcagagctgaccgacgcggttgatgaagcgctcgactgggcacgtaaacgctga

SEQ ID NO: 331876 - DNA, 411 bp, Pseudomonas aeruginosa
atgcgggttgtattggataccaacattctattcagcgcgctgatctcaccgcatggggcccctgatgtgatctatcgggcctggcgttcggctcgcttcgaggtagtaacctcacgggcacagctcgatgagattcggcgcgctagtcgataccccaagcttcaggccatcctgcagcctgccaaagtcggagccatgatcaacaacctgcaacgcgcagtagtattggagcgcttggtcatcgaggttgaagccgatgatccggatgattcatttctgctggccatggccttggcgggcaatgcggactatctggtgaccggtgatcgccgcgccggcctcttgcagcgcgggcatatcgaacgcacgcggattgtcacccccgcggtgttctgcgccgaggtactgtga

SEQ ID NO: 331877 - DNA, 2157 bp, Pseudomonas aeruginosa
atgccggtcggctttctgacccaggagcagcgcgacggctttggtcgctacatcgaggcacccagccgtgatgaactggagcgctacttccacctgagcgatgaagaccgtgaagccgtccaggtactacgcggcaaccataaccgcctgggctatgccgttctgctgactaccgttcgcttcgtgggtgttttgccggacaagcccgttgctgtgccggtggaagtcctgcatgtactttgtcggcaattggcaatcgccgaccctgactgtcttgcgcgttacagcgatcatcgtcgctggatacatacggccgatattcaagagcgctatggctatcgccactttacagaccctggcatcggctttcgtttgagccgctggctgtatgccctctgctggacaggcacagatcggcctggtgtgctgtttgaacgagccgcctcatggctgttcacacagaaagtcctattgcctggggtttcccagttagagcgtttcattgcccaactgcgtagccgcgttgaagaacgcctctggtacaccttaggccgcagcgtgaccgaggaacagagacaacacctacaagacttgcttctggtggctgaaggcaaccgcagttcccggctggatcaactacgctccggcccggtgatggtcagtggccctgctctgattcgggcgctgcgtcggctggatgatgtgcgtgggttgggtatcgccttgccgccggctgcacatatcccgcccagccgtattgcagccctggcccgcttttccaacacggccaaggtcacggccatcaatcgactgccggcgtcgcgccggttggcgacgctggtggcgttcgcggtttcccttgaagccagtgcgcacgacgatgcgctggaagttctggaggcgctactacgtgatattttcaacaatgcggagaaggctgacaagaaagcccggttgcgtagcctaaaagacctggatcgctcggcggcaacactcgctgctgcgtgcaaggtcgtgctggatagctcgatcagcgatgacaacgtccgttcccagctgttcaacgacctgccacgtgtcaggctggagaaagccctggaagaggtcactgcgttgatccgtccggccaacgatgtattttacctcgccctggaggagcgctaccgcagtgtgcgccgcttccttcccgatcttctgaaacatattcgcttcggcttcagtcccgccggcaagggggtggcggctagtctggactggttgcaactgaatctacctcgcaggaagcccgaggatgacgcgccgcaggagattgttgccaaggcctggcagaaccacatcacccgcgaagatggctccctcgacatgggcgcctatgtcttctgcacgctcgatgcactacgcacggccctacgccgccgcgatgtctttgttgcacccagttggcgctatgccgacccgcgtatcggtctgctcgatggcgcagaatggctgtcggcgcgaccgatcatctgccgctcactgggcttgaccatcgacgccaaaaccactttggacgctttgtctgctgagctggattcaacgtggcaggcggttgccgcccgacttcccgacaacccggccatccagctaagtgagagcgcagagggtaaaaccgagctgtccctcggggcgctggacaagttggaggagccaaactcgctattgcaactgcgtgcagcagtggccgacttgatgccgcgtgtcgatctgccggaaatcctattggaaatcgcggcccgtaccggcttcgctgaggccttcacccatgtatccgaacgcaatacgcgggccgacaacctggtgacaagtctgtgcgccgtgctgctgggaggcgcctgtaacaccggcctggagccattgatccgcaacgataaccaagcgctgcgccgtgatcggctgtcgtgggtcagccagaactatctccgtgacgacaccctgtcagcagccaacgccattctggtgtcggcgcaaagccaactggagctggctcagatctggggcggcggcgaagtggcctccgccgatggcatgcgtttcgtcgtaccagtgcgcaccgtgcatgctgggcccaacccgaaatacttcggtaccggccgggcgtcacctggtacaacctga

SEQ ID NO: 331878 - DNA, 789 bp, Pseudomonas aeruginosa
ttgcgcgacagcctggtactgcttgcggttgtgctggaacaacagaccgaattgcagcccacacaaatcatgaccgataccggtgcctacagcgatgtggtgttcgggttgttccgtttgctcggttatcacttctgcccgcgcttggccgatgtcggcggcacccgcttctggcgcacacgcccagaagcggattacggcaagctcaacggactcgcccggcagtcggtcaagctcgacctgatcgcggaacactgggatgacctactacgcctagctggttcactcaagctcggtcgagtgccggcgaccggcatcatgcgcacgctgcaaacgggagatcgtccgacccgcctggcccaagcgctggcagagtttgggcggatcgagaaaaccctgcacacactgacctacatcgatgatgagtccaagcgccgcgccaccctgacccaactgaaccgaggcgaaggtcggcacagcctggcccgtgccgtgttccatggcaaacgcggcgagcttcgccagcgctatcgcgaaggtcaagaggatcaactcggtgctttgggcctggtggtgaacatcatcgtgctgtggaacaccctctacatgacggcagctgtggaacggctaaagcagcacggctacccggtgcaggaagaggatctggttcggctgtcgccgctgatcttcgagcatatcaatatgttgggacggtactccttcgcggtaccggaagaagtcgcccgaggtgagctacggccactgcgtaatccagaggaagacctgtag

SEQ ID NO: 331879 - DNA, 738 bp, Pseudomonas aeruginosa
atgagccaatctgacccgcaacacccatcccgccgcatgctgctcaagcgcggagctgccctttccacattggcgattactggagtggccgggttaactgtgccttcagtgtcttttgccgcagcgcttagcaaagaagagcgagataaaatgacgccggatgaggtcattgaaagcctgaaatctggcaatctgcgtttccgtgaaggcaaaatgcagcagcatgactatttggcgcaaaagcgcgccagtcaaaaggggcagtatccgtcagcggtaattttaagctgtattgattcgcgcgctccggcggaaatcctgctggatgccggtattggtgaaacgtttaactgccgtgtggctggcaatgtggaaaacgaagacattctcggcagcatggaatttgcctgtgctctggcaggggccaaggtaatagtggtgatggggcatacctcctgtggtgcggtgaagggtgccattgccaacgccgaactgggaaacctgactggattgctgagcaaaattaaaccggcaattactgaaacggcatacgcaggtgagcgtacggctgacaactatgactttgtcgattccgttgcccgcaccaacatcaagatgacgctggccgatatccgtcaacacagccccaccctgaataagctcgagcaggatgggaaaataaaaattgtaggcgctatctataagcttgtgggtggagaggttgagttctttacctga

SEQ ID NO: 331880 - DNA, 1257 bp, Pseudomonas aeruginosa
ttgctgaagttgccgatggcggggctggcctcgtgcgggcagcatgggcgcatgcatgacatggacgcgctccagagccaggacctgaggggcctgacgccacaggccctggaggccctggcgcagcgcatgctggtgcatgtccagcagcaggcgcgcgagattgcccggcgcgatggcgagatcgtgtggcgggacgcgaagatcgagaagatcacgttcgagctggcgcggctcaagcgctggaagttcggcgcgcgcaccgaggcgatggatgcgcagcagcgacagctcttcctggagacgctggtcgaggacgaggcggacctgcaggcgcagctcgccgagttgcaggcccggcagtcgccgccgccagtcactcccgagaaggcgccccagccgccgcgccggcaggcgctgcccgagcacctgcgccgggtggagcatcaccacgagccggccgacacccactgcccggcggtggactgcggcgagccgatgacccgggtgggcgaggacgtcagcgagcgactggacatcgtgccggcggagttcttcgtgcaccggcacatccggggcaagtgggtctgccggtgctgccagcgccagggcgtcgatcgcctggtgcaggagcccgccgagccgcagatcattgagcggggcatcccggcgagcggactggtggcgtacacgctcatcagccggttcgccgaccatgtgccgtactaccggcaggaggcgatcaatgcccgctcgggcgtgcacaccccgcgctcgacgctggccgcgtgggccggtcaggcgggcgcggcgctgcacccgctgtacgaggcgctcaagcgcttcgtgctgggcagcgcggtcgtgcaggccgacgagacgacggtggacatgctggacccgggtgcaggcaagaccaggaaagcgtacgtctgggcctatgcacgcggggaattcgatccccggcccggcgtggtctacgacttctgtccggggcggggcagcaagtacccgctggccttcctgggcgggctgcccagtccacccggcagccaggccgaccggcccgccgagagccgggatccgccctggagcggcacgctcgtgtgcgaccgctacggcggctatgactcggtgctcgaccccaaggtcttcccgcagcgtgtctcggcggcctgtgcggcgcacgcccgacgcaagttcgacgaactcgccaagtcggggtttggggagcaatggaaccaaaaaccaacgtaa

SEQ ID NO: 331881 - DNA, 339 bp, Pseudomonas aeruginosa
gtgatccgcatcgacgcgctgtgggcgtgcacggcgccagtggacatgcgagccggggcggaccggctgctggcgtgtgtggtgcagacgctgggggcggcgcaggcccaccacggctacctgttcgcgaatgcgcgtgccacacgcgtgaagctgatcgtccatgacggctggggggtgtggtgcgcagcccggcgactcaacgcggggcacttcgtgtggccgcgggggttggagtcgagcaccccgctggccctgacgcaggagcaattcgatgcgctgatcgtggggctgccgtggcagcgactgcacgagcggcgggtgatcacccgggtgtga

SEQ ID NO: 331882 - DNA, 213 bp, Pseudomonas aeruginosa
atgcgcatcattgccttcatcacccacagcgccgaaatccgccacatcctgaaccacatcggggtggagtctgcccccccgcacatcaccccggcacgcgggccaccgctgtgggagggctgcgacgcgccggtggatgatggtgcgcaaggcgagccggattgggatctggcagctcaacccgacgaggtagaccagcgcgtcaattggtga

SEQ ID NO: 331883 - DNA, 1155 bp, Pseudomonas aeruginosa
atgaccgattcccagcaatgcatcaccctgtggggcacgccgcactccctgtataccggcaagattcgctcgtatctgatcaagaaaggcatcagcttccgcgagcgcatgccggctgagccggcgtttcagcagcgagtcgtaccggtggttggtgccgtggtagtacccattctggagctggccgatggcaccatcgtgcaggataccagcgacatgatcgaccatctggagcaagcctttcccgcacgcccgatgctgccgacctcgccggttcagcgggtaaccgcactgctgctggacggctttggttccgagggcctgctggccgccgccatgcactatcgctggtcctaccgcgccgagcaggaacaattcctgcgcgccgaattcggccgcagcgtgcacgccggcaacaaccgtgatgagcgtctggctgcaggcgcgcagatgatgagctacttcaattcctttctgcctttcctcggtgtgactccgcaaagcatcccggcacatgaggccgcctatgaggcgctgctggatgcgctggacattcactttctcagccatccgtacctgctcggtggtcacccgagcattgccgacttcggctttatggccccgctgtttgctcacctcggccgcgacccctacccgtccgcgctgatgaaaaatcgtgcaccgaatgtcttccgctggaccgaacgcatgaaccttgccggtatcggcgatgtcgagtttcccgaccgtgctgaagcctggctgcccgacgatgcgcttccggccaccctggagccggttctggcgctgctgttcaaggactggggcactctgctggcggcggatgccggggcattcaatgcctggagccagggactgcctgcaggcactccgacgcatatagcccaggagcgcaagattcatcccaccgtcggcatggtcgagtatcagtggcgtggctgcaaaatccagcgcgccagtgcgccacacggtctgtggctattcgccaaagcccaggcagcggccaacggtctgtccggtgcggcgcagcagcgtgtagccgaactgctcaagcgtaccggcggtgagccggtcatggccttgcagctggcccggcagatgaagcgggagaactacaacctcgtcctgcaatag

SEQ ID NO: 331884 - DNA, 549 bp, Pseudomonas aeruginosa
atgctggactgccagctcgaaaccaagatcgtttccactgtgcccggcatgactacctgctacacaactcgggacatttactcgaccaatggccgcgttgtgctgctggatcgtggctccaaggtcgtcggccagtaccagggcggcatgactcagggccaggcgcgaatcttcgtcctgtggacgcgggttgaaacgcctaccggcgtcgttatcaacctcgattcgccaggcgctggcccacttggcgaaggcggtctaggtggctgggtggatacccatttctggaagcgtttcggcggggcaatcatgttgagcatgattggcgatgtgggcgacttcctgtctaacaaggcgtcgcagggcgattcagaccggatcaccttcgataacacttcggatagtagccaggatatggccgctaccgcgctcgaaaacactattaacatcccgccgaccctgtacaagaaccagggcgagcggttgcaaatcttcgtcgcacgcgaccttgatttcagcggagtatataaccttgaacgcagcaactag

SEQ ID NO: 331885 - DNA, 1002 bp, Pseudomonas aeruginosa
atgcggcctatcgtgccgcacctggagcgtggtgatgtggtcgaggtcactatcaatcgccccggcgagctgtgggcaaaaacctttcaaggctgggaacctgtcaaggttcccgagctgaccatgccctacctcaagagcctggcgaacgctatcgccgtgttcaacggcatttccctggccagcatcacgtctgtggtgctgccaggcgggcaacgcggccagattgtcctgccgcctgcctgcatcgacgacacgctgtcgctttccatccgaaagcattcgctggtggtcaagacgctcgatgagctggacgccgagggtgctttcgagtccttcgatgacgtgagtttcaacaagccaacggctgccgaggcggcagccctggtgctgaagcgcgacttcactcgcctgacgcctgccgaggccgagctgttggccttgaagcgcgaaggtcgcatgcgtgacttcctcgacctgtgcgtccagtcgcaccgaaacatcatcattgcgggcaagactggatcgggcaaaaccacgttcgccaggtcgctgattgagcgcgtgcccaacagtgagcgcctagtcaccatcgaggacgttcacgaactgttcctggagaatcacccgaaccgcgttcacatgatttatgggtacggcaagggccgcgtctctgcggtcgaagcgctgcgttcctgcatgcgtcagtcgccggatcgaatctttctggctgagctgcgcggcgatgaagcatgggagtacctgggcagcctcaacacggcgcaccctggttcgatcaccactacgcacgcgaacaacgctatccagaccttccagcgtgtcggcaccttgatcaaacagtctgaggtcgggcgcgtgctcgatctggatatgatcaaccggacgctcttcagcacgattgacgtggtgctgtacttctccgaccggaagctctgcgaagtgttctatgaccccgtgtttgccaaagagcaaatgcgctga

SEQ ID NO: 331886 - DNA, 300 bp, Pseudomonas aeruginosa
atgaataacccagctctcgacgcaaaccaggttcgtgcgctgcacgttcttggtcagaccctggcgcagattcgctctctcgcccgtgcccaaggctccccagccgaccgcttgaacgccataggcgcgcttgccgacgctatgcacaacgtccctatgacggtcgcccatcccgaccgctacgacgcttccgagattggcagcgccatcagcgccgttgctgccattcatcgcaagcaaggcgcagccgctgctgccgcctctctcgctgccagcgggcatctggagtcgaatctatga

SEQ ID NO: 331887 - DNA, 789 bp, Pseudomonas aeruginosa
atgaccttcaacattcgtcccggtaaatttctcgcctgcgccccgttgctggccgcgttactgatggcccccggcatgggcaacgccgccgaagacccgtatgctgacccggtcaagccggcgctcccggcttccactttcgagtgggattccagtcgcaccgctttggtggtgatcgacccgcagatcgacttcatgagtaaagacggtgccggctgggcggtcttcggtgagagcgtcaccgagcaaaaactggtgccgcacctgaaccaactgttcaaagcgttcaagcaggccggagcaaccgtagccatctcaccccactactactatccccacgatcacaaatgggagtttgaggcgccagcagagtccgtgcagcacaagctcgggctgttcgatcgcaaaggtgccttgacgctcgatgggttccgtaactcgggggccgatttcatgcaggagttcaagcccttcatcgaagacggcaagaccatcatcgcctcaccacacaagttgtacggaccgcaaagcaacgacctgatgctgcaattgcgcaaacagcgcatcgacaaaatcgtcctggccggcatggcctccaacctgtgcgttgagtcgcaccttcgtgagttcctcgaacggggttttgaagtcatcgtcgtgcgtgatgcggtggccggaccgaagctgcctgatggcgacggatacggtagcgcgttggtcaacttccgctatatcgccaacggtgtgatgactaccgacgaagtggtgaaaaaactcgaagggcggtaa

SEQ ID NO: 331888 - DNA, 831 bp, Pseudomonas aeruginosa
ttgatcgaagcgtcgagtgggctgcagattgcaactgaagcgatacaggctgtcgagcgcttcgatacgctcatcattgtcggcgcgccaaccgcgccgatcgatgacaggatgccctcattggccgcgatcatacggcagatatccgcgaactcacgtcgcacggcgagtgtgtgtacgggcgcctttttgcttgccgagagcggtttgctcgatggccgcgtggccaccacccactggaactatgcgccgcagttgcaagcgcgatacccgttgctgcaggtcaatggagacagaatctggaccgaagacggcaatgtctggacgtccgcgggcatgtcggcgggtatcgatatgaccctggccatgattgagcaagacctgggcaaggaagtgtcgcggtccgtcgcgcgcatgctggtggtttattatcagcggccaggggggcagtaccagttttcttcgttgctggattttgacccgggctcggaccgaatccgtgcggtgctcacgtatgcgcgcgatcacctgcatgaagatttgcccgttgaacgtctggccgacgttgccaatatgagcgtgcgccagtttggccgcgtgtttgcggcggctatcggcgtgacgccctccaaagcggtcgaacgtctacgtattgagtcggcacggccgttggttgaggacagcaaccagacgttcgaggggatagccaggcgctgcggattcggcgatgccgatcacatgcttcgcagtttcatgcgtgtggtcggacgcacgccacaagagctgcggcgcagtagccgacaggcaaaactcgatggttccagggtatga

SEQ ID NO: 331889 - DNA, 678 bp, Pseudomonas aeruginosa
atgttcaataccaagcttccgaccctcaacgaactcccctcgacagcacagctactgcgctccacgatcatcgcggcaatcattgcctgcgtgcttctggttaccgtggtgatgccttcggagtatgcgatcgatcccactggcgtgggccgagcactgggtctcacacagatgggtgaggtgaagatccagctggctgaagaggcccgcgccgatgaggccgcagctcagacgccaactccgctgccagctgaaaatatcgccgcagcacctgcagcccctgccactaccccggccactcctgccgaggtcattcccgctccggagcaaccggctgcgcctgagcaggctgccctgcagcatgaaatgagcatcaccttgagcccgaaccagggcgccgaagtgaagctggaaatgaagcaaggtgccaaggtgaactacagctggactgccaatggcggcgtcgttaactacgatacccacggcgatccttacaacgcgccgcgcgacttctatcacggctacgggaagggacgctcaacgccagaagatacaggtgttctggaggccgcattcgatggcaagcacggttggttctggcgtaatcgcactagcaaaccggtgaccgtcaccctgcgaactcagggcgactacatcagcatcaaacgcgtgatctga

SEQ ID NO: 331890 - DNA, 738 bp, Pseudomonas aeruginosa
atgaattcgcttcccctaagcagggcaacggcgctgatcgcacgcctgcgtcgatcactctttctgcccttgcttaccctcgctctactgatggcagtcatgcctgaggcgctggcccacggagttcccgaaggagacaagggcttcatccaggaaagtaccggcgtgatgttggtgcccttcatctacatgggtgccaaacacatgatcaccggctacgaccatctgctgttcctgttcggcgtgatcttctttctctaccgtctgaaggacgtagggctgtacgtcacgctgttcgcagttggccattcgatcactctgctctttggagtgcttagcaacatcagcatcagctcgtatgtgatcgacgcgatcatcggcttttcggtcgtgtacaaggccctggataacctcggcgccttccagcgctggtttgggtaccagcccgatacccgcgcagcaacgctgatcttcggcctgcttcatggtttcggtctggccaccaagatccaggagttcgagatttctcctgatggcctgatcgccaacctgattgccttcaacgtaggtgtcgagatcggccagctactggcccttggcggcattctcattctgatgggctactggcgacgtactgccagcttctggcgccatgcctacaccgccaacgttgccatgatgagcgccggcttcttgctcatgggctaccagatcaccggcctgatcgtctctcagtaa

SEQ ID NO: 331891 - DNA, 294 bp, Pseudomonas aeruginosa
atgagcgatcacgaacacagccatggccaccgacaccaaagccacagcgatgtcatgaagcgcctgaaacgcgccgagggccatctgcgcagcatcatcaccatgatcgaggatggccgtgagtgcgtggatatcgcgcagcagctgcatgccgtggagaaggccgtatgccaggccaagcgcactctgattcaagatcacatcgatcactgcctggagcacacgatggacgccctcgctactggcgagcgcacctcccttgaagacttcaagcagatcacgaagtacctgtag

SEQ ID NO: 331892 - DNA, 1122 bp, Pseudomonas aeruginosa
atgtcgagctttgccgaattgctgcagcagggtgcgtctcacgcctggctgtacttccccagcgccatcctcctaggggcattgcatggcctggagccaggccactcgaagaccatgatggcggccttcatcgtagccatccgcggcaccgtgaagcaggcggtattgctggggctggcggcaaccatttcgcacaccgcggtggtctggctggtggccatgggcggcatgtatctgggccagaacctgaatgctgaaacgactgaaccctatttccagctcgcgtccgccgcgatcatcatcaccatcgcgctctggatgctgtggcgaacctggcgtggcgaacagatgtggcgtttcgaagaaggtgatcatgcgcatgatcaccaccatgacgagcttcgccgaatcgataccggacacgggcgaatcgaactctcgatcttcgaggaaggggttcccccgcgctggcgtctgcgcactctgactggtcactcttggccagcagaagacgtgaatctgtcgacgacgcgtcctgatgggacagctcagctgttccgctttgtgcatcgcggcgaatacctggaatcggtcgcggaaattccagagcctcatcagttcaccgcgcgtctgagccttggccacgcgggccattcgcacgactatgacctcgatttccatgagcacgaccacggccacgaccattccgatctgcagggcctggagctgtcgctggagggataccaggatgcccatgagcgagcccacgccaacgacatccgcaaccgcttcaataaccgcaacgtcactacaggccagatcatcctgttcggccttaccggaggactgatcccctgtcctgccgcgattacggtgctgttgctatgcctgcaggtgaaggaagtcgcactcggggctgttctggtgctgtgctttagtgtcggcctggcgttgacgctggtatccgtcggcgtagctgctgcggtgggcgctcgccaggcctccaaccggtggccatggctgggagcggtcgcgcgtcgcgcgccctacctctcgagcatgctcattattggggtcggtatctacgtcggtgttcatggctggatcggtctgaccgcctaa

SEQ ID NO: 331893 - DNA, 441 bp, Pseudomonas aeruginosa
atgtgggagctatcaggctacctgggcctactcctcgcggccttcagtgccgcgactttgatccctgcacagtccgaggcagtgctcaccggcctgctgataagtggcaactactcggtggtcatgctgttggtggtggctacggcaggaaacgttctgggttccgcgctcaactggctgctcggtctctacattgagcgctatcggcacagacgctggttcccggtcagtgacgacaagctggcccgcgcgcagcgggcctaccaccgctacggccgttggtcactgctgctgagctgggtaccgatcattggcgacccgctgaccctgattgccggtgtcatgcgcgaacccttctggagcttctttttgatcgtgctgctggccaaggcggctcgatacctggtgctcaccgtggtgaccctcgggatcatggggtaa

SEQ ID NO: 331894 - DNA, 702 bp, Pseudomonas aeruginosa
atgcgctcgaccagcctggatctcgtcaaatggctcgccatgctgacaatggtcatagaccacctgcgctatctctggcccgaagcaacagcatggcttttcgtggttggacgcttcgcctttccgctgttctgccttggcatcgccgccaatgtgtcgcgttcccacccaggagatctgtacagcgaaaataactttcgctacttgagttggattctggccttcagcctcatatccgagatgccgtatcgggcgctgtccgagatgagcaatacgctgaatgtgatgccgacactgatgttggggctcatagttgcttggagcgtccatcacagcgatcgtacaggcttggtgctggggctattcacgctgaccgtttcgatagtgctgcatgatcggctgatgtacggcgcgtttggcgtcctgctgccggcgaccatggtgctggcagtgcagcgcccctggattacctggctcatacctgcagtcttcagcgtgttggccaatagccgtgacggctggatcggagctggtccctttggcacctggtgggccatggccacgacctttgcggctccgctggttggcctgtggctattgcggcagaaaatcacccaacacatatggccagtggggcgctggggttactacttctaccccggccatctagcggtgctggcgttgcttcgtgtggctctctga

SEQ ID NO: 331895 - DNA, 135 bp, Pseudomonas aeruginosa
atgaagaagctttctgccgccctgatcgccaccgtgattgccctgtcctccgccgctgccattgcccatagcggcggtaccgactcgaagggctgccataccaaccactccacaggggcgtaccactgccattga

SEQ ID NO: 331896 - DNA, 324 bp, Pseudomonas aeruginosa
atggagcgcatatcgattcgcgagctcgctgagtggcaggctgcaggtcgcagctttgagctgctcgatgtgcgccgagccatcgtgcgcaacgccgacggggcacagatcgccaacgcgaaatggcaggaccccgaactgcttttttcctggaaggatcaggtgccacgggatcgccccgtgattctttactgcgcgcatgggcatgaaatcagccaagggtgtgccgctactctctgggcgatgggactggatgcgcggtatctcgtcgacggctttgcagggtggcgtgaagccaagcagccggtgtgcgatttggtctag

SEQ ID NO: 331897 - DNA, 1362 bp, Pseudomonas aeruginosa
atgagtgagacagctatgcaagcgactgagcaagaccagggcagggtagagaaagttggcctattcgaggcatttctgttctggctgaaactcggtttcatcagcttcggtggcccggctgggcagatctcgatcatgcaccaggaactggtggagaggcggcgctggatctcggagcgccgctttctgcatgcattgaactactgcatgctcctgccaggcccggaggctcagcagttggctacctatattggctggctcatgcatcgcacctggggtggggtgatcgccggcgcactgttcgtgctgccctcactgttcatcctgattgccctgtcctgggtctacatcgctttcggcgaagtgcctgtggtggcgggattgttctacggcatcaagcccgccgtcaccgccatcgttgtgcaggctgcccaccgtatcggttcacgcgcgctgaagaacaactggctttgggctatcgctgcagcctcctttgtggcgatctttgcgctcaatatccctttccccttgatcgttctgggggccgctcttatcggctatctgggcgggcggtatgcacctgacaagttcagcgtcggtggtgggcatggggcatccaaacagtcctatgggccggcgttgatcgacgacgacacgccaccgccggcgcatgcgcgcttccgctggtcgcacctagctctgctggttggagtaggcgccgtgctgtgggccttgcctatggggctgctgaccgtcctgtatggttgggagggcaccctgacccagatggggtggttctttaccaaggccgctctactcaccttcggcggcgcttatgcagtactgccgtatgtctatcagggcgcggtaggccattacggctggctgacacccccccagatgatcgatggcctggcattgggcgagaccaccccggggccgctgatcatggtggtggcgttcgtggggttcgttggcgcctatgtgcaccaggtcttcgggccagagcaggcattccttgccggtgccgtggcggccagcctcgtaacctggtttaccttcctgccctcgttcctgttcatcctcgccggcgggccgctggtggagtccacgcacaacgagctgaagttcaccgctccgttgaccggcattactgccgcggtggtaggcgtcatcctcaacctcgcgctgttcttcggttatcacgtgctgtggcctgagggctttgcaggcagcttcgactggccctcggcgttgatcgctgtcggtgccgcggtggcgctgttccgcttcaagcgtggagtcatccaagtgttggtgggatgtgctcttgtgggattggctatccacctgctgcgttag

SEQ ID NO: 331898 - DNA, 921 bp, Pseudomonas aeruginosa
atggcactgcctacggcaaatgccgccgagcgaatgcgcgcttggcgcacgttgaaaagcgctggggctgcggtgctacgcgatggggtttatctcctgccagatggctcggctagtcgtgaggtactggagtccgtcgagcgtgacgtgctggatagcggtggctcggcgtcgctcctgccggtcactgatccccagggtgagcgcttcatacctctctttgatcgtggcgacgactacgccaggttgcgctcggaggttgagccccaactggcccagctgactcctgagaatgcactggcgactgctcgccaggcccgcaagttgcgcaagtcgttcgctcagatccagtcgatcgacttctttccgggcgaacctttgcaacagacagacgcgctgctgcgtgatctcgaagtggccatcaaccgggcgctttccaaggatgagcccaccagccatgagcaagccatcgagcagctcgatccgcgggactacgaagggcgaacctgggcgactcgccagcgcccctgggtagaccgcctggccagcgcctggctgatccgccgcttcatcgatccaggtgccagcatcctctggcttccctctcctgatgcatgtcctgcggaagcacttgggttcgattttgatggtgcccggttcagccatgtcggcaacaaggtcaccttcgagacccttatggctagcttcgggctggaggctccagggctgcagcgcttaggggcactggttcattacctggatgtggggggcgcgcaacccacagaagcgacaggtgtagagcgcgtactggctggactgcgagccagcatcgagaacgacgatcagttattggctgcggcctgcgccatcttcgatgggttgctggctgcattcagcaaggaaggacagagtgatgagtga

SEQ ID NO: 331899 - DNA, 621 bp, Pseudomonas aeruginosa
atgaacatcatcgctacctgcagccgccagccctggaacaaaggaaaactggtcggacagaaaaccccactccgactgagagatatctgggccatccgagtaaggcttcaaattgcagaaagaactcgggatctggctctcttcgacctggccatcgacagcaagcttcgagcctgcgacttaaccaagctccgtgtgcgggacgttgcccatggtgagcaggtgtcatcacgagcaatagtgatgcagcagaaaacacagcggccagtgcagttcgagatcactgagcaaactcgggcggcgctcgcggcttggatacatcaagtacagctccgcggcgaggactacctgttcccgagtcgactgcataactcagaccatctatccactcgtcagtacgcccgtatcgtcaaaggctgggtgaaagccattggccttgacccagccatgtatggcactcacacaatgagacgcacgaaggcatcactgatctatcgcaggacgaagaacctgcgggccgttcaactgctgctcggccatacgaagctggagagcaccgttcgatatctgggaattgaggtcgatgacgccttggaaatggcggaacagaccgaagtgtga

SEQ ID NO: 331900 - DNA, 234 bp, Pseudomonas aeruginosa
atgggtatttcgtattacctcgcatgtttggagacccggcaatatgtctgggttggcaggcttgacccacagggggaggtgccggcggtggacgtcgaaggctccatcgccatgttcgcgctggagaatcggaacaaaccgttgatcgtcgttagtgaaagccatccgatcctcgaagagggaatggagtggtcgccgccggcaacgcaagaaacgtgcagcggacaaccatga

SEQ ID NO: 331901 - DNA, 651 bp, Pseudomonas aeruginosa
atgcaggcttgccaggtattcagtgatcaggatgaaatcgccgcccgtcttgaacagttgagtctggagcgcgagccactgcgtgaggctatcaatcaagctcacctacagcgggttcgcctgactcctaaccatcccagcatttttcccggccttgaaatgtggggctggttggtaggagcggtgcgcgatcagctgcgcccactagggtgggtcgcgcatgaacagtcgaactacccgcttaccgttcactcggcgctcaatctcgcgattgcggtcgcatcgggggatagctatgttggaaatctgctggggatgccgagcagccgatccaggaagggtaaaaatacagttgatgctgttgagcggaattgccagttcgacatgtttgctgacttgctgcccgatccggaggagctgcctgaatcaggccctcatgagacctggatcctgctccaccacaccgacacggtgaagaaggaaatccgcatcgagctctcacgtccatcgggaatgggtaaaggcggcaagatcaatttctggtctgaacgcatcatgcttggcacccttgctcttgatgatgatttctttgaggttacctccccaggcggtccggatatcgacatcgaaattcgccgtaaaagctcgtga

SEQ ID NO: 331902 - DNA, 1155 bp, Pseudomonas aeruginosa
atgtttaatccacaacgatttgcgctcgcccgtcgccggcgaggtatgaaaaagcgtgagcttgccactcatataggagtaacggagcgatcggtctccggctacgagagcggcacgcaggagcctgagcctggaaccctggcaaaaatcgctaaaacgcttcggttccccgaagcgtttttctttggtgatgatcctgaggtgccaacgccggatgttgccagtttccggtcgctctcaaagatgactgctggccttagggattcagctctcggtgcaggcgcaattgcgctcctgctgaatgactggatcgagcaacgtttcgatttgccagagccagatcttccggacctggggtccgaacgcgctgcactgacgaattttgaggcgctcgataagctggcactatcacgcagtgcccaagcgccagaggccgctgcggagatgctgagggcacactggggtttaggtgagcagccggttaagaacatgattgcgcttcttgagtcgaaaggcgttcgtgtctactcacttgcaattgatgcaaaggaggtcgacgcgttctcgatgtggagtggcggccgcccctttatgttcttgaatacctttaagtcggccgagcgttgccgctttgacgcagctcatgaattaggacatttggttatgcaccagcatgcccacccacaaggacctgatttagagcgtgaggcgaatgcctttgcgtcggcttttctaatgccacgtgcaagcgttctagcgatggctccacgttcgatcactatcaaaagcctcatcaaatacaagaagctctggtccgtttctgtggcagccttaaattaccggcttcatagcctggggctttccacggagtgggcttaccgaacgctgtgtattcagattgctcaagagggctatcgcaccgaagagccggaatctattgctcatgagcggtcagtgatcctggagaagattttcgccgcgttacgtgcagatggggttgggaaagctggcgtcgcgggagaactggcaatcagtcctgaggagatcaatgaattgacgttcggattgatgttgaacgtgttgaaggggcagagcgctaacccatccgactctggtgggaaatcaggtgcccatcttcgtttggtcaaggggtga

SEQ ID NO: 331903 - DNA, 636 bp, Pseudomonas aeruginosa
atgtccagcactgattttgctctgtcggtatccacccgcattgcgcaacgggtcaagcgcttacccaaagggcaacccttctgcatcagccgctttgcggagcttggagcgcgtggcgccatatccaaggcagtagctcggctggtcagccaaggcgaacttgaacgggtgcatcgaggaatttacatgcgcccgaaatccagtcgatacgttgcacgggtccgccccaatgtatgggaagtagtgagcttgatcgctaggcagaaccgccatgttcttcagattcatggcgctcatgcggtcaggttgtttggactgagcacccaggtgccgctcattccgatctattacaccagcggacccagccgctcgttttttataggtaagggtgaggtccggttggtacatgcggcaccaatggtcatgcagcgtgccgggaccgaggtagggacggctatcagcgcactattttatctcggtaaagacggctcgaccccggaatgcattgccgcgatcaagaaggtgctcaggcctgaagacctaaccacattaatggcctgcaaaatgccgaaatggatgcgcatggcgttggagcagtcagcgcgcatacacaccgtcaacacgcttgctccttaa

SEQ ID NO: 331904 - DNA, 264 bp, Pseudomonas aeruginosa
ttgacccttcctcacgaaagaacccgcagcgtcatcaagaccgaagcgttcctgcgagagctcgcccgtaacactgagctgcctcaggatatccgcagctatgcgaaaagcctgctcaggcactacccgtcggccgaccagatcctctcgttggggcgccttgaagagtgcctggtgagcgatgcatcagatgatgaatatcgacggcgggtgatcgcttttcatcagccgctgttcagctcgtcattggacttcactcgatag

SEQ ID NO: 331905 - DNA, 1401 bp, Pseudomonas aeruginosa
atgaccacactgcttcgagactggcaacgccgctgcatcgacacggcactagagcacttcactaccacgccgcacttcttctgccaggcaacgccgggcgccggcaagacgcgcatggcggcagagctggccaacagactgcttgagcaggacagaatcgatctggtgctctgcttcgctccgtcctgtcaggttgtcgagggctttcgctcgtcctttgctgcggtgctcggcagacgcttggatggccaactcggcgcagttggtgcagcgttcacctatcaagccatggaataccgagatgaggcgttctggcgactcctcgatgactaccgtgtattcgcggtttttgacgagatccaccactgcgccggccatgatgtactcctgagcaacgcctggggccaacagattcttcagcgggtacaggacagggccaccttcaccctggccctatccggcaccccatggcgttcggacgaccgggccattgctctggcccgctactcgacgcccgaggggtacctgatctgcgactaccgctacggattgaaagaggccattgctgatggtgtgtgccgctcccctcgcattgtcctcctcgacaaccagaaggtgaaacttaccgaggagctggacactgagagcactgtcaggatgtttcccagcattgccaaactattgggggagtcccctgtcacctacgaagagctgttgcgtcatgacgaggtgattgatcagttactcggtctcgggtgcagcaagctggatgagcttcgcctgatcaagcctgatgcggcaggcttggtggttgccaccgacatcgagcacgcccagcaaattgctttggccctggaaaccctgggtgaaggttgccgcatcgtcaccaacaaaaccccggctgcgcagcaggttatcaatgcgttcagacacagcgcctgccgttggattatcgcagttggaatgatcagcgaaggcacggacattcctcgactccaggtgtgctgctacctcagtcgcatccgcactgagctgcattaccgacaagtgcttgggcgagtgcttcggcgcacaggcgagcccgataatcaggcgtggctattcatgttagcggagccgacactgcagtgcttggcagagagaattgcagatgatctaccggatgacctggcagtgctgaacgaggtagagatgccagcctccacttcaggttcaatatctggctggattggggctgctggcaatatcgatgtcctggatgacagtaatggaagtggcattgcgcaggtaattggggcaggtgctacatgcaccttatccctggggggctctgccgctgagccaaaccatctggtcagcttttccaagcactaccggcaacagttgctggcttgcttttga

SEQ ID NO: 331906 - DNA, 588 bp, Pseudomonas aeruginosa
atgaaatcggcctcgtttatcttcgacaggcgtctgtatgagctgcttcaggaggaagggtgtgcaaggttcacgacgcgtgaactgcgtgacgcctatgctgctcgcctgaagggcacacagttccgtatcgccgatgtgcgccactacgtgtatgaacagatccgcagaatgctgcgcatgggctgggttgtgctcgatgaagagcgccgttcgcggggacaggtctaccacctgctgccgattccggcacatctgcaactggagctgatcgacaacgggttcgagaacagccataagaccgcttgtgagtcagagcaggagccgtcagcgttcaataatgcggcggcaccgcaaccatcagccgatgtggatcagcacctggaagcgctcctcaaggaaatcaggctggacttcctggcatcgatgggcgaggcggagcgatacaagctgctcctcgatgatatgccgcatctccgggataaggtcgaaggcgagtacctggaagctagagaccgaagctcgcgcctgctgggccatcttcgcgccatcgagaagacactcaagacgcttgcctccgcacgatga

SEQ ID NO: 331907 - DNA, 222 bp, Pseudomonas aeruginosa
atggagaagttggcgaaagcgttaggggaacgcatccggacgcagagaaaggcctgtgggatttctcaggatgcgttagcgctggcctgcagtatcgaccgtagctatatggggcgtatcgagcgtggtgaagtaaacatcaccgtcgagaagctgtatcggatcgcaagcgagctcgcctgcgatccatcctgccttatgcctcagttgtcagagctgtag

SEQ ID NO: 331908 - DNA, 2781 bp, Pseudomonas aeruginosa
atgaatgcagtagaaattgagtccgccatatcgaacctggcccttgagccctttgacgcggcggagttcccgttcaccttcctggccgcgttcggcaacaaggaaaccgcgctcaagcgcctgcgcgccggcaacaacaacgcctcggacgtacccggcggcgtactactgcgcagtaacatccatatcgccacttgcgagcttggcggcgtgggcgaaacgctcaaggcgctgcgtgccagcccggccactacaaaagccaaagccaagttcatactagccaccgacggacaaacgctggaggccgaagagctgatcacaggtgaaaccatcgcctgcgactacccggactttcccaaccatttcgggttcctgctgccgctcgccggcatctccaccatcaaggagatcaaggacaaccccatcgacgtgcgcgccaccagccgcctgaacaagctgtacgtcgagctgctaaacgagaacccggactgggccaaggccgaacgccgccatgacatgaatcactttatggcgcggctgattttctgcttctttgccgaagataccgatatcttccgtggcgatggtctgtttaccaagacagttgagcagtttagcgagcgcgacggttcaaacacccaccagttgctgtcggaaatcttccgcgccatgaacatcaagctggccgagcgcgccactgctcagccacgcctgcccagctgggccaacaccttcccttatgtgaatggcggtttgttctccggtagtaccgaagtgccacgcttcacgcgcatggcgcgcacttacctgctgcacgctggcaagctcaactggaaaaaaatcaacccagacatcttcggcagcatgatccaggccgtagccgatgatgaagagcgcggcgcactgggcatgcactacaccagcgtgcccaatatcctcaaggtgctgaatccgctgtttctggatgaccttcgggagcaactggatgcatgcggtgacaacaaagccaagctgctcaatctgcgcaagcgtatggcacgcatccgcgtatttgacccagcctgcggctccggcaactttctagtcattgcctacaagcagatgcgtgagatcgaggcggaaatcaatcgtcgccggggcgaagcccacaacaaatccgaaataccgctgactaacttccgcggtatcgaactccgcgactttccggcagagattgcccgcctggcgctgatcattgccgagtttcagtgcgacgtgctctatcgaggccagcaggatgcgttggcggaatttctaccgctggatgcgcaaaattggatcatctgcggtaatgcgctatggctggactggctgaacatctgtcctcctacaggcacagctgtgaaattactcgcagatgacttgttcagtactccacttaatcaggcggagatcgaattcgcgaacgaaggtggagaaacatatatttgcgggaacccgccatatgttgggacaaagtaccaaacaaaagaccaaaaagacgacatagcggcactatttaaaagcgaaggcataaattccggaaacctagactacgttggctgctggctcttaaaggcggcgcagtatgcttctaaagttgagagattcgccttctcgtttgtgacaacctccagcttattccaaggagagcaggctgaaatagtcctccatacaatctctcgctatagtctgaaaatttactggtgtcatccaagcttcatgtggtcgaacaatgcatctaataatgcaggtgtaacatgcagtatcgttggctgtgctcgtgacggggctcgacctgagcgatacatatatggtgatgagtctaggcgcagagttgagaacatcggcccatatcttgttccaatgcccgacattgttgtctcaaagcgacagactccattgtcgcaggtatctgcaatgagttatgggagcatgtctaacgacaacggtgaattcacattctccgatgacagatacagagccagcatcagtgccaatccggaaaataagagtattttcaaagtcgccgtaggaggagctgaattcatcagggggattgtgcgaaggaatatatatatcgatgagacaaccacattatcaagtgctcaggaagaagagttttcgggcgtatttgatcgcgtgcgcaaatatcgcgcagcaagcaatcgagaagcaactcgaaagctaagcgcagttccaatgtattttgccgaaagaaggcatgcggcggcatgtaagatatttatacctcaggttttatctgagcgaagggaatatgttacatcggggctgttaggtagtgatgctctcgttattgctccgcacatgcaaatcgtcggcgggcacagttatgaattcgcaattatcagcagtaaaattcatcatgtgtggatttctacagtatgtggaaagctgaagacggacattcgttactcaaacttgctcggctggaataccttccccataccactgctcaccgaacagaacaaggccgatctgacccgctgcgccgaggacatcctgctggctcgcgaagcccattttcccgcgaccattgccgacttgtacgatccagaagccatgccggacaacctgcgccacgcccacgagcgcaacgatgaagtgctggagcgtatctacatcggtcgtcgcttcaaaaacgataccgagcgactggaaaagctgtttgatctctacaccaagatgacagcgggtacattgggggccgcatcgaaaaagccacgagggaaaaaggtatga

SEQ ID NO: 331909 - DNA, 129 bp, Pseudomonas aeruginosa
atgagcgatatccctgctagcctgaccacctcccctgaaagctgcggcgattggttagctgatcttgaaggccgcatccacaatgctcaggcgatggcactctcatggagcaagaatcacagtgactaa

SEQ ID NO: 331910 - DNA, 2004 bp, Pseudomonas aeruginosa
atgcaggagcgcgcttatgccaagcgcggtgaacagtacttgctgatcaagtcgccgcccgcatctggcaagtcccgcgccctgatgttcatcgccttagacaagctccataaccagggactgcaacaggccatcgtcgtagtgccggagcgctccattggcggcagctttgcagatgagccgctgagccaacacggcttttactgggactggcaagtagccccacagtggaacctgtgtaatgcaccaggtattgatgaaccgcgtgtggccaagtccaaggtggatgccgtgcgtgccttcctgaccagcagcgacaaggtgctggtctgcacccatgccacctttcgttttgccgtggaagagttgggcattgacaccttcgacaaccgcctaattgccatcgacgagttccaccacgtttccgccaacccggacaacaaactgggtagccaactgagcgcgttcatcagccgcgacaaggtgcatctggtggccatgaccggctcgtacttccgtggcgacagcgaggccgtgctggccccgtcggacgagaataagttcgagacggtgacatacacctactacgagcagctcaacggctatcgctggctcaagtcactggatattggctacttcttctacaccgggagatacgtggatgcggtcgctaaggtgctggacccggcgctgaaaaccatcgtccacatcccacatccagctgctcgcgaaagccttaaagacaaggagcgtgaggtcaatgagatcatgagctcgctgggcgattggcagggtgtcgactcggtgaccggcttccacctgatcaaagccaaggacggccgcacgctgaaagtggccgaccttgtggatgacagcgacccaggaaaacgctccaaagtgctaggcgcactgaaagacccggctcagaagaacaaccgcgacaacgtggatgtaatcatcgccttgggcatggcgaaggaaggctttgactggatctggtgtgagcatgccctgaccatcggctaccgctcgagcctgaccgaaatcgtgcagatcattggccgcgccacgcgcgatgctgagggcaaggaacgctcgcgcttcaccaacctgatcgccgagccaatggctgatcaagcagctgtagccgaggcggtaaacgatatgctcaaggccatttccgccagcctgctgatggaacaggtgctcgccccgcgctatgagttcaccccgaaagataccgggccgaaagaaggcttcacttacgggccggaggggtatcaaacgggtggcaccaatctgggtgtgaatgagaccacgggccagttccatgtcgagatcaatggcctgaccacaccgcaaagcacagaagccacgcgcatctgcaaggaagatttgaacgaagtagtaaccagcttcctgcaggacaaaaccgtgctggagcgcggtctattcgataaggaaaataccttgcctgaggagctgacccagctgcgcatgggcaagatcgtgcgcgagcgttatcccgacttgagcgacgtcgaccaggaagccatccgccaacacgccatcgcggccatgaacattacccaacaggccaaactggctttggcgcaggcagatgcaaacggtagcgataacgtgcaaggcagcaacgcactgctggatggcgtgcgcaagttcgtaaacgtgcgcgagctggacattgacctgatcgaccgcatcaaccccttcgatgccgcctatgcggtactggcgaaggcgatggatgaaaagtccctgcgccaggtgcaggccagcattgcggccaagaaggtgagcattcccgaagacgaagcacgagaactggcaaaacgtgctctgcagttcaagaatgagcgtggccgcctgcctgacatcaattctgctgatgcctgggaaaagcgcatggccgaaggtgtagctgcgttggcacgctaccgcgcccaggccaaagcggcacagggggaatccgccaatggctga

SEQ ID NO: 331911 - DNA, 1191 bp, Pseudomonas aeruginosa
atggctgatatgaacgatgacgaccttctggatgcgttgggggtagaagtccccacgctcaagacagccactcgaactcctcgcgaagaacgcatcatcgctggtttcgaggacattcagcgcttctatcagacccacggccgcgccccactgcatggcgaagaccgcgacatcttcgagcgcttgtatgccgtacgcctggatcagctgcgcaagctgccggaggcacaaaccctactggccggcctggatagtcacggcctactgtcaggcagtgcggacgccgcagtaaatgtggatgacctggatgaggacgccttgctcgccgagctgggcatcggcagtgagtccgtcgaccaggacgacatcacagtgttgcgacatgtgcgctccagcgcggcaatcagggcggcagaagaaattgccgctcgaaacccatgtaaagacttcgagaagttcaagccgctgtttgatgaggtggaagcgggcctcaagcagaaattgtggataaccaagccctttggcaagaacgcgagcatcgaggccggggacttcttcattttgagcggactcattgcctatgtcgccgaggtgggcgacacttacaagacgccaaatgcggagatgaatgggcgcttgcgcgtcatctactccaatgagacggaaagcgatctgctattacgatccttgcagcgggcgctctacaaagacagtgacgggcgtgccggatctcggctcatcaaggtagattccggcccactgttcagcgacataaccgagccggacgacatcgagactggcactatctatgtgctgcgcagccagtccagccacccattcgtagccaaacaccgcgagctgatccacaagattggcgtgaccggtggcaaggtggaaacccgtatagctggggcgaacaaagatgccacctacctattggcagatgtggaagtggtcgctacttacaagctgcacaacctgaatcgcaccaggctggagaacatcttccaccgcctgttcggcgcagcgcagttgaacttgaccatcgaagaccgcttcggcaatccggtcaagccgagggaatggttcctagtaccactgcatgtgattgatgaagcagttgagcgtattcgggatggatcgattaccggtgtagcgtatgacccgaaaacggctcgcctggtcagttaa

SEQ ID NO: 331912 - DNA, 2298 bp, Pseudomonas aeruginosa
atgcttaacaaataccttggccgattggaacggctcatcagcgaatatcgcgaagccaagctagcgcaatttgaagggcatggcggcaagaaagcggagtttgatgatttggtctggtatcatattgatcccaatactggccgccgaacccgattcttgtgcggtgtacatggccgcaagggcaaaggaaacgccggcaaccaccccatagacgcccttccttacccctatgaccacctgataaaaatatggatcatagaaacaactaatacaccactttccgccaaagaaaaacaagctcggacgtcggtagctaggaagatgttgtcactcatagatggtgatctctatgagcaatcagagtccacaatcaccggccttaatttgggggcgcgttcagctgaccgcttgcggccgtttctcgcgttctgcgctgaaaagggggtgatgcgaaaggtcaacctgaagggcagcgacaacagagacaggacgggacatgccgcgtttgacaatacgctggagaaacttccagatacccaaacagtacttgcgctagccgacatcttctctagtgtgtttgagtatgtggatgaacatggctcgctgagccctggtaaagagataaaaatccatgatgccttagtggtgacttctgcactactgtcgctggcatcgcccaatcgaatttctgcggaaataccagttctgcctaaacaaaaactgcattgttactctgaaagtaatggagagccagtttattatctcgactggattggaagtaaaggctacgggaaccacaaaaatcacgtacttgcggtgctcgctgagccgataaagaaagccctaaacttcttctacaaggcatgcgagcctgcaagaattctctgtcgattctacgagagtccgggcaaaagcttgaaagcgttgctcagtgggttcgaaatggaaccagagctagagagaaatttaaatttaaccaaacggcctaatcttttcacattggggtatgctttagggttttatggggttaatgattgcgttccggtccttaaggaaggagctgatctgacttccatccatcaaagtcaaagaggtcgttttttcgaaaaaaaaccgatttactcgttgcagcctcaagatcagttgtccgtgtcgcaaacgagaagtgcagctttagcaggattaccccacttgttcgggtacgccaatatgccaaaagttttttccgataagtctgtcgtttcggttgaagaagtgcaggagtggtggattgctttctataggacatcaattttgccggaatttccgctctcattttcaaccggagaatcaagtatcaaacttaaggatgccatgttctgcttcttggggagttggctttatggtgcgcccgagagtgtcggaagtggtgggaaggtttttcaaaagacaaactatgcggtggtgccattagcgtcgctaggcgcctcggttcttactcgactggtcggccaggggcgctacacgacatcgatttttcaggattacggattttcgtcagaattaattcttcgaccgcatagtctgcggcacttatctaacacccttgctgatttaagtagcattccagttgaaattatcactgcttggtctggcagaaagaatcccgagcaaacccatacttatattcatacgactcacgacgagaaagccagtcgtgtgagtgcgatattgaatccgccagatatcgacaggcgggatattcgagtcgtttcccaagatcaacttacacaaaccaccaacctgccggcatctgtcacctccaccggtctttgtactcaaaatcttaatgtaacgccttgcaattatttgaacgatttcgtctcgcagtgcttcatgtgtccggatacttgtcacatagcaggcgatgtgaagacaatcgagttttttgagaaagatttatcgtttcaaactttgagattagaatcggtagcgtgtgatccacgcttaccaagctcccaggcaatgaggcagtggtatctaattcactcgcgaaatacccatattctatccatgctgaatgatttgatgaaaagtaaggctgtcggaacgatgatttgttactcagataaaaattctgagttcagtttgaccgatctaaataccaagatcattacaaaggtcgcgtgtgccctaccggattttgaggctcgcctgaagggtattattgaagataagactgccagaacagcatctgatgctaatcccgagttgcgctctcttttatcctctttcggtctgtctgaaggcgaggtgtga

SEQ ID NO: 331913 - DNA, 1653 bp, Pseudomonas aeruginosa
atgactcgcgagaagaggcgggaagtttttaagtctctgactaatgaaggctcatggattacggccaaatctggcctgatggtaaatacctcagacgatgtatggatattactgccgaataatggaaaaggaaaacggttgtgcgttgactgggttcattcgtctaacatgccagatgatgataaaaaattaattctgagtgtatttgtggactacgtgcgaaccaaggctgcgagtacggcgtcaggtatcgtttgcaatgtaaagccatttatgttgaatggcattccgtcgttagccagagttaaatctatatggagtgggctgcagacaaacaataagaaggggctcaatcagttctttgggacgctctctaggcaaggtaatacacggtatgaagaatatcacaagtttacgcggacacatttggacaagggtaaagacaatactcttgatccttccattggggcactaagcgatattgagtttgactcgttagccaggcagatcaatgaaaatatacaagagttcgactggggcgccagtcgggatcttttgttttttcagtcgccgaggctatatgcgcggctcagaaatatagtcactaacaagttgttgctctccatcgtaaggcggccaattcaaattgcgctattgaaatggtctgatttgatcccctcgggtgcgagttttcgcgacgcgggaattcttcctgtggacgaaatcggcacggtaggggggcaaacattgcagcttagagtgttcatagttaagtctaagggcgcacaattctcaagggagcggcccgagcgctatcctatacatctttccgaatatatctcaagggttcttatagactataaacgggtggtattggaagggctcagactagtgatggactcagcagagattcaagtggatcaatctgaactcttgagcctcatgaatgatatgcctatgtttccagcggttgatttttttgaagtgcgatttgactctttagatttgttcaaaagcatgtttacgccaaagtctactgcctaccacatatcggagactgcagttgcacaggccatgagatgggttccggttgcctctgatcgaactgtcgaatgtatggctacttccaacagaattcgtcacaccgtattaactcgcggtgctcaaaatggtctgcccgccgttcaattggccaagatgacaggtgtcaccgtgccggctgcaaggcattacatagatttggattatgtatctaggagagagattgacacaaagtatatcggaaatgagtttctaaagaaggcttttagccataccttaactgtcgttccggaaggcgatgaggtcattgtcgacaataagttcaaccctgttggtggggcactcaacaagcattcctgcgcgacctgttcaactgttttagggagaccattggggtgttatgggtgcccaaactttcgtccgatgctagaagctgatcacaggtcggtattggctgatgcagagggcaagcttgctgcaaaccgcaactccctagttagtcctctttacgctcgcagtattgaaaaattggagagacagattgtttgggtgaggcaaacaataatggtttgcgatgaagaactcgcaaggcggcgcacaatcgatgcttaa

SEQ ID NO: 331914 - DNA, 1248 bp, Pseudomonas aeruginosa
atgaaagtcaaacgataccaattcaattcgttgcccttcgtgtcgatagtggacgaagcggattgccctattgatccgtatgtttcctgctatctcaatggcgctttatctgctaaatcggccaatacgagatttaggtacgcaaatgaactgctgttcgtgctgcagtacttttcggaaaaaaatattgacctacccgaacgagttgcatcgggcatttttatatcccagatggagtacatgcagttctatgacagatgctgcttaagtaagggttctggtgatgaaggtataaatataagatttctagatataaatgataaacatttaaggaacatcattgttgccaatcagaaagggatgacaaaggtcgctagcgaaaccttgcaaggtcgcatcagacgacttcgacaatttcttttatggctgttcgatgagtttcacgaagtgcaagatgctgacgaaaaaacaaaaaataaatttaatgggcttatttcaaaaattaggttagatgaagatgcccttggcaagaatggagagcaacatgtcggcgatcctgaggaatcggtgatcccggatgacgttttcgtaaagtttttagagatggtgatgccgtcatctcctaataatccctttaaagcatctagggtgaggaattacttgatcgtcaatttgctagtcctaagcggcatcagaagaggtgcgctggcaaaattgaagatttctgactgtctatttcatggcactaacgatcagctagctatttatcgatctgcaaatgatccaacagatccgcgctctgaaaaacccaatcaaaagacaaaagcacacttcgcctcggttgatccaggttttttggagaaggttaagttctatattgacaacgttcgtattgtctttcctcgtgcgcaattccatgacttcgtgtttgtcagcgaaaatgactctaaaggcactgcgggtcagcctctttctttaaaggcaataaatgcaatatttcaaaagctctctagatcgctgggctttcatgtccatcctcatttgttgcgccacaaatggaatgaaatttttgataagaaaggggagtcgcttggggtcaatccggctttgcttgaggatgctagaaaatatgccatgggctggtcgcaaaatacgactcagaacagacgatataatgaaaagagaattgcgctgaagacgagagagatatcaatggcgcatcaaaaaagagtggatcagcaaaaatga

SEQ ID NO: 331915 - DNA, 135 bp, Pseudomonas aeruginosa
atgggcaccctttcggtcaatcagaacaaactgcagaagcgcctgcgccgcctggccggcgaggccatcaccgacttcaacatgatcgaggatggcgacaaggtcatggtctgcctgtccggcggcaagttataa

SEQ ID NO: 331916 - DNA, 957 bp, Pseudomonas aeruginosa
atggctactgaaatcggcaccgccacgaaccaccagaacctggtcgagcgcctcgtccagttcctcaccgcgaaccccgacctggtcgcggctgggcaggcctacgagaaggttttcgacaacaccatccccgcgtccggcacggccatcgccgtgcgccaggtgaccctgcgcgccccaggtctgggcggcaccgacagcatctacatggggattcagagctacggcgataccgccctggactactacaaccttcgcctgatgggcggcacggcgttcaatcctggagcaatcccgcctggcggcgactactggaccgcgtttgccaactacagtccgcgggttcaggcgctgctgtggaaccagcccatgccgtactggttcttcgccaacggccgacgcttctgggtcgtcgtgaaagtctcgacgatctacgagtctgccggcgccggcttcatcctgccaccctgtccgccgtcgcagtatccgtacccgcttgccgtcgtgggctcctaccgtggtgacgttgcaactcgctggtcagacgtcagcgaccggcacagaggcatcagcagcccctacgagcgcagttgctatctccgcgatcccgccgggcgctggctcggtttcactgtcgcaggtgggtcagccaacgagtccgactacagcaatcggaccctgctgccgcttggctgcggtcgctatgcgggtggtagcgacactgtgatcaaccagctccgcgactctttcagcaagttcccgctgaaagctttgcagttcgtcacccgcgaaaccgaggggcgccgctatctgggcgatttcgacggcgccttctacgtgccgacgctcaactccggcgccgaagacgtgattgtcgaggacggtgtggaccacgtcgttttccaaaccgcttggcgtagcggtaacccttggctctacgcgatcaggaaggactga

SEQ ID NO: 331917 - DNA, 771 bp, Pseudomonas aeruginosa
atggctcagaagccttctcaccatcccaaagctccgggtgcgtaccatgcgcctaaaagtgacaagccggaatacattcagggcgagacaggactcgccgggtttggctccagatcgttctatgtggcgcagataccacgggtggaggccaatgctgtcatcaagcagcatcactactctcgtcggatcgtcgcaaactcctatgtccaccttggcgtattcatcgacggggtccaagtaggcgtgcttcagtttgggtatgcactgaaccccgtggcgggagcaacgaaaatcattgagggaacacaggttgatcagtacctggagttgaaccgcatgtggctggatgactcagctcctcgcaacagcgagagtcgagctttgagctatgcgttcaagttcatcaaacgagcctgcccgcgagttgcttgggtgcagtcattcgccgacgagcgatgtgggggatgggggatcgtctaccaagccgccaactttctttacttcggacatcaccgaaagggcttctatgagcttgacggggagacctatcacgagatgctgctcacggcgcgccctggaggaggcggacgtgcgaagtacctgcgggacaacctggagcgggcggtacgcaagagcctattgcagttccgctatatatatctgatccgaaagaactggctaacgcgtgccaaagtcccgcctcttccttatccaaagcctggtcagccccttccatctcgacgtcgtaagaagggggtgttcctggcatga

SEQ ID NO: 331918 - DNA, 2223 bp, Pseudomonas aeruginosa
atgagcttgccaccttcaaactctgactctgccggcttcggtctgctagacccagcgattcaacgctgggtctggcgagaggggtggacgtcactgcgagatgcgcaggagcgagctattcctgcgcttctgaacgccgatcgcgatgtgatcattgcggcttcgactgcggcaggtaaaaccgaagcagcgttccttccgattctcacgaacctgctggagcatgatgaccctgcaggctctgttatctacgtcagtcctttgaaggcgctgatcaacgatcaatgggatcggcttgagaccctctgccaagagctggatatccctgtcattgcctggcacggcgacatctctgcgagtcgtaagcagcgcttcttaaagtctcctagcggcgtcctcttgatcacgcccgaatcgctcgaagcgatgtttgtgaatcgaggggcagggctcgcaggcgttttcgctaacctgcgctatctagtcgttgatgagctgcatgcatttattgggagcgagcgtggtaagcagcttcagtcgctgcttcatagggtcgaactggtcgtagagcgaaccgtgccccgagtggggctctcggcaacgttgggcgacatggcgttggcatcttcttttctgcgccctggaaaagagcagggcgttgagatcatcgaatcaaagacttctgagcaggtacttaaggttcaggtcagagggtacgttgaggcgctctcgcagcgagagacagcaaatagtgaagaggcacagcgggacgatgactcgggcgtagagcaggcgatcgctgcgcacctgtaccaagtactgcgagggagcaacaacctcgtcttccccaacagccgcggaaaggttgagtggtacgccgaccagttgcgtcggctgtgcgaaagggacggggttccgaacgagttctggccccaccatggcaatctctccaaggatgtccgagaggaggccgagaaggccctgaaggctggcaatcgcccggcaacggcggtgtgcaccacgacccttgaactgggtatagatattgggagcattcgcactgtcgggcaaattggatcgccaccgagcgtggcaagcctgcgtcagcgactaggccgctcagggcgtcggcagggcgagtcagccatccttcgtagctactgcaaagagcgctcattgagcgatgactcgtctctgtctgatcggctgcgccaggggctagtgcagagcgtcgcgatgatacgtctactgatggctaactggtttgagcctcccaaagtgcagggctgccattactcgactctcgttcagcagatcctgtcgatcattgctcaacggggaggggcaacagcaggtgagctctggcgcagcctcgttgctacagggccattctcgacagtcgctcagcccgactttctgatgctgctacgggccatgggtgagcacgatctcgtcctccaagagtcctctggcctgcttctgcctggagagtcaggggagcggttcatcaatcactatgacttctacagtgcctttatcagcgatgaagagtttcggcttgtctgtgacggtaaggcgcttgggtctttgcctgtctcccgtccgctgactgtcgagcaacgcatcatttttgcgggacgcaggtggcaagtcactgatgtcgacgcaaacgccaaagtggtcgttgtgcggccatcaccaggaggcgcacctcccgtatttgacggtatcggcgcccgtgttcacgaccatgttcgccaagagatgaggcaactcctaagcgaagaagctccctgtccgtttgtggatgcggtggggcagaaccttttgggcgaggcgcgtcgttgctttagcgagctcggacttgcgagccgtggtctggttgatgttggtgccgtaaccgcggtgtttacttggcatggcgattggacgaatgacgccctggtaatactgctcgaatggcacggtttgagatgtgatagagcagggctggtgcttgaggttaatggcagtgtggaacgtgtccaagaagccctgcgactcatagcagagtcacctgttccgcctctcccagagctgctatctgacgtgcaaaacatgatgtgcgagaaatgggactgggtgcttcctccaaacctgctcgccgcttcatacgcctcaacctatctcgatgttgaaagcgctcgaaaggtcgctgtacgactgggtcgagagaggcagtag

SEQ ID NO: 331919 - DNA, 1047 bp, Pseudomonas aeruginosa
atgcacgcggatctcaatcccgatcggcgtctgcacgccactggaggccaggcgcgatcgctctacgccgagcttgccaagaacatgtccacgcgcaccaagcccgacggtggtgcactgcagggcatcgtggagaaattcatcgctcaggctaaggcagaggcaaagagctcaggaaagagcagcgaagaggtcattcgctcgaatctcgatgagctcaccgaaatggtgaatggatacgactttgctgatgtgatcgcgacttactgcaaaggctttgaagaagggaacgagcaactgaaagccgatgccattcgttggctgcgcggtgagttcaccacgaagacggatgcccgggccgccctcggcgttcgcacgatcattgatgacgcatccgtttacgaccagctcaagctcctttcgcgctttgtgaggctcgcaggtttcagcggtttgatggtttgcctggatgagctggtaaacctgtacaagctctcaaatacgcaggcacgaaacgccaactacgagcagatcttgcggatcctgaatgactctctccagggcgctgcagaaggtcttgggttcgtgcttggcggcacgccagagttcctcatggatacccggcgcgggctctacagttaccctgcgctgcagtcgcgcctagccgagaactctttcgcgaaatccggcctgatcgacctgtccgggccagtcatcaggctggccagcctgtcgccagaggatttctacgtcctcctgcagaagctgcggcatgtttacgccgggggggggcagtcccgctacttgctgcctgacgaagctttgcccgcgttcatggctcactgcaatcagcggctcggtgacgcttacttccgtacgccgcggacgacgatcacagccttcatcaaccttcttgcggtactggaacagaacccaggtgcgaattggagaagtctcctcggtgagattgaggtagctactgacgatggtggtgcagctgacacgcaggtagatcccgacgatgagcttgccaccttcaaactctga

SEQ ID NO: 331920 - DNA, 2868 bp, Pseudomonas aeruginosa
atggcaaggaagcgcagaggaaggaagtcgaacgcatctggcggtttggttttaggcgccatcttcgtcgtgatccttgcatcgattcccaagactgtatggtttctcatcggcatcgcgctggtattggggggaatcatttggctgattgctaagcttgtcgctgactcaaagcctcttgctaatcgcgcccctcctgtcaaggttgatcaggtcgcgtccactaagcctgtaaagcttgcgaagcctgccaagccaactaagcctcctactccggttgccgcagcccctcgtgcgacgaagccagccccggcagtcggtcaggcgcaagtatccccttgcactgaaatcgatctttcggcgttttttaatctctcgctcgatgaaccggagccagtcctcgaggctttgccagccgcagccgagagcactaagaacgaaaccaggacggtcgaagcacccacttctgaggcgcctcctcgcgtggttcaagctgcttctgcccccgcacgggttagttcaccggcgccggcagtgaaagccctgtctcagctcgccaccagcccaatcaaaaccaatacaccagcaactcaaacttctcctgttcaggcggccgaaatcactcggagcgaaactagcaagcgtgaaactccgattgctgtgacgcctctacctgtcgttcgggctgcttcaacgcccgcacggtttgatccgccaccgccgcccgagaaagacctatcgcacttcttcacgatatcgattgggtctagcaaaccaccgtcgtacccgattcctgatcgaccagcagagtttgaggacatagagccccattgggtgccggcaggcgaaacggtcgaagttgcgggcgagaagattcctggagggatgttctacctaggaacaaccacgggtctgtcgtatggtgagacggagccctcgatgatcgacccaagccttcccgtagcgcgtcgaatcgttgatatcgccgagcgtctgacccattactggccgagatacgacagtctctctccggaggcgaggcgtgcatacttgcagtggctgtccagtggcaggaaggcgccacacgcgaacatcggttatgtcttcatcttcttctatggactggagcggcgggcccttattgacgcgaaaagcgatccggtagctgcaggggaagtgccagcaatcattgctgaggtttcgcggctgcaatccatttatcacgacaactattccttccaaggctatgccaaaaggttcttggaatttgtgactacgagaggcttccaaaagaagcgttacctagagaagcctccggaagtagatcggtcgtcctacgatatggctatggagctaagagtgggtcttggccagttagcgttggacaagcagccagtgccggcagagtgggctctcgcgtgggtgctctccgacgtcaacattggtctgcgcacacctgctactcgttgccaggcggaattcgccaagctgttcaagatgaggtacgaggaggcctacggtgctgggatcgttctgcctcagaacaagactcgagtgaaggtcgagtaccagccagcgtccggctcgttgaggcccttgaaggttcccggtaccgaaaatcttccagacgtgactgcggtgagtgggcctcgaaataagctgcagaagatcactgatgagtgcacggcggaactggattcgtacagtcggtacctggggcgtaaccccgactctcctgatgcgctggagggcgtgcttcagcttccgattgcgctgtggccggagaccacccgtgctgagcttgagtcgctaaaggagcggatcggcgagggcatgctcgtcatgagttttggcgagctagcgggacgcctgaagagcgcaggcgcgctttcaaggggcaaagtcttagcgtttgcgcgttcccttgaatcattgcacataggcctgcaacccgacgttctcgcggggagccgaattcccaagtcagaggactcgatcgcaatgtttgctacgcagcctgaggacggtgatctgcgatcgtctcctgcgtatggtgctgcatcggtaaccctcgatcttgcctgtgctgttgctgccgctgatggcgagacatcgcctcaagagatcatgctgctctcgcgtcacatcgactcctggagtcacttgagcagcgcccatcgcaagcgtctgaaagcgcacctgcgcctccaattgaatcagccgccgactctgcagagcctcaagaaacgcctggatccattagacacgtcggcgaaacgagcgattgttgcttttctagcgcaccttgctcaggccgatggggaagtgagtccggcggaggtgaagctgctcgagcgtgtctataaatcactgcagctagatgcccagttgctctatagcgacttgcatatcgcagcaagcagccagcctggtagtactccgtctgctgcactgtcgcctcaagcagctgcgccggcgccgacagcaggcggtggtttcgttctcgaccaggatcgaattgctgcactgcagaaggagactgagcaagtctccaagctcctcgctcaggtgttcgtcgatgagcaagttgtcgagcccgaggaacctacggtggaggaggaggcttcgggcgatacaagtctttggagtctcgacgccgagcactctgcgttccttcgcttgcttgtatcgcgcagcgagtggagtcgagacgaacttgaagctgtggccgcggacatggagctgatgcttgatggtgctctagagcacgtcaacgacgcagcattcgacttgtttgacatgccgctcacggaaggtgaggagcctgtcgaaatcaattcagagatcagggaaaagctaactgtatga

SEQ ID NO: 331921 - DNA, 348 bp, Pseudomonas aeruginosa
gtgaccggcctgttcgtcaccctggagggcccggaaggggccggcaagagcaccaaccgcgactacctggccgagcgcctgcgcgagcgcggcatcgaggtgcagttgacccgcgagcctggcggcacgcctctcgccgagcgcatccgtgaactgctgctggcgcccagcgacgagccgatggccgccgataccgagctgttgctgatgttcgccgcgcgggcccagcatctcgccggggtcatccgcccggcactggcgcgcggggccgtggtgctctgcgatcgcttcaccgacaccctgttttccctcgggtcaggacgtaaaccgttgcggttcattgcctag

SEQ ID NO: 331922 - DNA, 504 bp, Pseudomonas aeruginosa
atgcagctcaaaatcgcacttgccggcgccatcagagccttgcgtcagcaacgccaactccggcacgaggatctctccgacgtcagcgtcaaatccaagctcagtgcccttgagcgaggcgagaccagcatcaccctcgagaaatttgagagcctggcagaagctcttgaaatcgagccgctggcactcttcgccatctgcctatccgtgcgtcgcgatgccccctactcctcccttatagaaagcgctactgagcagctgcgagccttcgatcaagcaggaggaatggatctgctggcggagcagtttgttgacgacgctgtggcttaccgaaagccagggaaacctcagaacaaaatcaatgaggagaaaatccggaagctgaagcagcaagggatggggcagacacagattgcgcgggagaccggcctggcgttgtccacggtgcatcgctactggaaacgaattgaggcggaaggtgacggagggaaggctgtattgtga

SEQ ID NO: 331923 - DNA, 192 bp, Pseudomonas aeruginosa
atgttcctgtttgcacacaatgtcctgcacgacgacaaccgtagatttgaaccgggacactgggtgcgctcttcgatgggtacgtccttcaaagatggctacctgttctcgacgcgaaatactatctatgtgctggtcggccctgggtacaggaagcagtcgtccatccaagcgatcttctcaatcttctag

SEQ ID NO: 331924 - DNA, 195 bp, Pseudomonas aeruginosa
atgacgctaacagatgcgatcattgtcctcctgctggccgaaaaaattcacggcacagaagaggccatacgtaaggcggcgaagaatatggccaagcggctcccccgaagcaagcgtggcctcatgtacgacatagccgggagcaagaacccgcgagacttgatgcggcatattgcgctgggcctggacgactaa

SEQ ID NO: 331925 - DNA, 837 bp, Pseudomonas aeruginosa
atgatcgacgaccacatgccggaatcctggcaagctctgcaagatggagttaaacgaatttttcgaaatattggcctgtctgcagaagtcgaggtggatattgtaacgcctagaggctccgtcaatatcgacgtagtggccgttgacctacgtagcgtggatcaaatcaagtatctggtcgagtgtaaaaattggggaagcgctatcccccagcatgtcgtacattcatttacaacaataatgcatgaaactggggccaatatcggattcatcatttcaaaaaacggcctccagtcgggtgccgagcgctatactcaaagcacgaatataaccggcatgacctaccttgaattccaaaagcgttactttgcggtttggtggaaacgctatttctgcccccgtatcggggatgctgccgacagaccattacaatacgtcgaagagtgtaatgggcatcgagacaaagcctatgccggcttatctcctgataagcaacaagagtttgacaaacttcgcagaacatacatggcagccatcatggttttttcgatgtttaatgtcagcacactcagcgattgttttggcaccagcaagattgacactccgcccgcagatcttgagagtttcaagaaggatattctggctttaattgcgccatgtattacatggcactgctcaaccttccgtgggctacttgaactcattcttaaattcctcacggacgtagaagaacagttcaatgccctgttcggagaatatatcttcaaccttgaaccgatcagcatggtcacagaggacggccctcctcttcacgaccgttgggctaaaagaatttga

SEQ ID NO: 331926 - DNA, 1500 bp, Pseudomonas aeruginosa
atgatcaccaaccttaacgaactacccgaattcctggctcaggctgttagcgccaagggaggtatttatgaatgcacctctccaaactctcagttagatgagcacctattcaacaacaccgttagaatgctcacacagcttacagagcaggccaatcagcgctatttttacaatgccggacgcgaactaaaatttggaatcatcaattctgattacgttagcgcttttgcttccacaggaaaaggcgaaatagattttataggagtaaactttggagcaattcatttactctcatctctatttactcgactcctaagcaacgaattaatattttccgacattggaaattcaagctctgaaactagagagggttattcatttttcatccccagaattgcagatgcgggtaaatttgaagcacgccgccccaactgctcgattagatccgcttttgccaagcacatggcattagccgcattaacctttatctactcccacgagatatcccacataacaaaaggtcattcaaaagtaaaaaactcaatcaaagatggctcccgacaaaaattcaccgcattagaaacccaagctattgaactggatgcagactgcggagctatcgaacttacatatgattatatgcaatttatcaggctcaatgaagagctgttagaccttgactcgaatgcggcaattaaggaatcttggattagcttttataaagatccggtacagaatgtaaggttcgtattttttgcatgctatctgccacttagaattcactgcgataatcactgggactctgagactcaggcaagggatggccaaccccacccaccgttcagaatgggtaacctcatgaaatccttcgcaaccgtgcttcaaaacggtttcgggttttctgaagaaaaaagtaaaaaaatagtatatttactctgtattgagtcggaaaaggcatacgcagctattcaagcagagtcaggcgaaggcgaactagatctgaatgcaatcgatgccttctttgagaacgttggtaactacggtttaactgtagttgaagcatttgagaaaattgaggcagagctgaaagataatgccctcgttgaacaattatgcccatcacctgctgaagcgctaaagaccagctacgtggtgatcaccggagcgaagctaggcaccccttactatgcgatcatagaatcaaagctctgtgaaaacacagaggggatactgcaaatccaatgtttcagtattgaccgtgtcggcaagcagccacttcaattttctgtgaacatctcgccgaatgccggaggaaatccggctgcagacctacttagggctgaagctttagaaaaaatcaaagaactcgaagaaattgatagccttgagctcatacctctatcagatctaaaagagccgtctgaactcattaggtgggcttttgaccacagcaagtcaataacccttaagctagacattaagaacttgatagaagcgtag

SEQ ID NO: 331927 - DNA, 633 bp, Pseudomonas aeruginosa
atgccagctgaactcgatgccctgttgcggagacccttggcttgggaagcgccggtaccaacactgctggcagccctgcgaagatggatttctgataagaagccgtcatgcctactgcaccctcacggcttccacgtattgctgttgaagcgtagcgagggtgaagagtggcgattgcacctttggcctccaacggcgcggaaaagcacgggaatgcctgctcggatccacacacatgaccgccatgtagagagccgcatcctgaaggggagcctgctaaatctggactaccgccctgtagtgacgaacgagcatgggcatcctctgtactcagtcacatacgcgggcgacaggtacgtgggtaacacatcgaatgtgctccagaacacaggtgaaaggatctcacttaccgagacaggccgcaggcagttcggaatcggtgatcactaccgactcgaacggcatacctaccacgaggccatagtgccagagcatcaagccacgatcactctggtttgcatgcacagccgggatcctgggccgatcatggtcgttgggctggatggataccctgaggtggttgcatttgaaaggacgaaaaatgaagcctcgatcttcatggaatatctgtaa

SEQ ID NO: 331928 - DNA, 876 bp, Pseudomonas aeruginosa
gtggcactacccggtttcatgagatccaaatcccagcgcaggctattcgtatggttcagcctgctcctagtgatcattagccttggcgctgctcttgccgtagcgtggggtgagccggggccaaaatggttgcgggaaacgctaaacgggctccttctttcgctggttgccagcggtgtcttcgccatggtctctatggcatatgtcgccctattcttggatccccaacaagaggaggactccatcgtagtcttaccccaagacctcgaggggcagatggacaggatcgcgaccgaggccagagattacaaaatctatgtccgcacaggacgctatttcaggtcgcgcaccctgccgaagctcatcgagcgagccaggtcgacaaggcgcccgatcaacatcgaagtcatcctcctcgatttccgagaccatcagatgtgtgacctctatgcacgcttccgaaaaagcaccttcgatggtcacttatggagtaccgaaagtgctcgagccgatatcctcgcgacggcgtcagcgctggctcaagcagccctagacaactcgtcactggtcacagcgtccttgtatctcagcagtcgtctctctgtcttcaggatcgagggcagcgctgatgaattgttggtcacccgagagggccccaaagactttgcgtacaaattccacgatagccatcccgaccacgcggcatacctgaccgaattcatgtgggttcgtgacacggcttctcgcatcgacttgccacggactactccatcaggaagcctgctcgcagcgatgttcggtcaggaagaagtgactccagaggtagagcaagctgtgaatgatgctcttgccaggaaggctccgtatgccagctga

SEQ ID NO: 331929 - DNA, 1443 bp, Pseudomonas aeruginosa
atgcctgttgtagtaagtttgcaagtcgaggatagatttctcgacctggctactccagagatgcttgatttgggaagggtttttgaagtcgattcaataattttgcttctcggaaaaaatggatctggcaaaacccgccttcttaatatgattgcagaagggatttctgctccaggtcataatgggacgatggtctatgtgaaggacaggggtgggaatgtttcactgctggccgaagaggatgaagatctctgtgctatttattattcagggcttccctataggcggaaattgagccggaggggcgggctgattgatgcttcgccgaataataatactgacaaaataaacgaagagcatggccgaatgaagcagctgggagatattgcggctgctttaggggtagatgctcagcttaaagctaaattgtcttactctaaaaatattcaaagaacaataattgtgcctgcgttaaaactggctaggaaggttgcaaatcccaagcttgctggttttttaaaggaactgaaaagcctagagtctacgtctctaaaagatcctgatcgtttgaaggatctgcataagaaaattgaattggcattgagggatgtagtcacatttatagaggattatattgaggagcatctgccaggtagggattatatttattatctttcaattctggagagtctttatgagcatgaagattacgatggcgaagattatgcattagcgttcctgagctatttgggtcttgtgaaggcggatttcccagcagagcttgacttgcttcaagacgtagttgatagaactcgagaagctattagaaactacggaggtgaggccagattcactgagcattcggtatcattcctcattgagggcgtagagcaatttgatgctatacgtaggtacaatgcaccaattaagattgagtggtcaacacttagttcgggtctccaggctttaatagaccagttcgcacatattggagacgccatagacaaagcagcacgtcgaggaagtgactctgtagtcttgatgattgatgagggggatgcctatctgcacctagactggcagaggaggtacataactctgcttaacaagtatctagggaagctgaaaaggttttacgaattgcgaagcttgcaggttatattggcctctcattcgcctcttgtagcagccgatatgccagggttatttgtgacaaacctggattcaaagtctcgtgtaaaaacttttggggcgccaattgaggatgtgatttcagggtcgtttgagtcgagctctctcggtgagtttgcagcaaagaaaattaatgaaatctatggtcgaatgctgaaaaataagctttccagtgctgacaaaaaactgattgatgagattggtgacaaagctattaggtctgcccttatgaaaggtggtagacggtcatga

SEQ ID NO: 331930 - DNA, 930 bp, Pseudomonas aeruginosa
atgattattaatatccaagatgtatgggcggctgcggtaaatgatcatgcaggctttttaaatgatgcaatcgataaaggcttggcaaatttggggggctcacctattgagcaagctgttgctaaatttgtaacagataataggagctgcattgttcatggggctccggcagatttggcgcagtgcatagctaaatatctgaagatttttcctgatgataagctgaggaaagttgtagctggatttatggagaaaatatttgattatgggtctttttcagctaagtctgggaaaacttggacagcttaccatctctgcctgaaagctcggtataaagtatgctgctactgccacatggtggagacgggtacgtgcctacccgatgaggatacgaaaggttaccgtccgcccatcgatcattactatggcaaagctgagtatccatttctcgcactttctttatttaactttataccttgctgcgagaagtgtaatggccctcagatgaaagggaggatcgacttttccgagtctctccatctaaatccgctagttgatgatgagtctatcgagtttttattagctccagctcaggcagtggcctcaaactttgcggagtttgccgccttagaattgcctaaggatcagtacaaattagaagtggtttctatcaagaatcataaggtttcggcctcatcaatacaaactttccagttaaaaagtcgatatgctacctattctgagcgagcttattatttggctaagcggcttcgaggattgccatctaggcagaagttttacgctaaggcgctcaattttaaggttggggtggaggagcatttggagtttgagcctgaagaatacaaagacgtcccttatggtaaggcacgcttatgtatagctaaacaattcggggttgatgttctgtga

SEQ ID NO: 331931 - DNA, 1014 bp, Pseudomonas aeruginosa
atgagtagcaacgaactgacagatctccatgaattcttagagcttgacgacatctctcttgagcttttctttatacagagaaaatcaaaaacagctcaaaagaaaaaatcgtttatctacacgattagcaagctagacgccaacaaagaaattaatgactttttcgaaaacgcggcgattactcaggtaagccggttcgttaaagccggtacgacaccacaaaactatgccgtcattagcgatgacatgccgcgctcgttgtatatttacaaagaagccagcaagctaaagctgtccgagcaaacctggaagaaaatgttggatggcactgcaataagctctgctacctctttaggccagatcaaaaagaacatttggttttactgcgtaaaggcgactgcatcggtagatggcgaagtaaagtccgttgtcttcttcaagaaaatcactcaagcaagtgttgctacagatgagcctcagaacttcatccacaaaatgaaggccagccttgactcaagcgaccccaaattggtaccggtgaaaccgcagcacatcacttttgaagacaaatttgactgcgccttaattaacgactcgttcatcatattctccaagccttactttgaaaaaatcgttggacttgaagacgaattcatcgagcaaaccaacaccaccttggcagtcatagaagcgcagggggtgattcaaggccttgaaatactccaagccgaaatcacttcgaagccttcactcatgagaacactggttaacatcacaaaaaacgagaaccacagcaccatcggagctaccgaaatagcgaagatgcagcagatgcttctcgatttcgatggacagcaactgaaaaccactcccgatgggaagatactcatcgagaacaaggatgacgccgcgactttactcaagcttctgaatgattactacaagcaaggcttggttacgggcaaaacctacggctctaactcaggcagtattcttcaacgaaaatcttcttaa

SEQ ID NO: 331932 - DNA, 543 bp, Pseudomonas aeruginosa
atggtattccaacagctatataagaacagtgagtatcttcatttcggcggcttcaacaaaaccgccctactgatatttgtcaagaatttcggcgtgaccactgttctggttttcatttctgtaacgtcactcatagcactcctattgcttttgcgaaatctaacagaacgggcgagcgagagcggcgagactacgaagatcaccgaagtggaaaataaaaactccgagtgcatcgcctatctattcacatacatcatccctttcgtattccaagattcagccgacccatcacaactggtaccgatcatcacgttaatggttgtcacctataccatctacgtcaactcatcgatgatcctgatcaacccaacactcagcttctggtattccctgtatcacgttgagatcgaatcggggacaaacaagaagaaggtcataatcctcaccagcgaaagattcatggaggaaggagacgtcgtaaagatcaaacgcattgctcacaaactctatttcggaaaaggactggtaagtaacaatgagtag

SEQ ID NO: 331933 - DNA, 729 bp, Pseudomonas aeruginosa
atgatcgtgagcttcccacgccgcagctccgaagcgttggtgtcgctgctgggtacccagatcccggcaggcctaccagagcctcagccgttggctactggtctgctaactcaagtgccgcctgggttaccgtccgatcttctggtacgtcggccagatatcctccaggccgagcatgctcttaaggcggccaacgccaacatcggtgcggcgcgtgctgcattcttcccagcgataagcctgacggcgagcgctgggagtgcgagctccgatctgggcaatctattcaggggcgggcagggggcatggacgtttgcaccgagcatcagcctaccaattttcaatgctggcagcctgaaagcgagtctggattattcgaagatccaaaagcaggttgaggtcgcaaattacgagaaggcgatccagatagccttccaagaggttgcggacggtcttgcggcgcgtaagacttacaccgatcagatgacggcccaggagggcttggttgaggcaagtcgtgactactatcgactcgccgagcgtcggtaccgtactggtgtggacagcaaccttaccttcctcgatgcccagcggtcgttgtttacggctgaacaggctttgattagtgatcgcctagctcagctccaagctgaggttaatttgtataaagccctgggaggtggttggagtagtggaaaagatgccgttgccgaaataaattcactctga

SEQ ID NO: 331934 - DNA, 369 bp, Pseudomonas aeruginosa
atgtctcgtctggccgaattccgtcaacttgagcaggagctcgcggctcagctcgcagagctcgaagccctgaaaggcagctctgagctccagaaagaaattgaatttgagaccaaattgcgtgatttgcttggccagtatggctacagcctgcgcgacatcatcaacatcctggatccccaggcgggccgacgcgttgccgctcctgctggtgtcgaaaaagcgccgcgccgtgagcgtcaggtgaagcagtacaagaacccgcacaacggtgaaataatcgaaaccaaaggcggcaatcacaagctcctgaaagattggaaagctcagtatggaggtgatgtagtagaaggctggctctctaaataa

SEQ ID NO: 331935 - DNA, 1044 bp, Pseudomonas aeruginosa
atgcagtttgatgatgagcgctatcaggaaatctgggattctatacagttggcaaaagatttgcgaaaagcaaagccagaggactccgataagttggcgattgctttaagttataagttgagtcagccattatttactttagatcccaaagaaagcgctgaaggcctgcttgaaaatgttcaggctaagttggaggagaggatttctgaggtttgcggcgaggagcgctccaaagaagctctggcgttaaagtatgaaacgctgcctgattttaagttttttattgatgttgcgcttcgcgccaagcgaaagctgaaggaactcatcgagtatgttgaggatgacgagcctgatgtgtttgctcttgagctagtagagtatgttttggaggctttggatgaatataattcagtgataatcaatggggatgttattcctctgattaaacgcggtatatattcatctgatatttctcgggcgttagaggcttggagaaattatcgcactgaaaaaggaagtgatgagagcttctggcatgctgagctagaaagcagcagaggggtgcttgagcgactccttggtggtcatgctgtactgctgcgaagtgagtttcatgcaggggcaacggatatgggcggggcaggtagtattcgtgctgactttgcttatttgaataagtctaaaaatctaagcctcgttgagattaaatgcccggatactaatttgctgggagccaagtatcgaggtacgtacccgctttcaaaagacttgtcaggatctatctcgcaggtcttgatacagcgtagtgaagtaatgctcaattactacatgaagcgcgcaaagtcatctgaagcgtttgaggttttcgctccgcgctgctttttgattgtgggtgatttgtcaagtatttcggctgatagggataaacttcaagcctttgaggttcaaaggcaggcagtcgcttcgcatgtctcaattgtaacttttgatgagctctatgagcaattctctacatttaatcagatggaagacgtgaagctttaa

SEQ ID NO: 331936 - DNA, 1227 bp, Pseudomonas aeruginosa
atggctgagaagaagtacgcttggaaagacggcgcaatcctcgccgagcattcacggaaaaagcaccaaatacttcgcgagtatttttacaattacgttatcaccagatgcgcacatccccaggtaaggaaatttcgattagcagtcgtcgatgggttcagcggcgccgggcgctatcaatgcggagcagcgggctccccggtaatatttgtagaagagttgtctagggctatcgccgacatcaacctaaaaagggctatagccaaaatgcccttagttgagatcgagtgcagtttaatactgaatgatgccgaacggaacgtcatcgaacttctgaaagagactcttaccccaatacttcttcagagcgaccttaccaatagccgcctaaagatcaagactcactactactgcgaccaatttgagagaatttacccaacgatcaagacattaattcgctccgagcggcacaaaagcattatctttaatctcgatcaatgcggacacagccaggtaagagccgaaaccctcattgacatgatgagcctcaacgagtcggtcgaggtgttttatacgttcttgattaaggccctactggcgttcttagagaaagacaatcctcacgcactctccaaccagctttccactcttcaattgaccggcgaagactttgaagccctcaaggcacaagcctccaaacgagtgtggcttggtgtagctgagcggattgtttttaacagcttaaagaaatgcgcaagatacgtaagcccattctcaattaataatcctgacggctggcggtactggctaatacaccttgcaaactcccatagagcaaggcaggtctacaacaacatccttcataaaaacagcaaaatgcaagctcattatggaagatccggcttgaacatgcttgctcacgaccctaacgaagaaaagacgctatacctatttgatactactgctcgagagcaggctaaggaagagttgttagaagacatcccccgcctcctaagtgacgccggcccattgctagtcggagatttttatcagctcatctacaaccacacacctgctcacagcgatgacatcaacaccgcaatacttgagagcgtggatcttcaagtcaaaaccccaactggaggaaacagaagaaaggctacacaaattgacaccaaagactatatagagttcaaaaagcaaactagctttttcttcaaacaatag

SEQ ID NO: 331937 - DNA, 786 bp, Pseudomonas aeruginosa
atggcagaaacacaaatcgagtggacggactctacttggaacccagtggccggctgctccatcatcagcgctgggtgcaaaaactgctatgccatggagatggcacgtcgccttgaagccatgggtacccctaagtacgttgggctcacccgcaaaaagaacaaacgcatagtctggaacggctcaatcgtcgaagaccacgattccctggcgatcccgtatcgctggaagaagcccaggaaggttttcgtcaactccatgagcgacctgttccacgagaaggtaagcgaagagttcatcatcgcggtctggaaggtgatgcgtgagaccccgcaccacaactatcagatcctaacgaaacgccctgagcggatgcggcagatcctcaacgacgttatcaccgaggtgctgccaaacgtctggctgggcacctcggtcgaagatgccgacgccgctgagcgagtccagtttttgaaggaaacacctgcccagattcggttcatctcttttgagccactgattggcccagttggcccaatcgatctctcgcagatcgactgggctatcgtcggtggggagagcggaaacaaggctcgaccgattaaagaggggtggatcgacgagatctacactcagtgcctggaaagcggtaccgcgtttttcttcaagcagtggggaacatggggtaaagacaatgttcgccgctcgaaaaaagccaacggtagagaatatcgtggcaagacttgggatgagatgccagttaagttggtaggcatggccctgtag
